United States Patent Application Publication US 2024/0327476 A1 - sequence listing, part 124

SEQ ID NO: 235835 - DNA, 1911 bp, synthetic construct
  misc_feature 1..1911: note = Description of Artificial Sequence: Synthetic coding sequence
  source 1..1911: mol_type = other DNA
atgaaaaaactgcagggagctcacctgcggaagcccgtgaccccagacctattgatgacgccctcagatcagggtgacgtggacctcgacgtagatttcgcagcgcacagaggcaattggaccggcaagctggacttcctattaagctgtattggatattgcgtcggcctgggaaacgtgtggcgctttccctacagggcctacactaatgggggaggcgctttcctcgtgccatatttcttaatgctcgctatttgcggtattccactgttcttccttgagttgagtttagggcagtttagcagcctcgggccattagcagtctggaagattagcccactgtttaagggagctggtgccgctatgctgctgatcgtgggcttggtggctatctactacaacatgatcatcgcttacgttctcttttatctgttcgcttcgcttaccagcgatctaccttgggaacactgcggcaattggtggaacactgagctgtgtctagagcatcgggtgtctaaggatggtaacggggctttacctctgaaccttacttgtacagtctcaccgtccgaggagtactggagccggtatgtactacacattcaggggagccagggtataggatctccaggcgagatcagatggaatctgtgcttgtgtctcttgctggcgtgggtcattgtcttcttatgtatcttaaagggggttaagtcttcaggaaaggtggtttacttcactgctacctttccctacctcatcctgctgatgttgttagtccggggtgtcacactgccaggagcgtggaagggaatccagttctatctcaccccccagttccatcaccttcttagttcaaaggtgtggatagaggccgcactccagatcttctatagtctcggtgtggggttcggaggacttttaacgtttgcctcatataacacttttcatcagaacatttaccgggacacattcatcgtcactctgggtaacgccattacgtcaattttagccggattcgcaattttttccgtgttggggtacatgtcccaggaattgggcgtcccagtggatcaggttgccaaagcaggcccaggcctcgctttcgttgtgtatcctcaggctatgactatgctgccactgtccccattctggtctttcctgtttttttttatgttattaactcttggactggattcacagttcgcattcctggagacgatagtgacagccgtgacggacgagttcccttattacttgcgaccaaaaaaagcggttttctccggtctgatttgtgtggctatgtaccttatgggtctcatcctgacaaccgatggcggaatgtattggctcgtccttctggacgattatagtgccagcttcggcctgatggtcgtggtcattacaacgtgtctggctgtgacaagagtgtacggaatccagcgcttttgtcgcgatatccacatgatgcttggttttaaaccaggcctgtatttcagagcctgctggctctttctcagccctgctaccttacttgctttgatggtgtactccatcgttaagtatcaaccctcagagtacgggagttaccgtttccctccttgggccgagttattgggcatccttatggggctgctgtcatgcctgatgatccccgctggaatgcttgtggccgtacttcgggaagagggctccctctgggagagactgcagcaggcatcccgcccagctatggactggggtccctccctcgaggaaaatcgtacagggatgtacgtcgcaactctcgccggaagccagagcccaaagccactgatggtgcacatgcgcaaatatggcggtatcacctctttcgagaacaccgccatcgaggtggaccgggaaatcgccgaagaggaggaatcaatgatgtag

SEQ ID NO: 235836 - DNA, 798 bp, synthetic construct
  misc_feature 1..798: note = Description of Artificial Sequence: Synthetic coding sequence
  source 1..798: mol_type = other DNA
atgcatttctatcgcctgttcctcggagccacacgccgatttctgaaccccgagtggaagggcgagatcgataattggtgcgtgtatgtgctgacaagcttgctgccttttaagatccagagccaagatatcaaggccttgcagaaggaactggagcagttcgctaagctgctcaaacagaagcggatcactctcggttatacccaggccgatgttgggttgacgctcggagtattgtttggcaaggtgttctcacagactaccatctgtagatttgaggccttgcagctttcctttaagaacatgtgtaaactaaggcccctgctccagaagtgggttgaggaagctgacaacaatgaaaatttgcaagagatatgcaaggcagaaacactcgtgcaggcaagaaaacgaaagagaaccagcatcgagaaccgggttcggggaaatcttgaaaacctatttctgcagtgtcccaaacctactctccagcaaatttcccatatcgcccagcagctagggttggagaaagacgttgttcgagtgtggttttgtaaccgccgacagaaaggtaagagaagttcctcagattatgctcaaagagaggacttcgaggccgctggaagtccgttttccggaggtcctgtttcctttccgctggccccaggaccacatttcggcactcctggttacgggtctccccattttaccgctttgtattcaagtgtgcctttccctgaaggcgaggctttcccacctgtgtccgttaccactctggggagcccaatgcattcaaactag

SEQ ID NO: 235837 - DNA, 1083 bp, synthetic construct
  misc_feature 1..1083: note = Description of Artificial Sequence: Synthetic coding sequence
  source 1..1083: mol_type = other DNA
atggcagggcatctcgccagtgatttcgccttttctccaccacccggaggtggaggagatggtccaggaggtccggagcctgggtgggtcgatcctaggacatggttatcttttcagggtcctcctggagggcctggaattggacccggagtggggccaggttctgaagtgtggggtatccctccatgccccccaccctatgagttctgcggtggtatggcctactgtgggccacaggtcggcgtgggcctagttccacaagggggactggagacatcccagccggaaggagaagctggggtcggcgttgagagcaacagtgatggcgctagtccggaaccctgcaccgtgactcccggagctgtaaagctggagaaggagaagcttgaacagaaccccgaagaatcccaggacattaaagctttgcaaaaggagctggaacagtttgccaaactgctaaaacagaaaaggatcaccctcggatacacccaggctgacgtgggactaacacttggcgtgttgttcggaaaggtgttcagtcagactacgatttgtagatttgaggccttgcagctatcctttaaaaatatgtgcaaattgcgccctttgcttcagaagtgggtggaagaagctgataataatgaaaatttgcaagaaatttgcaaggccgagactctagttcaggctcggaaacgcaagcggacaagcatcgaaaatagggtccgaggcaatttagagaatctgtttctgcagtgcccaaagcctacattacagcagatcagccacatcgcccagcaactgggcctcgagaaggacgttgtcagagtgtggttctgtaataggcgccagaaaggaaagaggtctagcagcgattacgctcagagagaagacttcgaggcagctggatcacccttcagtggtggccctgtgagcttcccactggcccctgggccacactttggcactccaggctacgggtccccccactttaccgctctgtactcatcggtgcctttccccgagggcgaggcctttccaccagtcagtgtcacaacactgggatctccgatgcatagcaattag

SEQ ID NO: 235838 - DNA, 372 bp, synthetic construct
  misc_feature 1..372: note = Description of Artificial Sequence: Synthetic coding sequence
  source 1..372: mol_type = other DNA
atggctggtcacttagcctccgattttgctttcagccccccaccgggtggtgggggtgacgggcctggcggacctgagccgggatgggtggaccctcgcacgtggctttcctttcagggcccaccaggagggcctggaatcggcccaggagtgggccctgggtctgaggtgtggggcataccaccttgcccacctccttatgaattctgcggcggaatggcctactgtggccctcaggtaggggtgggcctcgtgccccagggtggactagagacatctcagccagaaggcgaggctggcgtgggtgttgaaacccctatggggcctccaagaagcccggctccgcacccctttcctttcccgctcttgtag

SEQ ID NO: 235839 - DNA, 558 bp, synthetic construct
  misc_feature 1..558: note = Description of Artificial Sequence: Synthetic coding sequence
  source 1..558: mol_type = other DNA
atggcaggccatctggcaagtgattttgcgttttcgcctcctccgggaggaggcggagacggcccaggcggacctgagccaggatgggtggaccctcgaacatggctgtctttccagggaccccctgggggtcctggtatcggccctggagtaggccctggctccgaggtgtggggtatccctccctgccccccaccatacgaattctgtgggggtatggcctactgcggaccccaggtgggggtgggtctcgtcccccagggagggttagagaccagccaacccgaaggcgaggccggagtgggcgtggaatcaaactctgacggtgcaagccccgagccttgcacagttacaccaggcgcagtgaagctggagaaggagaagttagagcaaaaccctgaagaatcccaagacatcaaggccctgcagaaggagcttgaacagtttgctaaactactgaaacagaaacggattactttaggctacacacaagccgatgtccacccgggtggctccatctgggagggcatccaaccgaacgaccatctccccctgtag

SEQ ID NO: 235840 - DNA, 558 bp, synthetic construct
  misc_feature 1..558: note = Description of Artificial Sequence: Synthetic coding sequence
  source 1..558: mol_type = other DNA
atggctggacatctcgcaagcgacttcgctttttctccgcctccaggagggggtggagacgggcctggcggtcctgagccgggatgggtcgatccaagaacttggctgtcctttcaaggacctcccggtggccctggcataggccctggtgtaggcccaggcagcgaagtttggggcatacccccatgcccacccccatacgagttttgcggaggcatggcatattgcggacctcaagtgggggtcggccttgtacctcaggggggtctcgaaacatctcaacctgaaggagaggcaggagtgggagtggaaagcaattccgacggggctagccctgagccttgtaccgtgacaccgggagctgtcaagctggagaaggagaagctagagcaaaacccagaagaatctcaggacatcaaggcgctccagaaagaattggagcagttcgccaaattgctcaagcagaaaagaattacgctgggctatacacaggctgatgtgcatcccggaggctccatatgggagggaatacagcccaacgatcacctccctctgtag

SEQ ID NO: 235841 - DNA, 495 bp, synthetic construct
  misc_feature 1..495: note = Description of Artificial Sequence: Synthetic coding sequence
  source 1..495: mol_type = other DNA
atgtgcaagttgcgtcccctcctgcagaagtgggtggaagaggctgataacaatgagaatctgcaggaaatttgcaaggccgagactttggtccaggccaggaagcgcaagcggacgagcattgagaaccgcgtccgaggtaatctggagaatctgttcctccagtgtccaaagcctactctccaacaaatttcacatattgcccagcagttagggctagagaaagacgtcgtgagggtgtggttctgcaacagaaggcaaaagggaaagagatcctcctccgactatgcccagcgtgaagatttcgaggcagctggctcccctttctcgggcggtcccgtttctttcccccttgccccaggccctcattttggcacaccgggatatggatctcctcacttcactgccctgtacagttctgtacctttccccgagggcgaggcattcccccctgtcagcgtgaccacgctcgggagtccaatgcacagcaactag

SEQ ID NO: 235842 - DNA, 495 bp, synthetic construct
  misc_feature 1..495: note = Description of Artificial Sequence: Synthetic coding sequence
  source 1..495: mol_type = other DNA
atgtgtaaactacgccctctcctgcaaaagtgggtggaggaggccgataacaatgagaatcttcaagaaatttgcaaagccgagacgctggtgcaggcacgaaagaggaagaggacgagcatcgagaaccgggttcggggtaacttagagaatcttttcctgcagtgtcccaaaccaacgctacagcagatctcccacatcgctcaacagttgggcctcgagaaggatgttgtgcgggtctggttttgcaaccggaggcagaaaggcaaacggagctcttctgattacgctcagagggaagattttgaagcagcaggtagtccattcagtgggggacccgtctctttccctttggccccaggcccacacttcggtactccgggatatgggagcccccatttcacagctctgtatagtagtgtcccattccccgagggtgaggcctttccaccagtcagcgtcacaacactaggttccccaatgcattctaactag

SEQ ID NO: 235843 - DNA, 2076 bp, synthetic construct
  misc_feature 1..2076: note = Description of Artificial Sequence: Synthetic coding sequence
  source 1..2076: mol_type = other DNA
atgagtgccttacttcaggatccaatgatcgccggtcaagtgtctaaacccctgctatctgtgcgatctgaaatgaacgccgagctgcggggagaggataaagcagccacgagcgacagcgaacttaatgagcccctcctagccccagtggagagcaatgacagcgaggacacacccagtaaactgttcggcgctcgaggaaacccagcactgtcggatccgggaacacctgaccagcatcaagcgtctcagacccaccctccatttccagtcggccctcagccgctgctgacagcacagcaactggccagcgctgtggccggagtgatgcccggaggcccacctgctctcaaccagcctatcttgattccctttaatatggctggacagctgggtggccagcagggtctggttcttacacttcctaccgccaatctgaccaacatccaaggcttggtagccgcagccgctgccggagggatcatgacgctccccctacagaatctgcaggccacttcatccctgaacagccagctccagcagctgcaactccagttacagcagcaacagcaacagcagcagcagcaaccacctcccagcaccaaccagcatcctcagcctgcaccccaggcccctagccagtcccagcaacagcccctccagcctaccccgcctcagcagccaccacccgcttctcagcaaccacccgcacccacgagccagctgcagcaggcacctcagccacaacaacaccagccacactctcactcacagaaccagaatcaaccatcccctacacagcaatcttcctcaccaccccaaaaaccatctcagtcacccggacacggcctcccttctccactcactccacctaaccccctgcagctggtgaacaacccattggcttcacaagcggcagccgcagctgcggctatgtcttccatagcaagcagccaggcctttgggaatgcactgagctctctgcaaggggttaccggccagctggtgaccaacgcgcagggccagatcattggaaccatacccctaatgcccaacccgggaccctcctctcaagccgctagtggtactcaggggttacaggttcagccaatcacgcctcagctcctgactaacgcccaggggcaaataatcgccaccgtgatcggaaatcagatacttcctgtcattaacacccagggcattacgttgtcccctatcaagcctggccagcagcttcaccagccatcccaaacttctgtgggacaggctgcttcgcaaggaaaccttctccacctcgctcatagccaggcttctatgagccagtctcccgttagacaggcctcttcctcgtcttccagcagcagttcaagcagcgccttaagcgtggggcaattagtgtccaatccccaaacagctgccggagaagtcgacggggttaatcttgaagagatcagagagttcgccaaggcctttaaaataaggagattgagccttgggcttacccagacccaagttggacaagctctctctgctacagaggggccagcgtatagccagtccgccatttgtaggcatactatcctgaggagccactttttccttccccaagaggcacaagagaacacgatcgcaagctctctgacggctaagctgaacccaggcttgctctacccagcaaggttcgagaaactcgacataactcctaagtcggcgcaaaagatcaaacctgtcttggaaaggtggatggccgaagccgaagcacggcacagggccggtatgcagaatctgacggaatttattggaagcgagccgtctaagaaacgcaaacgacggacctcttttacacctcaggccctcgagatactgaacgcccactttgagaaaaatactcacccttcggggcaagagatgacggagatagccgagaaattgaactacgatcgggaggtggtgagggtgtggttttgcaacaagagacaggccctgaagaatacaattaaacggcttaaacagcacgagcccgctacagccgtgcccttagaaccccttaccgatagcctggaggaaaactcctag

SEQ ID NO: 235844 - DNA, 1968 bp, synthetic construct
  misc_feature 1..1968: note = Description of Artificial Sequence: Synthetic coding sequence
  source 1..1968: mol_type = other DNA
atgagcgccttactgcaggatcctatgattgctggacaggtttcaaagccactgctctctgtcagatcggaaatgaatgccgaactacgcggtgaagataaggccgctacatccgactccgagctgaacgaacctctactcgcacctgttgagtctaatgattctgaggacactccttcaaaacttttcggggcacgtggtaaccctgcactgtctgacccaggcacgccagaccaacaccaggcatcacagacacacccaccatttccggttgggccacaaccactgctgaccgcccagcagctcgcgtctgctgtagctggggtcatgcccggagggcctcccgctctgaaccaacctattctcatcccttttaacatggcgggacaattgggaggccagcaggggttagtgctgacgcttcccactgctaacctgacgaatattcaagggctggtggccgctgcagctgctggcggaataatgactttgccattacagaatcttcaggcaacttctagcctgaacagccaactgcaacagctgcagcttcagctgcagcagcagcagcagcagcaacaacaacagcctcccccaagtactaatcagcacccgcagccggcaccacaggcccctagtcagagccaacagcaacccttgcaacccactccacctcagcagccaccccctgcgagccagcaaccccctgcccctacatcccagcttcaacaggcccctcagccacagcagcatcagccacacagccactcgcagaatcagaatcagcccagcccaactcagcagtcaagcagcccgccacagaaaccttctcaatcaccgggtcacgggctgccctcccccctgacgccacccaaccctctgcagctggttaacaatccactggctagccaagccgcagcggctgctgccgctatgtcaagtattgctagttcccaggcctttggtaacgccctttcttcattgcagggtgtcacaggccagctcgttactaacgcccagggtcagatcatcggtaccattcctctgatgccaaaccccggtccatccagccaggcagcaagcgggactcaaggattacaggtacagcccatcacgccacagttgctcacgaacgctcagggccaaatcatcgcaacagtaatcggaaaccagatactgcccgtgatcaacacccagggcataaccctcagtcccattaagccaggccagcagctgcaccagcctagtcagaccagcgtgggacaagccgcaagccagggcaatctcctccacctggcgcactctcaggcctcgatgtcccagagtccagtgcgccaggcatccagcagctcctcttcctcttcaagcagcagcgctctatcagtaggccaactggtatctaatccacaaacggctgcaggagaggtagacggggtcaatctcgaggagattagggaatttgctaaggcatttaagatacggagactgagcctgggcctgacacaaactcaggtgggacaagccctgtccgcaactgaagggccagcatattcacagtctgctatttgcaggtttgagaagctcgacataaccccgaagtctgcgcagaagatcaaaccggttctggaaagatggatggccgaagcagaggcccgacaccgcgctggtatgcaaaacctcacggagtttatcggtagcgagccctcaaagaagaggaaaagacgcacctcatttacgcctcaggccttggagatcctgaacgcccattttgagaaaaacacccacccaagcggccaggaaatgaccgagatcgccgagaaattgaattatgacagagaggtggtacgagtctggttctgcaataagagacaggccctgaagaacacaatcaaaaggctcaaacagcatgaaccagctaccgcggtacccctggagcccctcaccgactcactggaggaaaacagttag

SEQ ID NO: 235845 - DNA, 2076 bp, synthetic construct
  misc_feature 1..2076: note = Description of Artificial Sequence: Synthetic coding sequence
  source 1..2076: mol_type = other DNA
atggagaagatttacagtagaggggaactccatcatttcatcgacgggtttaacgaagaaaagtctaactggatgagatatgttaaccctgcccacagtcctagagagcagaacctcgcagcatgtcaaaacggcatgaacatatatttttacaccattaaaccaatccccgcaaaccaggagttgctggtctggtattgtcgcgatttcgcagagcgcctacattatccttatccaggcgagttgacaatgatgaatctaacacaaacacagtcctccttgaaacagccatcaaccgaaaaaaacgaattgtgccccaagaacgtgcccaagcgggaatattctgtcaaggaaattctgaagctcgattccaacccctcaaagggaaaggacctatatcgcagtaacatcagtcctctgacatctgaaaaggacctggacgacttccggagacgaggtagccctgaaatgcctttttatccacgggtcgtgtatcccatccgcgcacccctgccagaggattttttgaaagcatcattggcatatgggatcgaacggccaacatatataacccgatcgcccattccctctagtacaacaccatcaccaagcgccagatcttcacccgatcagtctctgaaaagctctagcccccactcaagtccaggaaataccgtctctcctgtggggccagggtcacaggagcaccgggattcctacgcatatttaaatgctagctacgggactgaaggcctcggatcttaccccggttacgcccctctcccccatctacccccagcttttattccatcatacaatgctcattatcccaaattcctgctccctccttatggcatgaattgcaatggacttagtgctgtctcctccatgaatggtatcaataactttgggctgtttcccaggctgtgccccgtctactcaaatctgctgggagggggaagcctgccccatcccatgcttaatccaacctctctgcccagcagtctgccttcggacggtgctaggcggttgctgcagccagagcacccacgcgaggtcttagtgcctgcaccccactctgccttcagcttcacaggtgcggcagcttcaatgaaagataaggcgtgttcccccacaagcggatctccgaccgctggcacagcggcaacagcagaacatgtggtccagccaaaggcaacaagcgcagcaatggccgcaccatcttcagatgaggcaatgaacctgataaagaataaaaggaacatgacaggctataagaccctgccttaccctctgaagaagcagaacggaaagatcaaatacgaatgtaatgtatgcgctaagaccttcgggcaactgtctaatttaaaagtgcacctgcgggtgcactctggagagcgaccattcaagtgccaaacctgtaacaaaggtttcacccagttggcccacctacaaaaacactatttggtgcatactggggagaagcctcacgaatgccaggtgtgccacaaacgcttttcgagcaccagtaacttgaagactcacctgcgcctgcactcaggcgagaagccttaccagtgtaaagtatgtccagcaaagttcacgcagttcgtgcacctgaagctgcataagcgacttcatacgcgggaaaggccacataagtgtagccagtgtcataagaactacatacacctctgcagtctgaaggttcatctgaaaggaaactgtgccgctgcccctgcccctggtctgccactggaggacctgacacgcatcaatgaggagattgagaagttcgatatatcggacaacgccgatcgtcttgaagacgtagaagatgacatctccgtgattagtgtcgtggaaaaggaaattctcgccgtggtgaggaaggaaaaagaggagaccgggcttaaggtctctttgcagcggaacatggggaacggactgctcagctccgggtgtagcctctatgagagttccgatttgccattaatgaaactaccacccagtaacccgcttccactggttcccgtgaaggtgaaacaggagaccgtggagccgatggatccctag

SEQ ID NO: 235846 - DNA, 2370 bp, synthetic construct
  misc_feature 1..2370: note = Description of Artificial Sequence: Synthetic coding sequence
  source 1..2370: mol_type = other DNA
atgaagatggatatggaggatgcagatatgaccctgtggaccgaagccgagtttgaggaaaaatgcacttacatcgtcaatgaccacccatgggacagcggagccgacgggggtacttctgtgcaggccgaggcttctcttccacggaatctgctgtttaagtacgctactaattccgaagaggtgatcggcgtgatgtcaaaagaatatatccccaagggaacacgattcggaccacttattggggaaatttacaccaatgacactgtgcctaagaacgccaaccgtaagtatttctggcgcatctactccagaggcgagctgcaccactttattgatggttttaacgaggaaaagagcaattggatgcgctatgtcaaccctgcgcactcacctcgggagcagaatcttgccgcttgtcagaacgggatgaacatatatttttacaccatcaaaccaatccctgccaatcaggaactcctggtttggtattgtcgtgatttcgccgaaaggctccactacccttatcccggagaattgaccatgatgaacctgacacagactcagtctagcctcaaacaaccgagcactgaaaaaaacgaactctgcccaaaaaacgtgcctaaacgtgagtactccgtgaaagagatcctaaaattagattcgaaccccagtaaggggaaggacctgtataggagtaacatctcaccattgacatccgaaaaggatctcgacgactttcgcagacgagggtccccggaaatgcctttttaccctcgggtggtataccccattagagcaccactcccggaagacttcctgaaggcttcactggcctatggcatcgaaagacccacctacattacacgaagtcccatacccagctccactacgcccagtcccagtgcacgctcttcccccgaccaaagtctgaaatcttccagcccacattcctctccgggtaacaccgttagccctgttggtccaggttcccaagaacatagggattcttatgcgtacctgaatgcgagctacggcacagaaggactcggatcctaccctggatatgctcctctgccgcacctgccacctgctttcatcccctcgtacaatgctcattaccccaagtttctcctgccgccatacgggatgaactgtaatggactcagcgctgtgtcttccatgaatggcatcaataacttcggactgtttccgaggctttgccccgtgtattccaatcttctgggcggtggttccctgccacaccctatgctgaaccccacttccctgccttccagtttgcctagcgacggtgccaggcggttgctgcaacccgagcatccccgagaagtcctggtccccgctccccactcagcgttcagcttcacaggggctgccgcaagcatgaaggacaaagcgtgctctcccacatcaggcagccccacggccggaactgcagcaacggcggaacacgttgttcagcccaaagcaaccagcgctgccatggccgctccctcatctgatgaggccatgaatctcatcaaaaataaaagaaatatgaccggctataaaactcttccgtacccgctcaagaaacagaatggtaagattaagtacgagtgtaatgtttgcgccaagaccttcggccagctgagcaatttaaaggtccatctgagggtgcactcaggagaacgtccatttaagtgtcaaacctgtaacaaagggtttacgcagttggcccacctgcagaaacattacctagtgcatacaggtgagaagccccacgagtgtcaagtttgtcacaagagattctccagtaccagtaatctgaaaactcacttgcgtctgcactccggcgagaagccgtaccagtgtaaagtgtgcccggctaaattcactcagttcgtgcacctaaagttgcacaagcggctgcacacacgcgagagaccccacaaatgctctcagtgtcacaaaaattatattcacctctgcagcctgaaggtgcatctgaaaggaaattgcgccgcagccccagcgcctggtctgcccctggaagatctgacaaggattaacgaagaaatcgagaaattcgatatctctgataatgcagatcggctggaggacgtggaggatgatatctctgtgatatctgtagttgagaaagaaatcctcgcagtcgttagaaaggaaaaagaggaaacagggctgaaggtgtcactgcaacgtaatatgggaaatggtttactgtcttccgggtgcagcctgtacgagtcctcggatctccctctgatgaaactgccaccaagcaaccctttgccgcttgtccctgttaaagtcaaacaagagaccgttgagccaatggatccatag

SEQ ID NO: 235847 - DNA, 2478 bp, synthetic construct
  misc_feature 1..2478: note = Description of Artificial Sequence: Synthetic coding sequence
  source 1..2478: mol_type = other DNA
atgctcgacatttgcttagagaagcgggttgggactaccctcgccgcaccgaagtgcaactccagtacagtgcggttccagggcctggccgagggcactaagggtacaatgaaaatggacatggaagatgctgatatgaccctgtggaccgaggcggagtttgaggaaaagtgtacctacatcgttaacgaccacccttgggactctggggctgatggtggaacatcagtccaggccgaggcatccctgcccaggaatctgctgtttaagtacgccaccaattccgaggaagttatcggcgttatgagcaaggaatacatcccgaaaggcacgcgcttcggaccactaattggagagatttacactaatgacacggtcccgaaaaacgccaaccgcaagtacttttggcggatctattctaggggggagctccatcattttatcgacggctttaacgaagagaaatctaactggatgcggtatgtgaatcccgctcactccccaagagaacagaacctggctgcctgccagaatggtatgaatatctacttttatacaattaaacccatccccgctaatcaagagctgcttgtgtggtactgccgagacttcgcagaacggttgcattacccgtatcccggtgagctcactatgatgaatctgacccagacccagagtagtttaaaacaaccatccacagagaagaacgagctgtgtcctaagaacgtgcctaaacgagagtattcagtcaaggaaatcctaaagctggacagcaatccaagcaagggaaaagacctttaccggtcaaatataagccctttaacgtctgaaaaggaccttgacgatttccggcgaagaggatccccagaaatgccattctatccacgggtggtgtacccaatacgagcgccactgcccgaagactttctgaaagcgtcactggcatacgggattgaaaggccgacctacattactagatctcctattcccagctcaacgaccccgtcaccgagcgccaggtcttctccggatcaatcccttaagtcaagctctccacactcatctcccggaaataccgtgtctcccgtggggccagggtctcaagagcatagagactcctatgcatatctgaacgctagttatggcaccgagggactgggaagttacccgggatacgcacccctgcctcacttgccccctgccttcataccaagttataacgctcattatcccaaatttctccttccgccatatggaatgaactgcaacggtcttagtgccgtctcctccatgaacggtatcaataacttcggattgttccccaggctctgtcccgtatattcaaacctcttgggcggagggagcctgccacaccccatgctgaatcccaccagcctgccaagcagcctgccgtccgacggcgcacgcagactcctgcagcctgagcatccgagagaggtgttagttccagccccacatagcgcgttttctttcacaggggctgccgcttcaatgaaggacaaagcctgctcgccgactagtggttctccaacagctggaactgccgctacagccgagcacgtggtgcagcccaaggccacgagtgccgcaatggcagcaccatcatccgacgaagccatgaatctaattaagaacaaacgaaacatgactggctataagactttaccttaccctttaaagaaacagaatggcaagatcaaatatgagtgtaacgtgtgtgccaagacattcggccagctctcaaacctcaaggtccatctgagagtccacagtggcgaaaggccctttaaatgtcaaacctgtaacaagggttttactcagttagcccacctccagaagcactacttggtgcataccggagaaaagccgcacgagtgccaggtctgccacaaaagattttcatccacttccaaccttaagactcacttacgcctccactccggggaaaaaccgtaccaatgcaaggtctgcccagcaaagttcacacagttcgtccatctgaaattacacaagagactccacacacgcgagcggcctcacaaatgctctcaatgtcataagaactacatacatctatgtagcttgaaagtgcacctgaaggggaattgcgcagccgcaccagctcctgggctgccactggaggacctcacccggattaatgaagagatcgagaaattcgatattagcgacaatgcagacaggctggaagatgtagaagatgacatttcagtcatcagcgtggtagagaaggagatcttggccgtagtgcgaaaagaaaaagaggagacaggtctgaaagtctcccttcaacgcaacatggggaatggcctgttaagctcaggctgtagcctgtacgaatcttccgatctgcctctcatgaaactcccaccatctaatcctctaccactggtgccagtgaaggtcaagcaagaaaccgtggagcccatggatccctag

SEQ ID NO: 235848 - DNA, 192 bp, synthetic construct
  misc_feature 1..192: note = Description of Artificial Sequence: Synthetic coding sequence
  source 1..192: mol_type = other DNA
atgaaaatggatatggaagacgccgacatgaccttatggaccgaggccgagtttgaagagaaatgcacatacatcgtgaatgaccacccatgggattctggcgctgacggcggaactagtgtgcaggccgaggcttcacttcctcgaaatctgctttttaaatatgccacaaattctgaggaggttatctag

SEQ ID NO: 235849 - DNA, 2367 bp, synthetic construct
  misc_feature 1..2367: note = Description of Artificial Sequence: Synthetic coding sequence
  source 1..2367: mol_type = other DNA
atgaagatggatatggaggatgctgatatgactttgtggacagaagccgagtttgaagagaaatgcacttacatagtgaatgatcatccatgggactctggagctgatggcggaacgtccgtgcaagccgaagcaagtctgcccaggaacctactgttcaagtacgctaccaattccgaagaagtgattggcgtaatgtctaaggagtatatacctaaaggaaccaggttcggaccattgatcggtgagatttacactaacgatacggtcccaaagaatgctaatcgaaaatacttttggagaatatattctcgtggtgagcttcatcattttatcgatgggttcaacgaagagaagtctaattggatgcggtatgtcaaccccgcacactccccaagagaacagaaccttgccgcttgccagaacggtatgaatatttatttttacactataaagccgatcccagctaaccaggaactgctggtttggtattgccgggatttcgctgaacgcctccactacccttacccaggcgagctcaccatgatgaacctcacccaaacacagtcatccctcaaacaaccctctacagaaaagaatgagctgtgtccaaagaacgtgcccaagagagaatactctgtgaaagagatattgaagctcgacagtaatcctagcaagggaaaggatctctacaggagcaatatatcccccctcacaagcgaaaaggatctggacgacttccgaaggaggggttctccagagatgcccttctaccctagagtagtgtaccccatcagagctccactcccagaggacttcctgaaggcttcccttgcttatgggatagaacggccaacctacattaccagatcccccattcccagcagcaccacaccaagtccgagcgccagatcctcccctgatcagtccctaaagagctcttcgcctcactcctcccccggtaatacagtttcccctgtggggccaggttcgcaggaacaccgggactcttacgcatatttaaatgcttcctatgggacagagggactcggaagttatccgggatacgccccattgccacacttgcccccagcattcattccctcctataacgcacactatcctaaattcctgttaccaccctacggaatgaactgcaatgggctgtccgcagtgtcttccatgaacggcatcaataatttcgggctgttccccaggttgtgccctgtttacagcaacctgctagggggtggctccttgccgactccctgcagtacccccctgctgcccagcagtctgccatcagatggagccaggcgactgttgcagccagaacaccctcgcgaggtactcgtgcctgcaccacacagcgccttcagcttcacgggcgctgccgctagtatgaaggataaagcgtgcagccccacctccgggtcaccgactgctggaacggccgctaccgctgagcacgttgtgcagcccaaagccaccagtgccgcaatggcagccccaagttcagatgaagctatgaatctgatcaaaaacaaaaggaacatgactggttacaagacactgccctacccactcaagaagcagaatggtaagattaagtacgaatgcaatgtgtgcgccaaaacctttggacagctgtctaatttgaaggtccaccttcgggtgcacagcggcgagcggcctttcaagtgccagacctgtaacaaggggttcacccagttagctcatctccaaaagcactatctagttcacacgggcgagaagccccacgagtgtcaggtgtgtcacaagcggttcagcagtacaagcaatctcaagacacacttgagactccactctggcgagaagccttaccaatgtaaagtttgccctgccaagttcactcagtttgtacacctgaaattgcacaagcgacttcatactagagagaggccacataagtgttcccaatgtcacaagaattacatacacctgtgttcccttaaagtgcacctgaaagggaattgtgcagccgctcccgctcctggtcttcccctggaggatctgaccagaatcaatgaagagatcgagaagttcgacatcagcgataacgcagatcgactggaggacgtggaggacgatatcagcgtgattagcgtggtggagaaggaaatcctggcagtcgttagaaaagagaaggaagaaaccgggctcaaggtgtctcttcaacggaacatgggcaacgggctgctttcgtctggctgttcactgtatgaatcaagtgaccttccgttgatgaaactgcctcctagcaaccctctgcctctagtgccagtgaaggtgaagcaagagaccgttgaacctatggacccctag

SEQ ID NO: 235850 - DNA, 1716 bp, synthetic construct
  misc_feature 1..1716: note = Description of Artificial Sequence: Synthetic coding sequence
  source 1..1716: mol_type = other DNA
atggccttgccaagaccttctgaggctgtacctcaggataaggtgtgctacccaccggagagctctcctcaaaacttggccgcttattataccccttttcctagttacggtcactatcggaattccctggcaactgtggaagaggacttccaaccatttaggcagctggaagccgctgccagtgcagcgcctgctatgcctccctttcccttcagaatggccccacccctactatctcccggactagggctgcaaagagagccgctctacgacttgccatggtacagcaaactgccaccgtggtaccccattccgcatgtacccagagaggtcccaccctttctgagcagctcacatgagtacgcgggtgcaagctcagaggatttaggccaccaaattatcggcggagacaacgagtccgggccttgctgcggacctgacactctaatccccccaccccctgctgatgcaagcttgctcccagagggactccgcacatcccagctcctcccctgctccccttctaagcagtccgaagacggtcccaagccgagcaaccaggaaggcaaaagcccagctagattccaatttactgaagaggacctgcattttgtgttgtacggcgtgacaccgagtctagaacacccagcctctctgcatcacgcaatttcaggattgctggtccccccagactcaagcggctctgatagcttaccacaaacactggataaagactccctccaattgcccgaaggcctgtgcctgatgcagaccgtgttcggcgaagtcccacactttggcgttttttgctcttcattcatagccaagggcgtacggttcggcccattccagggtaaggtcgtaaacgcttccgaggtgaagacgtatggcgacaactcagtcatgtgggagatatttgaggatgggcatctgtctcatttcatagacggcaagggaggaactgggaactggatgagctacgtcaactgcgcacgctttccgaaagaacagaatctagtggccgtccagtgccagggccatattttttacgaatcttgtaaagagatacaccaaaatcaggaactgcttgtatggtatggcgactgttatgaaaagttcctggatatccctgttagcctgcaggttacagaacccggaaagcaaccgagcggcccaagcgaagagagtgccgaagggtatcgatgcgaaaggtgcgggaaggtgttcacctataaatactatcgggataagcacctcaagtacacaccgtgtgtcgacaagggggaccggaaattcccctgcagcctttgtaaacgctcattcgagaagcgtgatcgcctccgtattcacatcctgcatgtgcatgagaagcacaggccccacaagtgcagcacctgcggcaaatgcttctcacaaagtagctcactcaacaagcacatgagagtgcactctggcgaccgaccctatcagtgcgtctattgtactaagcggtttaccgcgtcttcgatactgcggacccatatccgccagcatagtggcgaaaaaccattcaagtgtaaatattgtgggaagtcttttgctagccatgccgctcacgatagccatgtcaggaggagtcacaaagaggacgacggctgttcctgcagcatatgcgggaaaatcttttcggaccaagaaaccttctattctcatatgaaattccacgaagattattag

SEQ ID NO: 235851 - DNA, 303 bp, synthetic construct
  misc_feature 1..303: note = Description of Artificial Sequence: Synthetic coding sequence
  source 1..303: mol_type = other DNA
atggcgctgcccagaccaagtgaggcagtgcctcaggacaaggtgtgttaccctcctgaatcctccccccagaatctggcagcctactataccccctttccgagttatgggcactacagaaactctctcgctacagtcgaagaggacttccagcccttccggcagctggaggcggctgccagtgccgcacctgccatgcccccttttccatttagaatggccccaccactcctatcccctggcctgggcctgcagcgagagccattgtacgatctgccctggtatagcaagcttccaccctag

SEQ ID NO: 235852 - DNA, 3831 bp, synthetic construct
  misc_feature 1..3831: note = Description of Artificial Sequence: Synthetic coding sequence
  source 1..3831: mol_type = other DNA
atgcgttctaaagccagagctcgcaaactggcgaagagcgatggcgatgtggtgaacaacatgtatgaacctaatcgggatttactagcaagccactccgctgaggacgaggccgaggattccgccatgagccccatccctgttggccctccttcaccgttccccacaagcgaagattttacacctaaagaagggtctccatacgaggctcctgtgtacatacctgaagatatcccaatccccgctgacttcgagcttagagagagcagcatcccaggtgccggacttggcgtttgggccaaacggaagatggaggcaggtgagcgattgggaccatgtgtcgtcgtgccccgagccgcagcaaaagagacagatttcggctgggaacagatccttactgatgtcgaggttagcccgcaggaaggttgtattacaaagatatcagaggatctgggtagtgaaaagttctgcgtggacgccaatcaggcaggtgccggatcgtggctcaagtacattcgcgtcgcttgttcctgcgatgatcagaatctgactatgtgccagatttctgagcagatatattacaaagtgataaaagacatagagccaggggaggagctgttggttcacgtaaaggagggggtttatccactgggcaccgtgcccccaggcctggatgaggaaccaacctttagatgcgatgagtgtgatgagctgttccaatcgaagttggatctgaggagacacaagaagtatacttgcggttccgtaggagctgccctgtatgagggcttggccgaagagctgaagcctgaaggactgggaggcggatctgggcaggcccatgaatgtaaggactgcgagagaatgtttcccaataaatattctctggaacagcacatggtgatccacaccgaggagagggagtataagtgcgatcagtgtcctaaagccttcaactggaagtcgaatctcatccggcaccagatgagtcatgattcaggaaagcgcttcgagtgtgagaactgcgttaaggtattcaccgatccgagtaacttgcagagacacattcggtcacaacatgtgggtgcccgagcacacgcgtgtcccgactgcggaaaaacttttgcgacaagctctggcctgaagcaacacaaacatatccatagcaccgtgaagccattcatctgcgaggtgtgtcacaaaagctacacccagtttagcaacctttgtcgccacaagcgcatgcacgcagactgccgcacccagatcaaatgcaaggattgcgggcagatgttcagcactactagtagtttgaacaagcatcgccgattctgtgaaggaaaaaatcactacactcccggtggaatatttgctcccggtctacccctgactcctagtcctatgatggacaaagctaagccctcccccagtttaaatcatgcatccctgggcttcaacgagtatttcccttcccgaccccacccagggtccttgcctttcagtactgccccacctacattccccgctcttacgccaggattccctgggatcttccctccttccctatatccgagaccacccctgttgcctcccacttctcttctgaaaagtccactgaaccatacacaggatgccaagcttccctccccactcggcaacccagccctgccattggtgtccgccgtcagtaatagcagtcagggaactaccgccgcagcgggacctgaagaaaagtttgagagtaggctggaagacagctgcgtggagaaattgaagacccggtcatccgacatgtcagacgggtccgacttcgaagacgtaaatactactactgggaccgacctggataccacaaccgggacgggaagtgaccttgattctgatgtggactccgaccccgataaagacaagggtaaaggtaaatccgcagaaggccagcccaaatttggcggaggactcgcccctccaggtgctccgaatagcgtggctgaagtgccggtgttttactcccagcatagcttttttcctccacctgacgaacagctgctgacagccacgggagccgctggtgattctatcaaagctattgcctcgatcgccgagaagtattttggacccggtttcatgggaatgcaggaaaagaaactgggatccctcccctaccatagtgcctttccttttcaattcctacctaattttccacatagcctttaccccttcactgatcgggctctcgcccacaatctcctcgtgaaagccgagccaaagagtccccgtgatgccttaaaagtggggggaccatctgctgagtgcccgtttgacctgacgaccaagcccaaggacgtgaagccaattctgccgatgccaaaagggccatcagctcctgcttccggggaggagcaacctctggatctgtctatcggatcacgcgctagagcctcccaaaacggcggaggacgggaacccagaaaaaaccacgtgtatggcgaaagaaagctgggagccggagaggggcttcctcaggtgtgtcccgcaagaatgccccagcagcctccacttcactatgccaaaccgagtccattttttatggatcccatttattcacgtgttgaaaagcggaaggtgaccgatcctgtaggcgcactgaaggagaagtacctccgccctagccctttgctgtttcatcctcagatgtctgccattgaaaccatgaccgagaagctggaatcgttcgccgctatgaaagccgacagcggctcctctctacaaccactgccccaccaccccttcaacttccggtcacccccacccacactcagtgatcccatccttaggaaaggtaaggaacggtacacatgtaggtactgtggaaaaatatttccaaggagcgccaacttaacacggcacctaaggacacataccggggaacagccgtaccgatgcaaatactgtgatagatccttcagtatttctagtaatctccagcgccatgtgaggaatattcataacaaagagaaaccttttaagtgccacctctgcaataggtgtttcggccaacagacaaacttggaccgacacctaaagaaacacgagcacgagaacgcccctgtcagccagcatccgggagtgcttacaaatcaccttgggacctctgccagctctccaactagtgagtcagacaatcacgccctgctggacgaaaaagaagatagttatttctctgagataaggaacttcattgcaaatagtgagatgaaccaggcctcgacacgtactgagaagcgcgcagacatgcagatcgtggacgggtctgctcagtgtcccggattagcatccgagaaacaggaagacgtcgaggaggaggacgatgacgacctggaggaggatgacgaagactccctggctggaaaaagtcaggacgacaccgtgagccctgcgccagaacctcaggccgcttacgaagatgaggaagacgaggaacctgccgctagccttgccgtagggtttgaccatacacgtaggtgcgcagaggaccatgaaggaggtttgttggccctcgaacctatgccaacattcggcaaaggtctggacctgcggagagctgcggaggaagctttcgaggtgaaggacgtgctgaatagtacgctggatagcgaggcgctcaaacatacactatgccgccaggccaagaatcaagcatacgccatgatgctgtcgctgtctgaagacactccccttcacactccctcgcaggggtctctagacgcctggcttaaggtgacgggggcaaccagcgagagcggcgcttttcacccaattaatcacctgtag

SEQ ID NO: 235853 - DNA, 3831 bp, synthetic construct
  misc_feature 1..3831: note = Description of Artificial Sequence: Synthetic coding sequence
  source 1..3831: mol_type = other DNA
atgaggagtaaagccagagcaaggaaactggccaaatcggatggcgacgttgtcaataacatgtatgagcccaatcgtgatctgctggcctctcatagcgctgaggatgaagcagaggactccgcgatgagtccgattcctgtcggcccaccatcaccatttccaacctctgaagactttacccctaaggaaggtagtccctacgaagccccagtgtacatccctgaagacatcccaatacctgctgattttgagcttcgcgaatcaagcattcctggagccggactgggcgtctgggccaaacgtaaaatggaggccggtgagagactggggccatgtgtcgtggttccacgcgcagctgccaaggaaacggacttcggatgggaacaaatactcacggacgttgaagtgtccccccaggagggttgcataacaaagataagcgaagacctgggttcagaaaagttctgtgtggatgccaatcaagcgggagctgggtcctggcttaagtacatcagagtggcctgctcctgcgacgaccagaatctgactatgtgtcagataagcgagcaggtcatctattataaggttatcaaggacatagaacccggagaggaactgctcgtccatgtgaaggagggcgtctaccccctgggaacagtgcctccgggactcgacgaagaacccacatttaggtgcgacgaatgcgatgagctgtttcagtccaaactcgatcttaggagacacaagaagtatacctgcgggtctgtgggcgctgcactctacgaagggctcgcagaagaattgaagccagagggtctcgggggagggtcaggccaggcccacgaatgcaaagactgtgaacgcatgtttcccaataaatacagcctagagcaacatatggtaatccacacagaggagcgagagtacaagtgcgatcaatgccccaaggcttttaactggaaaagtaatctcatacgacaccagatgagccatgatagtggaaagcgatttgagtgcgaaaattgcgtcaaggtctttacagatccttctaatcttcagcgacatatcagaagccagcatgtgggcgcaagggcacatgcctgtccagactgtggaaagacctttgccacctcgagtggacttaagcagcataagcatatccattcaacagtgaagccattcatttgtgaagtctgtcacaagagctatactcagtttagcaatctctgtaggcacaagcggatgcacgccgactgtaggacacagataaagtgcaaggactgtggtcagatgtttagcaccacttccagcctgaataaacaccggagattttgcgaaggcaaaaaccactatacccctggagggatattcgcccctggcctgccactgaccccttcccccatgatggataaggccaagccatcgccgagtctgaatcatgccagcctgggctttaacgagtactttccttcaaggccacaccctgggagcctgccattctccaccgccccacccaccttccccgctctgactcccggatttcctggaattttcccaccgagcctgtaccccagacccccactcctgccaccaacatcactgctgaagtcgccgctgaaccatacgcaggatgcaaaactgccttcgccgctggggaatcccgcactgcccctcgtgagtgctgtgagtaattccagccagggcacaaccgcagctgcaggacctgaggaaaagtttgagtcacggctggaggattcctgtgtggaaaagctaaaaaccagatcctctgatatgagtgatggctctgactttgaagacgttaatacaaccacaggcaccgacctggacaccacaactggcaccggtagcgatctggatagtgacgtagactccgacccagacaaagataaaggcaagggcaaatcagctgaggggcagccaaagttcggcggtgggctagctcccccaggggcaccgaattccgttgccgaagtgcctgttttttactctcagcattccttcttccccccacccgatgagcagcttctgacagcaaccggcgcagcaggcgacagtataaaagcgattgcctctatcgctgagaagtatttcggtccaggctttatgggaatgcaggaaaaaaaacttggttctctgccataccactccgcattccctttccaattcctgcctaacttcccacactctctctatccattcaccgaccgcgctctggcccacaatctgttggtaaaggccgaacccaagagccctagagacgccctcaaggtcggtggaccatcggcggagtgcccgttcgatctgacaaccaaaccaaaagacgtaaagccaatacttcccatgcctaagggccctagcgcaccagccagtggcgaggagcagccactagacctctctatcggcagtagagcgagagcatcacagaacggcggagggagagaaccacggaagaatcatgtgtatggggagagaaaattgggtgctggggaggggctgccccaagtatgcccagcgcgtatgccacagcagcccccactgcactatgccaagcccagtcctttcttcatggacccgatctacagagtggagaaaaggaaggtgactgatcctgtgggggctttgaaagaaaaatacctgaggcctagtcccctgctctttcatccacagatgtcagcaatcgagaccatgactgaaaagttggagtcctttgctgccatgaaagctgactcagggtcatccctccaaccgttgccgcaccaccccttcaattttcgctccccacccccaaccctgtcggatcccattctacgaaaggggaaggagaggtacacgtgcagatattgcgggaaaatctttccaaggagtgccaatctgactagacatttgagaacgcataccggggaacagccttataggtgtaaatattgtgaccgctccttttccatctcctctaatttacagcgccacgtccgaaatatccataacaaggagaagcccttcaagtgtcatctttgcaaccgatgcttcggtcagcagactaaccttgaccgccatctgaagaagcatgaacacgagaatgcacccgtgtcccaacaccccggagtgctgaccaaccatctggggaccagcgctagctctccgaccagcgagtccgataatcatgcattgctggacgaaaaagaagatagctacttctcagagattaggaatttcatagccaattccgaaatgaatcaagctagcactcggacagaaaagcgcgcagacatgcaaattgttgatggttccgctcagtgtcccggacttgcctctgagaagcaggaggacgtagaggaggaagacgacgacgacttggaagaggatgatgaggattcacttgccggtaaatcccaggacgatacagtctcacccgctcctgagcctcaggccgcttatgaggatgaagaagacgaggagcccgctgcttccctggcggttggattcgaccatactcgacggtgtgcagaggaccacgaagggggattgttggcactcgagccaatgccaacattcggcaaaggcctcgacctaagaagggctgccgaagaggcattcgaggtgaaggatgtgttgaattctaccctggactccgaagctcttaagcacaccctatgtagacaggccaagaatcaggcttacgccatgatgcttagtttgtccgaggatactccactacatacaccaagccaggggtccctggatgcctggctaaaggtcacaggagccaccagtgagagtggtgcgtttcaccccatcaaccatttgtag

SEQ ID NO: 235854 - DNA, 3279 bp, synthetic construct
  misc_feature 1..3279: note = Description of Artificial Sequence: Synthetic coding sequence
  source 1..3279: mol_type = other DNA
ttctgcgcttatagtgcaaagatctactataaagtcataaaggacatcgaacccggtgaggagctgctggtgcatgttaaagagggtgtgtaccccctaggcaccgtgcctccagggttagatgaggagcctacatttcgctgtgatgagtgtgatgaactctttcaaagcaagttggacctgcgcaggcacaaaaagtatacctgcggctctgtgggcgcagctctgtacgaagggctggctgaggagttgaagcctgaggggttgggcggaggatctgggcaggcacacgaatgtaaggattgcgagcgtatgtttcccaacaaatatagcctggaacagcacatggtgatacacaccgaggagagagaatataaatgcgatcagtgccctaaagcattcaactggaagtccaatttaataagacaccaaatgagccacgattcggggaagaggttcgagtgtgagaactgcgtgaaggtttttaccgacccctcaaatcttcagcggcacattcgtagccagcacgtgggggctagggcccacgcttgcccagattgcggtaaaactttcgctacatcctccggactgaagcagcataagcacatacattccaccgtgaaaccttttatatgcgaggtgtgccacaagagttatactcagttttccaacctgtgccgacacaagagaatgcacgctgattgccgaacccagatcaagtgtaaggactgcgggcaaatgttctctaccacctccagcctgaacaagcataggcgcttctgcgaaggtaagaatcattacacgcctgggggtatctttgcaccaggactgcccctcacacccagccccatgatggacaaagcaaaaccttcgccatctctgaaccacgcctcgctcggttttaatgaatacttcccaagccgtccacacccgggttcgctccccttttcaactgctccacccaccttcccagcattgacacctggctttccaggcatctttcccccttccctctatccccgtcccccactgctgcctcctacctctctcctgaaatcaccactgaatcacactcaggacgcaaaactgccctccccgctgggcaaccccgcacttccactggtgagtgccgtgagtaactcctctcaaggcacaacggcagccgcaggtcccgaggaaaagttcgagtcacgcctggaggactcatgcgtcgaaaaattgaaaacacgctcctcagacatgagcgatggttccgactttgaggatgtaaacactacaaccgggaccgatctcgatactacgactggtactggaagcgacctggacagcgatgtggacagtgaccccgataaagacaaagggaaaggtaagagcgccgagggtcagcccaaatttgggggtggactggccccacccggagccccaaactccgtggccgaggtgcctgttttttactcccaacacagtttcttcccaccccctgatgagcagctcctgacagcgacaggggcagcaggagacagtattaaggcaatagcctctattgcagagaaatactttgggcctggctttatgggtatgcaggaaaaaaaactcggatccctcccataccacagtgccttcccctttcagtttctgcctaactttccgcatagtctatatccattcacagaccgggcactagcacacaacctcctggttaaagcagagccaaagtctccacgtgacgcactcaaagttggcggaccctccgccgagtgcccttttgatctcaccacaaaacctaaagacgtgaaacccatccttcccatgccaaaagggcctagcgcacctgcaagtggcgaggagcagcccctggacctgtcaatcgggtcaagagccagggctagtcagaacggcggtggccgagagcctagaaaaaatcacgtttatggggagagaaagctgggagcaggagagggactgccacaggtctgccccgcaaggatgccccagcagcctccgttacactatgctaagccatctccttttttcatggaccctatttattccagggtggagaagcggaaagtgactgatccagtgggagccctgaaggagaaatatttgcgtccatcccctctgctatttcatccccagatgtcggccattgagaccatgaccgagaaactggagtcatttgccgcaatgaaggccgattctggctcttccctgcagcccttgccccaccacccttttaattttcgctccccaccacccacactgagtgacccaattctgaggaagggcaaagagcgctatacttgtcgatattgtggcaaaatattccctcggtcagccaacctgactcgtcatcttcgcacacatacaggtgagcagccctaccgttgtaaatactgcgatcgctcgttttctatctctagcaacctacagcgccacgttaggaatatccacaacaaggaaaaaccatttaagtgccacctttgcaaccgttgtttcggccagcagacaaacctggataggcatctaaagaagcatgagcatgagaacgcccctgtgagccaacaccccggtgtcctgacaaaccacctggggacgtcagccagctcacccaccagcgagagcgataaccacgctctgctggatgaaaaggaggattcctatttctctgaaatcagaaactttatcgccaatagcgaaatgaatcaggcatccacgcggacagaaaagagagctgatatgcaaattgtagacggctctgcccagtgtccgggactggcctctgagaaacaggaggacgtagaggaagaggacgacgacgacctggaagaagacgatgaggactccctagctggcaaatctcaggatgataccgtgtccccagcccctgagccccaggcagcctatgaggacgaagaagacgaagagcctgcagccagcctggcagtggggttcgatcacacccgacggtgcgccgaggatcacgaggggggactgctggcactggagcccatgccaaccttcgggaagggactcgatctcaggcgtgccgctgaggaagcatttgaggtcaaggacgtcttgaactctaccctcgactccgaggctctcaaacatacactgtgtcggcaggccaagaatcaggcatacgctatgatgctgtcactgtccgaggacacccctctgcacacgccaagccaggggagcctcgacgcctggctgaaagtgactggcgctacaagtgaaagtggcgcattccacccaattaaccacctttag

SEQ ID NO: 235855 - DNA, 3828 bp, synthetic construct
  misc_feature 1..3828: note = Description of Artificial Sequence: Synthetic coding sequence
  source 1..3828: mol_type = other DNA
atgcgatcaaaagctcgggctaggaagctagctaaatcggacggcgacgtggtaaacaatatgtacgaacctaatagggacctgctcgcgtctcactccgctgaggacgaggccgaggactcggcgatgtctcccatccctgtgggtccccctagccctttcccaacctctgaggacttcacccccaaagagggaagcccatatgaggctcctgtgtacattcctgaagacatcccaatcccagccgactttgaactgagagaaagtagtatccccggtgccggtctcggtgtctgggcaaagaggaagatggaagccggagaaaggttaggtccatgcgtcgtggtccccagagccgcagcgaaggagactgacttcggttgggagcagatactaactgatgtggaagtgagtccccaggagggatgtattacgaagatttcagaggatcttggtagcgagaaattttgcgtcgacgcaaaccaggccggagccggtagctggctaaaatatattcgcgtcgcttgctcgtgtgatgaccagaacctgacaatgtgtcagatatctgaacagatttattataaggtgataaaggatattgagccaggcgaggaactcctcgtgcatgtaaaggagggcgtgtatcctcttggaacagtacctcccggtctggacgaggagcccacctttagatgcgatgagtgtgatgagttgtttcagtccaaactcgacctgcgcaggcataagaaatatacttgcggttcagtgggcgctgcactgtacgaggggctcgctgaagagctcaaacccgagggtctcggaggcggtagcggacaggctcacgaatgtaaagattgcgagcgcatgtttcccaacaagtattcccttgagcagcacatggttattcacacagaggagagagagtataagtgtgaccagtgtcccaaagcctttaactggaagtcgaatctaattaggcaccaaatgagccacgattctggtaagcgttttgaatgcgagaactgtgtgaaagtgtttacggatccatcaaacctgcaaaggcatatacgctctcagcacgtgggagctcgggctcacgcctgtccagattgtgggaaaacattcgccaccagcagcgggctcaaacagcataagcacatccatagcacagtgaagcccttcatatgtgaagtctgccacaaatcctacactcagtttagcaatctgtgccggcacaagaggatgcatgctgattgccgcacccagatcaagtgtaaggattgtggacagatgttctcgaccacaagctcactcaacaagcacagacgcttttgcgaggggaagaatcactacaccccaggcggtattttcgcccctggcctccctctgaccccttccccaatgatggacaaggcgaaaccatcaccgagcttaaatcatgcctcactgggtttcaacgagtactttcctagcaggccacaccctggttccctgcccttcagcaccgcacctccaacgttcccagctcttacgcccggttttcccggtatcttcccccctagcctgtatcccagaccacctttgctacctccaactagcctgctgaaatctcccctaaatcacacacaggacgcgaagctgcctagcccactgggcaacccagctctgccactcgtgtcagctgtctctaactcctcacaagggaccactgccgcagcaggccctgaggagaaatttgagtcccgcctagaggactcctgtgtggagaaactgaagaccaggtcatctgatatgtccgatgggtctgatttcgaagatgtgaacactacgacggggactgacctcgacactaccactggcactggctccgacttagatagcgacgtggatagtgatccggacaaagataaaggaaaaggcaaatccgctgaaggacagccgaagttcggcggaggcttggcaccgccaggggctcccaatagcgtggctgaagtccccgtgttctattcccagcattctttcttccctccccctgatgaacaattgctgaccgctactggtgcagctggcgactccattaaggctattgcgagcattgcagagaaatacttcggccctgggtttatgggaatgcaggaaaagaagctaggttctctcccctatcattccgcttttccctttcagttcttaccaaatttcccccacagtctgtatccattcacagaccgcgctctcgcgcacaatctccttgtgaaagcagagccaaaaagtcccagagacgctctgaaggtggggggacccagtgccgaatgccctttcgatcttactacaaagcccaaggatgtcaagcctattctcccaatgcccaaaggtcctagtgcccctgcaagcggagaggaacagccattagacctgagcatagggtccagggcacgcgcaagtcagaacgggggagggagagaaccgcgtaagaatcacgtctacggggaacgaaagctgggggctggtgaaggcttgccgcaagtctgtccagctaggatgccacagcaacccccactgcattatgccaaaccgtcaccattcttcatggacccgatctatcgggtagagaaaaggaaagttacagatccagtgggcgctctcaaggagaagtacctcaggccttctcctcttctgtttcatccccaaatgagcgccatcgaaactatgacagagaagcttgagtcttttgctgccatgaaggccgactcaggcagttctcttcagcccctgccacatcacccgtttaatttccgtagtccaccacctactctgtccgaccccatccttcgcaaaggaaaggagagatacacatgtcggtactgcggtaaaatattccctcggagcgctaacctcacccggcacctacgcacccataccggtgagcagccttacagatgtaaatactgcgacaggtctttctccatatcttcaaatctgcagagacatgtgagaaacattcataacaaagaaaagccattcaaatgccacttatgtaatcgatgtttcggtcagcaaacaaacctagaccgtcacctcaaaaaacacgaacatgagaacgccccagtaagtcagcacccaggcgtactcactaaccatttaggtacatccgccagtagtccgaccagcgagtccgacaaccacgcgctattggatgagaaggaagattcatacttctctgaaatccgcaacttcattgctaattccgagatgaatcaggcatccacccgtacggagaaacgagccgatatgcagatcgtggatggtagtgctcagtgtcctggcctggccagtgagaaacaggaagatgtggaagaggaggatgacgacgacctggaagaggatgatgaagactcgctggctggaaagtcccaggacgacaccgtttccccagccccagagccacaggcagcatacgaagatgaagaagacgaggaaccagctgcctctctcgctgtgggctttgaccatacccgccgatgcgccgaggaccacgagggagggctgctggcattggaaccaatgcctactttcgggaagggattggacctgaggcgagctgctgaagaagcttttgaagtgaaggatgttcttaattctacccttgactccgaggccctgaagcataccctgtgccgccaggctaaaaatcaggcgtacgccatgatgctgagcctgtctgaggatactccactgcatacgccttcacaaggaagcttggacgcctggctgaaggtcaccggtgcaacctctgagtcgggggctttccacccaattaatcacctgtag

SEQ ID NO: 235856 - DNA, 3771 bp, synthetic construct
  misc_feature 1..3771: note = Description of Artificial Sequence: Synthetic coding sequence
  source 1..3771: mol_type = other DNA
atgagatccaaggcacgcgctagaaaactggcaaagtctgatggggatgtggtgaataatatgtacgaacctaaccgcgatttactggcttctcattccgctgaggacgaggccgaggatagcgcaatgagcccaattccagttgggcctcctagcccatttccaacctcggaggattttaccccaaaagagggcagcccgtatgaggctccagtctacatccccgaggatatccctatccctgctgacttcgagctcagggagtccagcatcccgggtgctggactcggggtgtgggcaaagaggaaaatggaggcgggagagaggctggggccatgtgttgtagtgcccagggcagccgcaaaagaaacagacttcggttgggaacagatactgactgacgtggaagtatctccccaagagggttgcataacaaagattagtgaagatcttggtagtgagaagttctgcgtcgatgcaaaccaggccggagcaggatcttggttaaaatatatcagggtggcctgtagttgcgacgaccagaacctgactatgtgccagatctccgagcagatctattataaggtaattaaggacattgagccaggtgaagagttgcttgtacatgtgaaggagggggtctaccccttaggtaccgttccaccgggactcgacgaggaacccactttccgctgtgacgaatgcgacgagctctttcagagcaaactcgatctccggagacataagaaatatacgtgcgggtccgtgggagctgctctgtacgagggactagctgaagagttgaagccagaaggactcggcggtggatctgggcaggcccacgagtgcaaggattgcgaacgtatgttcccaaacaagtactcccttgaacaacatatggtgatccataccgaggagcgcgagtataaatgtgatcagtgcccaaaagcattcaattggaaaagtaacctgatacggcaccaaatgagtcatgactccgggaaaagattcgaatgtgagaactgtgttaaggttttcaccgatccatcaaatcttcagcgccacatccgtagccagcacgtcggtgctcgggctcacgcatgtccagattgcggaaagacatttgccacatccagtggactgaagcagcacaaacacatccattctactgtaaagccgtttatttgcgaagtttgccacaagtcgtacactcaattttctaacctttgtagacataagcgcatgcacgctgattgtaggacacagataaaatgcaaggactgtgggcaaatgttttctacaacctcttccctcaacaaacatagacggttctgtgagggaaagaaccattacactccagggggtatattcgcacccggtctccctctcacccctagtcctatgatggacaaggctaaaccctctcccagtttgaatcacgcaagcttggggtttaacgagtattttcccagccgacctcatcccggttctctgccgttttccactgctcccccaacgttccccgctctcaccccgggatttcccggaatctttcccccaagcctgtatccacggcctcctctcctgccccctaccagcttgcttaaaagccctctcaatcacacccaagacgcgaagctcccgtctcctttagggaatccggctctccccctagtgtcagccgttagtaatagttcacaaggcaccacagctgcagcaggtcccgaggaaaaattcgagagtaggcttgaggactcttgtgtcgagaaactgaaaaccaggtcatcagacatgtctgatggctctgactttgaggatgtaaatactactacaggtacggacctcgacaccactacagggactgggagcgatctcgacagtgatgtggacagcgatccagataaggataaaggaaaaggcaagtccgcggaaggccaacccaaatttggcggaggcctggcaccacctggcgcaccaaactccgtggctgaagttcctgtattctactctcagcactcattctttcctccacctgacgagcaactcttgacagctaccggggcagctggagactctattaaagccatcgcgtcaatcgccgagaaatatttcggcccagggttcatgggcatgcaagagaagaaactaggctcattaccataccactccgcgttcccttttcagtttttacctaatttcccccacagtctttacccctttactgatcgagccttggctcacaacctcctggtcaaggcagagcccaaaagccctcgagatgctctgaaagtcggcggaccatccgcagaatgcccctttgacttaacaaccaaaccaaaggacgtgaagccaattcttcctatgccaaaaggacccagcgcacctgccagcggcgaggaacagcctctggatcttagcattggatcacgcgctcgtgccagccaaaatgggggtgggagggagccgcgtaaaaaccatgtatatggcgagcgtaaactcggagctggcgagggtttgccccaggtgtgcccagcacgtatgccgcagcaaccccctcttcactatgcaaagccaagccccttcttcatggaccccatctacagagtggaaaagcgaaaagtgaccgatccagtgggtgcactaaaagagaaatatttgaggccttctcccttgctgttccacccgcagatgtccgcaatcgagacaatgacggaaaagctcgagtctttcgcggctatgaaggccgacagcgggtcaagtctgcagccgctccctcatcaccccttcaatttccggagccctccacctacgttgagtgatccaatcttgaggaagggaaaagagcggtatacatgtcgctactgtgggaagatatttccacgtagcgccaatctgacgaggcacctgagaactcatactggggagcagccttacagatgcaaatactgtgataggagtttttccattagttccaaccttcaaagacacgtacgaaacattcacaacaaagagaaaccattcaaatgtcacctctgtaaccggtgcttcgggcaacagacaaacctggaccgccatttgaagaagcacgagcatgagaacgcacctgtgtctcagcatccaggggtcttaactaatcatcttggtacatcagcatccagtccaactagtgagagcgataaccatgccctgttggacgagaaagaggactcttatttctcagaaataagaaactttatcgccaattcagagatgaatcaggccagcactcgaacggagaagcgagctgacatgcaaatcgtcgatggaagcgctcagtgtccgggactggcaagcgaaaagcaggaagatgttgaggaagaagacgacgatgacctggaagaggatgatgaagactcgttagctggaaagtcccaagacgacactgtatcgcctgcccctgagccccaagcagcgtacgaggatgaagaagacgaggaacctgccgcttccctagctgtgggtttcgaccataccagacgatgcgctgaagaccatgagggtggcctcttagcccttgaaccaatgcccacttttggtaaaggcctcgacctgagacgggctgcagaggaggccttcgaagttaaggatgtactgaacagcaccctggattccgaagctctgaagcataccctctgtcgccaggcaaagaaccagggtagtctggatgcatggctgaaagtgacaggcgcaaccagtgagtccggagccttccaccctatcaaccacctgtag

SEQ ID NO: 235857 - DNA, 3255 bp, synthetic construct
  misc_feature 1..3255: note = Description of Artificial Sequence: Synthetic coding sequence
  source 1..3255: mol_type = other DNA
atatactacaaggttattaaagatattgagcctggcgaagaactcctcgtgcacgtaaaggagggcgtgtacccactcggaacggttcctccaggtctcgatgaggagcccactttcaggtgtgatgaatgcgacgaactctttcaaagtaagttggacttgagacggcacaagaagtacacttgtggcagcgtcggagctgctctctatgaagggttggcagaggagttgaaaccagaaggactgggaggtggtagtggccaagcacacgagtgcaaagactgtgagcggatgtttccgaataagtactcactggagcaacatatggtcattcacactgaggagagggagtacaagtgtgaccagtgccccaaagcctttaactggaagtcaaatttgataaggcaccaaatgagccacgactcagggaaacgtttcgagtgcgaaaactgcgtgaaggtattcacagatccaagtaacctgcagcggcatatccgttctcagcacgtgggcgctcgcgcacacgcatgcccagactgtggaaagaccttcgcaacatcgagtggcctaaagcagcataaacacatccattctacagttaaacccttcatatgcgaggtgtgccataagagctacacgcagtttagcaatttatgtagacacaaacgaatgcatgccgattgccggacccaaattaagtgtaaggactgcggccagatgtttagtacaacttcatcattaaataaacataggcggttttgtgaaggtaaaaatcactacaccccgggagggatcttcgcaccaggtttaccactgacgcccagcccaatgatggataaggcgaaaccctccccatcactgaatcacgcaagcttaggttttaacgagtactttccgtctcggccacatcccggatctttaccgtttagcactgctcctccgaccttccccgctctgaccccagggttccccggaattttcccacctagcctctatcctcgaccccctctcctaccccctacgtccctcctcaaatcccctctcaaccacacccaggacgctaagctgcctagccccttaggaaacccagctctccctttggtctctgcagtttctaacagctcacaaggtaccactgcagcagcaggacctgaggaaaagttcgagtcccgcctcgaagactcctgtgttgagaagctcaagacccgcagttcagatatgagtgacggctcagactttgaggacgtgaacactaccaccgggactgacctggacacaaccacaggcactgggtccgatttagacagtgatgtcgatagcgacccggataaggataaaggaaagggtaaatcggccgaaggtcagccaaagtttgggggaggactggcaccccctggggctcccaattcagttgccgaggtgcctgttttttatagccagcatagcttttttccccctcctgatgagcagctcctcactgccacgggcgcagccggagacagtatcaaggctatagccagcatcgccgaaaagtattttggtccgggattcatggggatgcaagaaaagaagcttgggtctttgccttaccactcagctttcccgttccagtttctccccaacttccctcacagtctttaccccttcactgatcgcgctttagctcacaatctactcgtaaaagccgaacctaagtcacctagggacgccttgaaggtcggagggccaagcgccgagtgtccgttcgacctgacaaccaaaccaaaagatgtgaaaccgattttacctatgccaaagggcccttcggcaccagcctccggggaagagcagcccctggacctgagcattgggtccagggcacgggcaagtcagaacggaggaggcagggagccacgtaaaaatcatgtctatggcgaacgaaagctgggagcaggagagggactgccccaggtgtgtccggctagaatgccccagcagcctccactccactacgcaaaaccttcacccttttttatggatcccatttatcgcgttgaaaaaaggaaagtgaccgatcctgtcggtgccctgaaggagaaatatttaaggccgtcccctctactctttcaccctcaaatgtctgccatcgaaaccatgacagagaagctggagtcattcgctgctatgaaagcagatagtggttctagtctgcagcccctgcctcaccatccatttaacttcagatccccccctcccaccctgtccgaccccatccttcgcaaaggaaaggagaggtatacctgccggtactgcggcaagatctttccaagatctgccaacctgacacgtcacctacggactcacacaggggagcagccctacaggtgcaaatactgtgatcggtcattctccatttcgtcaaacttacaacgccatgtgaggaacattcacaacaaggaaaaaccttttaaatgtcatctttgcaatcggtgtttcgggcaacagacaaatctcgataggcacttaaagaaacatgagcacgagaatgccccagtcagccagcaccctggcgtcctgactaatcacttggggaccagcgcctcatctccgacctctgaatctgataaccatgccctcttggacgaaaaggaagattcctacttctctgagattcggaactttatagccaacagtgagatgaatcaggcctcgaccagaactgagaaaagagcagatatgcagattgtagacgggtctgcacaatgccccggactcgcctcagaaaaacaggaggatgtagaggaggaagacgatgatgacttagaggaggacgacgaagatagcttagcgggaaagtcgcaagatgacactgtgtcacccgctccggagccgcaggccgcttatgaggatgaagaagacgaagaacctgccgctagtctagccgtaggattcgaccatactcggcgatgcgccgaagaccacgaggggggacttttggccttagagcctatgcctacattcggaaaaggccttgacctgagacgagcagctgaggaggccttcgaagtcaaggacgtcttaaactcgaccctcgatagcgaagctctcaaacatactctctgtagacaagccaaaaaccaggcgtatgctatgatgctttcactcagtgaggacacacctctgcatacaccttctcagggatctcttgacgcctggttaaaggtcaccggagccacctccgaatccggagcctttcatcctatcaaccacttgtag

SEQ ID NO: 235858 - DNA, 3774 bp, synthetic construct
  misc_feature 1..3774: note = Description of Artificial Sequence: Synthetic coding sequence
  source 1..3774: mol_type = other DNA
atgcgatcgaaagcccgagcgagaaaactcgcaaaatcagatggtgacgtcgtgaacaacatgtacgaacccaaccgggaccttttggcctctcatagtgctgaagacgaagctgaggactctgccatgagccccattcctgtcgggccaccttcgccattcccaacctctgaggatttcacaccaaaggagggaagtccatacgaggcacccgtttatataccagaagatatccccatccccgcagattttgaacttcgcgagagcagcatccctggggctggtcttggtgtgtgggccaagcggaagatggaggccggagaacggctagggccatgtgtggtagtccctagagcagccgcaaaagaaaccgattttggttgggagcagatcctgacagatgtcgaagtgtcaccacaagagggatgcatcactaagatatccgaagacctaggcagcgagaagttttgtgttgatgccaatcaggctggagctggttcctggctgaagtatattagggtggcctgttcatgcgatgatcagaacttgaccatgtgccagatttctgaacaaatttactataaagtgattaaagacatcgaacccggagaagaactgttggtgcatgttaaagagggagtttatcccttgggtaccgtgccacccggactagacgaggaaccaaccttccggtgcgatgagtgcgatgagctgttccagtcaaaactggacctgcgcagacataagaaatacacttgcggcagcgttggcgcagcactgtatgaagggcttgccgaggagctgaaacccgaaggcttagggggaggaagtgggcaggcccatgagtgcaaggactgcgaaaggatgtttcccaacaagtactccttggaacagcatatggtcatccatactgaagaacgcgagtataaatgcgatcagtgccccaaggcgttcaactggaaaagcaaccttattcggcatcaaatgtctcacgactcaggtaaaagatttgagtgcgagaactgtgtcaaagtgttcactgatcccagtaacctgcagcggcacattcgaagtcagcacgtgggtgctagggctcatgcctgccccgattgtgggaagaccttcgccacatcaagcggactgaagcagcataaacacattcactccactgtgaaaccgttcatctgcgaagtctgccacaagagttatactcagttttccaacctgtgccgtcacaagcgcatgcatgccgattgcagaactcagattaagtgcaaggactgcgggcagatgttctccaccacatcttccttgaacaagcataggcgtttttgtgaaggtaaaaatcactatacccccggtggaatcttcgctcctggcttgcctctgacaccaagccccatgatggacaaggccaagccaagtccaagcctgaatcacgctagcttgggattcaatgaatacttcccctctcgacctcaccctggatccttacccttttccacagccccacccacatttcctgccctcactcccggatttcccggtatttttccgccttctctttatcccaggccaccactacttcccccaacctcactgttgaagagcccgctcaaccatactcaggacgccaagctgccaagcccactcggtaacccagccttaccattggtaagtgccgtgagcaactcctcccaggggaccacggccgctgctggtcctgaggagaaatttgagagcaggctcgaggatagctgcgtggaaaagctcaagactaggagttctgacatgagcgacggctcagactttgaggacgtgaatacgaccacagggaccgacttagatactaccactgggacgggctccgaccttgatagtgacgtggactccgacccagacaaggataaaggcaaaggaaaatcagctgaagggcaaccaaaatttggaggcggactcgccccaccgggagcaccgaattccgttgctgaagtgcccgtattttacagtcagcactctttctttccacctccagacgagcaactccttacagcaactggtgccgcaggggattccattaaagctatagcttcaatcgccgaaaagtattttgggcctgggttcatgggcatgcaggagaagaagctgggctccctgccttaccactcagcattccctttccagtttctcccaaattttccacactctctgtaccccttcacagaccgggcactggcccataatctcctggtgaaagctgaacccaagtcaccaagagacgcgttgaaggtggggggaccaagtgccgaatgtccctttgatctgacgacaaagccaaaggatgtgaaaccgatcttaccgatgcctaaaggaccatccgcgcctgcctccggcgaggaacagcctctggacctctccatcggcagtcgtgcccgagcctctcagaacggcggaggcagagagccgcgaaaaaaccatgtgtatggagaaaggaagctaggggcaggggagggcctgccgcaagtttgcccagcgaggatgccccagcagccacctctccactatgctaaaccttctccattttttatggaccctatctattcccgcgtggaaaagaggaaagtcaccgatcccgttggcgctctgaaggaaaagtatctgcgaccttctcccctgttattccaccctcagatgagtgctatcgagacaatgaccgaaaaactcgagtcattcgcggcaatgaaagctgactcaggatcttctctgcagccgctgccgcatcacccctttaattttagatcaccgccacctactctgagtgaccccatccttaggaagggtaaggaacggtatacatgccgatactgcggaaagattttccccagaagtgcgaacctgacacggcacctgcggactcacactggagagcagccctaccggtgcaagtactgtgatagatcttttagtatcagcagcaacctccagcgacacgtcaggaacatccacaacaaggagaaacctttcaaatgccacttatgtaatagatgcttcggtcagcagactaaccttgaccgccatcttaagaagcacgagcacgagaacgcgccagtgtcacagcatcccggagttcttactaatcatctgggtacgagcgccagttcaccgacctctgagagcgataaccacgccctgttggacgaaaaggaggatagttacttctctgagatacggaattttatcgccaacagtgagatgaaccaggcctctactcgaacagaaaagcgcgctgatatgcagatcgtcgacggctctgctcagtgtcccggacttgcatctgagaaacaggaggacgttgaggaagaggacgacgatgaccttgaggaagacgacgaggacagccttgcgggaaaatcacaggatgacacagtgtcaccagcacccgaaccacaagcagcttacgaggatgaggaggatgaggagccggcagcctctctggctgttggctttgatcatactaggaggtgtgctgaagatcatgagggagggcttctcgctctcgaacctatgcccactttcggtaagggactggacctccgaagggccgcagaggaagcgttcgaggtaaaggatgtgctcaattcaactctcgatagcgaggcgctcaaacataccttgtgtaggcaggctaaaaaccagggatccctggatgcatggctgaaagtgactggggctacaagcgaatccggtgcctttcaccccatcaaccatctgtag

SEQ ID NO: 235859 - DNA, 600 bp, synthetic construct
  misc_feature 1..600: note = Description of Artificial Sequence: Synthetic coding sequence
  source 1..600: mol_type = other DNA
atgagcagcgaaaattgcttcgtggccgagaattcgtccctgcacccagaatccggccaggagaacgacgctacttcaccacattttagtactcgacatgagggttcttttcaggtgccagtgttatgtgccgttatgaacgtggtattcataaccatcctcatcatcgccttaatcgcactgtcggtggggcagtacaattgtcctgggcagtacactttcagcatgccctcagacagccatgtgtcaagctgttctgaggactgggtgggctaccagcggaagtgttattttatatctactgtaaaacggagctggacatcagcccagaatgcctgttctgaacatggggctacactcgctgtgatcgactctgagaaggatatgaactttctgaagagatacgctggcagggaggaacactgggtgggcctcaaaaaagaaccaggtcacccttggaagtggagcaatggcaaggagtttaataattggtttaacgtaaccgggtcggacaagtgtgtgttcctcaagaacactgaggtgtcaagtatggagtgcgaaaaaaacctgtactggatttgcaataagccatataaatag

SEQ ID NO: 235860 - DNA, 228 bp, synthetic construct
  misc_feature 1..228: note = Description of Artificial Sequence: Synthetic coding sequence
  source 1..228: mol_type = other DNA
atgcatcatagaatgaatgagatgaaccttagtccagtcggtatggaacaactgacatccagcagcgtctccaacgctctgccagtgtccggatcccatctaggcctggctgcgagtcctacccattctgcaattccggcacccggactgccagtcgccattccgaatctaggcccatcactttccagcctgcccagcgctctttcattgatgctgcctatgggctag

SEQ ID NO: 235861 - DNA, 1893 bp, synthetic construct
  misc_feature 1..1893: note = Description of Artificial Sequence: Synthetic coding sequence
  source 1..1893: mol_type = other DNA
atgctggggatgtatgtccccgatcgtttcagcttgaagagcagtagggtgcaggatggtatgggactttataccgctaggcgggtgaggaaaggtgagaagttcggccctttcgctggcgagaagaggatgccagaggatctcgatgagaacatggattaccgcctcatgtgggaggtgcggggtagcaaaggggaggtcctgtacatcctcgacgcaactaaccccagacatagcaactggctaagatttgtccacgaagccccatcccaggagcagaaaaacttagctgctatccaggaaggcgaaaacattttttatctcgcagtggaggacatcgagaccgatacagagttacttatagggtaccttgactctgatatggaagccgaagaggaggagcagcagattatgacggtgattaaagaaggcgaagtcgagaacagtaggcggcaaagcaccgccggaagaaaggacagattaggatgtaaggaagactacgcttgccctcaatgtgagagcagtttcacgagcgaggacattttggctgagcacctgcaaacacttcatcagaaacctactgaggagaaagagtttaagtgtaaaaactgcggcaaaaaattccctgtcaaacaggctcttcagcgccacgttctccagtgtacagcaaagagctccttaaaggaatcaagtcgatcattccagtgcagcgtttgtaatagtagcttctcatcagcctcatcgttcgaacaacatcaggagacctgtagaggcgatgctcgctttgtctgcaaggccgattcgtgcgggaagagattaaaaagtaaggacgctcttaagcggcaccaggagaacgtccacactggggatcccaaaaaaaagctgatctgcagcgtttgtaacaagaagtgtagcagcgctagttcactgcaggagcatagaaagattcatgagatctttgactgtcaggagtgtatgaaaaagttcatctctgccaatcagttaaaacgacacatgattacccacagcgaaaaaagaccctacaactgcgaaatatgcaataaatctttcaagcgcctcgaccaggtaggagcccataaggtgatacactccgaggacaagccttataaatgtaagctgtgcggcaaaggtttcgcccaccgcaatgtttataaaaaccacaaaaagactcactctgaagagagacctttccagtgtgaggagtgcaaggccttgtttcgaacaccattttccctgcagcgccatctgctgatccacaattctgagcgaacctttaagtgtcaccactgtgatgccactttcaaacggaaggacacgctgaacgtacacgtccaggttgtgcatgagagacacaaaaaataccgttgtgagctgtgcaacaaggccttcgtgactccctccgtcctcaggtcccacaaaaagacacataccggggaaaaggaaaagatctgtccttactgcggtcagaagttcgctagctcgggtacactacgggtccacatacgttctcacactggggaacgcccttatcaatgtccctactgtgagaagggattcagcaaaaatgacggtctaaaaatgcatatccggacacatacccgcgagaagccgtacaagtgttctgagtgcagcaaggccttcagtcagaaaaggggactagatgagcataagcgaactcacactggcgagaagcctttccaatgtgacgtgtgcgatctagctttctcgctaaagaagatgctcatccggcataaaatgacccacaatccgaataggcccttggctgaatgtcagttttgtcacaagaagtttaccaggaatgactatcttaaggtgcatatggacaatatacacggcgtcgccgactcatag

SEQ ID NO: 235862 - DNA, 336 bp, synthetic construct
  misc_feature 1..336: note = Description of Artificial Sequence: Synthetic coding sequence
  source 1..336: mol_type = other DNA
atgctggggatgtatgtgccggatcgattttctcttaaatcctcaagagtgcaggatgggatgggactttacactgcgaggagagttaggaagggtgaaaaatttgggccatttgcaggagagaagcggatgccagaggatcttgacgagaacatggattaccgcttgatgtgggaagttcggggatccaagggggaggtactgtatattttggatgccacaaaccctagacacagcaattggcttagattcgtgcacgaagctccatcccaagaacagaagaacctcgcagctattcaggataagaacctcggacctgcagagtggcggggatag

SEQ ID NO: 235863 - DNA, 1800 bp, synthetic construct
  misc_feature 1..1800: note = Description of Artificial Sequence: Synthetic coding sequence
  source 1..1800: mol_type = other DNA
atgctggggatgtacgtgcctgatagatttagtcttaagtcctcaagggtacaggacggcatgggtctttacactgctcggcgagtgaggaagggtgaaaaattcggaccttttgctggtgaaaagaggatgcccgaagaccttgacgagaatatggactataggctgatgtgggaggtgagaggcagtaagggtgaagttttatatatcctggacgccactaaccccaggcactccaactggctgcggtttgtccacgaagccccaagtcaagaacagaaaaacctggcggcaatccaggaaggagaaaacatcttctatctggccgtggaggatatagagactgataccgagctcctgatcggttatctagactcagatatggaggccgaagaagaggaacaacaaatcatgacagtcatcaaggagggggaggtggaaaactccagaaggcagagcaccgccggtagaaaagaccgactggggtgtaaagaggattacgcctgtccacagtgcgaatcgagtttcacctccgaagacatacttgctgaacacctgcagaccttgcaccaaaagcccactgaggagaaagagtttaaatgcaagaactgcgggaaaaagtttcccgtaaaacaggccctgcaaaggcactttgagcagcaccaggaaacatgccgcggagatgccaggtttgtatgcaaagcagatagctgtggaaagagactgaagtcaaaggatgcccttaagagacatcaggagaatgtccataccggcgacccaaagaagaagctcatctgctctgtgtgcaataagaagtgtagcagcgcctctagccttcaagaacaccgcaaaatccacgagatctttgattgtcaagaatgcatgaagaagttcatcagtgccaaccaactgaagcgccacatgatcactcattctgaaaagaggccttataattgtgaaatctgtaacaagtccttcaagaggcttgatcaggtaggtgctcacaaagttatacactctgaggacaaaccctataaatgcaagttatgtggcaaaggtttcgcccatcgcaacgtgtacaaaaatcacaagaaaacccattctgaggagcgcccattccaatgtgaggagtgtaaagccctttttcggacacctttctccctacagcgtcacctgctgatccataatagcgaaagaacattcaaatgtcaccactgcgatgcgaccttcaagcggaaggatacactaaacgttcacgtgcaggtggtgcatgagcggcacaaaaagtaccggtgcgaattatgtaataaagcgttcgtgaccccctctgtgctgcggagccacaaaaaaacccacacaggagagaaggaaaaaatttgtccctactgcggacaaaaatttgccagttcgggaacgttgagggtacatattcgcagccataccggagagaggccctaccagtgtccttactgcgagaagggcttctctaagaacgatggattaaagatgcacattcgaactcacactagggagaagccctataaatgctccgaatgttcaaaggccttttcccagaaacgtggcctcgatgagcataaacgtacccacacgggagaaaaaccctttcagtgtgatgtgtgcgacctggcctttagcctgaaaaaaatgctgatcagacataaaatgacccacaatccgaaccggcctctcgccgagtgtcagttctgtcataaaaagtttacccggaacgattacctgaaagtgcacatggacaacatacacggcgttgctgactcctag

SEQ ID NO: 235864 - DNA, 1506 bp, synthetic construct
  misc_feature 1..1506: note = Description of Artificial Sequence: Synthetic coding sequence
  source 1..1506: mol_type = other DNA
atgctgggcatgtacgtgcctgaccgctttagcctgaagtctagtcgggtgcaggatggtatgggactctatacggccaggcgagtacggaaaggggagaagtttggcccattcgccggagagaagagaatgccagaagacctcgatgagaatatggactatagattgatgtgggaggtgcgaggcagtaaaggagaggtcctctacatcttggatgccactaatccccgtcacagcaattggctccgattcgtgcatgaagctccatcccaggagcagaagaacctcgcagccattcaagaaggcgagaatattttttacctggcggttgaggatattgagacagacaccgagcttcttattggttatttagactctgatatggaggctgaggaagaggagcagcagataatgacagtaattaaagaaggggaggtggaaaactctcgacgacagagcacagctggacgcaaagacaggctggggtgcaaggaggattacgcttgtcctcaatgtgagtcgtcgtttacgagcgaggacatcttggccgaacacctacagacattgcaccaaaaacctacggaggagaaagaatttaaatgtaagaattgtggcaagaagtttccagtcaaacaggcactgcagaggcactttgagcagcaccaggagacctgtcgcggagatgccagattcgtttgtaaagcggactcatgtggcaaacggctgaagtcgaaagatgccttaaaacggcaccaggagaacgtgcataccggggatcccaagaagaagttaatttgctcagtgtgcaataagaaatgcagctccgcatcatcactgcaggaacatcgtaaaattcatgaaattttcgattgtcaggagtgtatgaagaaattcattagcgccaatcagttaaagcgccatatgatcacacattccgagaaacggccttacaactgcgagatatgcaacaagtcattcaaaagactggaccaggtaggagctcataaggtaatacatagtgaagataagccttacaaatgcaagctttgcgggaaaggattcgctcacagaaacgtatacaagaatcataagaaaacccacagtgaggaacgtccctttcaatgcgaagaatgcaaggccctgttccggacgccgtttagccttcagagacacctgctgatacacaacagtgagaggaccttcaaatgccaccattgcgatgcaactttcaagcggaaggatactttgaatgttcacgttcaagtcgtacacgagcgacacaagaagtaccgttgtgagctatgcaataaagctttcgtgactccatctgtgctgcggtctcacaaaaagacacacacaggagagaaagagaaaatctgcccttattgcggacagaagttcgcctcatcaggcacgcttcgtgttcatatccgctctcatacaggggaagccgtgcaggtcttacgcgtacaacaagggctacagccggaagctcgaccaggatag

SEQ ID NO: 235865 - DNA, 1227 bp, synthetic construct
  misc_feature 1..1227: note = Description of Artificial Sequence: Synthetic coding sequence
  source 1..1227: mol_type = other DNA
atgtgtcagaatttttttatagattcctgcgccgctcatggcccaccaacgttcgtgaaggatagtgccgttgacaaaggccaccccaacagatctgccctaagcctccccccagggctgcgtatcggcccatccgggattccacaggcaggacttggcgtctggaacgaggctagcgacctcccattaggattacactttgggccttatgagggccgtatcacggaggacgaggaagctgccaacaatggatactcgtggctgattaccaaaggacgcaattgttatgagtatgtcgacggaaaggacaaatcttgggctaattggatgcggtatgtgaactgcgccagggatgacgaggaacaaaatttggttgcatttcaatatcacagacagatcttttatagaacgtgccgagtcatccggccaggatgtgaactcctggtgtggtacggcgacgaatatggccaggaattaggaatcaagtgggggtctaagtggaagaaagaattgatggccggaagagaacccaagccagagatacacccctgtccatcgtgctgcctggctttcagttctcagaagttcctgagccagcatgtcgagcggaaccacagcagccagaattttccagggccaagcgcccgaaagttacttcagccagaaaatccttgtccaggtgaccagaatcaggaacaacagtacccagatccacattcccgtaacgacaaaaccaaaggccaggagattaaagagaggagtaaactccttaataaaaggacctggcagcgcgagatcagccgcgcttttagtagcccacctaaggggcagatggggagttgtcgggtcgggaagcgtattatggaggaagagtcgaggacaggacagaaggttaatcccggtaacaccggtaagttattcgtgggggtcggtattagtcggatcgccaaagtcaagtacggggagtgtggacagggatttagcgtcaagtcggacgtaatcactcaccaacgcactcacaccggggaaaaaccttacgtgtgccgggagtgtggcagaggcttctcttggcagtcagttcttctgacccatcagagaacccacaccggagagaagccctatgtgtgtagggaatgcggccgtgggttcagccgacagtccgtactattgacccatcagcgtacccacacgggcgagaagccatatgtttgccgagaagacgagtag

SEQ ID NO: 235866 - DNA, 2685 bp, synthetic construct
  misc_feature 1..2685: note = Description of Artificial Sequence: Synthetic coding sequence
  source 1..2685: mol_type = other DNA
atgtcccccgagaagagtcaggaggaatcccccgaagaagataccgagagaacggaacggaagccaatggtcaaggacgcattcaaagacatcagcatttattttacaaaggaagaatgggcagaaatgggggattgggaaaaaactcgctatcgcaacgttaagcggaattataatgcattgattaccatcgggctccgggctaccagaccggcattcatgtgccacaggagacaggccataaaattgcaggtggacgacaccgaggactctgacgaggaatggactccccgacagcaagtgaagccaccttggatggcactccgcgtggaacagagaaagcaccagaaaggcatgccaaaagcatcgttcagcaatgagtcatcacttaaagagctgtctcgcaccgctaacttgttaaacgcaagcggctcggagcaggctcaaaagccagtgagcccatctggcgaagcatcgacttcgggccagcacagcagactcaagctggagctacgcaaaaaagaaacggagcgtaaaatgtactctctcagagagagaaagggccacgcctacaaagaggttagtgaaccacaggacgacgactatctgtactgtgagatgtgtcagaatttttttattgatagttgtgcagcccacggacctcccaccttcgtgaaagacagcgctgtcgataaaggccaccctaaccggtctgccctgtctctccctccaggactcagaatcggaccttctggtattccccaggccggactaggcgtgtggaatgaagccagcgaccttccactcggactccacttcggaccctacgagggcagaatcacagaggatgaggaggccgcaaacaacggatactcctggctcatcaccaagggacggaactgctatgagtatgtcgacggcaaagacaagagctgggcaaactggatgaggtacgttaattgtgcccgagatgacgaagagcagaacctggtagcctttcagtaccaccggcagatcttttacaggacatgccgcgtgatcagacccggttgcgagctgctcgtgtggtatggggatgaatacggtcaggaacttggcattaaatgggggagcaaatggaagaaagagctgatggcagggagagagcctaagcccgaaattcatccatgcccctcctgctgcctcgcattctctagtcaaaagttcctgagccaacacgtagaacgcaaccactctagccagaatttccccggaccgagtgcaaggaaacttttacagccggaaaatccatgtccgggtgatcaaaaccaggagcagcaatacccggatccacactcacgcaacgacaaaacaaaagggcaggagattaaggaaaggtcaaaactgctcaataaacggacatggcagagggaaatctctagagcctttagcagccctccaaaagggcaaatggggtcttgcagggtggggaagagaataatggaggaagagtctcgcacggggcagaaggtaaatcctggtaataccggcaaacttttcgttggcgttggcatctccagaatcgctaaggtaaagtacggagagtgcgggcagggatttagcgtgaagtcagacgtcatcacccaccagcgaacccacacaggagagaagctttatgtatgccgtgagtgtggtcggggattctcctggaaaagccatctcttgatccatcagaggatccatactggagagaagccttacgtttgcagagagtgtgggagggggttcagctggcagagcgtacttcttacccaccagaggacccacacaggcgagaaaccctacgtttgtcgggagtgcggcagagggttttctcgacagtcagtattgctaacgcaccagagacgtcatacaggcgaaaagccatatgtgtgcagagaatgcggaaggggcttttctcggcagagtgtgctgctaacgcaccagcgcaggcacacaggcgagaaaccctacgtatgccgcgagtgcggtagggggttttcatggcagagcgtattactgactcatcagcgcacacacactggggagaagccgtacgtgtgtcgtgagtgtgggcgaggcttcagttggcaaagtgttctcctgacccatcagcgcacccatactggtgagaagccttacgtgtgccgagaatgcggacgcggatttagcaacaaaagccatctcttacgccatcagaggactcatacgggtgagaagccatacgtatgccgcgagtgcggccgagggtttcgggacaaaagccaccttctgcggcaccagaggacccatacaggtgaaaaaccatatgtttgtagagagtgcgggcgaggcttcagagacaaatctaatttgttaagtcaccaacgcacccacactggagagaagccttacgtctgccgtgagtgcgggcgagggttcagtaacaaaagtcatctcctgaggcaccaacgcactcataccggtgaaaaaccctacgtgtgtagggaatgtggacgcggattccgaaacaagagccacctcttaaggcatcagagaactcatactggcgaaaaaccttatgtttgcagggaatgcggacgagggttctcagaccggtcaagcctgtgttaccatcagcgcacccataccggggaaaaaccttacgtttgccgggaagacgagtag

SEQ ID NO: 235867 - DNA, 303 bp, synthetic construct
  misc_feature 1..303: note = Description of Artificial Sequence: Synthetic coding sequence
  source 1..303: mol_type = other DNA
atgtccccggagaagtctcaggaggagagtcctgaagaggacacagaaagaaccgaacgcaaaccgatggtaaaagacgcgtttaaagatattagcatttactttactaaagaggaatgggcagagatgggcgactgggaaaagacaaggtatcgcaatgtgaagcgaaactacaacgctctgattactatcggacttcgtgccaccaggcctgctttcatgtgccaccgtagacaagccataaagctccaagtcgatgataccgaggactcagacgaagagtggacccctcgacagcaatag

SEQ ID NO: 235868 - DNA, 537 bp, synthetic construct
  misc_feature 1..537: note = Description of Artificial Sequence: Synthetic coding sequence
  source 1..537: mol_type = other DNA
atgtccgaagtcagattgccccctctgagggctctggatgatttcgtacttggcagcgcacgtctggcagctcccgatccatgtgacccacagcggtggtgccaccgcgtgattaacaatctgctctattaccagaccaattatttgctctgcttcggcattggtctggcactcgccggatatgtaagacccctacacaccctcctcagcgctctggtagtcgcagtcgccctaggggtgctcgtgtgggccgctgaaacccgcgcagccgtacgccgttgtcgccgatcgcacccagccgcatgcctcgctgctgtcctggcagtcgggctcctggtgctctgggttgccggaggagcatgcacgttcctcttcagcatagccggaccagtgctcttgatccttgtccacgcttctctaagactgcgaaacctgaagaacaagatagagaacaagatcgagtctattggactcaaaaggacccctatgggtctgctgctggaggctctgggccaggaacaagaggcgggatcctag

SEQ ID NO: 235869 - DNA, 846 bp, synthetic construct
  misc_feature 1..846: note = Description of Artificial Sequence: Synthetic coding sequence
  source 1..846: mol_type = other DNA
atggcaggtacgtggctcctgttgctcctggcactggggtgtcccgcactccctaccggcgtcggcggaacaccattccctagcctggctcctcccattatgctgttggtggacggcaaacagcagatggttgttgtttgtctcgttctcgacgtcgctcccccaggactggattctcctatctggttctccgcagggaacggttcggcactggacgcctttacatatgggccatctcccgctacggatgggacatggacaaacctggcgcacctaagcctaccctcagaggaactggcaagctgggagccattagtatgccacacaggaccaggagctgagggccactcacggtctactcagcctatgcacctgagcggagaggcatctacggctcgaacatgcccacaggaaccattacggggaacgccgggaggggctctgtggctcggggtgctgagacttcttctcttcaaacttttattgtttgaccttctcttgacctgttcttgtctgtgtgatccagccggacccctcccatcccctgccaccaccacccgactgcgcgctttggggtcccaccggcttcatccagccactgagactggaggcagggaggccacatcttcgccacgtccacaacccagagataggcggtggggggatactccacctgggagaaaaccgggttctcctgtctggggcgagggcagctacttgagcagctacccaacctgtccggcacaggcgtggtgcagcagaagcgccctacgcgcaccctcctctagcctcggcgcatttttcgctggggacctcccaccaccgctgcaggccggtgccgcttag

SEQ ID NO: 235870 - DNA, 384 bp, synthetic construct
  misc_feature 1..384: note = Description of Artificial Sequence: Synthetic coding sequence
  source 1..384: mol_type = other DNA
atggctgcaacatctccaggaccctgggtctccagccctacacatcggtcatgttttctaccatttttgacaaggggatgtcataacagagtgtgggccgcacatccattcttactctggccccatcagagctgttgctggtggatggagagttcgagatggtggtggtccgcatggagcctcatgcttcaccccctcgcactgactgctcccggacgaaaacctggaagccccgtgtggggggaaggctcatacctgtcatcgtatcctacatgtcctgcccaggcctggtgtagtcgcagtgcactgagagcccctagcagttcactgggggctttttttgcaggtgacttgcccccaccgctccaggcaggggcagcttag

SEQ ID NO: 235871 - DNA, 771 bp, synthetic construct
  misc_feature 1..771: note = Description of Artificial Sequence: Synthetic coding sequence
  source 1..771: mol_type = other DNA
atggcaggaacatggttgctccttctgctcgctctggggtgccctgcccttccaacaggcccagtttcctttcctagtagcccggaggccgctaccacagggccaatttggttctcagctggaaatgggtccgcgctggatgctttcacctatggaccgagtcctgcgaccgatgggacctggacaaatctggcccacctgtccctgccttcggaggagctggcaagttgggagcctctcgtgtgtcatacaggtccaggcgctgagggacactcccggagtacacagccgatgcacctgtccggcgaggctagcacggcaaggacttgtccacaagagcccctaagagggacaccaggcggagccctgtggttgggtgtactgagactcctgttgtttaagttactgctctttgacctgttgctcacatgctcatgcctgtgtgaccctgcgggaccattgccttcaccggcaacgactactagactgcgagcactcggctcacatagactgcacccagctactgaaactgggggaagagaggccacgtctagtccacggcctcagccacgagatcgacgctggggggacactcctcctgggagaaaacctggttcaccagtttggggagaaggtagctatctgagttcatatccaacctgccccgcacaggcttggtgttctcgttcagctctgcgggcaccatccagtagcctgggagctttcttcgcgggagatttgcctcccccactgcaggccggagccgcatag

SEQ ID NO: 235872 - DNA, 525 bp, synthetic construct
  misc_feature 1..525: note = Description of Artificial Sequence: Synthetic coding sequence
  source 1..525: mol_type = other DNA
atggcaggaacctggctcctcctgctgctcgcacttggctgtccagccctgccaaccggcgaagcctccaccgccagaacctgccctcaagagcctctccgaggcacaccagggggtgcactgtggctgggtgtattacgcctgctcctgttcaagttactcttattcgacctcttactcacctgctcctgcctttgcgaccctgcaggccctcttcccagccccgctacaaccacccggcttcgagccctcggcagccaccggctgcatcccgcaaccgagaccgggggaagggaagcgacaagctctccaaggcctcaaccacgcgacaggcggtggggcgacacaccaccagggagaaaacctgggagtccagtctggggagagggatcatacctgagctcatacccaacctgcccggctcaggcgtggtgtagtcgctccgctctgagggccccatcaagctccctcggagccttcttcgcgggtgacctaccaccccctcttcaggcaggagccgcttag

SEQ ID NO: 235873 - DNA, 438 bp, synthetic construct
  misc_feature 1..438: note = Description of Artificial Sequence: Synthetic coding sequence
  source 1..438: mol_type = other DNA
atgtcttgggccccagtgttgttgatgctcttcgtgtactgtaccggctgtgggccacagccagtgctccatcagcccccagccatgtccagtgcgctggggaccactatccggctaacatgcaccctgcgtaacgaccacgatatcggcgtgtactccgtctattggtaccagcagaggccagggcatccgcctcggttccttctgagatatttctcccagagcgacaaaagccagggtccccaagtaccgcctagattttctggatccaaagacgtggctagaaaccgcggatacctctccatttctgaactgcagcctgaggacgaagccatgtactactgcgcgatgggcgcaagaagcagcgaaaaggaagagagagagcgtgagtgggaagaggagatggaaccaaccgcggcaaggacccgcgtcccctag

SEQ ID NO: 235874 - DNA, 372 bp, synthetic construct
  misc_feature 1..372: note = Description of Artificial Sequence: Synthetic coding sequence
  source 1..372: mol_type = other DNA
atggcttgcaggtgtctgtcatttctgctgatgggcacattcttatccgtcagccagactgtattagctcagctggacgctctcctcgtgttccccggacaggtggcccagctttcatgcactctctccccccagcatgtgacaatcagagactacggtgtgagctggtaccagcagcgtgctggcagcgccccacgctatctgctttactataggtccgaggaggatcaccataggccagctgatatacctgatagattcagtgcagccaaagacgaagcccacaatgcctgtgtgctgaccatttcccctgtgcagcccgaggacgacgccgactattattgtagtgtaggctacggattctcgccatag

SEQ ID NO: 235875 - DNA, 513 bp, synthetic construct
  misc_feature 1..513: note = Description of Artificial Sequence: Synthetic coding sequence
  source 1..513: mol_type = other DNA
atggacgagcagcctagattgatgcattcacacgcaggagtgggaatggccggacatcctggcctgagccaacatctgcaggacggagccggtggcaccgaaggggaggggggacgtaaacaagacatcggcgatatcctacaacagataatgactataaccgatcagagcctcgatgaggcccaggccagaaagcatgccctgaactgccatcgaatgaaacccgctctgtttaacgtgctgtgtgagatcaaggagaagactgttttgtcgattaggggcgcacaggaagaggaaccaactgaccctcagctcatgcgtctggacaatatgttattggccgagggtgtggctgggccagaaaaggggggtgggagcgccgctgccgctgccgctgccgctgctagcggcggtgctggcagtgacaactcagtggagcactcagattaccgtgcaaagctgtcccagataagacagatataccatacagaactcgagaaatatgaacaatag

SEQ ID NO: 235876 - DNA, 1044 bp, synthetic construct
  misc_feature 1..1044: note = Description of Artificial Sequence: Synthetic coding sequence
  source 1..1044: mol_type = other DNA
atggatgagcagcccagactcatgcactcccacgctggcgtcggtatggcagggcatcctgggctcagccaacatctgcaggatggcgcagggggtacagaaggcgagggagggcgtaagcaggatatcggggacatactgcagcagatcatgactattaccgatcagagcctggacgaagcccaggcgagaaaacacgcgctgaattgccacaggatgaaaccagcactattcaacgtgttatgtgagatcaaggaaaaaacagtcctgtcaattcggggagcccaggaggaagagcctactgacccccagctgatgaggcttgataatatgctcttggcggaaggcgtagcaggacccgagaaaggcggaggcagtgccgctgccgcagccgcagcggctgcaagcggaggagccggtagcgacaactcggttgagcactcagattaccgggctaagcttagtcagatcaggcagatttaccacaccgagctagaaaaatatgaacaagcttgcaacgaatttactactcatgtgatgaaccttctcagagaacagagtcgaacaaggcccattagtccaaaggagatcgagcggatggtgtccataatccacagaaaattctcttctatacagatgcaactgaaacaatctacatgcgaggcggtgatgattctcagatcacgtttcctggacgcgagaaggaagcgacgaaacttcaataaacaggccaccgagatcctaaatgaatacttctactctcacctgagtaacccatatccatctgaggaagcaaaagaggagcttgccaaaaagtgtgggataacagtatcccaggtgagcaactggtttgggaacaagcgaattcgatacaagaagaatattggtaagttccaggaggaggcaaatatttacgccgcaaaaacagccgtaactgccacgaatgtctcagcgcacgggagtcaagccaactcaccatctacccctaactcagctgggggttaccccagcccatgctatcagccagaccggaggattcaatag

SEQ ID NO: 235877 - DNA, 1044 bp, synthetic construct
  misc_feature 1..1044: note = Description of Artificial Sequence: Synthetic coding sequence
  source 1..1044: mol_type = other DNA
atggatgaacaaccccgacttatgcattctcatgctggcgtgggcatggccggtcatccgggactgtcccagcatctccaagacggggctgggggaacagagggggagggcggtaggaagcaggacattggggacatcctgcagcaaatcatgaccattactgaccagagtttggacgaagcccaggcccgaaagcacgcactgaattgccatcgcatgaaacccgctctatttaatgtcctctgcgaaataaaagaaaaaaccgtgctttcgataaggggggcacaagaggaggaacctacggatccacagctgatgcgtctggataatatgctactcgccgagggggtagcgggtcccgagaagggcggaggtagcgcggcagctgcagctgccgctgcggctagtggcggagccggttctgacaacagcgtggaacacagcgactatcgggcaaagctgtcgcagatccgtcaaatataccatactgagctggagaagtatgagcaggcttgtaacgagtttaccacccacgtgatgaatctactgagagaacagtcaaggacacgaccaatttcccctaaagagattgagagaatggtgagcataattcatcggaaattttcgagtatacagatgcaacttaaacagagcacatgtgaggccgtaatgatcctccgctctcgcttccttgatgcacgccgaaagaggagaaatttcaataagcaggcaaccgaaatcttaaacgaatatttttattcccaccttagcaacccttaccccagtgaagaagcgaaagaggaactggctaagaagtgcggcatcacagtcagccaggtgtctaattggtttggcaataaaaggatcagatataagaagaatatcggaaaatttcaagaggaagcaaacatctatgcagctaagactgcagtcacagctactaatgtgtcagcacatgggtcgcaggctaactcacccagtacccctaattccgccggtggctacccatcaccttgctatcagcctgatagaaggattcaatag

SEQ ID NO: 235878 - DNA, 1293 bp, synthetic construct
  misc_feature 1..1293: note = Description of Artificial Sequence: Synthetic coding sequence
  source 1..1293: mol_type = other DNA
atggacgaacagccgaggctcatgcattcccatgcaggcgtgggtatggcaggacatcccggtctttcacagcacctccaggacggggctggcggtacagagggagagggcggacgtaagcaggatataggagatatccttcagcagattatgacaatcacagaccagtcgcttgacgaggcccaagctcgcaagcatgccttgaattgtcatcggatgaaaccagctctatttaacgtgctgtgtgagataaaggaaaagactgttctttctattcgtggcgctcaggaggaagagccgactgatccccagctgatgcggctggataatatgctactggcagaaggtgtagcaggtcccgagaagggtggcggatcggcagcagccgcagccgctgccgcagcctcgggaggcgctggttcagataatagcgtcgagcattcggactatagggctaaactgagccagattcgccagatctaccataccgagctggaaaagtatgagcaagcctgtaatgagttcactacacatgtcatgaacctgttgcgtgagcagtcgcgcacccggcctatttcccctaaggaaattgagcgaatggtaagcatcattcataggaagttttccagtatccaaatgcaactcaaacagtcaacttgtgaggcagtgatgatcttaaggtcccgcttcttggatgcccgaagaaaacggaggaacttcaacaaacaggcaactgagatcttgaacgaatatttttattcccatctctcgaacccttacccatctgaggaggcgaaggaggaactggccaagaagtgcggtataaccgtcagccaggtgtccaactggttcggcaataaacggatcagatataagaaaaatattgggaagttccaggaagaagcaaatatatacgctgccaagacggcagttacagctacaaatgtatcagcgcacggcagccaagcgaactcaccaagcactcctaatagcgctggctctagctcttccttcaacatgtcaaactcaggagatctgttcatgtccgtgcagtcactgaacggggactcctaccagggagctcaggtcggcgctaacgtccagtcccaggtggatactttgcgtcatgtgatttcccaaaccggtgggtatagtgacggcctggccgcttcccaaatgtattctccccagggaatcagcgctaacggcggttggcaagatgccactacacctagtagtgtcacatctccaacagaaggacccggaagtgtccattctgatacctctaactag

SEQ ID NO: 235879 - DNA, 978 bp, synthetic construct
  misc_feature 1..978: note = Description of Artificial Sequence: Synthetic coding sequence
  source 1..978: mol_type = other DNA
atgcgtctggacaatatgctgctggccgaaggtgtcgctggacccgaaaaggggggtggtagcgctgccgctgctgccgcagctgctgccagcgggggagccggatcagacaatagcgtggaacattcagattatagggccaagctttcacagattcggcaaatataccatacagaactggagaagtatgaacaggcctgtaatgagtttacgacgcacgttatgaatctcctgcgtgagcaaagcaggacacgccctataagcccaaaggaaatcgaaaggatggtcagtataattcaccggaagttttcctccattcagatgcagctgaaacagagcacttgtgaagccgtgatgatcctccgaagcaggttcctggacgctcgacggaaacgtcggaatttcaataaacaggccaccgagatcctcaatgaatacttctattctcacctatccaatccttatccctcagaagaggccaaggaagagctcgcaaaaaaatgtgggataacggtgagccaggtgtccaattggtttgggaataagaggatacggtataaaaagaacatcggtaaatttcaagaagaggcaaatatctatgccgctaaaacggctgtgacagctaccaatgtgtccgcgcacggcagccaggcaaactctccatcaacccctaactccgcagggagttcttcctcttttaacatgtctaactctggggatttgttcatgtcagtgcagagcctcaacggggacagctatcagggggcacaggtgggcgcaaacgtccagtcccaggtggacacgctgaggcacgtgatatcccagacaggaggatactccgatggccttgccgcttcacaaatgtactccccccaaggcatctccgccaatggcggatggcaagatgctactaccccgtcctcagtcacgtcccccacggaaggccctggctcagtacattccgatactagcaattag

SEQ ID NO: 235880 - DNA, 1113 bp, synthetic construct
  misc_feature 1..1113: note = Description of Artificial Sequence: Synthetic coding sequence
  source 1..1113: mol_type = other DNA
atgctgctagtgtttttcgtgttgtggacgtgtagtctggcccttctggcatctagccagtctcccccaccaccatgcgccagcgtcctgtctatccggggtgcccaggaggaggagccgaccgacccccaactgatgaggctcgacaacatgctcctagccgagggtgtggccggtccagagaagggcggaggatccgccgctgcggcagcagccgctgcggctagtggaggtgctggttcagataactccgtggaacacagcgattatagggcgaaactatcccagattcggcaaatttatcacaccgagctcgaaaagtacgagcaggcctgtaacgaatttacgacacacgtaatgaatttgcttcgggaacaatcaagaacaagacctattagccctaaggaaatcgaacggatggtctccatcattcacagaaagttctccagtatacagatgcagctcaaacagtcaacctgcgaagctgtcatgatcctaagatctcgtttcctcgatgcacggaggaaaagacgcaatttcaataagcaggccacagagatcctgaatgaatacttctattcccacctgtcgaacccctatcccagtgaggaggccaaggaagagttggcaaagaaatgtgggatcacagtgagccaggtgagcaactggtttggcaacaagcggatcaggtataaaaagaatattgggaaatttcaggaggaggcgaacatctacgctgccaagaccgctgttacagccaccaatgtgtctgcccacggttcccaagcaaactccccaagcactccgaacagtgctgggtcgagctctagcttcaatatgtccaactctggcgatcttttcatgtctgtccagtctctgaatggcgattcctaccaaggcgctcaggtgggagcaaatgttcagtcgcaagtggataccttgaggcacgtgatttcccagactgggggatatagcgatgggctcgccgcttcccagatgtactcacctcaagggatctctgccaatgggggatggcaagacgccacaacaccatcctcggtgacaagtcccacggagggcccaggtagcgtccattctgatacatctaactag

SEQ ID NO: 235881 - DNA, 1263 bp, synthetic construct
  misc_feature 1..1263: note = Description of Artificial Sequence: Synthetic coding sequence
  source 1..1263: mol_type = other DNA
atggacgagcaaccgcgactgatgcacagccatgcaggcgttgggatggcgggtcatcctggcctgtctcagcacctgcaggacggtgcagggggaaccgagggtgagggcggtcgcaagcaggacattggcgatatcctccagcagattatgaccatcacggaccaatccctcgatgaggctcaggcacgcaagcacgcactcaactgtcatagaatgaaacccgcactttttaatgtgctgtgtgagatcaaggagaagaccgtgctcagtatccgcggagcacaagaagaggagcctacggacccccagttgatgaggctggataatatgttgcttgctgagggtgtggccggaccagaaaaggggggtggcagcgccgcagctgccgcagcagccgctgcatcgggaggggcaggttccgacaacagcgttgaacatagtgattatcgagctaaactcagccagatccgacagatttaccacacagagctagaaaagtatgaacaagcgtgcaatgagtttaccactcacgttatgaacctgctgcgggaacagtctcgcactagacctatttcccccaaggaaattgaaaggatggtgagcatcattcaccggaagttttcctccattcagatgcaactgaaacagtcgacctgcgaggccgtgatgatactgagatcccgctttctggacgccaggcgaaaaagacggaattttaacaagcaggccactgaaatcctgaacgagtatttctattcgcacctatccaacccatatccaagcgaggaagccaaagaagaactggcaaagaaatgtggcatcacagtctcacaggtgtcaaattggtttggcaacaagaggatcagatacaagaaaaatattggcaagtttcaggaggaagctaacatttatgctgctaaaacagctgttactgctactaatgttagtgcccatggatcccaggcaaattcgcccagtaccccaaattccgccggatcctcgagttctttcaatatgagtaattcgggcgacctttttatgtccgtgcaaagtctgaacggggactcttaccaaggtgcacaagtaggtgcaaatgtgcagagccaggtggatactctgagacacgttatttcgcagaccggcggatatagcgacggcctggcagcgagccagatgtactcaccacagggcatctctcatctgcctagacaccccagacaggcacattatcacttccgcttgcccacatggcatccgtag

SEQ ID NO: 235882 - DNA, 906 bp, synthetic construct
  misc_feature 1..906: note = Description of Artificial Sequence: Synthetic coding sequence
  source 1..906: mol_type = other DNA
atgagattggataatatgctgctggccgagggagttgctggccctgagaagggtgggggatccgcagcagcagctgcagccgcagcagcctctgggggagctggctccgacaatagtgtagaacactccgattacagggccaagctgagccaaatccgccaaatctatcacacagaactcgagaaatacgagcaggcatgtaacgagttcactactcatgtgatgaatctgctgagagagcagtccaggacacggcctattagccccaaggagatcgaaaggatggtgtccataatccaccggaaattctccagtattcagatgcagctcaagcagtctacttgtgaggctgtgatgatcctgcggtcaaggtttttggatgcaagacgaaaaagacgcaattttaacaagcaagctactgagatcctcaacgagtacttttactcccaccttagcaatccatacccgtccgaggaggctaaggaagagctcgctaaaaagtgcggtattacagtatcccaggtcagcaactggttcgggaacaaaagaatccggtacaaaaagaacatcggcaaattccaggaggaagccaacatttatgctgcaaagacggcagtcaccgctactaatgtcagcgcccacggatcacaggccaactccccttctactccaaatagcgccggatcttcctcctcatttaacatgtccaattcaggcgacctctttatgagtgtccagtcattaaatggtgacagttatcagggggctcaagtcggcgctaacgtgcagtctcaagtcgacaccttacgacacgtgatctcccagacgggtggatattctgacgggctggccgcatctcagatgtactctcctcagggaatatcggagattgccaggacctattag

SEQ ID NO: 235883 - DNA, 1020 bp, synthetic construct
  misc_feature 1..1020: note = Description of Artificial Sequence: Synthetic coding sequence
  source 1..1020: mol_type = other DNA
atggacgagcagccacgactaatgcattctcacgccggagtagggatggccggacaccccggattatcacagcatcttcaggacggggctgggggtaccgaaggagagggtggtcgaaagcaggacatcggcgacatccttcagcagatcatgacaataactgatcaatctttagacgaagctcaggcgaggaagcacgcacttaattgccaccggatgaaaccagctctttttaatgtgctgtgtgaaatcaaggaaaagacagttctgagtattagaggggctcaggaagaggaaccgacagatccacagctgatgcgcctcgataatatgttgctcgctgaaggggtggctggccctgagaagggcggtgggtccgccgcagccgcagctgctgctgcggcttcaggaggtgccggaagcgataattctgttgaacatagtgattatcgagccaaactcagccagatccgtcagatctatcacaccgagctggagaagtacgaacaggcttgtaatgaatttactactcatgttatgaacttactaagggaacaatcccggaccaggcccatttcaccaaaagagatcgaacggatggtttctatcatccaccgcaagtttagctccatccagatgcagctgaagcagtccacatgtgaagccgttatgatcctgagatctagatttctagatgcgagacggaaaaggcgcaatttcaataaacaggctactgagattcttaatgagtacttctattcccatttgagtaacccttacccttcggaggaggccaaggaagagctggccaaaaaatgtggaattactgtgtcacaagtggatacactccgacatgtgattagccagactggaggttactcagatggactcgcagcctcccagatgtactcccctcagggaatctctgcaaatgggggttggcaggacgcaacaaccccaagcagcgtgacctcgcccacagagggccctggatcagttcacagcgatactagtaactag

SEQ ID NO: 235884 - DNA, 978 bp, synthetic construct
  misc_feature 1..978: note = Description of Artificial Sequence: Synthetic coding sequence
  source 1..978: mol_type = other DNA
atgcgcctggacaatatgctgctggctgaaggtgttgctggtcctgaaaagggcggaggtagcgccgctgccgctgcagctgctgccgcttcaggcggagcgggtagcgacaactcagtagaacatagtgactacagagccaaattgtctcaaatacgccagatatatcataccgagttggaaaagtatgagcaagcctgtaacgagtttacaacccacgtgatgaatctgctgagggagcagagtcggacgcgcccaattagtccaaaagagatagagagaatggttagcatcatccaccgaaagttctcatctattcaaatgcagctgaaacagagcacctgtgaggctgtgatgatcctaaggagccgctttctcgacgccaggaggaaaaggaggaacttcaacaagcaggccacagagattctgaatgagtatttctacagccatctgtccaatccctacccaagtgaagaagccaaggaggagctcgctaaaaaatgtggaatcaccgtgtcccaggtgagcaattggttcggtaataagagaatacgctataagaagaatattggcaagttccaggaagaggccaatatatacgccgctaagactgccgtgacagcgacgaatgtcagtgcacacggttctcaagcaaactccccatctactccaaacagcgctgggtcttcctcttccttcaatatgagtaattccggggatttgtttatgtcggtgcaatccctgaacggggactcttatcagggcgcacaagtaggcgcaaatgtgcagtcacaagtagacacactccggcatgtaatatctcaaacgggaggatacagtgatggactcgccgcatctcagatgtattctccccaaggcataagcgccaatggaggctggcaggacgccacaacaccgtccagcgtgacttcccctaccgagggccctggatctgtgcacagcgatacaagtaactag

SEQ ID NO: 235885 - DNA, 978 bp, synthetic construct
  misc_feature 1..978: note = Description of Artificial Sequence: Synthetic coding sequence
  source 1..978: mol_type = other DNA
atgcgtttggacaatatgctcctcgccgagggagtggcaggacccgagaagggtggtggtagcgccgctgctgctgcagccgctgccgcatccggaggtgcagggtccgacaacagcgtggaacacagcgattacagggccaagctgtcccagattaggcagatctatcatactgagctggagaagtacgagcaggcttgcaacgagtttacaacccacgtgatgaatcttttacgggaacagtctcgcacaagacctatctcccccaaagaaatagagcgaatggtgagcatcatacaccggaaattctcatctatccagatgcagttgaagcaatccacctgcgaggcggtcatgattctacgcagccggttcctcgatgccagaagaaaacggaggaactttaataagcaagctacggagatattgaatgagtacttttactcccacctgtcgaatccttatccctcggaagaagccaaggaagagctcgccaagaagtgtggcataaccgtaagccaggtgtccaactggtttggcaataagaggatcagatataaaaagaatattggtaagttccaagaggaggcaaacatttatgctgcgaagaccgcagtgacggctacaaatgtctccgcgcatggtagtcaggcaaacagcccttcgacccccaattcagccggatcatccagttcctttaacatgtctaactccggtgacctcttcatgtccgtgcagtcactgaacggcgactcataccaaggcgctcaagtgggggctaatgtccaaagccaggtggacacactgagacatgtaatatctcagaccgggggatatagcgatggcctcgcagcgtcccagatgtatagtccccagggcatatctgcaaatgggggatggcaggatgcaacaacacccagttcagtaacatcacctaccgaggggcctggaagtgttcatagtgacacatctaattag

SEQ ID NO: 235886 - DNA, 1293 bp, synthetic construct
  misc_feature 1..1293: note = Description of Artificial Sequence: Synthetic coding sequence
  source 1..1293: mol_type = other DNA
atggacgagagactgttaggcccaccgcctcctgggggagggcgtggaggcttgggactcgtttccggggaaccaggtggtcccggtgagcccccaggcggtggggatcccggtggcggaagtgggggtgtcccaggaggccgaggaaagcaggacattggtgacatcctgcagcagattatgacgattaccgaccagtctttggatgaggctcaagctaagaagcacgcacttaactgtcacaggatgaagccagcgctgttttccgtgctgtgcgagataaaggaaaaaacaggcctgtctattaggagctcacaagaggaggagcctgtggacccccagcttatgcgcctagacaatatgttgttagccgaaggtgtggccggacccgaaaaaggaggcggaagtgcggcagccgcagcggcagccgcagcttctggcggaggtgtgtcgcctgacaatagtatcgaacatagtgattacagaagcaaactggcccagatccgccatatttaccactccgagttggagaagtacgaacaggcctgtaatgagttcacaacacatgtgatgaacctgctccgggaacaatctaggacccggcctgtggccccaaaggagatggagcggatggtctcaatcattcataggaagttttctgccatccagatgcagttaaagcaatcgacttgcgaagctgtgatgatcctccgctcccgatttctggacgctagaaggaagagacgcaactttagcaagcaggcaacggaagtgctcaatgagtatttctactctcacctgtcgaacccttacccttctgaagaggcaaaagaagaactagcgaagaagtgcggtattactgtctcccaggtgtccaactggttcggcaacaagagaatccgatacaaaaaaaacattggcaaatttcaggaggaggctaacatctacgctgtgaaaaccgccgtttccgtgacccagggcggacactccagaacttcctctcctacacctcccagctctgccggatctggcggttctttcaacctctccggcagtggagatatgtttctgggcatgccaggccttaacggagacagctatagtgctagtcaggtagagtcattgcggcattccatggggccaggcggttatggtgataacctgggcggtgggcagatgtactccccacgagaaatgagggccaacggatcctggcaggaagccgtaaccccatcatccgtgacatctccaactgagggaccgggttctgtgcattccgacacgtccaattag

SEQ ID NO: 235887 - DNA, 1293 bp, synthetic construct
  misc_feature 1..1293: note = Description of Artificial Sequence: Synthetic coding sequence
  source 1..1293: mol_type = other DNA
atggacgaacgccttcttggaccaccccctcctggcggaggcagaggcggactgggtctggtgagtggagaacctggaggaccaggcgagccgccagggggaggagaccccggagggggatcgggcggagtgcccggaggcaggggcaagcaggacatcggggacatccttcagcagattatgactataacagaccagtctctggatgaggcccaggccaaaaaacacgctttgaactgccataggatgaagcctgctctgttcagcgttttgtgtgaaatcaaagagaagacagggttgtctattaggagttcacaggaggaggagccagtggacccacaactgatgcgtctggacaacatgctactggccgagggcgttgcgggacctgagaagggaggtggaagcgccgcagcggctgccgcagctgcggcttctgggggtggagtgtccccagacaatagcatcgagcacagcgattataggagtaagctggcacaaatcagacacatttatcacagcgaactggaaaaatatgagcaggcatgtaacgagttcaccactcatgtgatgaatctcctgagagagcagtcacgcacaagacccgtggcccctaaggagatggagcgtatggtaagcataatccacagaaagttctccgctattcaaatgcaacttaaacagtcgacctgcgaagccgtgatgattctcaggagccgcttccttgacgctagaaggaaaagacgcaacttttcaaagcaggcaaccgaggtgcttaacgaatacttctatagccacctgtccaatccctacccatctgaagaggccaaggaagagctcgctaagaagtgcgggatcaccgtgagtcaagtgtccaactggtttggcaacaagaggatcagatacaaaaagaatattggtaagttccaggaagaggccaatatctacgctgtcaagactgcagtgtccgtgacccagggaggacacagccgaacgtcatctcccaccccaccctcttccgccggatcaggaggttcctttaacttaagcgggagcggtgacatgttccttggtatgcccggactgaatggcgattcatactccgcaagccaggtagaatccttgcggcactcaatggggccaggcggttatggcgataatctaggagggggacagatgtatagccctcgggaaatgcgggctaatggcagctggcaggaggctgtgacaccttcaagcgttacgtcccccactgaagggccaggctccgtacactctgacacctccaactag

SEQ ID NO: 235888 - DNA, 1293 bp, synthetic construct
  misc_feature 1..1293: note = Description of Artificial Sequence: Synthetic coding sequence
  source 1..1293: mol_type = other DNA
atggacgagagactgttgggacccccacctcctgggggaggcagaggcggactggggctggtgtcaggtgagcctggcggaccaggggaaccgcctgggggaggggatccgggaggtggatccggcggtgtacccggaggaagaggtaagcaagacataggcgatattctacaacaaattatgaccattaccgatcaatctctggatgaagcccaggctaagaaacatgctctcaattgccacagaatgaagcccgctctgttctctgtgctgtgcgaaattaaagaaaaaacaggactgtctattcggagctcccaggaagaagaaccagtggatccacagttgatgaggttggacaacatgctgttggccgaaggcgtcgcgggtcccgaaaagggcggaggcagcgctgccgcagccgctgccgctgcagcctccgggggtggcgtgagcccagacaactcaatcgagcactctgactaccgaagcaaactagcacagatccgccacatctaccacagtgagctggaaaagtatgaacaggcttgtaatgagttcacaacccacgtgatgaacctgctccgggagcagagccgtacccgcccagtggcccctaaggagatggagcgaatggtctcaattatccataggaaatttagcgccattcagatgcagctgaaacaatccacatgcgaagcagtcatgattttacggtcgaggttcttggatgctcggcgtaagcgcagaaacttttcgaagcaggccacagaagtgctgaacgagtacttttacagtcacctgtccaatccttatcctagcgaggaggccaaggaggagctcgcaaaaaaatgtggtatcaccgtctcacaggtgagtaactggtttggcaataaaaggatacggtataaaaagaatattgggaagttccaggaagaagcaaatatctatgccgtaaagacagcggtctccgtgacccaaggaggacatagtcgtacgagttcccctacgcccccatccagcgcaggctctggaggcagttttaacctttccggtagtggcgacatgttcctgggtatgcccggtttgaatggggactcttactctgcttctcaggtggagagtttacgacacagtatggggccaggtgggtacggggataatctcggaggaggccagatgtactctcccagggagatgagagctaacggatcctggcaggaagcagtcacaccatcttccgtgaccagtcccaccgagggccctgggagtgtccattctgacacgagcaactag

SEQ ID NO: 235889 - DNA, 1293 bp, synthetic construct
  misc_feature 1..1293: note = Description of Artificial Sequence: Synthetic coding sequence
  source 1..1293: mol_type = other DNA
atggatgaacggctcctcggtccccctccccctggcggaggcagggggggtctggggctggttagtggcgaacccggaggaccaggcgagccccctggcggaggcgatcctggaggcggttctggcggagtgcctggcggacggggaaaacaagacattggcgacattttgcagcagatcatgacaatcacagaccagtctctggacgaagcacaagcgaaaaaacatgctctgaattgccaccggatgaaaccagccttgttttcagtgctgtgtgagattaaggaaaagaccggactttctattaggtcctcacaggaagaagagcctgtggatcctcagctcatgcgattagacaatatgcttttggctgagggtgtggccggtcctgaaaaagggggagggagcgcagccgcagcagcagcggcagctgcatccggcggaggcgtgagcccggataattccattgagcattctgattatagatctaagctggcccagatcagacacatttaccactccgaactcgaaaagtatgagcaggcctgtaacgaatttaccacacatgtgatgaacctactaagggagcaatcccggacacggccagtggctcctaaagaaatggaacgcatggtgtctatcatacatcggaaatttagtgctatacagatgcagctcaaacagagtacctgcgaagcagtgatgatcctgagatccaggttcctggatgctcggcgaaagagacgaaatttttccaagcaggccaccgaggtcctcaatgagtatttctattcccatttaagtaatccataccccagcgaggaagcaaaggaagagctcgccaagaagtgtgggataaccgtgagccaggtgtccaactggttcggcaataagcggatacggtacaaaaaaaatatcggcaaatttcaggaggaagctaatatctatgccgtgaagacagccgtaagcgttacgcaagggggacacagtaggacgtcttcacccacgccccctagctctgcaggctctggcggttccttcaatctgtcgggatcaggcgatatgttcctcggaatgcccggattgaacggcgattcctattctgcctctcaggttgagtctctccgccatagtatgggacccggaggttacggtgacaacttaggaggcggacagatgtactcaccccgagaaatgagagccaatggctcttggcaggaagctgtgactccctcgagtgtgacttctccaacagagggcccaggatccgtccatagcgatactagcaactag

SEQ ID NO: 235890 - DNA, 1293 bp, synthetic construct
  misc_feature 1..1293: note = Description of Artificial Sequence: Synthetic coding sequence
  source 1..1293: mol_type = other DNA
atggacgaacgcctgttggggcctcctcctcctgggggaggaagggggggactaggactggtctcaggagaacctgggggtccgggagagccacctggagggggagatcccggtggagggtctggaggtgtcccgggaggaagaggcaagcaggatattggagacatcttgcagcagattatgacaatcaccgatcagtccctcgatgaggcccaggcaaaaaaacacgccctgaactgccaccgcatgaagccggctctattctcggtgttatgtgagattaaggaaaaaacaggactctcaattcgcagcagccaggaagaggagccggttgatccacaactcatgagactggataatatgttgctagccgaaggcgtggctgggcctgagaaaggcggaggtagtgccgcagctgcagccgcagcagcagcctctgggggaggcgtcagcccggataacagcatcgagcattcagactatcgatcaaaattggctcagataaggcatatctaccattccgaattagagaaatacgaacaggcatgcaacgagttcacaacccacgtgatgaatcttctgcgggagcagagcagaactcggcctgtggctcctaaggagatggagcggatggtaagcatcatccacaggaagttcagcgccatccaaatgcaactgaaacagagtacctgcgaggcagttatgatcctgcggtctagatttttggacgctaggcgaaagcggaggaacttctcaaagcaagctactgaagtactgaatgagtacttctattcacatctgagtaatccttacccaagtgaggaggctaaagaagagttggcgaaaaaatgcggtatcacagtgagtcaggtgagtaattggtttggcaataaaaggatccgctataagaaaaacatcgggaaattccaggaggaggccaacatttacgccgtcaaaactgccgtgagcgtaactcaagggggacactcccgcacctcttcgccgaccccccctagcagcgctggttctggcggatcctttaaccttagcggctcaggcgatatgtttctcgggatgccaggtctgaatggcgatagctacagcgcatcccaagttgaatcactgaggcactccatggggccaggtgggtacggcgacaaccttggaggcggtcagatgtattcccccagggagatgcgagccaacggcagctggcaggaggccgtgactcccagttcggtgacatcccccactgagggtccgggaagtgtgcatagcgacacttctaactag

SEQ ID NO: 235891 - DNA, 1293 bp, synthetic construct
  misc_feature 1..1293: note = Description of Artificial Sequence: Synthetic coding sequence
  source 1..1293: mol_type = other DNA
atggacgagcgcctgctgggaccccctccacctggcggtgggaggggcggtcttggcctggtatctggcgagccagggggacctggggaaccacctggtgggggtgacccaggcggaggctccgggggtgtccctgggggacggggtaaacaggatataggagacatcttgcagcagatcatgactatcacggaccagtcattggatgaggcccaggctaaaaagcatgcacttaattgtcatcggatgaagccggcactgttctcagtgttgtgtgaaattaaggaaaagacggggttgagcattcggagctcccaggaggaggaacctgtcgaccctcagctgatgcgcctcgacaacatgttgctcgcagagggggtggccggaccagagaagggcggaggcagcgccgctgctgcagccgcagccgctgcgagcggcggaggagtgtctcctgataactctatcgagcattcggattacaggtcaaagctggctcagattaggcacatctaccatagtgagcttgagaaatatgagcaggcctgtaatgagtttacaacccacgtaatgaacctgctgcgtgagcagagcaggactagacctgtggcccctaaagaaatggagagaatggtctcgatcatccataggaagttttccgccatccaaatgcagttaaaacaatccacttgcgaagccgtgatgatattacggtcccgcttcctcgatgctaggcgcaaacggagaaattttagcaagcaggcaaccgaggtgcttaatgagtacttctactcccacctctctaatccatatccctccgaggaggctaaggaggaattggcaaaaaaatgtggaatcacagtgtcacaggtctccaattggtttggcaacaagagaatcaggtataagaagaatataggaaaatttcaggaggaagccaacatctacgccgttaagaccgccgtgtccgtgacccaaggtggtcactcaaggacctcgtccccaacacccccatcctctgctgggagtggaggctccttcaatctcagtggatcaggggatatgttcctgggcatgcctggcctcaatggggactcctattccgcctcacaggtcgaaagtttgaggcactcaatggggccagggggatatggcgacaacttaggcggtggtcaaatgtactcccctagggagatgagggcgaatgggtcctggcaggaggccgtcaccccgtcatccgtcacgtcgcctactgagggccctggcagcgttcacagtgatacatcaaattag

SEQ ID NO: 235892 - DNA, 1293 bp, synthetic construct
  misc_feature 1..1293: note = Description of Artificial Sequence: Synthetic coding sequence
  source 1..1293: mol_type = other DNA
atggatgagcgcctcctcggcccaccccctccaggtggaggtagagggggactcgggctcgtttccggtgaacccggagggcctggtgagcctccgggtggcggagacccaggaggagggagtggtggggtgccagggggtagaggcaaacaagatattggagacatactccaacaaatcatgacaatcacagatcagagtttggatgaggcacaggccaagaaacacgcccttaattgtcaccgtatgaaacccgcactgtttagtgtgctgtgcgagattaaggagaaaacaggactctccatccgaagctcccaagaagaagagcctgttgatcctcagctaatgcggttagacaacatgctcctggctgagggagtggcgggaccggaaaaaggaggagggagtgctgccgcagctgcagccgctgcagcctcagggggaggcgtttccccggataactctattgagcacagcgactacagatctaaactggcacagattcggcatatctaccacagcgagctggaaaagtacgagcaggcctgtaatgaattcaccacccacgtcatgaacctgctgagagagcaaagccgcacgagacccgtggcacctaaagaaatggaacggatggtcagtatcatccaccggaagttctcagcaatacagatgcagctgaaacagtccacatgtgaggcggtgatgattctgcgctccagatttttggatgcgcgtcgtaaacgcaggaatttcagtaagcaggccacggaagtgttgaacgaatatttctactcacatctctcaaacccctacccctccgaagaggccaaggaggagctggccaagaaatgtggaataacggtgtcgcaagtgtccaactggttcggcaataaaaggatccgctataagaagaacattggcaaatttcaggaagaagcaaacatatacgccgtgaaaactgctgtgtctgtcactcaggggggtcactcacgcacttcgagccccacgccgccatcctccgcaggcagcgggggaagctttaacctgagcggctccggggatatgtttttaggtatgcctggactgaacggggattcttacagtgccagccaagtagaaagtctccggcacagcatggggccaggaggatacggagataatctcggcggagggcagatgtattccccacgcgagatgcgagctaacggctcatggcaggaagctgtgaccccgagttccgtcacctctcctacggagggacccggatctgtgcatagtgatacatctaactag

SEQ ID NO: 235893 - DNA, 1392 bp, synthetic construct
  misc_feature 1..1392: note = Description of Artificial Sequence: Synthetic coding sequence
  source 1..1392: mol_type = other DNA
atggatgaaaggctgcttggccctccacccccagggggtggcagaggcggactcggcctcgtgtccggcgagcccggaggaccaggtgagccgccaggcggtggcgaccctggcggtggttcaggaggggttccagggggaaggggtaaacaggacatcggcgatatactgcagcagatcatgactattaccgatcaaagcctggacgaagctcaggctaagaagcatgcgctcaactgtcaccgaatgaagccagctttattttcagttctgtgtgaaatcaaagaaaagactggtctttccatcaggtcttctcaggaggaagagccagtggacccacaactaatgaggctcgataatatgctgttggccgaaggtgtggcagggcctgaaaaggggggaggatcagcagctgccgcagctgcggctgcagcgtccggcggaggagttagtcccgataactcaatagagcactcggattatcgcagcaaactggcacagattcgacatatctaccacagtgagctggagaagtatgagcaggcgtgtaacgagttcaccactcatgtaatgaacctgcttagagagcagtcgaggactcggccagtggccccaaaagaaatggagcggatggtatccataatccaccggaaattttcggccatccagatgcaactgaagcagagcacctgtgaggctgtgatgatcttgaggtctcgcttcctggacgcaagacggaaaagacgcaacttttccaagcaggccaccgaggtactaaatgaatacttttacagccatttgtccaacccctatccatctgaagaagcgaaggaagaattggctaagaaatgcggaatcactgtgagtcaagtcctgtggagactccgggaggagctgtccggcaaggtgcatgccagccagctaggagccgtggtaagtaattggtttgggaataagagaattaggtataagaagaacattggcaagttccaggaggaagccaatatttacgctgtaaagacagctgtcatcattgctgagcgaggcccttttggggtgcgaggcaccgagctgtccttgccctctctcccaccccagggcagcggcggaagcttcaatctgagcggctccggggacatgtttctgggtatgcctggcttgaatggcgattcgtattccgcgtcacaggtaagatgtccgagtcccctacaggtggaatctttaagacactcaatgggccctggcggatacggggacaacctggggggtgggcagatgtacagtccacgggagatgcgagcaaacggaagctggcaggaggccgtgaccccctcaagcgtaacatctcctaccgaaggcccagggtctgttcactccgacacttccaattag

SEQ ID NO: 235894 - DNA, 1392 bp, synthetic construct
  misc_feature 1..1392: note = Description of Artificial Sequence: Synthetic coding sequence
  source 1..1392: mol_type = other DNA
atggatgaacgcctgctcggtcccccacctcccggagggggacgcggtggcctgggactggtatcaggagagcctggtggacctggcgagccccctggaggaggagatcctggtgggggaagcgggggtgttcctgggggtcgcggtaagcaagatattggagatattctacagcagattatgactataacagatcaaagtctggatgaagcccaggccaaaaaacacgccctgaattgtcacaggatgaaacctgctctgttcagcgtgttatgtgaaatcaaggagaagacaggcttgtcaattcgttcatcccaagaggaagaacctgtagacccccagttgatgcgcctggacaacatgctccttgcggagggcgtggccggacccgagaagggtggtggcagcgcagccgctgccgcagccgctgcagcctctggagggggagtgagtcccgataacagcattgaacactccgactaccgctccaaactcgcgcagattcgtcacatctatcactctgagcttgaaaaatatgagcaggcttgcaatgagtttacgacacatgtcatgaatcttcttagagagcaatcccgcacaaggccagttgcccctaaagaaatggaaagaatggtgtctatcatacatcgtaagtttagcgcaattcagatgcagctgaagcagtctacctgtgaggcagtcatgatattgaggtccaggttcctcgacgcgcgtagaaagagaagaaactttagtaagcaggcaaccgaggtgctgaacgaatacttttacagccacctttccaacccctacccatcagaagaggctaaggaagaacttgccaagaagtgcgggattaccgtcagtcaggtgctatggcgtctgagggaggagttgtctggtaaggtgcatgcgagccagctgggggctgttgtgtcgaactggttcggcaacaaaaggatcagatataagaaaaacatagggaagtttcaagaggaggctaacatttacgcggtgaagacagccgtcataattgccgaacggggaccttttggcgtgcgaggcacagaactgtcgctgcctagcctgccaccgcagggatcaggcggtagctttaaccttagtggttctggcgatatgtttttaggcatgcctggactaaatggtgactcttactcagctagtcaggtacgatgcccctcacctttgcaggttgagtcactcagacattccatgggaccaggcggatacggtgacaatctgggcggtggacagatgtactcaccccgagagatgcgcgctaatggatcctggcaggaagcagttaccccaagcagcgttacaagtcctactgaaggtccagggagtgtgcattcagatacctccaattag

SEQ ID NO: 235895 - DNA, 1317 bp, synthetic construct
  misc_feature 1..1317: note = Description of Artificial Sequence: Synthetic coding sequence
  source 1..1317: mol_type = other DNA
atggacgaacgactcctcggtccaccccctcccggtggcggaaggggtgggctaggcctcgtctccggcgaacccggtggcccaggcgagccgcctggagggggagacccgggaggaggatccgggggtgtgcctggtggacggggtaaacaggacattggcgatatcctgcaacagatcatgaccatcaccgaccaaagtttggacgaggcacaggcaaaaaagcacgcacttaactgccatagaatgaaacctgccctattcagcgtcctttgtgaaatcaaagagaagacagggctgtccattaggagcagccaggaggaggaacccgtggatccccagctgatgagactagacaacatgttacttgctgaaggcgtggccggaccagaaaaaggcggagggagcgctgcagccgcagcagccgctgcagcgagtggagggggtgtctcccccgacaattctatcgagcattctgactaccggagcaaactggcgcaaataaggcacatctatcacagcgaactcgaaaagtacgagcaggcatgcaatgagtttacaacgcacgtgatgaacctgttgcgggaacagagccgcacccgtcccgtcgcccctaaagaaatggaaaggatggtgagcatcatacataggaagtttagcgccatccagatgcagctgaagcaaagtacctgcgaggccgtgatgatcctgcggagcagattcttggacgctagaagaaaaagaaggaacttttccaaacaagcaactgaagtgctcaacgagtacttttactcacacctttctaacccttacccctcagaagaagcgaaagaggaattggccaaaaagtgcgggattactgtgtcccaggtttccaattggtttggtaacaagcgcatccgctataagaaaaacattggtaaatttcaggaggaagccaatatctacgcagtcaaaaccgccgtatctgttacccagggagggcatagtcggacttctagtcctactcctccctcttctgccggatctggaggctcttttaaccttagcggctccggcgacatgtttttaggaatgcccggtctgaacggcgatagttattcagctagccaagtgaggtgccccagccctctgcaggtggagtctcttagacacagcatgggccctggtgggtatggcgacaacctggggggtggacagatgtatagcccaagggagatgcgcgctaacgggtcctggcaggaggctgtcactccctcatctgttacatctcccactgagggtcccggtagtgtgcactccgatacctcgaattag

SEQ ID NO: 235896 - DNA, 1317 bp, synthetic construct
  misc_feature 1..1317: note = Description of Artificial Sequence: Synthetic coding sequence
  source 1..1317: mol_type = other DNA
atggatgaacgcctcttgggtcctcctcccccaggcggtggaagaggagggctgggactggtgtctggggagcccggaggacccggagagccacccggaggcggagatcctgggggtggaagtggcggagtgcccggtggacggggaaaacaggacatcggcgacatactacagcagatcatgactattacggatcagtccttggacgaggcacaggcgaaaaagcacgccctgaactgccatcgaatgaaaccagccctgttttccgtcctgtgcgagattaaggagaagaccggactgtcaattcgaagttcgcaggaggaggaacctgttgatccacagctgatgcgcctcgataatatgctgctggcagaaggcgtcgctgggcctgaaaaaggaggtggcagtgcagctgcagcggcagccgctgcagccagcggcggtggggtctccccagacaactcaatcgaacatagtgactataggagcaagcttgcacagataagacacatttatcattccgagctggagaaatacgagcaagcctgcaacgagtttaccactcacgttatgaatttactgcgtgaacagagccgcaccaggcccgttgctccgaaggagatggagcgcatggtcagcatcattcaccgcaagttcagcgccatccaaatgcagctgaagcagagcacctgcgaagcagtgatgatcttacgctctcggtttctggatgcccgacgaaaacggcgaaatttttctaagcaggctacggaggtccttaacgaatacttttactctcacctgtccaacccatacccttctgaagaagctaaagaagagctggcgaagaagtgtggcatcacagttagtcaggtgtctaactggttcggaaataagagaattaggtataagaagaacatcggtaagtttcaggaggaggctaacatatacgccgtgaaaaccgcagtctccgtgacccagggcggtcattccaggactagtagtcctacacctccaagctcggccggatccggtggttctttcaacctcagtggttccggcgacatgtttttgggcatgcctggcttgaacggagacagctatagcgccagtcaggtcagatgtccttcgccactgcaggtagaaagcttgaggcattccatgggaccaggagggtacggcgacaacctgggaggtggccagatgtactcaccacgtgaaatgagagctaatggttcctggcaggaagccgtgaccccatcaagtgtgacatctccgaccgaaggccctgggtcagtgcacagtgatactagcaattag

SEQ ID NO: 235897 - DNA, 1392 bp, synthetic construct
  misc_feature 1..1392: note = Description of Artificial Sequence: Synthetic coding sequence
  source 1..1392: mol_type = other DNA
atggacgagagactcttgggccctcccccacctgggggagggcgtgggggactgggattggtttctggggaacctggaggcccaggggagccacccggtggcggtgatcctggaggcggttccgggggtgtcccgggtggacggggaaagcaggacattggagacattctgcagcaaattatgacaattactgaccagtctctggatgaggcccaggcgaaaaagcacgccctgaattgtcacaggatgaagccagccttgttcagtgtcctgtgtgagatcaaagaaaagacaggactgtcaatacgttcatcacaagaggaggagcccgtggatccgcaactcatgcgacttgacaacatgttacttgctgaaggggtggcaggacccgaaaagggtggcggatctgcagcagccgctgccgctgctgctgcttctgggggaggggtgagcccagataatagcattgaacactctgactaccggagtaaactggctcagatccggcatatctatcactcagagctggaaaagtacgaacaggcatgcaacgagttcaccacgcatgtgatgaatctgctgcgagagcaatctcgtacccgccctgttgctcctaaggagatggagcggatggtcagcatcatccaccgcaagttttctgccattcaaatgcagctgaagcagtcgacttgtgaagctgtgatgatcttgaggtctcgctttcttgacgccaggcgcaagcggagaaacttctctaagcaagccaccgaggtgctgaatgaatatttttacagccacctgtccaacccatatcccagtgaggaggctaaagaagagctggccaagaagtgcggcatcacagtgtctcaagtcctttggaggttgcgcgaggagctttccgggaaggtgcatgcttcccagctgggggctgtcgtcagcaactggttcgggaataaacggattcgctataaaaagaacattggtaaatttcaagaagaggctaacatctacgctgtcaaaactgcagttataatcgcagagagggggccattcggcgtacgaggcaccgaactgtcactgccatcactgccaccccaaggatctggaggcagcttcaatttatctggaagcggcgacatgttcttaggtatgcctggattgaatggggatagctatagcgctagccaggtccgctgccctagtcccctccaagttgagtccctccgacactccatggggcctggcggttatggagataaccttggtggcggacagatgtactcacctagggagatgagagcaaacggcagttggcaggaggcagtcacaccatcctccgtgacatcgcccacggaagggcctggttctgtgcacagcgacacatctaattag

SEQ ID NO: 235898 - DNA, 1392 bp, synthetic construct
  misc_feature 1..1392: note = Description of Artificial Sequence: Synthetic coding sequence
  source 1..1392: mol_type = other DNA
atggatgaacgtctgctgggacctccgccacctgggggtggacgtggaggactgggccttgtatccggggaaccgggaggacccggtgaacctcctggaggcggagaccccggtggcggttccggcggtgttccgggaggcagagggaagcaggatataggagacatattgcaacagatcatgacgatcacggaccagagcctcgatgaagcccaggctaagaagcacgctctgaactgccaccgcatgaaacctgctttgttcagtgtgttgtgtgagattaaggagaaaaccggtctgtcaattcggagttctcaggaggaggaacctgtagaccctcagttgatgcggctggacaatatgctcctcgccgagggcgttgccggaccggagaagggcggaggctctgccgctgctgctgccgctgctgcagcgtctggcggaggcgtctccccagataattccatcgagcattctgattatagatcaaaactcgctcagattcggcacatataccactccgagttggaaaaatatgagcaggcctgcaacgagttcaccacccacgtgatgaatctgcttagagagcagtcaaggacccggcctgtcgctccaaaggagatggagagaatggtgagcataatacatcgtaagttttcagctatacagatgcagctgaaacaatcaacatgtgaagccgtgatgatcctacgatctcgatttctagacgctcggcgtaagcggaggaactttagcaagcaggccaccgaggttctgaacgaatatttttactctcatttgagcaatccctacccgtccgaggaagccaaagaagagctagctaagaagtgtggaatcacggtgagtcaggttctgtggaggcttcgcgaagaactcagcggcaaggtccacgccagccagcttggggcagttgttagcaactggttcgggaacaagcgaattaggtacaagaagaacattggcaagttccaggaggaggcaaatatatatgcagttaagaccgcagtgataatcgctgaaaggggtcctttcggggtgagaggcactgaactatctctgcctagtcttccaccccaaggttccggagggtccttcaatttgagcggcagtggggacatgtttctgggtatgccaggcctcaatggcgattcgtactccgcatcccaggttcgttgcccttcgcccttgcaggttgagtctttacggcattccatgggtcccggagggtacggcgacaacctgggcggaggacagatgtacagtccccgagagatgagagctaatggtagctggcaagaagcggtgactccctccagtgtgaccagtcctacagaaggcccaggctctgtgcacagtgacaccagtaactag

SEQ ID NO: 235899 - DNA, 1332 bp, synthetic construct
  misc_feature 1..1332: note = Description of Artificial Sequence: Synthetic coding sequence
  source 1..1332: mol_type = other DNA
ggcgcagaacaggggggtggcctgcgcgctccgcctcaactgtggacaaacggctactggggacgcccactgcaggccggagcgggtggcctggggcttgtttctggcgaaccaggtggacccggagagccacccggtggcggtgatcccggtggaggcagcggtggcgtgcctggcggaaggggaaaacaggatataggcgatatcctgcagcaaattatgaccatcaccgaccaaagcctcgatgaggcccaggcaaaaaaacacgcgctcaattgtcataggatgaaacctgccttgttctccgtgctctgcgagattaaagaaaagaccggcctgtctataaggtcaagccaggaggaggaacccgtggacccccagctgatgaggctggataatatgttactcgcagagggggtggccggacctgaaaaaggaggcggatctgcggcagctgcggcagctgctgcagcaagcggtgggggtgtgtctcccgacaattctatcgagcattcggattatcggtcaaaactggcccagattcggcatatatatcacagcgagctggagaagtacgaacaggcatgtaatgaatttacaacccacgtgatgaatcttctccgggaacagtctcgcactaggccggtggccccaaaggaaatggagagaatggtgtccattatccataggaaattcagcgcgatacagatgcaattaaaacaatctacttgcgaagccgtgatgatactgagatcgcgtttcctggatgcccgtcggaaacgcagaaatttctccaaacaggccaccgaagtcttaaatgagtatttctacagccatctctctaatccttatccgtccgaagaggccaaagaggagctcgcaaagaaatgcggcatcactgtttctcaggtcagcaattggttcgggaataaaaggatccgttacaagaaaaatattggcaagttccaagaagaagccaacatctacgcagtgaagaccgcagtgtctgtgacccagggcggacacagccggacctcttcccctaccccaccgagctccgccggatcaggcggatcgtttaatcttagtggcagcggggatatgttcttgggcatgcccggtctgaatggtgatagttacagtgcctcgcaggtcgaaagcctgcgccattccatggggccaggcggatacggtgataacctcgggggagggcagatgtattcccccagagaaatgagggccaacggttcctggcaggaggctgtgacaccctccagtgtcactagtcctacggaagggcctgggagcgtccatagcgacacatccaattag

SEQ ID NO: 235900 - DNA, 1332 bp, synthetic construct
  misc_feature 1..1332: note = Description of Artificial Sequence: Synthetic coding sequence
  source 1..1332: mol_type = other DNA
ggtgccgagcagggtggcggactccgggcaccgccacagttatggacaaatggctattggggcagacccctgcaggcgggtgccggtggcttgggccttgtgagtggggaacccggtggccctggcgagccacctggcggaggcgaccccggaggaggttccggtggagtccctggcggaaggggtaaacaagacattggcgacatccttcaacagatcatgactatcaccgatcaaagccttgacgaagcacaggctaaaaagcatgcgctgaattgccacaggatgaagcccgcactgttttctgtgctgtgcgaaatcaaagagaaaaccggcctctctatcaggagcagtcaagaggaagagcctgtggatcctcagttaatgagacttgacaacatgctgctggctgaaggagttgcaggaccagagaaggggggaggatctgccgctgcagccgctgccgctgccgcaagtgggggaggcgtgagtcctgataacagtattgagcactctgattacagatcaaagctggcccaaatccgccacatatatcattcagagcttgagaagtacgaacaggcatgcaatgaattcacaacacatgtgatgaacctgctgcgtgagcagagccgaacacggcctgtggcacccaaagagatggaaagaatggtgagcatcatccatagaaagttctccgccattcagatgcaattaaaacagagcacctgcgaggccgtgatgattctgagaagtagatttctggatgccaggaggaagagaagaaactttagcaagcaggccactgaggtgctgaacgaatacttttactcgcatctgtcaaatccttaccccagcgaagaggccaaggaagaactggccaaaaagtgcgggattactgtgtcacaagtgagcaactggtttggtaacaaaagaattcgatacaaaaaaaacataggcaaattccaggaggaggccaatatttatgcagtgaagacagccgtctcagtgacacagggcggacactctcgtacttccagcccgactccaccttcaagcgccggaagcggagggagttttaatctttctggatcaggagatatgttccttggaatgccaggactgaacggggacagctactctgcaagtcaagtcgaatctctcaggcatagcatgggacctggcggatacggagacaaccttgggggaggacagatgtactctccacgtgagatgcgagctaacggctcatggcaagaggccgtaaccccatcctccgtcacttcgcccaccgaaggcccaggttctgtccacagcgacacatccaattag

SEQ ID NO: 235901 - DNA, 1317 bp, synthetic construct
  misc_feature 1..1317: note = Description of Artificial Sequence: Synthetic coding sequence
  source 1..1317: mol_type = other DNA
atggacgagcgcctgcttggcccaccccctcccggtggcggacgcggtggccttggcctcgtctccggtgagcctggtggcccaggtgagccacccggtggtggggacccgggaggtggaagcgggggagtgcccggaggcagaggaaaacaggatattggcgatattctccagcagattatgacaataaccgatcagagtctcgatgaagcacaggcgaagaagcacgccctcaattgccatcgaatgaagcctgctctgttttccgttctatgtgagataaaggaaaagaccggcctctccatcaggtctagtcaggaggaggagccggtcgaccctcagcttatgcgacttgataacatgctgttagcagagggcgtagcgggtcccgagaaaggtgggggaagtgccgcagccgctgccgcagccgctgcctctgggggaggcgtgtcgccagacaactctattgaacatagcgattaccgctccaagttggctcagatacgccacatttatcactcggagctagagaagtatgaacaagcatgtaacgagtttacaacgcacgtgatgaacttgctccgggagcagtcccgaacgcgtcccgtggctcctaaagagatggagagaatggtgtctatcattcaccgcaagttttccgcaattcagatgcaactcaaacaatcgacgtgtgaggcagtgatgattctgcgatcccgctttctggacgcaaggcgcaaaaggagaaactttagcaagcaggcgaccgaggtcctgaacgagtacttctactcacacctgtccaacccctatccttcagaagaagcaaaggaggaactcgcgaagaaatgtggcatcaccgtgagccaggtgagcaactggtttggtaacaagcggattcgctataagaagaatattgggaaattccaggaagaagccaatatctacgcagttaagacagccgtttctgtgacacaaggcggtcattcaagaaccagtagcccgacaccaccttcgtccgccggatccgggggaagctttaatctgtctggctctggagacatgttcctgggtatgcctgggctgaatggggacagttactccgccagccaagttagatgtccctcacctttgcaggtggaaagcctgcgtcactcaatggggcctggtggatacggtgataatctgggcggtgggcagatgtactcccctcgcgagatgcgtgccaacggcagctggcaagaggcggttaccccatcctcagtgacatcacccacagaaggtccagggtccgtccattcggataccagcaactag

SEQ ID NO: 235902 - DNA, 1380 bp, synthetic construct
  misc_feature 1..1380: note = Description of Artificial Sequence: Synthetic coding sequence
  source 1..1380: mol_type = other DNA
atggacgaaagactgttgggacctccgccaccgggaggcggtagaggcggactgggactcgtaagcggcgagcccggtggtccaggcgagccccctggcggaggagaccccggaggtggcagcggaggggtgcctggcggtcgtggaaagcaggatatcggagatattctgcagcaaatcatgaccatcaccgaccaaagcttggacgaggcgcaggctaagaagcacgcattaaactgccacaggatgaaaccagctctattttccgtactttgcgagattaaggagaaaacgggtctgtccatcagaagctcccaggaagaggagcccgtcgatccccagctgatgcgactggataacatgctcctggctgagggcgtcgccggacctgaaaagggaggaggttccgcagctgccgcagccgcagctgcagcatctggcggtggagtctcccctgataactccatcgagcatagcgattacagatcaaagctggcacaaataaggcatatctaccatagcgagttggagaagtatgaacaggcctgtaacgagtttactacacacgtcatgaaccttctgagggagcagagccggactaggccagttgcgcctaaagagatggaacgaatggtcagtatcatccacaggaaattctccgccatccagatgcagttgaaacaatctacatgcgaggccgtgatgatactgagatcccggttcctcgatgccaggcgcaaacgtagaaacttctcgaaacaggccacagaggtgctgaacgagtacttctattctcatttgagtaatccatacccttccgaagaagccaaagaggaacttgctaaaaagtgcgggatcacggtcagccaagtgctctggagattaagggaagaactgtctgggaaagttcacgctagtcaactcggtgccgtcgtgagcaactggttcggcaataagcggatccgctacaagaagaatattgggaaattccaagaggaggccaacatctacgctgtgaaaacagcagttagcgttacacagggaggacactctaggaccagttcgcccacacccccttcatctgcgggaagcggaggttcattcaacctgagtgggagcggagatatgttcctgggcatgccgggactaaatggcgatagttacagtgcaagtcaagtgcggtgtccgagccctcttcaggtcgaaagcttgaggcactccatggggcctgggggatatggcgacaatcttggcggtgggcaaatgtacagcccacgcgagatgagagcgaatggctcttggcaggaggcagtaaccccgagtagtgtgacttctccgactgagggcccaggtagcgtgcactcagatacatcgaactag

SEQ ID NO: 235903 - DNA, 1332 bp, synthetic construct
  misc_feature 1..1332: note = Description of Artificial Sequence: Synthetic coding sequence
  source 1..1332: mol_type = other DNA
ggtgctgagcagggagggggactaagagcccctccccagctatggaccaacggctactggggcagaccattgcaagcgggagccggaggtctgggcctcgtgagtggtgagcctggaggccctggtgagccccctggcggtggtgatccaggaggcggtagcggcggagtgccaggagggaggggaaagcaggatattggcgatattctccagcagatcatgaccattaccgaccaatcgctggatgaagctcaagcaaagaagcatgccttaaactgtcatcgaatgaagcctgccctattcagtgtcctctgcgagattaaggagaaaactggactatcgatcaggagtagccaggaggaggagcctgtggaccctcagttaatgaggctggataatatgctcttagccgaaggagtggccggacctgaaaaaggcggaggatcagcggctgcagctgccgctgccgctgcgagtggagggggtgtttcaccagataacagcatcgagcacagcgactatagatctaaacttgcacaaatccggcacatatatcactcagaacttgaaaagtatgagcaggcgtgcaacgagttcacaacacacgtgatgaatctcctccgcgaacaatctaggaccaggcccgtggctccaaaagaaatggaaagaatggtgtctatcattcaccgaaagttctctgctatccagatgcagttgaagcagagtacctgtgaagccgtgatgatccttagatcccgatttctcgatgcacgcagaaaacgccgtaacttctcaaaacaggcgaccgaagtgttaaacgagtatttctacagccacctctccaacccttaccctagtgaggaggccaaagaggaactagccaagaagtgtggcatcaccgtaagtcaggtgtcaaattggtttggtaataagaggattcgctacaagaagaatattgggaagtttcaggaggaagctaatatttatgccgtgaagactgctgtctccgtgacacagggagggcatagtaggacatcatcccccacccccccaagttctgccggttcgggcggttcttttaatctgagcggctcaggcgatatgtttctgggaatgcctgggctaaacggtgattcatacagcgctagtcaggtcgaatccctcaggcatagcatgggtccagggggttatggggataatctgggtggaggtcagatgtactcccctagagagatgagggcaaacggaagctggcaggaagcggtgacaccctcatcggtcacctcaccaactgagggaccagggtccgtgcactcagacacctctaattag

SEQ ID NO: 235904 - DNA, 1317 bp, synthetic construct
  misc_feature 1..1317: note = Description of Artificial Sequence: Synthetic coding sequence
  source 1..1317: mol_type = other DNA
atggatgagagacttcttggccctccacctcctgggggtggtcgcggtgggctggggctggtgtctggtgagccaggaggcccaggggaacctcccggagggggagatcctggtgggggtagcgggggagtgcccggtggacgcggtaaacaagacatcggggatatcctgcagcagattatgaccattaccgatcagtctctggatgaggcccaggcaaagaaacatgccctcaactgccatcggatgaagcctgcactcttctccgtactttgcgaaatcaaggagaagactggcctatccattcggtcgagccaggaggaggagcccgtagaccctcagcttatgcggctcgacaacatgctgctggctgaaggagtggcgggtcccgaaaaaggcggtgggagcgctgccgcagctgccgctgcggctgcttcagggggtggagttagcccagataatagtatcgagcattccgactaccggagtaaactggcccagattaggcatatataccactctgagctggagaaatatgaacaggcgtgcaatgagttcacgacacacgtgatgaatctcctgcgagagcagtctcgaactcggccagtggcacccaaggagatggagcgcatggtgtcaatcatacaccgaaagtttagcgcaatccaaatgcaactaaagcaaagtacatgcgaggctgtgatgatcttgaggtctaggtttcttgatgctaggcgcaagcggaggaatttcagcaagcaggctactgaagtgctaaacgagtacttctacagtcatctgagcaacccatatccttccgaggaggccaaggaagagctggcgaaaaagtgcggcatcacagtcagccaagtgtccaattggttcggcaacaagaggatcagatacaagaagaacatcgggaaattccaggaggaggcaaatatctacgccgtgaaaaccgcggtttctgttacccagggaggccacagtcgtaccagtagccctacccctccaagctccgccggatccggcggtagtttcaacttgtcgggcagtggcgatatgttcctgggcatgccaggccttaatggtgatagttatagcgctagccaggtgcggtgcccaagcccactgcaggtcgaatcactgcggcatagtatggggcctggaggctatggggacaatctaggcggagggcagatgtacagccccagagaaatgcgtgctaacggaagttggcaggaagcagttaccccaagctcagtgacatctccaaccgaaggtcctggttccgtgcacagcgataccagcaattag

SEQ ID NO: 235905 - DNA, 1317 bp, synthetic construct
  misc_feature 1..1317: note = Description of Artificial Sequence: Synthetic coding sequence
  source 1..1317: mol_type = other DNA
atggacgagaggttgctgggcccacccccacctggtggaggcaggggcggactcggactagtgtcaggagaacctgggggacctggagaaccccctgggggaggcgaccctggcggtgggagtggaggtgttcccggaggtcggggtaaacaggatatcggcgacattctgcagcagatcatgacaataacggaccagtctctggatgaggcccaggctaagaaacacgcgctgaactgccaccggatgaagcccgcacttttttctgtgctctgtgagatcaaggaaaaaacaggactgagcattcgctccagccaggaggaggagcctgtggatccccagctgatgaggctggataacatgctccttgccgaaggagtggccggtcccgagaaagggggaggctctgcggctgcagctgcagccgcagccgcaagcggtggtggggtttcacccgataattctattgagcacagtgactacaggtcaaagttagcccagattcgtcacatttatcactctgagctggaaaaatacgaacaggcctgtaacgagtttaccacccacgtgatgaacttactgagggagcagagtcggacccgacccgtcgccccaaaggagatggaacggatggtgtcaataattcaccggaaattcagcgccatacagatgcagctcaagcaaagtacctgtgaggctgtgatgatcctgcgaagcaggttccttgacgctagacgaaagagaagaaacttttcgaagcaagcaactgaggtgctgaatgagtatttttattcgcacctctcaaacccttatccatcggaggaagccaaggaggagttggccaaaaagtgcggtattactgtttcccaggtgtccaactggtttggcaacaagcgaattcgatataagaaaaacattgggaaattccaggaggaagcaaatatttacgccgtgaaaaccgctgtgtccgtcacccaggggggtcactctagaaccagttccccaacacctcctagttccgcaggcagcggcggaagcttcaatttatctggctcgggcgacatgttcttgggcatgcccggtctcaatggcgacagctacagtgccagccaggtgagatgtcctagccccctgcaagtcgagagtctgcgccactctatgggaccagggggttacggagacaatctcggtggtggccagatgtattctccccgtgagatgagggctaacgggagctggcaggaagccgtgactccctcttctgtgacctcacccactgaaggcccaggatctgttcacagcgatacgagcaactag

SEQ ID NO: 235906 - DNA, 1332 bp, synthetic construct
  misc_feature 1..1332: note = Description of Artificial Sequence: Synthetic coding sequence
  source 1..1332: mol_type = other DNA
ggagctgaacaggggggtggcctgcgggctcccccacaactctggactaacgggtactgggggaggcccttgcaggccggtgccggtggattgggattggtgtctggcgaacctggcggacccggagaacctcccggtggaggtgaccccggaggtgggagtggcggtgtgcctggagggagaggaaaacaggacatcggggacatcctccagcagatcatgaccatcaccgatcaaagtttagacgaagcccaggccaagaagcacgcacttaactgccatcgcatgaagcctgcgctgttctcagtgctgtgcgagatcaaagagaagactggactgtccattaggtcttcccaagaggaggagcccgtggacccccagctgatgcgcttggacaacatgttgctggccgagggggtggccggtccggagaaggggggaggttcagccgcagcagcggctgctgccgcagcctccgggggtggagtgagtccagataactccatcgaacatagtgactacagaagcaagctggctcagatcagacatatttaccactctgagctggagaaatacgagcaggcatgtaacgaattcacaacccatgtgatgaacttactgagagaacagtcacggacccgtccagttgccccaaaggaaatggagaggatggtatctataatccacaggaagttctctgcgattcagatgcagctgaagcagtctacatgtgaggctgtcatgatcctgaggtcccggtttttagacgccaggagaaagcgcagaaattttagtaaacaggctaccgaagtgcttaacgagtatttctacagccatctttccaacccctatccgtccgaggaagccaaagaggagctcgctaaaaaatgcgggatcacagtgtcccaggtgagtaactggttcggcaacaagaggatacgctataagaagaacatagggaaattccaggaagaagctaacatatatgccgtcaaaactgccgtgagcgttacccagggtgggcactcacggacctccagcccaacacctccaagcagcgcaggaagcgggggaagttttaacttgtctggatctggcgatatgttcctaggcatgccaggcctgaacggcgattcttacagcgcatcccaagtggagtccctaagacatagcatggggcctggcggatacggtgacaacctgggtgggggtcagatgtattcaccacgcgagatgagagctaacggcagttggcaggaggccgtgaccccatccagtgtaacgagccctactgaaggacctggctccgttcattcagacaccagtaattag

SEQ ID NO: 235907 - DNA, 1392 bp, synthetic construct
  misc_feature 1..1392: note = Description of Artificial Sequence: Synthetic coding sequence
  source 1..1392: mol_type = other DNA
atggacgagaggctgctcggcccaccgcctcccggagggggtcgcggaggcctggggctcgtgagcggtgaaccagggggtccaggagaacccccagggggaggcgaccccggaggaggctcaggcggagttccaggaggacgtggaaagcaggatataggggatatcctgcagcaaattatgaccatcactgatcaatctctggacgaggcacaggccaagaaacatgcgctcaactgccatagaatgaagccggcactgttttctgttctgtgtgagatcaaagagaagactggcttgagcatccgcagttctcaggaagaggagcccgttgacccccaactgatgaggttagataacatgctcctcgccgaaggggtggcagggccagagaaaggaggcggatcagcggctgccgctgccgctgccgctgcctctggcggtggcgtctccccagacaactctatcgaacactcggactacagatcgaaacttgcacagattaggcacatttaccattcggagctcgaaaaatatgaacaggcctgcaacgagttcacaacccatgtcatgaatcttttgagggaacagtcccggaccagacccgtggcccctaaggaaatggaacgaatggtaagcatcatccatcggaagttctctgccatccaaatgcaattaaaacagagtacctgcgaagcagtgatgattctcagaagccgtttcttggacgcaagaaggaaacggagaaattttagcaagcaggctactgaagttctcaatgaatatttttattcgcatctgtccaacccttatccatctgaagaagcgaaggaggaactcgccaaaaaatgcggcataaccgtgtctcaggttctatggcggctgcgggaggaactttctggcaaggtccatgcctcacagctgggcgctgtggtaagcaattggttcggcaacaaacgcatcaggtacaagaaaaacattgggaagttccaggaagaagcaaatatttatgccgtcaaaacagccgtaatcatagcagagcggggaccttttggtgtgaggggaaccgagctctcgcttccatctcttcctccacagggctcgggcggatcgtttaacttaagcggctctggcgatatgtttctcggcatgcctgggcttaatggggatagttattccgcctcccaagttcggtgtccatctcctctgcaggtggagtcactgagacattctatgggacctggcggatatggggacaatctaggcggaggccaaatgtacagtcccagggagatgcgggctaacgggtcctggcaggaagccgtaacccccagttctgtaacatcacccacggaaggacccggatccgttcattccgacacttccaattag

SEQ ID NO: 235908 - DNA, 1332 bp, synthetic construct
  misc_feature 1..1332: note = Description of Artificial Sequence: Synthetic coding sequence
  source 1..1332: mol_type = other DNA
ggcgctgagcagggtggaggccttcgagcaccacctcagctctggactaacgggtattggggcaggccactgcaggcgggagcgggtggactgggactggtgtctggtgagccaggaggccctggagaaccacctgggggaggggatcctggcggtggatccggaggtgtgccaggtggcaggggcaagcaggacataggcgatatccttcagcagatcatgaccattactgatcagtctctggatgaggcacaggccaaaaaacacgccttgaactgtcatcgaatgaagcctgcgctctttagcgtcctctgcgagattaaggagaagactggcctctctatacggagcagccaggaggaggagccagtcgatcctcagctcatgcgactggacaatatgctgctggcagagggagttgcaggacccgaaaaggggggtggctccgccgctgccgctgctgccgctgcagccagtggcggaggtgtgagtccggacaattcaatagagcacagcgattacagaagtaaattagctcagatcaggcatatctaccacagcgagctggagaaatacgagcaggcatgtaatgagtttacaacccacgtgatgaatctacttcgagagcagagcagaacacgacccgtcgccccaaaggagatggagcgcatggtcagtatcatccacaggaagttcagcgccattcagatgcagctgaaacagtctacttgtgaagctgtaatgattctgcggtctaggttcctggatgccagaaggaagcgtaggaatttttctaagcaggccaccgaggtcctgaacgaatatttctattctcatctgtctaacccctatccctctgaggaggccaaagaggaattggcaaaaaaatgcggcataacggtgtcacaagtctccaattggtttgggaataaaaggataaggtataaaaaaaatatcgggaaattccaggaagaggcaaatatctacgccgtgaagactgccgtatccgttacacagggcggacacagccggacatcttcacccacccctccatcttcagccggatctggtggatcttttaacttgagcggatcgggggatatgttccttggtatgcccggacttaatggcgacagttactcagccagtcaggtcgagagcttgcgccattcgatgggccctggtgggtatggggataacttaggtgggggtcagatgtactcgccccgagaaatgcgtgctaacggaagttggcaagaagctgtaacccctagctccgtcacgtcacctacagaggggcctggtagcgtgcacagcgacacatcgaattag

SEQ ID NO: 235909 - DNA, 1332 bp, synthetic construct
  misc_feature 1..1332: note = Description of Artificial Sequence: Synthetic coding sequence
  source 1..1332: mol_type = other DNA
ggggcagagcagggcggaggactgcgcgcacccccacagctatggaccaacggctattggggaaggccactccaggcaggtgcgggaggtctggggcttgttagcggggagccaggaggtcctggtgaaccacctggtgggggtgatcccggaggaggaagcggcggagtccccggagggagagggaaacaggacatcggcgacatcctgcagcagatcatgactatcactgatcagtcgctcgacgaagctcaggccaagaagcatgccctgaattgtcataggatgaaaccagcattgttctcagtcctgtgtgagatcaaggagaagactggcctgagtatcaggtcttctcaggaagaggagcctgttgaccctcagctcatgagactggacaacatgcttcttgcagaaggagtggcgggacccgaaaagggtggtggctcagcagccgctgcagccgctgccgctgctagcgggggaggagtttctccggacaactcaatcgagcactccgattatagaagcaagcttgcacagatcagacacatttatcactccgagctggagaagtatgagcaggcatgcaacgagttcaccacacacgtaatgaacctgctaagagaacaaagtaggacccggcctgtggcccctaaggaaatggagcggatggtgtccatcatccatcggaagttttcggccatccagatgcagctgaaacagtccacgtgcgaggccgtaatgattttgcgcagtaggttcctcgatgcacgtcggaaaaggaggaatttcagtaagcaggccactgaggtgttgaacgagtatttctactcccacttgtcaaacccatatccctctgaagaggcaaaggaagaactcgctaaaaaatgcgggatcacagtgtctcaggtgagcaactggttcggtaataagcgcattcgctataagaaaaatatcggtaagttccaggaggaggcaaacatatacgctgttaagaccgccgtctctgtgacgcaggggggtcattcacggacttcctcacccacccctccgtcttctgccggaagcggcggatcttttaatctatctgggtccggggatatgttcttgggaatgcctggcttaaatggtgactcatattccgcctcacaggtcgaaagtctccgacattctatgggtccaggtgggtacggagataacctcggcggtggccaaatgtattcccccagggaaatgagggccaacgggagctggcaagaggcagtgacccccagttcggtcacctcaccaacagaagggcctgggagcgtgcactccgacacaagcaattag

SEQ ID NO: 235910 - DNA, 1056 bp, synthetic construct
  misc_feature 1..1056: note = Description of Artificial Sequence: Synthetic coding sequence
  source 1..1056: mol_type = other DNA
atggatgaccaatctcggatgctccaaactctcgccggagtaaacttggcaggccacagtgttcagggcggaatggcactgcctccaccccctcacgggcacgaaggggcagatggtgacggcaggaagcaggatattggggacatcctgcaccaaatcatgacaataacagatcagtcactcgatgaggcacaggcaaaaaaacacgcgctgaattgccacaggatgaaaccagcactgttctctgtactctgcgagattaaggagaagactgggctttccattcgaggggctcaggaagaagaccctcccgacccgcaactgatgcgccttgacaacatgctgctggctgaaggggtcagcgggccagagaaaggcggaggctccgctgccgctgctgcggcagccgctgcgtccggaggatctagtgataattcaatcgagcacagcgactacagagctaagctaacccagatccgtcaaatctaccacactgaattggagaagtacgagcaggcctgtaacgagtttactactcacgtgatgaatctgctgcgcgagcagtccaggacacggcctatctctcctaaagagatcgagcgcatggtggggataatacacagaaagttcagttccattcagatgcagctgaagcagagtacctgtgaagccgtcatgatcctcagaagcaggtttctggacgccaggcggaaacggagaaatttttcaaaacaagccacagaaattctcaatgaatatttttactctcatctgtcaaatccatatccatcagaagaggcaaaagaagaattggccaagaagtgctctattacagtgtcccaagtcagtaactggtttgggaacaaaagaattcgttataagaaaaatattggaaagttccaggaggaagccaacctgtacgccgctaagactgctgttacagccgctcacgctgttgcagccgctgtgcaaaacaaccaaaccaattctcccaccactccgaactcaggaggctatcccccatcttgctaccagtctgatggtcggctgcagtag

SEQ ID NO: 235911 - DNA, 762 bp, synthetic construct
  misc_feature 1..762: note = Description of Artificial Sequence: Synthetic coding sequence
  source 1..762: mol_type = other DNA
atgaacctgctgagggagcagtccaggacccgacccatcagccctaaggaaatagagcgcatggttgggattattcatcggaagttctcatctatccagatgcagctgaagcaatcaacctgcgaggccgttatgatcctccgttccaggtttctggatgccagaaggaaacggcgaaattttagcaaacaagccaccgaaatcctcaacgagtatttctactcccatctgtccaacccctaccccagtgaggaggcaaaagaggagcttgctaagaaatgttccatcaccgtgtcacaggtgagcaactggttcggcaataaaaggattcggtataagaaaaatataggcaagtttcaggaagaggcaaacttatatgctgcgaaaaccgctgttaccgcagcccacgccgtggctgccgcagttcagaacaaccaaacaaacagtcccacaacaccgaattccgggtcatccggctcattcaatctaccaaactctggtgatatgttcatgaatatgcagtcgctgaacggtgatagctatcaaggcagtcaggtgggtgctaatgtgcagtctcaggtggatacattgagacacgttatcaaccagactgggggttattctgacgggctaggaggcaactctctgtatagccctcataatctgaacgcaaatggcggatggcaagacgccacaacaccgtccagcgttacatccccaactgagggaccagggtcagtgcattccgatacaagtaactag

SEQ ID NO: 235912 - DNA, 1368 bp, synthetic construct
  misc_feature 1..1368: note = Description of Artificial Sequence: Synthetic coding sequence
  source 1..1368: mol_type = other DNA
atggacgatcaatcgcgcatgctccagactctcgccggagtgaatttggcaggccactcagtgcaggggggtatggctcttccaccgccacctcacggccacgagggagccgatggcgatggccgaaagcaggatatcggggatatcctgcaccagattatgaccattactgatcagtccctcgacgaggctcaggccaagaagcatgccctcaactgccaccgcatgaaaccggcattgttctcagtcttgtgtgaaattaaggagaagacggggctgtccatcaggggcgctcaggaggaagatcccccagatccacaactgatgcgtttggataatatgctgcttgctgagggcgtctcaggccctgaaaaaggaggagggagtgctgcggctgctgccgctgctgccgcaagcggaggctcttctgataattccattgagcactctgattatcgggcaaagctgacccagatcagacaaatatatcacacagaactggaaaaatatgagcaggcctgcaatgagtttactacccatgtgatgaatctcctgcgcgagcagagcaggacgcgacctatttccccaaaggaaatagagaggatggtcggcatcattcacaggaagttctcctcaatccagatgcagctgaaacagtcgacatgtgaggcggtcatgattctgcgcagtaggtttttggacgctcgtaggaagaggcggaatttttctaaacaagcgaccgagattctgaacgagtacttctacagtcacttgtctaatccttacccctccgaagaggctaaggaagagctagccaaaaaatgctctattactgtcagtcaatcactggtcaaggatcccaaagagaggggcagtaagggatcggacatccagcctactagtgtggtgtctaattggttcggcaacaagaggattcgctacaagaaaaatatagggaagtttcaggaggaggcgaatctatacgcagctaagaccgccgttactgcagcacacgccgttgcggcagcggttcagaataaccaaactaactcaccaaccacaccaaactccggctcttccggatctttcaacttgccaaattccggggatatgttcatgaatatgcagtccctcaacggtgactcctatcaggggtcccaagtgggcgctaatgtccaatcccaggtggatacattgagacacgtgatcaaccagacaggtgggtactctgacggacttgggggaaacagtttatactctccccacaatctgaacgcaaatggaggttggcaggacgccaccaccccgagctctgtgacctcacctaccgaggggccagggtcagtacactcggatacaagcaattag

SEQ ID NO: 235913 - DNA, 1305 bp, synthetic construct
  misc_feature 1..1305: note = Description of Artificial Sequence: Synthetic coding sequence
  source 1..1305: mol_type = other DNA
atggacgatcagagtcgcatgctgcaaacgttagccggagtaaacctcgctggccactctgtccagggagggatggctctccctccaccccctcatggtcatgagggcgctgacggggacggcaggaaacaggatattggcgacattctccaccagatcatgactatcaccgaccaatcacttgatgaagcccaagccaaaaaacatgccttgaattgtcatagaatgaagccggcattattctctgtcctctgcgagatcaaggagaagactggcctgagtatacgcggtgcccaggaagaggatcctcccgacccccagctcatgagactggacaacatgttgctcgctgagggcgtctccgggccagagaaaggcggtggctccgctgcagcggctgccgctgccgcagcttcaggcggatcttccgacaactctatcgaacactcagactacagggccaaactcacccagatcaggcaaatttaccataccgagctcgagaaatatgaacaggcatgcaacgaatttaccactcatgtcatgaatttgctcagggagcaaagccgcacacggccaatctcccctaaggaaatagaaaggatggtgggaattattcatcggaaattttctagcatccaaatgcagctgaaacagagtacctgcgaggcagtcatgattctacgttctagattcctggacgccagaaggaagagaagaaactttagcaagcaagccacagagattctgaatgagtacttttactcccatttgtcgaatccgtaccccagtgaagaagcgaaagaagagctcgcgaagaaatgctcaattaccgtgtcgcaggtgagcaattggtttggcaacaaacgcattagatacaagaagaatattgggaagttccaggaggaggccaatttgtacgccgcaaagacagccgtgacagcggctcatgccgtggcggctgcggtacagaacaatcaaaccaatagtccgactactcccaatagtggaagtagcggaagctttaacctccctaactctggcgatatgttcatgaatatgcaaagccttaacggggattcttaccaggggtcacaggtgggcgctaatgtgcaatcccaggttgatacattgaggcacgtgatcaatcaaactggcggttacagcgatggactcgggggaaattccctgtactcaccacacaacctgaatgcaaacggaggatggcaagatgccacaactcccagttcggtgacctcacctactgagggcccaggctccgtccacagtgacacctccaattag

SEQ ID NO: 235914 - DNA, 789 bp, synthetic construct
  misc_feature 1..789: note = Description of Artificial Sequence: Synthetic coding sequence
  source 1..789: mol_type = other DNA
atgcggggactgagcatccgaggagcacaggaggaagatcctccagacccacagctcatgcgtcttgataatatgctcctggctgagggcgtctctggccctgagaaaggagggggttctgcggctgctgctgcggctgcagctgcttctgggggtagcagtgataattcgatcgaacactccgactacagagccaagctgactcagattcggcagatttatcataccgagctggaaaagtacgagcaggcctgtaatgaattcactacacatgttatgaatctgctgcgcgaacagtccaggaccaggcctatttcccctaaggagatcgaacgcatggtgggcatcattcaccggaagttctcatcaatccagatgcaactgaagcagagcacatgtgaggctgtgatgattttgcgtagcagattcttagatgccaggaggaaacgcaggaattttagcaaacaggctaccgaaatccttaatgaatatttctactcccacctttcaaatccttatcccagtgaggaggccaaggaagaattggctaaaaagtgctctattacagtgtcccaggtgagcaactggtttggaaacaaacgaatccgttacaaaaagaacatcgggaagttccaagaggaagctaacctgtatgcagcaaagacagctgtgactgccgctcacgcagttgctgcagcagtgcagaataaccagaccaactcgcctactacacctaattctggcggatatccaccttcatgttatcagtccgacggcaggctccagtag

SEQ ID NO: 235915 - DNA, 1080 bp, synthetic construct
  misc_feature 1..1080: note = Description of Artificial Sequence: Synthetic coding sequence
  source 1..1080: mol_type = other DNA
atgaaacctgcgctgttttcggtgctgtgtgaaattaaagagaaaacggggttatcaatcagaggggctcaagaagaggacccacccgacccacaactgatgcgcctcgacaacatgctcttggccgagggagtctccggcccagagaaaggcggtggttcagccgcagccgctgcagccgctgccgctagcgggggttcatcagacaactctattgagcatagcgactaccgcgctaaactcacacaaattaggcaaatctatcacactgagcttgaaaaatatgagcaggcgtgcaacgagtttacaactcatgtcatgaaccttttaagggagcaatctcgcaccagacccatttcccccaaggaaatcgagcggatggtcggaattatccacagaaagtttagtagtattcaaatgcagctcaagcaatccacctgtgaggccgtgatgattctgagatcgcgctttttggacgcgaggcgtaaacgacggaatttcagcaaacaggctaccgagatactcaatgaatatttctactcacacctgagcaatccctacccctccgaagaggctaaggaagagctcgcaaagaaatgttccataactgtgtcacaagtcagcaattggttcggaaacaaacgaatcaggtacaagaaaaatattgggaaattccaggaggaggccaacctgtacgcagcaaagacggctgttaccgccgcacacgcagtggcagccgctgtacagaacaatcagaccaattcgcccaccactcctaattccggttcatctgggtcgtttaatctccctaattcaggagatatgtttatgaatatgcagtctttaaatggggattcctaccagggatcccaggtgggggcaaacgtccagtcacaggtcgatactcttcggcacgtcatcaaccaaacggggggatatagtgatgggttgggcggaaatagcctgtactctccccacaatctgaatgccaacggcggatggcaagacgccacaaccccttccagcgtgacatccccgactgaaggaccaggttctgtccactcagatacttctaactag

SEQ ID NO: 235916 - DNA, 1530 bp, synthetic construct
  misc_feature 1..1530: note = Description of Artificial Sequence: Synthetic coding sequence
  source 1..1530: mol_type = other DNA
atggagcggagaagactgtggggcagcatccaatcccgctacattagcatgtcagtgtggactagcccaagacgtctcgtcgagcttgctggacagagcttattgaaggacgaggctcttgcgatcgctgcactcgagctgttgccacgcgaactgttccctcctctatttatggccgcattcgacgggagacactcacagactctaaaggccatggtacaggcctggcccttcacatgcctccctctgggagtcctgatgaagggccaacacttacatctagaaactttcaaggccgtcctagacggcctagatgtcctcctggcccaggaagttcgacctcggagatggaagttgcaggtcctggatcttcgaaaaaacagtcaccaagacttctggacggtctggtctgggaaccgggctagcttgtacagttttccggaaccagaggcggctcagcctatgactaaaaaacgcaaagtggatggtctgtccaccgaggccgagcagcccttcatacctgtggaagtccttgtggacctgttcctgaaagagggggcttgtgatgaattattttcatatctgattgagaaagtcaaaagaaagaagaacgtccttcgattgtgttgcaaaaagctgaagatattcgcaatgccgatgcaggacatcaagatgatcctcaagatggtccagctcgattcgattgaggacctcgaagtcacctgtacatggaagctgccaacactggccaagttttctccttatctcggtcaaatgataaacctccgtaggctattgctgtcacatatccacgcttcctcctacatcagtccggaaaaagaggagcagtacatcgcccagtttacctcacaatttctcagtctccagtgtttgcaggcactgtatgtcgatagcttatttttcctgcggggaaggctcgatcaattactgaggcacgtgatgaaccccttagagacactgagcataacaaactgcaggcttagcgagggagatgtcatgcacctatcccagagtccgtccgtttctcagttgtccgtgcttagcctgtctggggtaatgttgactgatgtatcacctgagccactccaggctcttctagagagggcgtccgctaccctacaggatctcgtcttcgatgagtgtggcattaccgacgaccaactgctcgccctgctgccaagcctttcccattgtagccagctaacaactctaagtttctacggaaacagtatatctatctccgctcttcagagtcttctgcaacatctgattggccttagcaatttaacccacgtcttgtaccctgtgcctctagaatcctacgaggatatccacggtacgctgcacctcgagagactagcctatcttcatgcacggcttagagagcttctttgtgaattaggtcgcccttctatggtttggttgtccgcgaacccatgcccacattgtggcgatcgcacattctacgaccccgaacctattctgtgcccctgttttatgcccaactag

SEQ ID NO: 235917 - DNA, 1530 bp, synthetic construct
  misc_feature 1..1530: note = Description of Artificial Sequence: Synthetic coding sequence
  source 1..1530: mol_type = other DNA
atggagcgtcgtagattatgggggtccattcagagcaggtatattagtatgtcagtctggacatcccctagaagactcgttgagctggccggacagtcgctgctaaaggacgaagccctcgccatcgccgctcttgagctgttgccaagggaactctttccccctctgttcatggccgcatttgatgggaggcactcgcaaaccctgaaggccatggttcaagcttggccatttacgtgtttaccactaggagtgctgatgaaggggcaacatttgcatcttgaaacgttcaaagctgtactggatggcctggacgttctgctggcgcaggaagtgagacctagacgatggaaactgcaagtcctggacctccgaaagaattcccaccaggacttctggaccgtgtggtccggtaaccgtgctagcctgtatagttttcctgagcccgaggccgcacagcctatgaccaagaaacgcaaggtggacgggctgtctactgaagcagagcagccctttattcctgtcgaagtgctggtcgatctttttctgaaagagggtgcctgtgacgaactgttctcctacttaatcgagaaggtcaagaggaagaagaacgtcttgagactctgctgtaagaaactgaaaatctttgcaatgccaatgcaggatatcaaaatgatcctcaagatggtccaactggactccatagaggacctcgaggtgacctgcacttggaaactccctaccctggcgaaattttcgccctacctgggccagatgatcaacctgcggaggctgttgctgagccacattcatgcatcttcatacatctctccggaaaaagaggagcagtacatagcgcaattcacttcccagttcttatctttgcagtgccttcaggctctgtacgtggatagcttgtttttccttagaggtcgactcgaccaactgctacgtcacgtcatgaatccgctggagaccctcagtatcaccaactgccgactcagcgaaggcgacgtgatgcacctcagtcaatcacctagtgtaagccaactcagtgtgctctcattgtctggtgtgatgctgacggatgtgagtccggagcctctgcaggccttgcttgagcgagctagcgccacattgcaggatttagttttcgacgagtgtgggattactgacgatcagctgcttgccttgctgcccagcctgagtcattgttcccaacttaccaccctgagcttctatggcaatagtatcagcatctctgccctgcagagccttcttcagcaccttatcgggctttcgaacctcacccatgtgctctaccccgtgcccctggaatcttacgaggacatccacgggacacttcatcttgagaggctggcgtatctgcatgccagacttcgtgagcttctatgcgaactcggacggccatccatggtatggctttccgctaacccatgtccccattgcggcgatagaaccttctacgaccccgaacccattttgtgtccttgctttatgcccaactag

SEQ ID NO: 235918 - DNA, 1530 bp, synthetic construct
  misc_feature 1..1530: note = Description of Artificial Sequence: Synthetic coding sequence
  source 1..1530: mol_type = other DNA
atggagagacgtagactgtggggaagtattcagtccagatacatcagtatgtcagtatggaccagcccacgccgtctagtcgagctggccggacagagtctgctcaaggatgaggctcttgctatagcggcactcgagctcctgccccgagaactctttccccctttgttcatggcggctttcgacggtaggcattctcagacgctgaaagccatggtgcaagcctggcctttcacgtgcctgcctttaggggtacttatgaaaggacagcacctgcacctagaaactttcaaggccgtcctcgacgggctggatgtgctcctggcccaggaggtgaggcctaggagatggaaacttcaggttctggacctgcggaagaacagccatcaggatttctggacagtttggtctggcaatagggcctcgctttatagctttcctgagccagaagctgctcagcccatgacgaaaaagaggaaggtggacgggctgtctactgaggccgagcagccattcataccagtggaagttctggttgacttgtttttgaaggagggcgcatgcgacgagctcttttcttatctgattgagaaggttaagcgcaaaaaaaatgtgctgcgtctctgctgcaaaaagctcaaaatattcgcaatgccgatgcaggacatcaaaatgatccttaagatggttcagctggattctatagaagatctcgaagttacctgcacgtggaagctcccaacccttgctaaattttctccatatctcggacagatgatcaatcttagacgactgctcctgtcccacatccacgcctcgagctacatatcgccagaaaaagaggagcagtacatcgcacagtttactagccagtttctcagcctgcagtgcctccaagcactatacgtggactctctctttttcctccggggaaggctggaccagctgttgcggcacgtgatgaatcctctagaaacattatccatcacgaattgccggctctctgagggcgacgtcatgcacctgtcacaatccccatctgtgtcacagctctcagtgctcagtttaagcggggtgatgttgaccgacgtgtccccagaacccctgcaggccctactggagcgagcttctgccacactccaagacctggtgttcgacgagtgcggcattacagacgaccagctacttgctttactacctagcctgtcgcactgctcgcagctgactactctctctttctatggcaatagcatcagcatatccgcgctccaaagtctgttgcagcatcttatcgggctcagcaatctaactcacgtactgtaccctgtgccactggaaagctacgaggatatccatggcacacttcacctcgaaagactcgcatacctgcatgctcggctgcgagagttgttgtgtgaactggggagaccatcaatggtttggctgagtgcaaatccatgcccccactgcggggacagaaccttctacgatccagaacctatcctctgtccctgcttcatgcccaattag

SEQ ID NO: 235919 - DNA, 261 bp, synthetic construct
  misc_feature 1..261: note = Description of Artificial Sequence: Synthetic coding sequence
  source 1..261: mol_type = other DNA
atggagcgtcgcaggttgtggggctccatccagagcaggtatataagcatgtccgtgtggacgtcccctcgccgattggtggagttggccggtcagtccctattaaaagatgaggctctggcaatcgcagctctcgaactcctgcctcgcgagctcttccctccactcttcatggcagcattcgacggtagacattctcagacactgaaagccatggtgcaagcatggccttttacttgtctgccactgggagtgctgtag

SEQ ID NO: 235920 - DNA, 1530 bp, synthetic construct
  misc_feature 1..1530: note = Description of Artificial Sequence: Synthetic coding sequence
  source 1..1530: mol_type = other DNA
atggagaggaggcgcctgtgggggtccatccagagcaggtatatctcaatgtccgtttggaccagtcctagacggctcgtcgaattggcaggccagagtcttctgaaggatgaagcccttgctatagccgcactggagttgctgcccagggaactattcccccctctttttatggccgcatttgacgggagacattcccagaccctgaaagcaatggttcaggcttggccattcacatgcttgcctctcggggttctgatgaaggggcagcacctccatcttgagaccttcaaagccgtccttgacggcctagacgtgctgcttgcccaggaggtgagacccagacgctggaagctgcaagtgctagaccttagaaaaaatagtcaccaggacttttggacagtgtggagtggcaacagggcctctttatacagctttcctgaaccagaagccgctcagcctatgaccaaaaaaagaaaggtggacggcctatcaactgaagccgaacagccgtttattccagtcgaggtgttggtcgacctatttttgaaggaaggagcatgcgacgaactttttagctacctcatcgagaaggtgaaacgtaagaagaatgtgcttcggctttgttgcaagaagttaaaaatctttgccatgccgatgcaagacataaagatgattctgaagatggtccagctcgattccatcgaagacctggaggtcacatgtacctggaaattacctaccttagccaagtttagcccgtacctcggccagatgataaatttgcggagactactgctgtctcacatccacgccagctcatatatctccccggagaaggaggagcaatacatcgctcagtttaccagtcaatttttgtccctgcagtgtctgcaggccttgtacgtcgactccctctttttccttagaggacgcttggaccagctgctgcgccatgttatgaacccgctggagaccctgagcatcaccaattgtcggctcagcgagggcgacgtgatgcacctgagtcagagtcccagtgtctcacagctgtctgtattgtcactctctggtgtgatgctgacagacgtatcccccgagcccctccaggccctgcttgagagggcctctgctactctgcaggatcttgtgtttgacgagtgtggcatcacagatgatcagctcctcgcgcttctgcctagcctctctcactgcagccaactaacgacactctctttctatggaaactctatttctatctccgcactccagtccctgctccagcacctcatagggctctccaacctgacacatgtgctgtaccccgtgccattagagtcctacgaggacattcacggtaccctgcatctggagcggctggcgtatctacatgctagactgagagaactgctatgtgagctgggacgccctagcatggtgtggctgtcagcaaacccctgcccccattgcggagaccggactttttacgatcctgagccaattctgtgcccgtgcttcatgcctaattag

SEQ ID NO: 235921 - DNA, 348 bp, synthetic construct
  misc_feature 1..348: note = Description of Artificial Sequence: Synthetic coding sequence
  source 1..348: mol_type = other DNA
atggaacggagacggctgtgggggtcaattcaatctaggtatatctccatgtccgtgtggacatcaccccgaagattggtcgagctggcgggtcagagtctgctgaaggacgaggcactggctatagccgcattagaactgctcccacgggagctgttccctcccctctttatggctgccttcgacgggaggcatagccaaacacttaaagcaatggttcaagcttggcccttcacgtgcctgccattaggggttctgatgaagggccaacatctacacttagagacctttaaggccgtcctcgatgggctcgacgtgcttctggctcaggaagttagaccgagatag

SEQ ID NO: 235922 - DNA, 459 bp, synthetic construct
  misc_feature 1..459: note = Description of Artificial Sequence: Synthetic coding sequence
  source 1..459: mol_type = other DNA
atggaacggcgacggctctggggctctattcagagtaggtatatttcaatgtccgtttggacgtcccctaggcggctggtggagctcgctgggcaatctttactgaaggatgaggccctggcaattgctgcactggagctcctgcctagagaactgttcccccctttgttcatggccgcttttgatggccgtcattctcagacacttaaagctatggttcaggcttggccgttcacctgccttccgcttggggtgttaatgaagggacaacatttacatctggagacatttaaagccgtgctggacggacttgatgtgctgctggcccaggaggtgcgacctcggcgttggaagctacaggtgctcgacctccgtaagaattcacaccaggatttttggaccgtttggtctgggaatcgcgctagtctgtattctttccctgaaccagaggccgcatag

SEQ ID NO: 235923 - DNA, 1482 bp, synthetic construct
  misc_feature 1..1482: note = Description of Artificial Sequence: Synthetic coding sequence
  source 1..1482: mol_type = other DNA
atgagtgtttggacatcccctcgcagacttgtggagctcgccggacaaagcctgctcaaggatgaggccttggccatcgccgcactggagttgctcccccgtgagctatttccacctctcttcatggctgctttcgacggcagacactctcagacacttaaagccatggtccaagcctggccatttacttgtttgcctctgggtgttctgatgaaggggcagcatctccacctagagacctttaaggccgtcctggatggattggacgtgcttctggcccaggaagtgaggcccagacggtggaagctgcaagtcctggatctgaggaagaatagtcaccaggatttttggaccgtatggtcaggtaacagggcctccctgtattcgtttccagaaccagaggctgcacagccgatgactaagaaacgtaaagtcgatggcctttccactgaagctgagcagccctttatacctgtcgaggtactggtggatctttttttgaaagaaggagcctgcgacgaacttttcagttatctgattgagaaggtgaaacgtaagaagaacgtgctgcgactgtgttgcaagaagctgaagattttcgcaatgcctatgcaggatatcaagatgatcctcaagatggtccagcttgacagcatcgaagacctagaagttacctgtacctggaaactccctaccctggccaaattctccccttatctgggacagatgattaatctccgtcgtctgctgctgagccatatccacgcatcctcttacatctcaccagagaaagaggagcagtacattgcacagttcacttcgcagttcctgtccctccaatgcttacaggcgctgtacgtggatagtctgtttttcttgcgaggcagactggaccagctcctgcggcacgtgatgaatcccctggagaccctatctatcacgaactgtagactaagtgagggcgatgtgatgcatttgtctcagagcccttccgtttctcagcttagtgtacttagcttgagtggcgttatgcttacggacgtgagcccagagccactccaggcacttttggaaagggccagtgccaccctgcaggacttggtgttcgatgagtgtggaattactgacgatcagctgttggctctgctcccgagcttgtcccactgtagccagctgacgaccttgagtttttatggcaactccatcagcatttccgccctacaaagcctcctgcagcacctcatcggcctatctaatctgactcatgtgttgtaccccgtgcctctcgaaagttatgaggacatacacggcactctacacctggaaagactagcttacttgcacgcgcgtcttcgggaattgctgtgcgaactgggccgaccctccatggtgtggctttccgcaaacccttgtcctcactgtggagacaggaccttttacgacccggagcctattctctgcccctgtttcatgccaaattag

SEQ ID NO: 235924 - DNA, 606 bp, synthetic construct
  misc_feature 1..606: note = Description of Artificial Sequence: Synthetic coding sequence
  source 1..606: mol_type = other DNA
atggaaagaaggcgcctctgggggtccattcagtcccgttacattagtatgtccgtttggacaagcccacgcagattggtggagctggccggacagagcctgttgaaggatgaggccctagcaatcgctgccctggaacttctgccacgtgaactgttcccccctttatttatggcagcttttgatggaaggcattcccagactcttaaggcaatggtgcaagcttggccctttacatgccttcccctcggcgttttgatgaaaggacagcacctgcatctcgaaaccttcaaggcagtgctggatggcctggatgtgttgttagcacaggaggtgcgccctaggagatggaagctccaggtgctggacttgagaaagaattcacatcaagatttctggaccgtgtggtccggcaacagggcatctttatactctttcccagagccggaagctgctcagccgatgactaaaaagcgcaaagtcgacggccttagtacagaggccgaacagccatttattcccgtcgaagtgctggtggatctctttctaaaggagggtgcttgcgacgaactgttttcttatctcatcgaaaaagttaagcggtag

SEQ ID NO: 235925 - DNA, 1482 bp, synthetic construct
  misc_feature 1..1482: note = Description of Artificial Sequence: Synthetic coding sequence
  source 1..1482: mol_type = other DNA
atgagtgtttggaccagtccacggaggctggttgaattggcgggacaaagcctcctgaaagacgaagccctcgccatagccgctctcgaactgctacctcgagaactctttccacccctttttatggctgcctttgacggcaggcacagccagacgctgaaagcaatggttcaggcatggcccttcacgtgccttcctcttggggtactgatgaagggccaacatctgcacctagagacatttaaagcagtcctggatggacttgacgtgctactcgcccaggaagtccgtccacgacgatggaagcttcaggttctggatctgcgcaaaaactcccaccaggacttctggaccgtttggtcaggaaacagggcatcgttgtatagttttcctgaacccgaggccgctcagcctatgacgaagaagagaaaagttgatggcctatcgactgaagcggagcagcccttcatcccagtagaagtgctcgtcgatctgtttcttaaagagggcgcttgtgatgaactgttcagctacctcatcgagaaagttaaaaggaagaaaaatgttctacgcctctgttgcaagaagcttaagatcttcgcgatgccaatgcaggacattaaaatgattttaaaaatggtgcagctggacagcatcgaagatctggaagttacttgtacatggaaattaccgactctcgccaagttctccccctatctgggccagatgatcaatctgagacgactgctgctctcgcacatccatgcttcttcgtatatcagtcctgagaaggaggaacagtacatagcgcaattcacatcccagttcctgtctttgcagtgccttcaggctctatatgtggacagcctgttcttcctgcgagggaggctcgaccagttactgagacacgtgatgaaccctctggagacactctcaattaccaactgtaggttaagcgagggcgacgtgatgcacctgtctcaatcaccgtcggtatcccagctaagcgtcctgtccctgtccggtgtgatgttgactgacgtatccccggaacccctacaggcacttttggaaagggcctccgccactttgcaagacttggtgttcgacgagtgtggcatcacggacgatcaactgcttgcgcttctgccaagcctgtcacactgctctcagttaaccacattaagtttttacggaaactcgatctctatcagtgccctgcagagtctgttgcagcacctcatcgggcttagcaatctgactcacgtgctgtacccagtcccacttgaatcttacgaggacattcacggtaccctgcacctggagcgattggcttatttgcatgctcgcttgagagagctgctctgtgagctggggaggccttcaatggtatggctctctgctaatccctgcccccactgcggtgacagaactttctacgaccctgaaccgatcctgtgtccttgcttcatgcccaattag

SEQ ID NO: 235926 - DNA, 1530 bp, synthetic construct
  misc_feature 1..1530: note = Description of Artificial Sequence: Synthetic coding sequence
  source 1..1530: mol_type = other DNA
atggagcgaaggagactctggggatcgatacagagccgctacatttccatgtcagtgtggacctcaccccgaagacttgtggagttggccggtcaatccctattgaaagatgaggcacttgcaattgcagcactagagttgcttcctcgcgaactgtttccccctctgttcatggccgcttttgatggccgtcacagtcaaaccttaaaggccatggtccaggcgtggccgtttacttgcctcccgctgggagtgctgatgaaaggacagcatctgcatctcgagacattcaaggccgttctcgatggacttgatgtgctactagcgcaggaagttagacccaggcgatggaagctgcaggttctggatcttagaaagaattctcatcaggacttttggaccgtttggagtggaaaccgtgcaagcctttatagctttcctgagccagaagccgcacagccgatgacaaaaaagaggaaggtcgatggactgagtacagaggctgaacagcccttcataccagtggaagtactggtcgatctgttccttaaggaaggagcctgtgacgagctcttttcttacttaatcgagaaggtcaaaaggaagaagaacgtcctgcgtttatgctgcaagaagctcaagatattcgccatgcctatgcaggatattaagatgatcctgaaaatggttcagcttgacagcatcgaagacttggaggtaacctgtacctggaaacttcctacgctagccaaattctccccctacctgggccagatgatcaatctgcggcgactgctgttaagccacattcatgcttcatcttacatcagtcctgaaaaggaggaacaatacatagctcagttcacttctcagttcttaagcctacagtgtttgcaagcactttacgttgattccctcttctttctgcggggacgtcttgaccagcttctccgccatgtaatgaatcccctggaaaccctctccatcacgaactgcagattgtccgagggagacgtgatgcacctgtcgcagagtccatccgtgtcccagctgtcagtgcttagtctaagtggtgtgatgctcacagatgtaagcccagaaccacttcaggcactgcttgaaagagcatccgccactttgcaggacctggtctttgatgaatgtggcataactgatgaccagcttctcgcccttctgccttctctttcccactgcagccagctgacaaccctgagcttttacggtaattctatctcaatctctgcgctccaaagcctcttacagcacctaatcgggctctccaatctgacacacgtgctgtaccccgtgcctctcgagagctatgaggacattcacggcaccttgcatttggagcgcctagcttatctccacgctagactacgtgagctgctctgcgaattgggcagaccatcaatggtatggctgtcagcgaacccttgcccccactgtggcgataggacattttacgaccccgagcctatcttatgcccctgcttcatgccaaactag

SEQ ID NO: 235927 - DNA, 369 bp, synthetic construct
  misc_feature 1..369: note = Description of Artificial Sequence: Synthetic coding sequence
  source 1..369: mol_type = other DNA
atggctgccccagtcgacctggagcttaaaaaggccttcaccgagttacaggccaaagtaattgacacacagcaaaaagtcaaactagccgatatacaaattgaacagctgaatcggactaagaaacacgctcacctgactgatacagagattatgacccttgtagacgagactaacatgtatgagggcgtaggccgaatgtttatcctacagtctaaagaggccattcattcacagctcttggaaaagcagaagatagccgaggagaagattaaagaacttgagcagaagaagagctatctggagcggagtgtgaaagaagccgaagataacattcgggagatgttgatggccaggcgcgctcagtag

SEQ ID NO: 235928 - DNA, 465 bp, synthetic construct
  misc_feature 1..465: note = Description of Artificial Sequence: Synthetic coding sequence
  source 1..465: mol_type = other DNA
atggccgaaaattccggtcgggcagggaagtcctcaggttcaggagccggtaagggagccgtttccgctgagcaagtgattgctggattcaaccggctgcgtcaggagcagagaggcctggcttccaaggccgctgaactggaaatggagctcaatgagcactcactggttatagatactcttaaggaagtggatgaaacaaggaagtgctatcgcatggtgggaggggttctcgtggagcggactgtgaaggaggtgctgcccgcactggagaataacaaggagcaaatccagaagattattgagaccttaactcaacagctacaggccaagggcaaagagctcaatgagttccgcgagaagcacaacatcaggctcatgggggaggatgaaaagcctgccgcaaaggagaactccgaaggcgcaggagcaaaggcctctagcgccggagtgttggtttcttag

SEQ ID NO: 235929 - DNA, 405 bp, synthetic construct
  misc_feature 1..405: note = Description of Artificial Sequence: Synthetic coding sequence
  source 1..405: mol_type = other DNA
atggccgctaccatgaagaaggccgctgctgaagatgtgaacgttacgttcgaagaccagcaaaagatcaacaagttcgcaagaaatacctcccgtatcaccgaactgaaggaagagatagaagtcaagaagaaacaactgcagaacctcgaggacgcatgcgacgacataatgctggccgacgacgactgtctgatgatcccctaccagataggagacgtgttcataagtcactctcaagaggagacacaagagatgctggaggaagccaagaaaaacctccaggaggaaatcgacgccttggagtcccgagttgaatcaattcaaagagtgttagctgatctgaaagttcagctttatgcaaagttcggctccaatattaacctagaagccgacgaaagctag

SEQ ID NO: 235930 - DNA, 465 bp, synthetic construct
  misc_feature 1..465: note = Description of Artificial Sequence: Synthetic coding sequence
  source 1..465: mol_type = other DNA
atggcacaaagcatcaatattacggagctgaacctgcctcagcttgaaatgctgaagaaccagcttgatcaggaggtggagttcctcagtacatctatcgcgcagctaaaagtcgtccagacgaagtacgttgaggcgaaggactgtctcaacgtcttgaataagtctaacgaaggaaaagagctgctggtgccacttacctcttcaatgtatgttcccggaaagctccacgatgtggagcacgttctgatcgatgtaggcaccggttattacgtggagaagacagccgaagatgcaaaggacttctttaaacgcaagatcgattttctcaccaagcagatggaaaagatccagcccgctttacaggagaagcacgccatgaagcaggcggttatggaaatgatgagccagaaaattcagcagttaacggccttgggtgcagcccaagccacagccaaggcctag

SEQ ID NO: 235931 - DNA, 330 bp, synthetic construct
  misc_feature 1..330: note = Description of Artificial Sequence: Synthetic coding sequence
  source 1..330: mol_type = other DNA
atggctcaaagcatcaatattactgagctcaacctgcctcagcttgaaatgctgaagaatcagctcgaccagatgtacgtgccaggaaagctgcacgacgtggagcacgtgctaatcgatgtgggtacggggtactatgtggagaaaacggccgaggatgcaaaggactttttcaagcgaaaaattgacttcctgaccaagcaaatggagaaaattcagcctgcactccaggaaaaacatgctatgaagcaggctgttatggagatgatgtcccaaaagatacagcaactgacagctttgggcgctgctcaggcaactgccaaagcctag

SEQ ID NO: 235932 - DNA, 465 bp, synthetic construct
  misc_feature 1..465: note = Description of Artificial Sequence: Synthetic coding sequence
  source 1..465: mol_type = other DNA
atggcccagagcatcaatatcaccgagcttaatctaccacagttggaaatgctgaagaaccagttagatcaggaggtcgagtttctctccaccagtatcgcccagctgaaagtagtacaaacgaaatatgttgaggctaaagactgtctgaatgtgctgaacaagagcaatgagggcaaagagctgctggtgccgttgacttcgtccatgtacgttcccggaaagctgcacgatgtcgaacacgttctaattgatgtgggaactgggtattacgtggaaaaaaccgctgaggacgccaaggatttttttaaaagaaaaattgactttctgactaagcagatggagaaaatccaacccgctcttcaggagaagcacgccatgaaacaggcagtgatggaaatgatgtctcaaaaaattcaacagctcactgctctgggtgccgcacaggctacagccaaggcgtag

SEQ ID NO: 235933 - DNA, 1281 bp, synthetic construct
  misc_feature 1..1281: note = Description of Artificial Sequence: Synthetic coding sequence
  source 1..1281: mol_type = other DNA
atgggaacactgtcagccccaccatgtacacaacggattaaatggaagggtctgctgctgacggcttctttactgaacttctggaatttgcctacgactgcacaggtgaccattgaagcggagcccacaaaagtatccgaggggaaggacgttcttcttttggttcataatctcccccagaacctcaccggatacatttggtataaagggcagatgagggatctctaccactatatcaccagttatgtggtcgacggtgaaataatcatttacggtcccgcatacagtggtcgcgagactgcatactcaaacgcatctttactgatccagaacgttacgcgggaggacgccggttcctacacactgcacattatcaagggcgacgacggcacacggggtgtcaccggccgttttacatttactttgcatctagagaccccaaagccttcaatctcctcttccaacctgaaccccagagagacaatggaggccgtgtccctgacatgtgacccagagacgcctgacgcaagctacctttggtggatgaatggacagtctctgcctatgacccattcgcttaagctttctgagacaaatcggacgctgttcctcctgggggtcacaaagtatacagccggtccctacgagtgtgagatacgtaaccctgtgtccgctagccgatctgatcccgtgaccttgaatctgctgcccaaactccctaagccctatatcactatcaacaaccttaatccgcgtgaaaacaaagatgtgctaaatttcacctgtgagcccaaaagcgagaattacacttacatctggtggctcaatggccagagcctgccggtgtctccccgtgtcaagcggcctatcgaaaatcggatactgatcctccccagcgttacccgcaatgaaactgggccttatcaatgcgagataagagataggtatgggggtataaggtcagatccagtgacattgaatgttctgtacgggccagacctcccccgtatttatccatcgtttacttactatcgctcaggggaggtgctgtatctttcttgttccgcggacagcaacccccctgcccagtactcttggaccattaacgagaagttccagctgcccggacagaagctgttcatcagacatataacaaccaaacactcaggcctctatgtgtgcagtgtcagaaattccgcaacaggcaaggagtcaagcaagagcatgaccgtcgaagtctcaggaaaatggattcccgcatctttggccataggcttctag

SEQ ID NO: 235934 - DNA, 432 bp, synthetic construct
  misc_feature 1..432: note = Description of Artificial Sequence: Synthetic coding sequence
  source 1..432: mol_type = other DNA
atggggaccctctccgcaccgccttgtacccagcggatcaagtggaagggattactattgactgcctccttgttaaatttctggaatctgcccaccaccgcgcaggtcacgatcgaagccgagccaaccaaagtctccgagggcaaggatgtcttattactggttcacaacctaccccagaatctgactgggtatatctggtacaaagggcagatgcgggatctctaccattacatcacgtcctacgtggttgacggcgagatcattatctatggaccggcatactccggcagagaaaccgcgtactctaatgcaagcctcctgatccagaacgtgacacgggaagatgcaggatcatacacccttcacatcattaagggcgacgatggtactcggggtgtaaccggcaggtttactttcaccctgcactag

SEQ ID NO: 235935 - DNA, 1287 bp, synthetic construct
  misc_feature 1..1287: note = Description of Artificial Sequence: Synthetic coding sequence
  source 1..1287: mol_type = other DNA
atgggtaccctctcggccccaccctgcactcagcgaattaaatggaaggggctcctacttactgcatctctgctgaatttctggaacctgcccacgacagcccaggtgactattgaagccgaacctactaaagtgtctgagggcaaagacgtgctgctgcttgttcacaacctgccacagaacctgactggttacatatggtataaggggcagatgagagacctgtatcactatattacatcctacgtagtagacggggaaatcattatctacggcccagcttactcaggtcgcgagaccgcctatagcaacgcctctctgctcatacagaacgtaacacgcgaagacgctgggtcttacacgctccatatcatcaagggcgatgatggtacccgcggtgttaccggacggttcacattcaccttgcacctagagacgcccaagccttctatatcttcgagcaatctcaatcccagggagacaatggaggccgtcagcctgacatgtgacccggaaacccctgatgcatcctacctctggtggatgaacggacagtctctgcctatgactcactccctgaagctgtcggagacaaatcgcaccctattcttactgggagtgaccaaatatacagctgggccttatgagtgcgaaatcaggaacccggtgagcgcttccagatccgatcctgtaactcttaatctcttacccaagctcccgaaaccctacatcactataaataacctgaacccaagagaaaacaaggacgtgctcaattttacgtgcgagcccaagagcgaaaactacacctatatttggtggctaaacggacagagcttacctgtttccccgagggtgaaaaggccaatagaaaacaggattctgattctgccaagtgtgaccaggaatgaaacaggcccatatcagtgtgagatcagagacagatatggagggataaggagcgacccagtcacgttgaatgtactatacggcccagacctgcccaggatctacccttccttcacgtattatcgatccggcgaggttctgtatttgagctgctcggccgactccaatcctcctgcacagtactcctggacaataaacgagaaattccagctccctggacagaaactttttattaggcacatcaccaccaaacattctggtctttacgtttgtagtgtgaggaattccgcaactgggaaggaatcttccaaaagcatgacagtcgaagtctcggcctatagcagcagcattaactacacaagcggaaaccgcaattag

SEQ ID NO: 235936 - DNA, 1260 bp, synthetic construct
  misc_feature 1..1260: note = Description of Artificial Sequence: Synthetic coding sequence
  source 1..1260: mol_type = other DNA
atggggacactcagcgcacccccttgtacacagaggattaaatggaagggactactgcttacagcctcactgctcaatttctggaacttgcctacaacggcccaggtaacaatcgaggcagagcccactaaggtgtctgaaggaaaggacgtgctgttgcttgtgcacaacttgccgcaaaacttgacagggtacatctggtataaagggcagatgagagacctgtatcattacataacatcctatgtggttgacggggaaattattatctatggccctgcttacagtggtagggaaacagcgtacagcaatgcatcgctgctgattcagaatgttaccagggaggacgccggatcatatacattgcatatcatcaaaggagatgacgggaccaggggtgttacagggcgatttacatttaccctgcacctcgagacccccaagccatcaattagttcctctaatctgaatcctcgggagaccatggaagctgtctcactgacgtgcgacccagagacccctgacgcgtcatacctgtggtggatgaatggccaaagtttgccaatgacccacagccttaagctgagtgagactaatcgcaccttattcctcctaggggtgacgaagtacacagccggaccctatgaatgcgagatccgcaatcccgtgtcggccagtcgctctgaccccgtgactctgaatcttctgccgaagttgcccaaaccttatataacaataaataatcttaatcccagggaaaataaagacgtgctcaatttcacctgtgaaccaaagtctgagaattacacgtatatctggtggttgaatggtcagtcgcttcccgtgagccccagggtcaagcgtccaatcgagaatcgcatcctcatattgccgtctgtcacccggaatgaaacaggcccatatcagtgcgagatccgggatcgctacggcggaatacggagtgaccccgttacattgaacgtgctgtatggcccagatttgcctaggatctacccttccttcacatactacagaagtggcgaggtgctttaccttagctgctctgccgactctaatcccccagcccagtattcttggacgatcaacgagaaattccagctgcccggacagaaactctttatcaggcacatcaccactaagcacagtggcctctacgtctgcagcgttcgcaattctgctaccgggaaagagtcgtccaagtctatgacggtggaggtctccgactggacagtcccgtag

SEQ ID NO: 235937 - DNA, 1254 bp, synthetic construct
  misc_feature 1..1254: note = Description of Artificial Sequence: Synthetic coding sequence
  source 1..1254: mol_type = other DNA
atggggaccctatccgcacctccatgcacccagaggatcaagtggaaaggcctgctgcttaccgcctcacttttaaatttctggaatctcccaaccactgctcaggttactattgaagctgagccaactaaagtaagcgaaggaaaggacgtgctgttacttgttcataacctgccccagaacctgaccgggtatatctggtataagggccagatgcgcgatttgtaccactacatcactagctatgtcgtggacggcgaaatcatcatctacggccctgcctactctggcagagagaccgcctattctaatgccagccttctcatacagaatgtgaccagggaagacgccggatcgtacaccctccacatcattaagggagacgacggcactcgcggagtgacaggccgatttacttttacattacacctggagacgcctaagccatccattagttctagcaatcttaacccgagagaaactatggaggcagtctctctgacctgtgatccagaaacccctgacgccagctatttatggtggatgaacggtcagagccttcctatgactcactcactgaaattgtcagagacgaatcggactctgtttctgctcggtgtgaccaagtacacagctgggccttacgagtgcgagattcgaaatccagtatcagcttcccgatctgatccagtaacgcttaacctgctgcctaagctccctaagccctatatcacaatcaataacctgaaccccagggagaacaaggacgtactgaattttacttgcgagcccaagtccgagaattacacatacatttggtggctaaacggccaaagtctgcccgtctcccctcgggtgaagcgccctatcgagaacaggattctgatccttcctagcgtgactcgcaacgagaccggcccttatcagtgcgagattcgagacaggtatggcggaattcggtccgacccggtgaccctaaacgttttatacggcccagatctgccccgaatttaccctagctttacttactatcggagcggagaagtgctctatctgtcttgcagcgccgattccaatcctcctgcacagtactcctggacgattaacgagaagttccagctccctggccagaagttgtttattcggcatatcaccactaaacactctgggctgtacgtatgctctgtgaggaattctgccacgggtaaagagagctccaagtctatgactgttgaagtcagcgaggcactgtag

SEQ ID NO: 235938 - DNA, 642 bp, synthetic construct
  misc_feature 1..642: note = Description of Artificial Sequence: Synthetic coding sequence
  source 1..642: mol_type = other DNA
atgggccctttatcagctccaccttgcacagagcatatcaagtggaaggggttactgcttactgttgagactcctaaaccttccatatcatcctctaacctcaaccctcgcgaggcaatggaaacagtgattcttacctgcaaccccgagaccccagacgcatcttatctctggtggatgaacggccagtctctgcccatgacgcatcggatgcagctcagcgaaactaaccgaaccctctttctgttcggagtaacaaagtacactgccggaccgtatgaatgcgagatctggaatagcgggagtgcttcacgatcagatcccgtaacactgaatttgttacacgggcctgacctgcctagaattttcccctctgtgacgagttattactccggagagaaccttgatctgtcttgcttcgctaacagcaacccacccgcacagtacagttggaccatcaacgggaaattccagctctccggccagaagctatttataccccaaattacccctaagcataacggtctctacgcgtgtagcgccagaaacagtgcgacgggggaagaatctagcaccagtctcactattagagtcatcgctcccccaggcttggggactttcgcttttaacaatcctacctag

SEQ ID NO: 235939 - DNA, 1008 bp, synthetic construct
  misc_feature 1..1008: note = Description of Artificial Sequence: Synthetic coding sequence
  source 1..1008: mol_type = other DNA
atgggccctctgtccgctcccccatgtaccgagcatattaagtggaagggcctgctcttgactgctttgctactgaacttttggaatctcccgaccaccgcccaagttatgattgaagcacagcctcctaaggtgtccgaaggaaaagacgtcctgctgctagtacacaatcttcctcagaacctcacaggctacatctggtacaaaggacagataagagacctataccactacataacatcctacgtggtagacggccagattatcatttatggccctgcttactcgggcagggagaccgtctactctaatgcttccttgctgattcagaacgtgacaagagaagacgctgggtcctacaccctgcacattattaagagaggcgatggcactcgtggagtcactggctacttcaccttcacactctatctggagactcctaaaccatctatcagctctagcaatttaaaccccagggaagccatggaaaccgtgatcttgacttgtaatcccgagaccccagatgcttcatacctgtggtggatgaatgggcaatccttacctatgacccacagaatgcagctatcagaaactaatcggacattgtttttgtttggcgtgacaaaatacacagcgggaccatacgaatgcgagatttggaattcagggagtgcctctaggagtgacccagtgacccttaacctgctccatggacccgatctgccgaggatttttccatctgttactagttattattcaggtgagaacttagatctaagctgcttcgcaaattccaacccaccagcgcaatattcctggacgatcaatggtaaattccagctgtctggccagaagctgtttatccctcagatcacaccgaagcacaacggcctgtacgcttgttccgcgcgaaatagcgctacgggtgaagagagcagtactagcctgaccatccgagtgatcgcacctcctggcctgggtacatttgcctttaataacccaacctag

SEQ ID NO: 235940 - DNA, 1008 bp, synthetic construct
  misc_feature 1..1008: note = Description of Artificial Sequence: Synthetic coding sequence
  source 1..1008: mol_type = other DNA
atggggccattatcagccccaccctgcactgaacacatcaagtggaagggactgctcctaacagcccttctgcttaatttctggaacttaccaaccacagcccaggtgatgatcgaggctcaacctcctaaagtaagcgagggtaaggacgtcttgctcttggtccataacctcccacagaatctgaccggctacatctggtacaaagggcagatccgcgacttgtaccactatataaccagttatgttgtggacggtcagattatcatatatggccctgcttattcgggccgtgagacggtgtatagtaacgcctcactcttaatccagaacgtaactagagaggatgcgggatcatacacacttcacattattaagaggggggatggaacacggggtgtcaccggatactttacctttactctgtacttggagacaccaaaaccatcgatctcttcaagcaacctgaatcccagagaggcgatggaaacagttatcctaacgtgcaatcctgagacacctgatgcctcatatctgtggtggatgaatggccaatcgctacctatgacacaccggatgcagctcagcgagacaaatcggacattgttcctgttcggtgtgaccaagtatacagccggtccttacgaatgcgagatttggaacagcggctcagcaagtcgctccgacccggtcactctcaatctactgcacggtccagacttgcccaggattttcccttctgtcacaagctactattccggggagaaccttgatctcagttgtttcgccaactctaaccccccagcgcaatattcctggacaattaatggcaaattccagctgagtggacagaagctgtttattccccaaatcacccctaaacataacggcctgtacgcctgtagcgcccgaaactcagccacaggagaagaaagtagcacatccttaacgatccgtgttatcgcacccccagggctcggtacattcgcattcaacaatcctacctag

SEQ ID NO: 235941 - DNA, 642 bp, synthetic construct
  misc_feature 1..642: note = Description of Artificial Sequence: Synthetic coding sequence
  source 1..642: mol_type = other DNA
atgggaccccttagcgctcctccctgcacagaacacataaagtggaaaggactcctcctgactgtcgagactccaaaacccagcataagttctagtaatctcaacccaagagaagcaatggaaaccgttatcctgacgtgtaatcccgaaactcctgatgcctcttatctatggtggatgaacgggcagagtctccctatgactcatcgaatgcaactcagcgaaacaaatcggaccctgtttctttttggcgtcactaagtacaccgccggaccctatgaatgcgagatatggaactccggttccgcctcacgttctgatccagtgactcttaacctattgcacggaccagacctgccaaggattttcccaagcgtgacctcttattattctggagagaacttggatctgtcgtgttttgctaattccaatcccccagcacagtattcttggactattaacggtaagtttcagttgagcggacagaaattattcattcctcaaataaccccaaaacacaacgggctgtacgcctgctctgccaggaatagcgctacaggggaagagtcatcgacgagccttactatccgcgtcatcgcaccccctggcctgggcaccttcgctttcaacaacccaacatag

SEQ ID NO: 235942 - DNA, 1008 bp, synthetic construct
  misc_feature 1..1008: note = Description of Artificial Sequence: Synthetic coding sequence
  source 1..1008: mol_type = other DNA
atgggccctctgtccgcacccccttgcacggaacatataaaatggaagggactgcttgtgacagccagtctgctgaacttctggaacttaccaaccaccgcacaggtgactatcgaagcccaaccccctaaggtgtccgagggaaaagatgtccttctactagtccacaacctgcctcagaatttgacgggttatatctggtataaggggcagatccgggacctgtaccactatatcacatcgtatgttgtagatgggcagataatcatttatggcccagcttactctggtagggaaactgcttacagcaatgcgtccttacttatccaaaacgtgaccagggaagatgccggtagctataccctccacattatcaaaagaggcgatgggacccggggtgtgaccggttatttcactttcacgctttacctcgaaactccaaagcctagcattagctcctctaacctgaacccgagagaggccatggaaactgtcatactgacttgcgaccctgagaccccagacacttcctatcagtggtggatgaacggtcagtcactgcctatgactcacaggttccagctgagcgaaacaaacaggacactcttcctcttcggcgtcaccaaatacaccgctgggccttatgaatgcgaaattcggaacagtggatcagccagccgttccgaccctgtgaccctgaatcttctgcatgggccagatctgccacgcatccatccctcatacacaaactacagatccggcgataacctgtatctcagttgcttcgccaacagcaacccaccggcacaatattcctggaccatcaatggcaaatttcaacagagcggccagaatctgttcatccctcagattactaccaagcatagtggcctgtatgtctgctctgtgaggaactccgccactggtgaagaatcaagtacaagcctgaccgttaaggtctccgcttccacccgaatcgggctgcttcctctgctgaatccaacttag

SEQ ID NO: 235943 - DNA, 1008 bp, synthetic construct
  misc_feature 1..1008: note = Description of Artificial Sequence: Synthetic coding sequence
  source 1..1008: mol_type = other DNA
atggggccactgtccgcccctccctgcaccgagcacattaagtggaagggcttgctggtgactgcatccctactcaatttttggaacctgccgaccaccgcccaagtgaccatcgaggcacagccgcctaaagtttccgaggggaaggatgtccttctcttggtgcataacctgccacagaatctgaccggttacatttggtataaaggacagattcgcgatctgtaccactacatcacgtcttatgtggttgatggacagatcataatttacgggccagcgtatagtggcagggagactgcttattccaatgctagccttctcattcaaaatgtgactcgggaggacgctgggagctacacccttcacatcattaaacggggagacggcaccagaggagtgactggctacttcacgtttactctgtatctcgagacccctaaaccttcaatctcctcatccaatttaaacccaagagaagccatggagacggtgatactcacttgtgacccagaaactccagacacaagctaccagtggtggatgaatggtcagagccttcccatgacccaccgttttcagttgtcagaaacgaataggaccctgttcctctttggtgtaactaaatacacagctgggccatacgaatgtgagatcagaaactccggctctgctagcagaagcgatcctgtgaccctaaacctgttacacggtcccgacctgcccaggatccacccctcttatacaaattaccgcagcggagacaatctgtacttgagttgcttcgcaaatagcaatccccctgctcagtatagctggacgattaacggcaagttccagcagagtggacagaacctgtttatcccgcagatcaccacaaagcacagcggactctatgtctgtagtgttaggaattctgcaaccggagaggaatcctccacatcactcactgtgaaagtctctgcttccactcggatcgggctgttacctcttctgaaccccacctag

SEQ ID NO: 235944 - DNA, 1008 bp, synthetic construct
  misc_feature 1..1008: note = Description of Artificial Sequence: Synthetic coding sequence
  source 1..1008: mol_type = other DNA
atgggtccactttctgcccctccttgcactgaacacatcaaatggaaaggactgctcgtgacagcaagccttctcaacttctggaacttgccaacaaccgctcaggtgactatcgaagctcaaccgccaaaggtttcagagggcaaggatgtgctgcttctggtccataacctgccacaaaatctgaccggatatatctggtacaagggccaaattcgcgacttgtatcattacatcacctcctatgtcgtcgacggtcagattatcatatatggccctgcatactcgggcagagagaccgcttacagcaatgcctctctgctcatacaaaacgtcactagggaggacgctgggtcttacaccttgcacataatcaaaagaggagacgggaccaggggggtaactggttacttcaccttcacactatacctcgagacacctaagccctccatttcttcatcaaatcttaatccccgtgaagctatggagacggtgatcctaacctgtgaccctgagacacccgatacctcatatcagtggtggatgaatgggcagagcttgccaatgacgcaccgcttccaattatccgagacgaatagaactctgttcctttttggagtcactaagtatactgctggaccttatgaatgtgagatccggaacagcggatctgccagtaggtccgaccccgtgaccctgaatctgttacatggtcctgatttgcctcggatccatcccagctacactaactacagaagcggagacaatctttatctgtcttgcttcgctaactccaaccctccagctcaatatagttggacgataaatggaaaattccagcagagtgggcagaatttgttcatcccccagatcaccacgaagcatagcggcctctatgtgtgttcagtgagaaatagtgctactggcgaggagtcctccactagtctcacagtgaaagtaagcgctagcacccgaattgggctgcttccgctattaaatccaacgtag

SEQ ID NO: 235945 - DNA, 1287 bp, synthetic construct
  misc_feature 1..1287: note = Description of Artificial Sequence: Synthetic coding sequence
  source 1..1287: mol_type = other DNA
atgggcccattgagtgcaccaccatgcacacagagaatcacatggaagggactactgttgaccgccctgctgcttaacttttggaacctgcccactacggctcaggttactatagaagctgagcctacaaaagtaagcaagggaaaagacgtgctccttctggtccataacctgccacaaaacctcgctggctacatctggtacaagggacaaatgaaggatttataccactacattacttcttatgtggtcgacggacaaattatcatttacggtccagcttattcagggagagaaacggtgtactctaacgcctctttactcattcagaatgtaacacgggaagacgctggctcctatacactgcatatcgtcaaaagaggcgacggcactcggggtgagacaggacacttcacatttacactttatctggagactccaaagccaagtataagcagtagcaacctttacccacgggaagacatggaggccgtaagcctcacttgtgatccagagacaccagacgcatcatacctgtggtggatgaacgggcagagtctgccgatgactcattcactacaactctccaagaataagcgaactttattcttgtttggtgtcacaaaatacactgctggaccctatgagtgtgagattcgtaaccctgtatcagcttccaggtctgatccggtgacgctcaaccttctgccaaagttacccaaaccatacatcaccatcaacaatctcaacccccgagagaacaaggacgtgctcgctttcacctgcgagcccaaaagtgagaactacacttacatttggtggctcaatggacagtcactgccggtgtcccctcgggtgaaaagacctatcgaaaataggatcttgattttaccttcggtgacaagaaacgaaactggaccatatcagtgtgagatccaggaccggtatggaggaatccggagctatcctgttacactcaacgtgctctatggccctgacctcccacgtatttacccctccttcacttactatcactccggtgaaaacctgtatctgtcctgctttgccgatagcaatccgccagctgaatactcttggactataaatggtaaattccagctgagtggacagaaattgttcatacctcagatcacaacgaaacactccggcttatacgcctgcagtgtaagaaacagcgcaacaggcatggagtcctctaaatcgatgacagtcaaagtgtctgctccctctggcactgggcatctgccagggctgaaccctctttag

SEQ ID NO: 235946 - DNA, 981 bp, synthetic construct
  misc_feature 1..981: note = Description of Artificial Sequence: Synthetic coding sequence
  source 1..981: mol_type = other DNA
atggggcctttatccgcccctccctgtactcagcgcattacgtggaagggtgtgctcttgactgcaagccttctaaacttctggaacccgccaacgactgctcaggtaaccatagaggctcaaccaccaaaagtgagtgagggaaaagacgtgctgttattggtccacaacctgccacagaatctcgcaggctatatctggtataaagggcagatgacatatctttaccattacataacgtcttatgtcgtagacggtcagagaatcatctatggacccgcatacagcgggagagagagagtttattctaatgcctcccttctcatacagaatgtgactcaggaagacgctggttcatataccctccatatcataaagcgaagagacggcactgggggagtcaccgggcatttcacttttaccctccacttggaaacgcccaagccatcaatatcgtcgtctaatctgaatccgagggaagctatggaggctgtgatattaacctgtgaccccgcaaccccggcagcaagttatcagtggtggatgaacggacagtccttgccaatgacacacagactgcagctaagcaaaacaaaccgcacgctgtttatttttggggttaccaaatatattgccggaccatacgagtgcgaaatacgcaaccccgttagcgcttctcgcagcgatcctgtcacactcaacctgctgcatggtccggatctgccatctatctacccctcgttcacatattaccgcagcggcgagaatctgtatctcagctgttttgcggagtctaatccccgagcgcaatattcctggaccataaacggtaaattccagctttccggacagaagctcagcatccctcagatcaccaccaaacactctggactctacgcgtgttcggttaggaattcggctaccggcaaggaaagtagcaagtcaatcactgtgaaggtctccgattggatcctcccttag

SEQ ID NO: 235947 - DNA, 1260 bp, synthetic construct
  misc_feature 1..1260: note = Description of Artificial Sequence: Synthetic coding sequence
  source 1..1260: mol_type = other DNA
atggggcctctctctgcccctccgtgtacacaacggatcacttggaagggcgttttgttgaccgctagccttcttaatttttggaacccacctacaaccgcacaggtgaccatcgaggcacagcctccaaaagtgagtgagggtaaagatgtgctgctgttggtgcacaaccttcctcagaacttagcaggctatatctggtataaaggtcaaatgacatatctctaccactacatcacctcctatgtcgtggacggacagaggattatatatggtccagcctattccggtagggaaagggtttactctaatgcgtctctgcttattcagaacgtgacacaagaggacgctggctcttacaccctccacattattaagaggcgggatggaaccggaggcgtcaccggccattttacttttactctacacctggagacgcctaagccaagcataagctcctccaatctgaacccgagggaagctatggaagccgtgatcctgacttgcgaccccgcaacacctgctgctagctaccaatggtggatgaacggacagtccctgcccatgacccacaggcttcagttgagtaagaccaacagaaccctgtttatttttggagtcacaaagtacatcgccggaccttatgagtgtgaaattcgtaaccccgtctctgcatcgcggtccgatccagtgaccctgaacctgcttcctaaattgagcaaaccttacatcaccataaacaacctgaatcccagggagaataaagacgttctgaccttcacatgtgaacccaaatccaagaactacacctacatttggtggcttaacggccagtcactccctgtctcacccagggtgaaaaggcctatcgagaacagaatactcattctgcctaacgtaacacggaatgagaccggaccctatcaatgcgagatccgagatcggtatgggggaatccgcagtgatcccgtcaccctgaacgtgctctatggcccagacctgccctccatttatccatccttcacctattatagatcaggcgagaatctgtacttatcatgcttcgctgagagcaatccacgtgcccagtacagttggaccattaatggaaagttccagctcagcgggcaaaaactttcgattcctcagattactacaaaacattctgggttgtacgcctgctcagtcaggaattcagccactggaaaggagtccagtaagtcgatcacagtgaaagtctcggactggatcttgccctag

SEQ ID NO: 235948 - DNA, 981 bp, synthetic construct
  misc_feature 1..981: note = Description of Artificial Sequence: Synthetic coding sequence
  source 1..981: mol_type = other DNA
atgggtcctctttccgctcctccctgcactcagagaatcacatggaagggagtcttgctgacagcctccctgcttaatttttggaatccacccacaactgcacaggttactatagaggctcagcctccgaaggtaagcgagggtaaagatgtgctgctgctggtgcacaacctccctcaaaacctggctgggtatatttggtataaggggcaaatgacctacctgtatcactatattacctcctacgttgttgatgggcagaggatcatctacggaccggcatattctggcagggagcgggtctactctaatgcttcgctcttaatccagaatgtgacccaggaagacgcgggtagctatactttacatattattaagagacgtgatgggacgggtggcgtgaccggccactttacgtttactctccatcccaagttgtccaaaccctatataaccatcaataacctcaatccgagggagaacaaggacgtgctgaccttcacatgcgaacctaaatcaaagaactacacttacatttggtggctgaatggccagagccttccagtgagccccagagttaagcggccaatcgagaatcgcatactcattctgccaaatgtgacacgaaatgagactggtccttatcagtgcgaaatccgtgatcggtacgggggtatacggtcagaccctgtgacactgaacgtgctctatggccctgaccttccttcaatttaccccagcttcacttattatagaagcggcgaaaacttatacttgtcctgcttcgccgagagcaatccaagggcccagtatagctggactatcaatggcaaattccagctgtccggccagaaactttctatcccgcagattacgactaagcactcaggcctgtatgcgtgcagcgtccgcaacagtgccactggtaaggaaagctccaagtccatcacagtgaaagtttcggattggattttgccttag

SEQ ID NO: 235949 - DNA, 1008 bp, synthetic construct
  misc_feature 1..1008: note = Description of Artificial Sequence: Synthetic coding sequence
  source 1..1008: mol_type = other DNA
atgggccctctctccgcccctccttgtacccagcacatcacctggaaggggctgctgctgaccgcgtccctcctgaatttctggaatctgccaatcactgcgcaggtcactattgaggcgttacctcccaaggtctccgaaggcaaagacgttttgctgctcgttcataacctccctcagaatcttgcaggatatatctggtacaagggacagctgatggatctgtatcactacattaccagctatgtggttgacgggcagatcaacatctatggccctgcttatacagggcgagaaaccgtatactccaacgccagtctgttgatccagaacgtgactcgagaagacgcaggcagttatacattacatattattaagcgcggagaccgcacacgtggagtaacaggatattttacattcaatctgtacctcaaattacccaagccatacattacaatcaacaacagtaaacccagagagaataaggacgtacttgcgtttacatgtgagcccaagagcgagaactacacatacatttggtggctgaatggccagagtctccctgttagtcccagggtgaaaaggccaatcgagaatagaattctcatccttccaagcgtcactcgcaatgagacgggaccctacgaatgcgaaattcgagatcgggatgggggaatgaggtctgaccccgtcaccctgaatgtgctgtatggacccgatctgccaagcatctatccgtcattcacttactacaggagcggggagaacttgtacctctcctgtttcgccgagagcaacccacccgcagaatacttttggacaatcaacggaaaattccagcagtccggtcagaagctgtccataccccagatcactaccaaacatagaggcctatatacctgttcggtccgaaattcagcgacagggaaggagagcagcaagagcatgacagtggaggtgagcgccccatcagggattggccgactgcccctgctgaacccaatatag

SEQ ID NO: 235950 - DNA, 1008 bp, synthetic construct
  misc_feature 1..1008: note = Description of Artificial Sequence: Synthetic coding sequence
  source 1..1008: mol_type = other DNA
atgggccctttaagtgcacctccttgtacgcaacacatcacatggaaggggcttctactgacagcctccttgctgaatttctggaacctgcccatcactgcccaagttacaatagaggctctgccccctaaggtctcagaaggaaaggacgtgttgctgctggtgcacaatcttcctcaaaatctcgctggatacatctggtataagggccagctgatggatttgtatcattacattacttcgtatgttgtggacggccagatcaatatttacgggcctgcttacacgggccgagagacggtctactcaaacgcaagtttgctcatccagaacgttactcgcgaggacgctggctcttatacgctccatataatcaaaaggggcgatcgtacacgaggggtgaccggatactttacgtttaatctgtatctgaagctgcccaagccttatattaccattaacaactccaagcctcgcgagaataaggatgtgctggcgtttacatgtgaaccaaagagtgagaactacacttatatctggtggttaaatgggcaatctctgcctgtgtcaccaagagtaaagaggcccattgaaaaccgcatcctgatactgccgtctgtgacccggaatgagactggaccatatgagtgtgagatccgggaccgagacggaggtatgcgctccgatcccgtgacattaaatgtcctttatgggccagacctgcccagcatctacccctcttttacctactatagatccggtgaaaatttatatctgtcttgctttgcggaatctaatccaccagctgagtatttttggacaatcaatggaaagttccagcaatcgggccagaaactgagtatcccccagattacaacaaagcatcggggattgtacacttgtagtgtccgcaacagcgcaaccggcaaggagagtagtaagtccatgacggttgaggtgtcagcccctagcgggattggacgcctacctctgctcaacccgatctag

SEQ ID NO: 235951 - DNA, 1008 bp, synthetic construct
  misc_feature 1..1008: note = Description of Artificial Sequence: Synthetic coding sequence
  source 1..1008: mol_type = other DNA
atggggcctctttcagcacctccctgcacccaacatatcacttggaaggggctgctcttgaccgcaagtctgctgaacttctggaatctgccaatcaccgcccaggtgaccattgaggcactgccacccaaggtgagtgaaggcaaggacgtgctgttgcttgttcacaatcttccacagaatttggcaggttatatttggtacaaaggtcagctaatggacctgtaccactatattacatcatatgttgtagatggtcagattaacatatatggcccagcttacacgggtagggagaccgtctactcgaatgcttcgcttctaatccagaatgtgacaagggaggacgcagggagttataccctgcacattatcaaacgaggtgaccgtaccaggggcgttaccggttactttacattcaacctgtacctaaagctgcccaaaccatacattacgatcaacaacagcaagcctagagaaaataaggatgtcttggccttcacatgtgaacctaagtctgagaattacacctatatatggtggttgaatgggcagtcacttcctgtcagtcccagggtaaaacggccaattgaaaacaggattctcattcttccttctgtgacacgcaacgagacaggcccatatgagtgtgaaattagggaccgagatggtggcatgcgatcagatccagttaccttgaatgtgttgtacgggccagatctgccttccatttacccaagctttacatattaccggtctggggaaaacctttatctctcctgctttgccgagtctaacccccctgcggaatacttttggactatcaacgggaagttccaacagtcaggacagaagctcagcatcccccagattaccaccaaacaccggggactgtacacttgctccgtgaggaatagtgccactggcaaggaatcctcaaaatcaatgacagttgaagtctccgctccatccggcattggacggctccccctgctgaaccccatctag

SEQ ID NO: 235952 - DNA, 1275 bp, synthetic construct
  misc_feature 1..1275: note = Description of Artificial Sequence: Synthetic coding sequence
  source 1..1275: mol_type = other DNA
atggggcctttgtcagcgccaccatgtactcagcacatcacctggaaaggtcttctcctgactgcttccttactgaacttttggaatctgcctaccactgcccaagtaatcatcgaggccaagccccctaaagtgagcgaaggaaaagatgtgttgctgttggtgcataacctcccacagaacttaacaggctacatctggtataaggggcagatgaccgatctatatcactatatcacaagctacgtggtccacggtcaaatcatctatggaccagcctactctggcagggaaaccgtgtatagtaatgctagccttctgatacagaacgtgacgcaggaagatgccggatcttacacactccatatcatcaagcggggagacgggacgggcggagttactggatattttaccgtgacactctattctgagacacctaagcctagcatctctagcagtaatctaaacccacgggaggtcatggaggccgtgcgcctaatttgtgacccagagacacccgatgccagttacctgtggcttctcaacggccaaaatttgccaatgacccaccgactgcagctgtctaaaactaatcggaccttatatcttttcggagtcaccaagtatatcgcaggaccatatgaatgcgagattagaaaccccgtctccgcctcacgctctgatcctgtgacattgaatcttctccccaagctgccaatgccttatataacgatcaacaatctgaaccctcgagagaaaaaggacgtgttggcattcacttgtgagccaaagtctcggaactacacttacatctggtggctcaatggacagagtcttcccgtgtcgcccagagtcaaaagacccatcgagaatcgcatactgattttgccatccgtcacaagaaatgaaacagggccttaccaatgcgagattcgagaccggtacggaggcattaggtcaaacccagtcaccctcaatgtgctctacggtcctgacctcccaaggatttatcccagttttacctactatagatcaggtgagaacctggatctctcctgctttgccgacagcaatccacccgctgagtactcatggaccatcaatggaaagttccagttgagtggccaaaaactgttcatcccccaaattacaactaaccactcaggcctctatgcctgttccgtgagaaacagcgccaccggcaaagagatcagcaagtcaatgattgtgaaagtgtctggtccatgccatgggaaccaaactgagagccattag

SEQ ID NO: 235953 - DNA, 1308 bp, synthetic construct
  misc_feature 1..1308: note = Description of Artificial Sequence: Synthetic coding sequence
  source 1..1308: mol_type = other DNA
atggggcctctgtctgctcccccatgcacccagcacattacgtggaaagggttgctcctgaccgcctccttattaaatttctggaacctaccgaccaccgcccaggttataatcgaagcgaaaccacctaaggttagtgagggcaaagacgtgttgcttttggtgcacaacctccctcaaaacctgaccggatacatatggtacaaggggcaaatgacagacctgtaccactatatcacctcttacgttgtgcatggccagatcatttacggtccggcatattctgggcgagagaccgtgtattcaaacgcctccctcctcattcagaatgtgacccaggaagatgcaggctcatacacactgcacatcataaagagaggcgatgggaccggaggggtaactggatacttcaccgtgactctttactccgaaacaccaaaacccagtattagctcaagtaacttgaaccctcgggaggttatggaagcagtcagattgatctgtgaccccgagactcccgatgctagctacctgtggctattaaacggccagaaccttcccatgactcaccgtcttcagttgtccaagaccaatagaactttatacctgttcggcgtaaccaaatacatagctgggccatatgaatgtgagattcgcaatcctgtttctgcttcacggtccgatcccgtgacactcaacttgctgcccaaactccctatgccttacattaccattaataaccttaaccctcgtgaaaaaaaggacgtgctggcttttacatgtgagcctaaatcccgcaactatacatacatatggtggctgaacggtcagagccttccggtgtcccctagagtgaaacggcctattgagaataggatcctcattctgccaagtgtgactcggaacgaaaccggaccctatcagtgtgaaataagagaccggtacggagggatccgttcgaatcccgtgaccctgaacgttctgtacgggcctgatttaccacgaatatacccaagcttcacctactacaggtcaggtgagaacctggacctctcatgctttgcggattccaatccaccggctgagtacagctggacaattaatgggaagttccagctcagcggacagaaactgttcattccgcagataactactaaccactccggcctatacgcctgttcagttaggaatagcgctacaggaaaggaaatttccaaatccatgatcgtgaaagtgtcagaaaccgcaagcccgcaagtgacttatgccggaccaaacacatggttccaggagatcctgctgctttag

SEQ ID NO: 235954 - DNA, 606 bp, synthetic construct
  misc_feature 1..606: note = Description of Artificial Sequence: Synthetic coding sequence
  source 1..606: mol_type = other DNA
atgggaggcgatgagaaccggggtgtcactggccatttcactttcactctgtatctggaaacaccaaagccatcaatttccagttccaaacttaatcctcgagaggccatggaggcggtgtcgctgacttgcgatcctgaaactcccgacgccagctacctgtggtggatgaacggccaatctttgcctatgtctcaccggttgcagctgagcgagaccaatcggacactattcctgttgggggtcaccaaatacacggcaggaccatacgagtgtgaaatcaggaatccggtttctgcaagcagatccgaccctttcacactgaatctgctgcatggcccagatctccccagaatttacccatcttttacttattatagatctggcgaagtgctctacctgagctgtagcgctgattcaaaccctccagctcaatatagctggacaataaacggaaaattccagctcagcgggcagaaactgtttatacctcagatcacaactaagcattcaggactgtacgcctgctccgtccgcaactctgctaccggcaaggagtcctctaagtccatgacggttaaagtatccgactggacactgccctag

SEQ ID NO: 235955 - DNA, 1281 bp, synthetic construct
  misc_feature 1..1281: note = Description of Artificial Sequence: Synthetic coding sequence
  source 1..1281: mol_type = other DNA
atgggcctgctcagcgcaccaccgtgcacccagcgcataacttggaagggactcctgctaaccgcttcactactcaatttttggaatcctccgaccactgctcaggtcacaatcgaggcccagcccaccaaagtgagcgaaggcaaggatgttctgctgctggtccacaatctgccccagaacctgaccggatacatttggtacaagggacaaatccgtgacctctaccattacatcacatcctacgtggtggatggacagattatcatctacggacctgcgtattccggacgagaaactatatacagtaacgcatcccttctaatacagaacgtgactcaggaagacgccggatcctacacactccacatcatcatgggaggagatgagaaccggggtgttacagggcatttcacgtttactctgtacctggagacaccaaagccgagcatcagttcaagcaaactgaacccaagggaggcaatggaggccgtgtccctgacatgcgaccccgagacaccagatgcatcatacctttggtggatgaacgggcagtctctgcccatgtcacatcggctacaactgagtgagacaaacaggaccctgtttctccttggcgtgactaaatacacagcaggaccgtacgagtgtgagatccggaaccctgtgagtgcctctagaagcgacccgttcactctgaacctcctccctaaactgcctaaaccctacataacaataaacaacctgaaacccagggagaacaaggatgttctgaatttcacatgtgaacccaagagcgagaattatacgtatatttggtggctgaacggccagagcttgcccgtttcgcctcgcgtgaagagacccatagaaaatcggatcctgatcctcccatccgtgacccgcaacgaaaccggcccataccaatgcgagatacgagaccagtacggtggcattcgttcctaccccgtgaccctcaatgtcctgtacgggccagaccttcccaggatctatccaagtttcacgtactatagatcgggcgaggtcctctacttgagttgttcagccgattcgaatcctcccgcacagtactcatggacaattaatggcaagtttcagctgtccggccagaagctgttcatccctcaaataacaaccaagcattctggcctctatgcgtgtagtgtccgtaactcagctaccggaaaggagagctccaaaagcatgactgtgaaagttagcggcaagcgaatccccgtgagtctggcgatcggtatctag

SEQ ID NO: 235956 - DNA, 717 bp, synthetic construct
  misc_feature 1..717: note = Description of Artificial Sequence: Synthetic coding sequence
  source 1..717: mol_type = other DNA
atgagtcatcgtttgcaattatccgaaaccaaccgaacgctgttcttactaggcgtcacaaagtatactgccggaccttatgagtgcgaaataaggaatcctgtctccgcaagcagaagtgatccgttcacattgaacttactccccaagcttccgaagccatacatcactatcaataatttaaagccccgtgagaataaggacgtgctgaattttacgtgtgagcccaaaagcgagaactatacctacatctggtggctgaacggacagtcccttcccgtgtcacctcgggtgaagcggcctatagaaaaccgaattcttattctaccttccgtgacaagaaacgaaacaggcccatatcagtgcgaaatccgcgatcagtatggcggaatccgctcctaccccgtcactctaaatgtgttgtatgggccagatctacctcgaatttacccttcattcacctactaccgctccggggaggtgctctatctcagttgctctgccgactctaatccccctgcgcagtattcctggacaatcaatggcaaatttcagctgtccggccagaagctctttattccgcaaattacgactaagcacagtgggctgtacgcatgtagcgtgaggaactctgccaccggaaaagaatcttcaaaatcaatgacagtgaaggtctcagcgtactccagttccatcaactatacagctgtctactag

SEQ ID NO: 235957 - DNA, 1260 bp, synthetic construct
  misc_feature 1..1260: note = Description of Artificial Sequence: Synthetic coding sequence
  source 1..1260: mol_type = other DNA
atggggcttctctccgccccaccatgtacccagaggataacctggaaaggcctgctgttaaccgcatcattattgaacttctggaatccccctacgaccgcccaagtgacgattgaagcccagcccaccaaagtaagcgagggtaaggacgtgctgcttttagtgcacaatttgccccagaacctaacagggtatatttggtacaaggggcagattcgagatctttatcactacatcacatcttacgtcgtggacggccaaatcatcatctatggaccagcttattctggcagggaaactatctactctaacgcaagcttgcttatacagaatgtgacccaggaggatgccggatcttataccctgcacattatcatgggcggagacgagaacagaggcgttacaggccatttcacctttaccttgtacctggagacacctaagcctagcatatccagttccaagctaaatccacgagaggcgatggaggcagtcagcttgacatgtgatccagaaacccctgatgcctcatatttgtggtggatgaatggacagtccctgcccatgtcccaccggttgcagctgtctgaaacgaaccgcaccctgttcctcctgggcgtgacaaaatacaccgccggaccatatgagtgcgagatccgcaaccctgtgtcagcttcccggagcgatcctttcacccttaatcttttgcccaaactgcccaaaccatatatcactattaataatctgaagccacgagagaataaggacgtactcaactttacttgtgagccgaaatctgagaattatacttacatatggtggttgaacggccagagcctgcctgtcagcccgagggtcaagagacctattgaaaatagaattcttatattgccgtccgtcactagaaacgagactggcccatatcaatgcgaaattagagaccaatatgggggaatccggtcttatcctgtcaccctgaatgtcttatatgggcctgatttgccgagaatctacccatctttcacatattaccgttcaggggaggtcctgtatttatcttgcagcgccgattcaaaccccccagctcagtattcttggactataaatgggaaattccagctgtctggacaaaagttatttatcccccagattacaaccaagcacagcggcctttatgcctgttccgttcgaaactctgcaacaggcaaagagtcctcaaagtcgatgacggttaaggtctcagattggacgctaccctag

SEQ ID NO: 235958 - DNA, 894 bp, synthetic construct
  misc_feature 1..894: note = Description of Artificial Sequence: Synthetic coding sequence
  source 1..894: mol_type = other DNA
atggggctgctgtctgccccaccctgcacgcagcggatcacatggaaaggcctcctcttgacagttgagacacctaagccaagcatttcttcaagcaagctgaatcctagagaggcaatggaggctgtgagcctgacttgtgacccagagacgcccgatgcaagctacctttggtggatgaacggccagtcactgcctatgtcccacaggcttcagctgtcagaaacaaataggaccctttttttgcttggtgtgaccaagtacacggctggtccatacgaatgcgagatccggaatccggtttccgcctccaggtctgatccttttacactgaacctcttgccaaagttaccgaaaccctatattaccattaacaacctgaagccccgagagaataaagacgttctcaatttcacatgcgagcctaagagcgagaactacacctatatctggtggctgaacggacaatctctgccagtctctccacgtgtaaaacgtcctatcgagaaccgtatactgattctaccttctgtgacacgaaatgaaaccggcccttatcagtgtgagatcagagatcagtacggcggtattcgcagctaccctgtgactctgaatgtgctctatgggcctgatctacctaggatttacccaagtttcacatattaccgcagcggggaggtgctctatctctcatgctccgcggatagcaacccaccagctcaatactcatggacaataaacgggaaatttcaactgtccggccagaagctgttcattccccagattactactaaacacagcgggctgtatgcttgctctgttcgcaactcagctaccggcaaggagtcttctaaatccatgaccgttaaagtaagtgattggactttgccttag

SEQ ID NO: 235959 - DNA, 1209 bp, synthetic construct
  misc_feature 1..1209: note = Description of Artificial Sequence: Synthetic coding sequence
  source 1..1209: mol_type = other DNA
atgggtcctctaccagcgccatcctgcacacaaaggattacatggaagggcttactcttgactgcttcacttctgaatttttggaacccccctacgactgcggaagtgacgatcgaggcacagccgccaaaggtgtcagaggggaaggacgtcctcctcttagttcacaacctaccccaaaatctccccggttatttttggtacaagggggaaatgaccgacctgtatcactacatcatatcttatatcgtcgatggtaaaatcataatttatgggccagcctatagtggtcgtgagacagtttattctaatgcctcactgcttatccagaacgtgactcgaaaagacgctggcacctatactctccacatcatcaagcgcggagacgaaacacgcgaggaaattcgccactttacatttacactgtacctggagacacctaagccatacatctcttccagcaatctaaatcctcgggaggcaatggaggctgtgaggctcatctgcgatcctgagacactggatgcttcttatctctggtggatgaatggacaatccttgcctgtgacccatcgattgcagctaagcaagaccaaccgcacgctctacctgttcggggtcacgaaatacatagccggaccctatgagtgtgagatccgcaaccccgtttcagcatcgcggtccgatccagtgacacttaacctactgcacggccctgacctgccgaggatttatccctccttcacatattacagaagcggggagaatctagatctaagctgttttacagagtctaaccctcctgccgaatacttctggaccataaacggcaagttccagcagagcgggcaaaagctttttattccccagatcactcgcaaccactctgggttatacgcctgctcagtgcacaactcagcaaccggcaaagagatttctaagtccatgacagtcaaggtatctgggaagtggatccccgcttcgctggccgtaggcttctacgtcgaaagtatttggctgtctgagaagtctcaggagaacatctttataccctctctgtgtcctatggggacctctaaaagtcagattctgctgttaaacccacctaacctatccctgcagaccttatttagcctctttttctgctttttgatggccgacctagtgtcaggactgaagaaggtgggacgaggactgtaccaaccatag

SEQ ID NO: 235960 - DNA, 1281 bp, synthetic construct
  misc_feature 1..1281: note = Description of Artificial Sequence: Synthetic coding sequence
  source 1..1281: mol_type = other DNA
atgggaccactccccgcaccaagctgtacccagcgaattacctggaagggccttctgctcaccgcctctctccttaacttctggaatcctcctactactgccgaagtaactatcgaagctcagccgccaaaggtctctgagggcaaagatgtcctgctgctagtgcataacctcccccaaaatcttcccggttatttctggtacaagggcgagatgactgacttataccactacattattagttacatcgtggacggcaaaatcattatttacgggcctgcttattctgggcgagaaactgtttactccaacgcatccctgctcattcagaacgttacacgaaaggatgccggaacttataccctgcacatcatcaagcgaggcgatgagacaagagaggagatccgccacttcacattcacactgtacctagagactccgaagccctatatctcatctagtaacctcaatccgcgtgaggcgatggaggccgtccgattgatctgtgaccctgagactctcgatgcgagctatctgtggtggatgaacggccagtcgctcccggtcacccataggctccagctgtctaagactaaccgcactttatacctgttcggtgtgacgaaatacatcgctgggccatatgagtgcgaaatcaggaatccagtgagcgccagccgttctgaccccgttactctgaacctgctgcccaagctccctatcccttatatcacaattaacaacctgaacccacgcgaaaataaagacgtgttggccttcacgtgtgagccaaagtccgaaaactacacctatatctggtggttgaacggccagagtctgcccgttagccctggtgtcaagaggccaattgagaaccggatattgattcttccatcagttacacgaaatgaaaccgggccttatcagtgcgaaattagggatcgatacggcggtctgcgctcaaacccggtcatcctgaatgtgctgtacggtcccgatctgcccagaatttacccctcctttacgtactaccggtctggcgagaatctcgatcttagctgctttactgagagtaacccccctgcggaatatttttggacaatcaatgggaagtttcagcagtctgggcagaaattgttcatccctcaaatcactagaaatcattctggcctttacgcgtgctccgtacacaacagcgccactggaaaggaaatcagcaagagcatgactgtgaaggtcagtggtccatgccacggcgaccttactgaaagccagtcatag

SEQ ID NO: 235961 - DNA, 723 bp, synthetic construct
  misc_feature 1..723: note = Description of Artificial Sequence: Synthetic coding sequence
  source 1..723: mol_type = other DNA
atgggccctctcccggcaccgagttgtactcaacgcatcacctggaaaggcctgctgctgacagcctctttgcttaacttctggaatcctccaaccacagccgaggtgacaatagaggctcagccacctaaagtgtcggagggcaaagatgtcctgttgctggtccataatctgccccagaacctccccggttatttctggtataaaggggagatgaccgatttgtaccactatattatttcatacattgtcgatggtaagattatcatttatggcccagcatatagcggcagggagacggtctactctaatgcgtcactgcttatccagaatgtcactcggaaagacgccggtacctatactcttcatatcataaagagaggagacgaaacgcgcgaggagatccggcatttcactttcactctttactacggaccagatctccctcgcatctacccaagctttacatactacagatcgggcgaaaacctggatttgtcctgtttcactgaaagtaatcctcctgcggaatacttttggaccatcaacggcaagtttcagcagtcagggcagaagctctttatacctcaaattaccagaaaccattccgggctgtacgcttgcagcgttcacaattctgccacagggaaggagatttccaaatccatgaccgtaaaggtgagcggcccttgccacggggacctaacggagagtcagagttag

SEQ ID NO: 235962 - DNA, 1164 bp, synthetic construct
  misc_feature 1..1164: note = Description of Artificial Sequence: Synthetic coding sequence
  source 1..1164: mol_type = other DNA
atgggccctctgcccgctcctagttgcactcagaggatcacttggaaggggctgctgcttaccgcgtccctcttgaacttctggtacaaaggagaaatgaccgatctgtatcattacatcatctcatacatcgtggacggcaaaatcataatttatggtcccgcttattcgggtcgtgaaacagtgtattcgaacgctagtttgctgattcagaacgtgacccggaaagacgccggtacatataccctccatattataaagaggggtgacgagacaagagaagagattcggcatttcacattcacgctctacttggagacaccgaaaccatatatttcctcaagcaacctgaatcccagggaggctatggaagccgtaagactgatttgtgacccggaaacgttggatgcgtcatatctatggtggatgaacggacagtccctccctgtgacgcatcgtctccagctgagcaaaacgaaccgaaccttgtatctgttcggagtgacaaaatacatcgccggtccttatgagtgtgagatccgcaacccggttagcgccagccgttcagatccagttaccttaaacttactcccgaaactgcctattccttatataacaatcaataaccttaacccgagagagaataaagatgtattggcattcacctgcgaaccaaagtcggagaactacacatacatctggtggctgaatgggcagagcctgcctgtcagccctggggttaaaagaccaatagaaaaccgtatcctcattctccctagcgtgaccagaaatgagactggcccttatcaatgcgaaatacgggaccgatacggagggctgagatccaaccctgtgatccttaatgtcttatatggtccggacttacctcggatctacccttcctttacgtattaccgcagtggagagaatctggacctctcctgcttcacggaatctaacccgccagccgagtacttttggacaatcaatggaaaattccagcagagcggccagaagttatttatcccccagatcactcgcaatcattctgggctatacgcctgttccgtacacaactccgccacgggcaaggagattagtaaatctatgactgtgaaggtgtccggcccttgccacggtgatctgactgaaagccagtcctag

SEQ ID NO: 235963 - DNA, 1002 bp, synthetic construct
  misc_feature 1..1002: note = Description of Artificial Sequence: Synthetic coding sequence
  source 1..1002: mol_type = other DNA
atgggaccactgcctgctccctcgtgcacccagcgcatcacctggaagggcctgttactaaccgcctccttattgaacttctggaatcccccaactaccgctgaggtaacaatcgaggcccagccgccaaaagttagcgaaggcaaggacgtgctgctgctagtacacaacctgccccaaaatctgccgggttacttttggtataagggagagatgaccgatttgtaccattacatcattagctatattgttgacggtaagatcatcatctatggcccagcctactcagggagggagacggtctactccaacgcttcgctgctgatccaaaacgtaacccgtaaggatgcaggtacctatacgcttcatattattaagcggggtgatgaaacgagggaggaaattcgacacttcaccttcacactgtattctaagctgcctatcccctacattacaataaacaacctgaaccctcgagagaacaaggacgtgctggcattcacgtgtgagcccaagagtgaaaattatacctatatctggtggctcaatggccagtccctaccagtgtcccccggagtgaagcgtcccattgaaaaccgaatcctgatccttccgtctgttactcgcaatgagacaggcccatatcagtgcgaaatccgggatcgatacgggggactgagatctaacccagttatcctcaatgttttatatgggccagacctgcctaggatctaccctagcttcacgtattaccgtagcggcgagaatctggacctatcatgttttactgaaagcaatccacctgccgagtatttctggacaattaatggcaagtttcaacagtccggtcagaagctttttattcctcaaattacacggaaccattctggactgtacgcatgtagcgttcataactctgctaccggcaaagaaatttcaaaatcaatgacggtcaaggtttctgggccttgtcacggtgaccttacggagtcccaaagttag

SEQ ID NO: 235964 - DNA, 1032 bp, synthetic construct
  misc_feature 1..1032: note = Description of Artificial Sequence: Synthetic coding sequence
  source 1..1032: mol_type = other DNA
atgctactgctgaaaaagcacaccgaggacatatcaagcgtgtacgaaattcgggagcggctgggcagtggcgctttttctgaggttgtcctggcccaggaacgtggtagtgctcatctggtggcgttgaaatgcatccccaaaaaagccctgcggggtaaagaagcgctcgtggagaatgagatcgccgtcctgagacgcatcagccacccaaacattgtagccctggaggacgtgcatgaatcaccctcccacctatatctcgccatggagctggtcaccggaggcgagttgttcgatcgtattatggaacgtggttcctacactgaaaaagacgcgagtcatcttgttgggcaagttcttggtgcagtgagttacctgcactctctgggaatcgtgcacagggatctgaaacccgagaacctgctatatgccactccctttgaggactctaaaatcatggtgtccgactttggcctttctaaaatccaggcaggaaacatgctgggcaccgcatgcgggaccccaggctacgtcgcccctgagctgctggagcagaagccatacggtaaagccgtggacgtgtgggctctaggcgtgatctcgtacatcctattatgcgggtatccccctttttacgatgagtccgatccagagctgttttcacagatcctcagagcttcctacgagtttgattcacctttctgggatgacatctccgaaagtgcaaaggatttcatcagacatctgctcgagcgggatcctcagaaacggttcacatgccagcaagccctaaggcatttatggataagtggcgacactgccttcgaccgcgacatcctgggtagcgtatctgagcagattaggaaaaattttgccaggactcattggaagagggccttcaacgcaaccagctttttgagacacattagaaaactgggccaaattcccgaaggtgaaggggcttccgaacaaggcatggcccgacatagccatagtgggctcagagctgggcagcctccaaaatggtag

SEQ ID NO: 235965 - DNA, 1101 bp, synthetic construct
  misc_feature 1..1101: note = Description of Artificial Sequence: Synthetic coding sequence
  source 1..1101: mol_type = other DNA
atgcttctcctgaaaaagcacactgaggacattagttccgtgtacgagattagagagcggctgggctccggtgcattctcggaggttgtactcgcacaggaaaggggttcggctcacttagtggccctcaaatgcatcccaaagaaggcccttagagggaaggaggctcttgtggaaaacgagatcgcagtattacggagaatcagtcaccccaacattgtggctctggaggatgttcatgagtccccttctcacctgtatctggcgatggaattggttaccgggggagagctgttcgataggattatggagcggggtagttacacagaaaaagacgcttcccatctggtagggcaggtgctgggagctgtgtcctacttacactctctgggcatcgtgcacagggatctgaagccagaaaacctcttgtacgccaccccatttgaggactctaaaatcatggtctccgattttggcctatctaaaatccaggcgggtaacatgctgggcactgcctgtggaacaccagggtacgctgaaccagtgacattgtctggaatggctgcgtgcgtgcccgtgcgagccagcgtgtgtttgtggccaccagctcctgaactgctggagcagaagccttatggaaaagcggttgatgtgtgggccctgggggtgatcagctacattctgctgtgcggataccctcctttctatgacgaatcagacccagagctgttctctcagattttgcgggcatcctatgaattcgattcacccttttgggacgatattagcgagtctgctaaagatttcatcaggcacctgctggaacgcgatcctcagaagcggttcacctgccaacaagcacttcgccatctgtggatttcaggtgacacagcctttgacagggatatcctcgggagtgtctccgaacagatacggaagaatttcgctagaacccactggaagcgggcttttaacgccacgagcttcctgcgtcacattaggaagctcggccaaatccccgagggcgaaggggctagtgagcaaggcatggccagacactctcactctggcttgagggccggacaacccccaaagtggtag

SEQ ID NO: 235966 - DNA, 1083 bp, synthetic construct
  misc_feature 1..1083: note = Description of Artificial Sequence: Synthetic coding sequence
  source 1..1083: mol_type = other DNA
atgtggcgccgagtgtgcggtgggctcgctgggagacggcctagcggcgacatgctgctcctgaaaaaacacacagaagatatttccagtgtgtatgagatccgagaacgattgggaagcggtgccttttcagaggttgtgctggctcaggagaggggctctgcccatttggtggcgctaaagtgtatccccaaaaaagctctacgaggaaaagaggcgctagtggaaaacgagatcgccgttctccgaaggatttcccaccccaatattgttgccctcgaggatgttcatgaatctccttcacatctgtacctagccatggaactagtaaccggcggagaactgtttgatcgtattatggagcggggtagctacacagagaaggatgcatcacacctcgttggtcaggtgctaggggctgtctcctatctccattcgctaggcattgtacaccgggaccttaaaccagagaatttgttatacgcaactccattcgaggacagtaaaatcatggtgagtgactttggcctctcaaagatacaggctgggaatatgctgggaaccgcttgtgggactcccggttacgtcgcgcctgagctgctggaacaaaaaccatatggaaaggcagttgacgtttgggcactcggggtgataagctatatactgctgtgcgggtacccgccattctacgatgaatctgaccctgagcttttcagccagatacttagagcgtcatacgagttcgacagcccattctgggatgatatatctgaatccgctaaagacttcatccggcaccttttagaacgagacccacagaagcgcttcacatgccaacaagcgctgcgtcatttgtggatctccggagacaccgcatttgacagagacattctgggctctgttagtgaacagattcgcaagaactttgccagaacgcattggaaacgggcatttaatgccacctcgtttctgaggcacatcagaaaactggggcagattccagaaggcgagggcgctagcgagcaagggatggccaggcattctcactctggcctgcgggctggccagccaccaaaatggtag

SEQ ID NO: 235967 - DNA, 1032 bp, synthetic construct
  misc_feature 1..1032: note = Description of Artificial Sequence: Synthetic coding sequence
  source 1..1032: mol_type = other DNA
atgctcctcctgaagaaacataccgaggacatttcatcagtatacgagattagggagcgtctcggaagtggcgcatttagcgaggtagtcttggctcaggaaagaggaagcgcccatctagtggccctgaaatgtatccctaagaaggcactacgcggtaaagaggccctcgttgaaaatgaaatagcagtgttgcggaggatcagtcaccctaacatcgtcgctctggaagatgtgcatgagtccccctcccacttatacctggccatggagctggtgactgggggagaattatttgatcggatcatggaacggggatcatataccgagaaagatgccagccatctggtcggccaggtgttaggcgctgtgagctacttgcattctctgggcatcgtacatcgggacctcaaacctgagaacctgctatatgcgactccatttgaggactcgaaaattatggtctcagattttgggctctctaaaattcaggccggaaatatgcttgggaccgcctgtggtactcctggttacgtggcccctgaactgctggaacagaaaccttatggcaaggcagtggacgtctgggcccttggcgtcatctcgtatattttgttatgtggttatccccctttctacgatgaaagcgacccagagctcttctcccaaatcctccgcgcatcctatgagttcgacagcccattttgggatgatatttcggagagtgccaaagacttcatccgacacctgttagagcgggatccccagaagcggtttacctgccagcaagcgctgcgccacctttggatcagcggggacacggcctttgacagagacattctcggtagtgtcagcgagcagatacgcaagaacttcgcacgcacacactggaagagggcttttaatgctaccagctttctcaggcacatccgaaaactcggccagattcctgagggagaaggagcatccgaacaggggatggctcggcactctcactccggactccgagcaggtcagcctcctaagtggtag

SEQ ID NO: 235968 - DNA, 1101 bp, synthetic construct
  misc_feature 1..1101: note = Description of Artificial Sequence: Synthetic coding sequence
  source 1..1101: mol_type = other DNA
atgttgcttttgaagaaacatacggaggacatctcctccgtttacgagatccgggaacggctgggctcaggcgcattttccgaagtagtgctagctcaagaacgcggaagcgcccatttggtcgccctgaaatgcatccctaagaaggccctgagaggcaaggaagcattagtggagaacgaaatagcagtgctgaggcgtatttcacatcctaatattgtggctctggaagacgtgcacgagtctccctcacacctgtatttggccatggagctcgttactggcggtgaactgttcgacagaatcatggaaagaggttcctacacagaaaaggacgctagccatctggtggggcaggtgctgggcgcagtgtcttacctgcactccctggggatcgtgcaccgggacctgaagcccgaaaatctcctgtacgcaactccttttgaggacagcaaaatcatggtttctgattttggtttgagcaaaatccaagcgggaaatatgttgggtactgcctgcggcacccccggatatgccgaacccgtgactctgagtggaatggcggcatgtgtccccgtcagagcttccgtctgcctctggccacccgctccagaactgctggaacaaaaaccttatgggaaagcagtggacgtctgggccctgggggtcatttcatatatactgctgtgtggatacccacccttctacgatgagagcgaccccgagctgttctcccaaattctgcgtgccagttatgaatttgatagcccattctgggatgacatttctgagtcagctaaagatttcatccgacatctcctcgagagagatccccagaagagatttacatgccagcaagctcttcggcatctttggatctcaggagacacagcctttgacagggatatattgggcagcgtcagcgagcagattagaaagaatttcgccagaactcactggaagcgggctttcaacgcaacatctttcctgcgccatattaggaagctggggcagataccagaaggcgagggcgctagcgaacaaggaatggccaggcactcccattccgggctccgcgcaggacagccaccgaagtggtag

SEQ ID NO: 235969 - DNA, 132 bp, synthetic construct
  misc_feature 1..132: note = Description of Artificial Sequence: Synthetic coding sequence
  source 1..132: mol_type = other DNA
atgctgctgctgaagaaacatacagaggatatctccagcgtgtacgaaatccgcgagcgcttaggatccggcgcattttccgaggtggttctggctcaggagagagggagcgctcacttagtcgccttgtag

SEQ ID NO: 235970 - DNA, 675 bp, synthetic construct
  misc_feature 1..675: note = Description of Artificial Sequence: Synthetic coding sequence
  source 1..675: mol_type = other DNA
atgctcttactgaaaaagcataccgaagatatttcatccgtgtacgagattcgcgagcgtctgggcagtggggctttcagtgaggtggtgctcgcgcaagaaagaggttctgctcacttagtggccctgaaatgcatccctaaaaaagccctgcggggtaaggaggcactagtggagaacgagatagctgtgctgaggcgaatctcccacccaaatattgtggccctggaagacgtccacgagagtccctctcatctttacctggccatggaattggtcacaggcggtgaattgttcgacaggatcatggaaaggggatcttataccgaaaaggatgcatctcacctcgttggccaggtcctgggcgcagtctcatacctgcactccctgggtatcgtgcatagggacctgaaacctgagaatctcctgtacgccaccccgtttgaagactctaagatcatggtttccgatttcggactgtccaaaatacaggccggtaacatgctgggcaccgcatgtgggacaccgggatatgttgctccagaactgctggagcagaagccctatggcaaagcagtggatgtgtgggctctgggtgtgatatcatatattctgctgtgcggctatcctccattttacgatgaatcagaccctgaattattttctcaaatttag

SEQ ID NO: 235971 - DNA, 132 bp, synthetic construct
  misc_feature 1..132: note = Description of Artificial Sequence: Synthetic coding sequence
  source 1..132: mol_type = other DNA
atgctgctgttgaaaaagcacaccgaagacatttcttcagtgtatgagataagagagcgactgggctctggcgcattttctgaggtggttttggcccaggaaagggggagcgctcacctagtggcactgtag

SEQ ID NO: 235972 - DNA, 132 bp, synthetic construct
  misc_feature 1..132: note = Description of Artificial Sequence: Synthetic coding sequence
  source 1..132: mol_type = other DNA
atgcttctccttaagaaacataccgaagatattagcagcgtgtacgaaatccgcgaaaggctgggatcaggagctttctctgaggttgtgctggcacaagaaagaggctcagcccacctggtggcgctctag

SEQ ID NO: 235973 - DNA, 261 bp, synthetic construct
  misc_feature 1..261: note = Description of Artificial Sequence: Synthetic coding sequence
  source 1..261: mol_type = other DNA
atgctgctgctaaaaaaacatacagaagatataagcagtgtgtatgagattagggaaagactggggtcaggggctttctccgaggttgtgttagcacaggaacgtggatccgcacatctagtggcgctgaagtgcattcctaagaaggccctgcgagggaaggaagctctagttgagaacgagattgctgtgctgcggaggatatcacacccaaacatcgtcgcgcttgaggacgttcatgagagtccttcccacttgtag

SEQ ID NO: 235974 - DNA, 246 bp, synthetic construct
  misc_feature 1..246: note = Description of Artificial Sequence: Synthetic coding sequence
  source 1..246: mol_type = other DNA
tgaatatctggtgacacagcatttgatagggacattcttggatctgtttccgagcagattagaaaaaactttgcccgaactcactggaaacgtgcttttaatgcaaccagtttcctgaggcatatccgcaaactggggcagataccagagggggagggggcttctgaacagggtatggcgcgacacagccacagcggtggccctcagggtctttccttcctccacgggtgctgcgtgctgcggtag

SEQ ID NO: 235975 - DNA, 681 bp, synthetic construct
  misc_feature 1..681: note = Description of Artificial Sequence: Synthetic coding sequence
  source 1..681: mol_type = other DNA
atgctgttactgaagaagcacacggaagatatttcgtccgtgtatgaaattagggaaaggcttggcagtggtgcattctctgaggtggtgctcgctcaggagcgcggtagcgctcatttggttgcattgaagtgcatacccaagaaggcactcaggggaaaagaggccctggttgagaatgagattgctgttttgagaagaatatctcaccccaacatcgttgcactggaggacgtgcatgaatctccatctcacctgtaccttgccatggaactggttacaggaggcgaactttttgaccgaatcatggaacggggttcctacaccgagaaggatgctagtcacttggtcggccaggtgctgggagccgtgagctacctgcatagcctaggcatagtgcatagggatctgaaaccggaaaacctgttgtatgcgacaccatttgaggattcaaagatcatggtatcagatttcgggctctctaaaatccaggctggaaacatgcttggtaccgcgtgtggcactcccggatatgtcgcacctgaactcctggagcagaagccttacggtaaggctgtggatgtctgggctcttggcgtgatctcttacatccttctctgcggttatcccccattttacgacgaaagtgatcctgaacttttctcacaaatccttagatag

SEQ ID NO: 235976 - DNA, 1281 bp, synthetic construct
  misc_feature 1..1281: note = Description of Artificial Sequence: Synthetic coding sequence
  source 1..1281: mol_type = other DNA
atggaggcagctttcggtcaggtggctggttccgcttgtccccgacggggaggagagggcagggactggaaggcagaaagcttggcagatttatggcccaagtcttcacccggagattctcaccgttggtgtaaggggccaggagctggaccagccggaccccagttgcgggaagctgcccgagcgtcgtcggggttgggcggtggaggtcgtcatccctctcgtatacccgctattgctctccaggatatgttgcttcttaagaaacacactgaggacatcagcagtgtgtacgagatccgcgagagactgggaagtggcgcattctctgaagtggtgctggcgcaggagcgcggttccgcacatctggtagcactgaaatgcattccaaaaaaggctttacgcggtaaggaggccctcgtggaaaatgagattgctgttctccgcaggatctctcatccaaacatcgtcgcccttgaggatgtccatgagtctccctcacacttgtacctcgctatggagctggtgaccggaggcgagctgtttgatagaatcatggagcgtggatcttacaccgagaaagatgcttcacacctcgttggacaggtcctgggggcagtgagttatcttcacagcctcggtatcgtgcaccgcgacctaaaaccggagaatttgctttacgccacaccctttgaagactcgaagattatggtttcggacttcggcttgagtaagattcaggcagggaatatgctgggaactgcatgtggcaccccgggatatgtagccccagagctgctggaacagaagccttatggtaaggccgtggacgtctgggccctgggggtgatcagctatattctcttatgtggataccctccattttacgacgaatccgaccccgagctgtttagccagatcctgagagctagttacgaattcgatagtccattctgggacgatatttccgaaagcgctaaggatttcattagacaccttctcgagcgcgatccgcaaaagcgctttacatgtcagcaggccttgaggcacctgtggatatccggagacacagcctttgatcgggacatattgggctccgtgagtgagcaaatcaggaagaatttcgccagaacccactggaaacgtgctttcaacgccaccagctttctgcgccacatccgcaagctgggccaaattcccgaaggggagggcgcatccgagcagggaatggcacggcatagccactctggcttgcgagcaggccagcccccaaaatggtag

SEQ ID NO: 235977 - DNA, 132 bp, synthetic construct
  misc_feature 1..132: note = Description of Artificial Sequence: Synthetic coding sequence
  source 1..132: mol_type = other DNA
atgctgctgctcaaaaaacacaccgaagacatcagctcagtgtatgagatacgcgagcgcctaggaagcggcgcattcagcgaagtcgtattggcccaggagagggggtccgcacatctggtggccttatag

SEQ ID NO: 235978 - DNA, 4883 bp, synthetic construct
  misc_feature 1..4883: note = Description of Artificial Sequence: Synthetic coding sequence
  source 1..4883: mol_type = other DNA
atgcggttgtggtcatgggtcctgcaccttggattgctgagtgcagccctcgggtgcggcctggcagagcgtcccaggagggcacggagagatcctcgcgctggtcggccaccaaggcctgcggctggccctgccacttgtgcaactcgcgctgctagagggcgacgagcatctccgcctccacctccgccacctggaggggcttgggaggcagtgcgagtgcctaggcgcaggcaacagcgggaggccagaggcgcaacagaagaaccctccccaccgagtcgggcactgtacttcagtggacggggagagcagctccgactgagagcagatctagaactgccgagggatgcctttacactgcaggtttggttgagggcagagggaggtcagaggtcacccgcagtgataactggtttgtatgacaagtgtagctacatctcccgggataggggctgggttgttggtattcacactatttcagaccaggataacaaggatcccagatacttcttctcgcttaaaaccgatcgggctaggcaggttactacgattaacgctcacagatcatatctacctggacagtgggtgtatttagctgccacttacgacggccaatttatgaagctttacgttaatggggcacaggttgcaacctccggggagcaggtgggcggtatcttcagcccgctcacacagaaatgtaaagtcctgatgctggggggttccgcactcaaccacaactacagggggtacattgagcacttttctctgtggaaggtcgctaggacacagcgagaaattctctcagatatggagacgcacggcgcacacactgccctgcctcagctgctgctacaagagaactgggacaatgtgaaacatgcctggtcacctatgaaggacggctcctctccaaaggttgagttctccaatgcccacggatttttgctggacacctcactggagcctcccctctgcgggcagaccctgtgcgataatacggaggtgattgcctcctataaccaattgagctctttcagacagccaaaggtggttagataccgtgtggtaaacctttacgaagacgatcataaaaaccctaccgttacacgggagcaggttgacttccagcaccaccagctggctgaagctttcaagcaatataatatttcttgggaactagatgtactggaggttagtaactcttccctccgccgaaggctgatacttgctaattgcgatatatctaagattggagatgagaattgtgatcctgagtgtaatcatacccttacaggccacgatggcggagattgccggcatctccggcatccagctttcgtgaagaagcaacataacggagtgtgcgacatggattgtaactatgaaagattcaactttgacggtggcgagtgctgcgaccccgagattactaacgtgacacagacctgctttgatccagactcgccccacagagcctacctggacgtaaacgaacttaagaatatcctgaagctcgacggcagtacccatctaaatattttcttcgcaaaatctagcgaggaggagttggctggtgtcgctacctggccctgggacaaggaagctctcatgcatttgggtggcattgtcctgaatccttctttctatgggatgccaggccacactcataccatgatacatgagatcggtcactccctagggctgtatcacgtgttccggggaataagtgaaatacagagctgctcagacccctgcatggaaactgagccttcctttgaaacgggagacttgtgtaacgacaccaatccagcccctaagcataagtcttgtggagaccccggtccgggaaatgacacatgtgggtttcacagtttttttaacaccccctacaataatttcatgtcttacgccgacgacgactgcacagattcttttactcctaaccaggtcgctaggatgcactgttacctagacctcgtgtaccagggttggcaaccatctaggaaaccagccccagtggccctggcccctcaggtgctcggacatactaccgattccgtcactctcgagtggtttcctccaatcgacgggcacttctttgagcgagaacttggctctgcctgccacctttgccttgaaggcaggatcctggtgcagtatgcaagcaatgccagcagccccatgccatgttcccccagcggacactggagcccaagggaggccgagggccatcccgatgtggaacagccatgcaaatcctccgtgcggacttggagccccaactcggctgtgaacccacacacagttccacctgcttgcccggagccccaaggatgttacttggagctggaattcctgtacccactggtgccagaaagccttacgatttgggtgacttttgtctcaacagactgggattcctccggcgcagttaatgatattaaacttttagctgtgagcggaaagaacatctctcttggacctcagaacgtattctgcgacgtcccactgacgatccgcctttgggacgtgggcgaggaggtctacggaatacaaatatatacactggatgagcacctggaaatcgacgccgcaatgcttaccagtactgccgataccccactgtgccttcagtgcaaacccctaaagtataaagtggtcagagatcctccactacagatggacgttgctagtatcttgcacctgaatagaaaatttgtcgatatggatctaaaccttggaagcgtgtatcagtactgggttattactatctcagggaccgaggaaagtgagccctctcctgccgttacgtacatccacggcagcggctactgtggcgatgggattatccaaaaggaccagggtgaacagtgtgatgacatgaacaagattaacggggacggatgttccctgttctgcagacaggaggtgagttttaactgcatcgatgagccctcaagatgctattttcatgatggcgacggggtttgcgaggaatttgaacagaagacatcaattaaggattgtggagtgtacaccccacagggtttcctggaccagtgggccagcaatgccagcgtgtctcaccaagaccagcaatgtccaggttgggttatcatcgggcagccagctgcaagccaggtctgtcgcaccaaagtcattgatctttccgagggaatttcgcagcacgcatggtacccctgcactattagttatccttattcccagctcgcccagacaaccttttggttaagagcctacttctcccagccaatggtggctgccgcagtaattgtacacctggttactgatgggacctattacggagaccaaaaacaggaaacaatctccgttcaactgctggacactaaagatcagtctcatgacctgggtctacatgtcctctcctgtaggaataatcccttgatcatacccgtcgtgcacgatctcagccagcccttttaccacagccaggctgtgagagtcagcttttcaagccccctcgtagccatttctggagtcgccctccggagtttcgacaactttgatcccgtaacgctgagtagctgtcagaggggcgagacctactcacctgccgagcaatcatgcgtccatttcgcatgtgaaaaaaccgactgccctgagctggccgtggagaacgctagtcttaattgttcctccagcgaccgctatcacggtgctcaatgtacagtctcatgtcgtacaggatatgttctgcaaatccggagagatgatgagctgataaagagtcaaacgggaccttcagtgacagttacgtgtaccgaagggaagtggaataagcaggttgcatgcgagcctgtggactgttctatccctgaccaccatcaggtatacgcagcctctttttcctgcccagaaggcaccacctttggcagccagtgctctttccagtgccgacaccccgctcagctcaaaggtaataactcacttctgacctgcatggaagatggcttatggagtttcccagaagcactgtgtgagttgatgtgtctggctcccccacctgtccccaacgccgaccttcagacggccaggtgcagagagaacaagcacaaggtcggctctttttgcaaatacaaatgtaaacccggatatcacgtcccaggaagttctaggaaatctaagaagcgggcttttaaaacacagtgtacccaggatggttcttggcaggaaggagcatgtgtgcctgttacctgcgacccaccccctcccaagttccacggcctctaccaatgcactaatggtttccaatttaactcggagtgccgcatcaaatgtgaggattcagatgccagtcagggattaggaagcaacgtgattcactgccgcaaagatggcacatggaacggctcattccacgtatgccaggagatgcaggggcagtgctctgtgccaaacgaacttaactctaatctcaaacttcaatgtcccgatggctacgctattggatccgagtgcgcaaccagttgcctggaccataactccgagagcatcatcctcccaatgaatgtcaccgtgagagacataccccactggctcaaccctacccgggtagaacgtgtggtgtgcactgcagggctgaagtggtatccacatcccgctttgatacactgcgtaaaaggctgcgaacctttcatgggtgacaattattgtgacgccatcaataaccgggcattttgcaattacgacggcggagattgctgtactagtacagtgaaaaccaagaaagtgactcctttcccaatgagctgcgacctacagggagattgcgcctgccgcgacccacaagctcaggaacactcccgtaaggatttgcgtggatacagccatggata

SEQ ID NO: 235979 - DNA, 1701 bp, synthetic construct
  misc_feature 1..1701: note = Description of Artificial Sequence: Synthetic coding sequence
  source 1..1701: mol_type = other DNA
atggactgtaattatgaacgcttcaattttgacgggggagagtgctgtgatcctgagataacgaatgtaacgcagacgtgttttgatccggattcgcctcacagagcctacctggacgtgaacgagctcaaaaatatactgaaactggacggctcgactcacctgaatatattcttcgctaagagttccgaggaggaattggctggggtggcaacctggccatgggacaaagaggcacttatgcaccttgacgatgattgcacggattccttcacacctaaccaagtggctagaatgcactgttacctggacctagtctatcagggatggcagccatctaggaagccagctcctgtggccttggctcctcaggtgctcggccataccacagactctgtgacactggaatggttcccccctattgacggtcactttttcgagagggagctggggtccgcatgccacctctgtcttgaggggagaatactggtccaatatgccagcaatgccagttctccaatgccatgcagcccctcaggacattggtctccaagggaggcagagggccacccggatgtggagcagccatgcaaatcttccgtgaggacatggtccccgaactccgccgtgaatccacatactgtgcccccagcctgcccagagccgcagggttgctacctagagctggagttcttgtatcctttagttccagaaagcctcaccatctgggtaacattcgtttctaccgattgggactcatctggggcagttaacgatataaaactcctggcggtaagtggaaagaatatatcactcggtcctcagaatgtcttctgcgatgtcccactcactattcggctgtgggatgtcggcgaggaagtgtacggcatccagatatacactcttgacgagcacctggagatcgatgccgcaatgctgacctctacggctgacactcccctgtgtctgcagtgcaaacctctgaaatataaggtggtgagggatccacctttgcagatggatgtggcttcaattttgcatctcaaccgcaagttcgtggacatggatttaaatctgggctcagtgtaccagtactgggtaatcacaatttctggtaccgaggagtcggagccttctcccgcagttacatatatacacggcagcgggtattgtggcgacgggatcattcagaaagaccagggggaacaatgtgacgacatgaataaaataaacggggacggctgcagcctgttctgcaggcaggaggtgtcctttaactgcattgatgagcccagtcgctgctacttccatgacggcgatggagtgtgcgaggagttcgagcaaaaaacctctataaaagactgcggagtgtacactccccaaggcttcctggaccagtgggcctcgaacgctagtgtgtcccaccaggatcagcaatgtccgggttgggtgatcataggccagcccgctgcctcccaggtctgccggaccaaggtcatagatctctccgagggaataagtgcttgcctcgtgcctctgcaccaccagctacctattttcccagccggtagtgatcattttcttgctccaggcgtgttttttagtacaaatggctgccggtcctgtcattgcccgcctggggatgggtgggacatcttgtggggacccaaagccggtgaccatcagcgggcagctgcttag

SEQ ID NO: 235980 - DNA, 1998 bp, synthetic construct
  misc_feature 1..1998: note = Description of Artificial Sequence: Synthetic coding sequence
  source 1..1998: mol_type = other DNA
atgaacaagataaacggagacggctgctctcttttctgtcgacaggaggtcagcttcaattgcatcgatgagccgtcacggtgctatttccatgacggagacggagtttgtgaggagttcgagcagaagacttctattaaggactgcggcgtgtacacacctcagggcttccttgatcagtgggcctctaatgccagcgtttctcatcaggatcaacagtgtcctggctgggttattattgggcagccagctgcctctcaagtctgtcggacgaaggttattgatctgagcgaggggatctctcagcacgcatggtatccttgcacaataagttacccctattcccaactggcccagacaaccttctggctgcgggcttacttcagccagcctatggtagctgcggcagtgattgtccatctcgtgactgatggcacgtattacggagatcagaagcaggagactattagcgtgcagcttctcgacaccaaggaccagagccacgaccttggactgcatgtactgagctgcaggaacaacccactgatcataccggtcgtgcatgacctgtctcagccgttctatcactctcaggcggttcgggtgtctttctcctctcctttggtcgctattagcggagtcgctctgcggtcattcgacaattttgaccccgttacactgagctcatgtcagaggggggagacctacagcccggctgaacagtcttgcgtgcatttcgcatgcgaaaaaacagattgtccggagctggccgtagaaaatgcttccctaaactgtagctcatccgacaggtatcatggcgctcagtgtacagtttcttgcagaacaggctatgtgcttcagatcaggagggatgacgagctgatcaagtcccagactggcccaagtgtaaccgtgacctgcactgaaggcaagtggaacaaacaggtcgcctgcgagcccgttgattgcagtattcccgaccatcatcaagtttacgcagctagtttctcttgtcccgaaggtaccacttttggaagccagtgttccttccagtgtcgtcatcctgctcaacttaagggaaacaatagtctcttaacctgcatggaagacgggctgtggagctttcccgaagctttgtgtgagcttatgtgcctggcgcctcctcccgtgcccaacgcagacctgcagaccgcccgatgtcgtgaaaacaaacataaagttggatcattttgtaagtataaatgcaagcccggatatcatgttccgggaagctcaaggaagagcaaaaagcgagccttcaaaacgcagtgcacacaagacggatcatggcaggagggagcatgcgtgcctgtcacttgtgatcctcccccacccaagttccatggcttgtaccagtgtacaaacggcttccagttcaattccgagtgcagaatcaaatgtgaggacagcgatgcttctcaggggctgggtagtaatgtcatacattgtcgtaaggatggcacatggaatgggagcttccacgtctgccaggagatgcagggtcagtgttccgtccccaatgaattgaacagtaatcttaagctgcagtgtccagacggctatgccatcggaagcgaatgtgccacatcttgtcttgatcacaattctgaatcaatcatcctaccgatgaatgtcaccgtaagggacatcccacactggctgaacccaaccagggtggaaagagtcgtttgtaccgccggtctcaaatggtatccacatcccgctctgattcattgtgtcaagggttgtgaaccctttatgggggataactactgcgatgctataaacaaccgcgctttttgcaattacgacggaggggattgttgcactagtacagtgaaaaccaaaaaggtaaccccttttcctatgtcgtgcgatcttcagggtgattgcgcatgcagggacccgcaggcccaggagcattcgagaaaggatctgcggggttattctcacggatag

SEQ ID NO: 235981 - DNA, 4449 bp, synthetic construct
  misc_feature 1..4449: note = Description of Artificial Sequence: Synthetic coding sequence
  source 1..4449: mol_type = other DNA
atgagaaaggaccgactgttgcacctttgcttggtcctgttactcatcctcctgtccgcatccgattctaattcaacagaaccccagtatatggtgttagtcccgtccctgctacacacggaagcaccgaagaaaggatgcgttcttctttcccatcttaacgagacagttaccgtatctgctagcctcgagtccggtagggagaatagaagtctcttcaccgatctcgtggccgagaaggatctgttccattgtgtatcattcactctgcccagaatctctgcttcgagcgaggtggctttcctgtccatacagattaaaggacctactcaagatttccggaagaggaatacagtgctggtgctcaatacacagtcgctggtgttcgtgcagacagataaacccatgtataaaccaggtcagacagtgcggttccgcgtcgtgtcagtagacgaaaattttcggcctagaaacgagctgatcccccttatttatctagagaatcccagacggaacagaatcgcccagtggcagtccttgaagctcgaggccggaatcaaccagcttagtttcccattgtcttctgaaccaatacaggggtcttacagagtggtggttcagacggagtctggcggtcgcatccaacacccttttaccgtggaggagttcgtcctgccaaaatttgaggtcaaggtccaggtaccaaaaattatctcaattatggatgagaaggtgaacatcaccgtgtgcggtgagtacacatacgggaaaccggttccaggtctagcgactgtgagtctgtgccgtaaactttctagagtgctgaattgtgacaagcaagaggtgtgtgaggagttctcccaacagctcaatagtaatggatgtatcacccaacaggttcacaccaaaatgctgcagataaccaatacaggttttgaaatgaaactgcgcgtggaggcacgcattcgtgaagaaggcacggacctcgaggtgacggcaaatcgaatttcagaaattacaaacatagtgagcaaacttaaattcgtgaaggtggatagccacttcagacaagggattccgttcttcgcacaagtgttgttggtcgacgggaaaggagtgcctatacccaacaagcttttctttatttctgtcaacgatgctaactactacagcaatgcaacaactaacgaacagggcctcgctcaattctccattaacacaacgtccatctccgtcaacaagctgtttgtcagggtcttcaccgtccatccgaatttgtgtttccactatagttgggtggcggaagaccaccagggcgctcagcacaccgcaaatagagtattctccctcagtggatcatacatccatcttgagccagtcgccggtaccctgccctgcggccatactgagactattactgctcactacactctgaatcgacaggccatgggcgagctatctgagctcagctttcattacctgatcatggctaagggggtgattgtcaggtccggcacacataccttgcccgttgaaagcggagatatgaagggaagctttgcgctttctttcccagtcgagagcgatgtcgcaccaatcgcgagaatgtttatttttgccatcctccctgacggagaggtagtcggtgactcagagaagtttgagattgaaaactgccttgccaacaaagtggatctcagcttctctccggcacaatccccaccagcaagccacgcacacctgcaggttgctgccgcaccacagtccctttgcgccctgagggcagtggaccagtcagtgttgctgatgaaacccgaagcggaattgtccgtttccagcgtgtataatctgctaacagttaaagatttaaccaattttcccgataatgtcgatcagcaggaggaggaacagggccattgtcctagacccttctttattcataatggagccatttacgtgcctttgagctccaatgaagcagatatttacagctttctgaagggtatgggactgaaggtgttcaccaatagcaaaatccgcaagcccaaaagctgtagtgtgattccatctgtcagcgctggggcagtcggccaggggtactacggagcaggtctgggtgtggtcgaacgaccatacgtgcctcagctaggcacctataatgtgattccccttaataacgaacagagctcaggtcccgtcccagagaccgtgcgcagctattttcccgaaacctggatctgggaactcgtcgctgtcaacagtagcggcgtggcagaagtcggagtgactgtccccgatactattacggagtggaaagcgggagcgttctgtttgtccgaagacgccggactgggcatcagcagcaccgcctctcttcgagcattccagcctttcttcgtggagctgacaatgccttacagtgtgatccgaggagaggtgttcactctgaaggccacggtcttgaattacctgcctaagtgcattagagtcagcgttcagctgaaggctagccctgcatttttggcctcccagaacaccaagggggaggagtcctattgtatctgtggaaatgagaggcagactctctcctggaccgtgacgcctaaaacactgggcaatgtgaactttagcgtgtccgcggaggccatgcagagtctagaactgtgcgggaacgaggtggtcgaggtgccggagattaaaagaaaggacacagttatcaagacactgttagtcgaggccgagggcatcgagcaggagaagaccttctcctcaatgacttgcgcatccggcgcaaatgtctccgagcagttgagcctcaagttgccctcgaacgtggtgaaggaatccgctagagcctcattcagtgtgcttggggatattctgggcagcgccatgcaaaatatacagaaccttcttcagatgccttacggttgcggagagcagaacatggtgctgttcgcgcctaatatatacgtattaaattatttaaatgagacccaacagttgacccaggagatcaaagccaaggccgtaggctatctgataaccggctaccagcggcaactcaattacaagcaccaggatggctcatattcaacattcggcgagcgatatggacgcaaccaagggaatacatggctcacagcatttgtattgaagacttttgctcaagcacgctcttacatatttatcgacgaggcacacataacacagagtctgacttggctatctcagatgcagaaagataacggatgtttccgaagctccggctcactgttaaacaatgctattaaaggaggtgtggaagacgaagccacgctgtccgcttatgtgacaatagcccttctcgaaattcccctgcccgtaactaatcctatagtgaggaacgccctgttctgcctggagtccgcttggaatgttgccaaggaggggacccacggcagccatgtctacaccaaagcactgctggcatacgcattctccttgctagggaaacagaatcaaaatagggaaatcttgaattcactggacaaagaggctgtcaaggaggacaatctggtgcactgggagaggccccagcggcctaaggcccctgtgggccatctgtaccagacccaggcacccagtgccgaggttgaaatgacatcctatgtgttgttggcctacctgaccgcccagccagccccaacgagtggtgatctgacgtcagccactaacatcgtgaagtggattatgaagcagcagaatgctcagggcggtttcagctcgacacaggacacggtggttgcgctgcacgcactgagccggtacggtgctgctaccttcacccgtacagaaaagaccgcccaagttactgtgcaggactcgcagaccttcagtacaaacttccaggtggataacaataacctgttgctgctccagcagattagcctgcccgaattaccaggggaatacgttatcacagttaccggggagcgatgcgtctatctgcaaacctccatgaagtacaatatcctgccggaaaaagaagactccccattcgcacttaaagtgcaaaccgtgccgcagacctgcgatggccataaggcccatacatctttccaaattagcctgactatttcctacacaggcaatcggcctgcgtcaaatatggtgatcgtggacgtgaaaatggtctctggtttcatcccgcttaagccaactgtgaagatgttagaaagatcctcctctgtcagccgaaccgaagttagcaacaatcacgtccttatttacgtcgaacaggtcaccaatcagacgctgtcattcagctttatggtgctgcaagatatcccagttggagacctgaagccagccatagtcaaggtgtatgattactacgagaccgacgagtcagtggtcgccgagtatattgctccatgtagcacagatacagagcacggcaatgtttag

SEQ ID NO: 235982 - DNA, 3807 bp, synthetic construct
  misc_feature 1..3807: note = Description of Artificial Sequence: Synthetic coding sequence
  source 1..3807: mol_type = other DNA
atgagcgagagctaccgtcgcacaactttccccgtacggtttagggttgtgagcgtcgatgagaacttccgccctcgaaatgaactgatccctctgatttacttggagaaccccaggagaaatcgtatagctcagtggcaaagcctgaaactggaagctggtatcaaccagttgtctttccccctgtcttctgagcctatccagggctcttatagggtggtcgtgcagacggaatccggtggacgtattcagcacccatttacagtggaagaattcgttctgccgaagttcgaggtgaaagttcaagtgcctaaaatcatcagtattatggacgagaaggtgaacatcactgtgtgtggagaatatacctacgggaagcccgtccccggactggcaactgtgtccctatgccgcaagctctccagggttttgaactgcgataagcaggaagtatgcgaggagttcagtcagcagttgaatagtaatggatgtattacgcaacaagtgcacactaagatgctgcaaatcacaaacaccggatttgagatgaagcttagagtggaggctagaatccgggaggagggaacagatttagaagtcaccgccaatcgtatttctgagatcacaaatattgtgagcaagttgaagttcgtaaaggtagatagtcactttcggcaaggtatacctttctttgcacaagtgctgctagtggatggaaaaggagtcccaatacccaacaagctcttttttatatccgtgaatgatgctaactactactccaacgccaccacaaatgaacagggcctggcccagtttagtatcaacaccactagtatatccgtgaataaactgttcgtccgcgtattcacggtgcatcccaatctgtgttttcactattcgtgggtggccgaagaccaccagggtgcgcagcacactgccaatcgtgtgttctcactgagcgggtcctacatccatttggagccagtcgctggtaccctcccctgcggccacaccgagactattaccgcacattataccttaaacaggcaggcaatgggagagctgtccgaactgtcatttcattacctcatcatggctaagggggtgatagtgcggagtggcactcacacactgcctgttgagtcaggagacatgaagggtagtttcgctctttccttccctgtggagtccgatgttgcacctatagccagaatgttcatttttgcaattttgcccgatggtgaagtggtcggagatagcgagaagttcgaaattgagaactgcctggccaacaaggtggacctttctttcagcccagctcagtccccacccgctagtcacgcccacctgcaggtggccgctgcccctcaatctctgtgtgccctgcgtgcagtcgatcagagcgtccttctgatgaagccagaggccgagctctcagtcagtagcgtctataacctgctcacggtcaaggacctgaccaactttccagataacgtggaccaacaggaggaggagcagggtcactgcccacggccatttttcatacataatggtgccatctatgtgcctctttcctcgaatgaagcggatatttactcctttttaaaaggcatgggactcaaggtttttactaattctaagattagaaagccgaaatcctgctctgtgatcccaagcgtgtctgccggtgctgttgggcagggttactacggagcaggtctgggcgtagtggagagaccatatgtgccacaactgggcacctataacgttattcccctgaacaatgaacagtctagcggccctgtcccggagacagtacgctcttacttccccgagacctggatctgggagttggtggccgtcaatagctctggtgtggctgaggtgggcgtgacggtacccgatactatcactgagtggaaagccggagccttctgcctctctgaagatgcgggactcggcatctcgtcaacggccagcctccgtgcctttcagccttttttcgtggagttgacaatgccttattcggtgattcggggagaagtgtttacgttgaaggcgacagttctgaactacctgccgaaatgtattcgcgcagaaggcattgaacaggaaaaaaccttcagttctatgacttgtgcgagtggggcaaatgtgagcgagcagctcagcctgaagttacctagcaacgtcgttaaagagagcgcacgagccagcttttctgttctgggcgacatcctgggatccgctatgcaaaatatacagaatcttctgcagatgccttacggatgtggagaacagaacatggtgctgtttgccccaaatatctacgtactcaattatctcaacgaaactcagcaattgacccaggagattaaggcaaaagccgtaggataccttatcactggctaccaaaggcagcttaattacaagcaccaggatgggtcttatagcacattcggcgagcgatatgggaggaaccagggtaatacttggctcaccgcctttgtgctaaagacatttgcgcaggccaggagttacatcttcattgacgaggcacacattactcagagcctcacatggctgagtcagatgcagaaggacaatggctgctttagaagttcaggcagcttgctgaataacgcaattaagggcggtgtagaagacgaagccaccctcagtgcgtatgtgactatcgctctcttggagataccgctgccagttacaaatccaatcgtacggaacgctctcttctgcctggagagcgcatggaacgtggccaaagagggtacccacggtagtcatgtgtatactaaagcactgctggcttatgcatttagcctccttggcaagcagaatcagaaccgggagatcctgaattcgctggataaggaggccgtcaaggaagacaacctggttcactgggaacgtcctcagcggcctaaggccccagtgggtcatctatatcagactcaggccccttccgccgaggtagagatgacttcatacgtactgctggcctatctgactgctcaacccgctcccacgagcggggatctgacctctgccaccaatatcgttaaatggatcatgaagcagcagaacgcccagggcggattcagctcaactcaggatacagttgttgccctccatgccctcagccggtatggtgccgctacttttactcgcaccgaaaagaccgcgcaggtcaccgtgcaggactcccagaccttcagcactaacttccaagtggataataataatctcttactccttcagcagatctccctgccggaattgcctggggagtacgtgattacagtgacaggcgagagatgtgtttacctgcaaacttcaatgaaatacaacatactccccgagaaagaggatagcccctttgctctgaaagtccagaccgtgccacagacctgcgacgggcataaggcccacacttcttttcagatctcactcaccattagctacacgggaaatagacccgcttctaatatggtgatcgtcgacgttaagatggtctccggattcatccctctgaaacctaccgtgaagatgctggagcgctcgtcaagcgttagcaggaccgaggtttccaataaccacgtactgatttacgtggagcaggtgacaaaccaaacactctctttttctttcatggtcctccaggacatccctgtgggagacctaaaaccagctattgttaaggtctacgattactacgagacagacgagagtgttgtggcagaatacatcgccccttgttctaccgacacagagcatggcaacgtgtag

SEQ ID NO: 235983 - DNA, 660 bp, synthetic construct
  misc_feature 1..660: note = Description of Artificial Sequence: Synthetic coding sequence
  source 1..660: mol_type = other DNA
atggtgaaatactttcttggccagagcgtattacgatcctcttgggatcaagtgtttgcagcattctggcagaggtacccaaacccgtactccaagcacgtgctgaccgaggatatcgtacaccgagaggtgactcctgaccagaaactgttaagccggcgtttgcttactaaaaccaacaggatgcctcgctgggccgagcggctgttccccgctaacgtcgcacatagcgtttacgtgcttgaggatagcatcgttgatcctcagaaccagaccatgacgacattcacctggaatattaatcatgctcggctgatggtggtggaagagcgctgtgtttattgtgttaattccgataatagcggctggactgaaattcgacgcgaggcgtgggtctcgtcctcattattcggagtctctcgggcagttcaggaatttggcctggctagatttaagtctaacgtgacaaagaccatgaaagggtttgaatacatactggctaaactccagggcgaggcaccgtccaaaaccctggtggagaccgcgaaagaagccaaggaaaaggccaaagaaacagcgctagccgctacagaaaaagcgaaagacctcgcttcgaaggcagctacaaaaaagcagcagcagcaacagcaatttgtgtag

SEQ ID NO: 235984 - DNA, 1770 bp, synthetic construct
  misc_feature 1..1770: note = Description of Artificial Sequence: Synthetic coding sequence
  source 1..1770: mol_type = other DNA
atgtctagtagttactggagcgaaacatcttcctcttcatgcggaacgcaacagcttcccgaagttctccagtgccagccgcagcactaccactgctaccaccagagcagccaggcccaacagccccctgaaaagaatgttgtgtatgagagggtacggacttactccggccctatgaacaaagtggttcaggctctagaccccttcaattcaagagaggtactgagtcctctcaagactactagcagctaccagaatttggtgtggagcgaccacagccaggaactccacagtcccactttgaagatctcgacctgcgcacctagcacccttcatatcacacagaataccgaacaggagctgcattcccctactgtaaaattaacaacctaccctcagactaccatccgcaagtacgttgtacagaaccctgaacaagaacctctgtctcaattcctcaggggatcccatttcttcccagggaacaatgtaatatacgagaaaaccatccggaaggtggaaaagctgaacacagaccaggggtgccatccgcaagcccagtgccatcaccacataattcagcagccacaggtgattcattccgctcattggcagcagcctgattcctcacagcagattcaggccattacaggcaataatccaatttccacccatatcggaaatgaactctgccattccggatcttcacaaatatgcgaacaagttattatacaggacgacggcccagagaaacttgatccccgatattttggcgagctccttgccgacctgagtcgcaagaataccgatctgtatcactgccttctggaacatttgcagcgcatcggtggcagtaagcaggacttcgagtccacagacgagagcgaggatatcgaaagcctaatccccaagggcctgtctgagttcaccaagcagcaaatacgatatatcctgcaaatgagaggcatgagtgataagtccttgaggctggtgctttctaccttcagcaacattcgagaagagctgggacaccttcaaaacgatatgacatcgctggaaaatgataagatgaggctagagaaggacctctcatttaaggatacccagttaaaagaatacgaggagctgctcgcctcagtgcgtgcaaacaatcatcagcagcaacagggtctgcaagactcctctagtaaatgccaagcactggaggaaaacaatttgtcacttaggcatactttgtctgatatggagtatcgcctcaaagaacttgagtactgtaagcgtaacctggaacaagagaatcagaaccttagaatgcaggtgagcgagacgtgcaccgggccaatgctgcaggccaaaatggacgaaataggcaatcactataccgaaatggtcaagaatctgcgcatggaaaaagatagagaaatttgcaggctacgcagtcagctcaatcaatatcataaagatgtcagtaaacgcgaagggtcctgctcagatttccagtttaaattacacgaactgacttctctgctggaggagaaggatagcctgatcaaaaggcagtccgaggaattatctaagcttcgccaggagatctactcctcacataaccaaccatccaccggagggcgtacaacaattaccacaaaaaagtatcggacccaatatcctatccttgggttactctatgacgactatgaatatattcctccaggcagtgaaacacaaaccattgtcatcgagaagacggaagataagtacacttgcccatag

SEQ ID NO: 235985 - DNA, 921 bp, synthetic construct
  misc_feature 1..921: note = Description of Artificial Sequence: Synthetic coding sequence
  source 1..921: mol_type = other DNA
atgtccagcagctactggagcgaaaccagttcctcttcttgcggaacacagcagctgcctgaagtacttcagtgtcagccgcagcactaccattgttaccatcaatcttcccaagcacagcagccacccgagaaaaatgttgtttatgaacgggttagaacctacagtggcccaatgaacaaagtagtacaggccctggatccatttaattctcgggaagtgcttagtcctctgaaaaccacatcatcctatcaaaaccttgtgtggtccgatcacagccaggaactgcactcgccaactctgaagatttctacgtgtgcaccatctaccctgcatatcactcaaaatacagagcaggagcttcattctccaaccgtaaagctgaccacctaccctcagaccactatacgcaaatacgttgtacagaaccctgaacaggagccactatcccagtttttaaggggctcccacttcttcccaggaaataatgtgatctatgagaagaccattcggaaagtggagaaactgaacacagaccagggttgtcacccccaggcccagtgccatcatcatataattcagcagccccaagtcatccattcagcacactggcagcagcccgatagtagtcagcagatccaggctatcaccggaaataaccccattagcacccacataggcaatgagctgtgccacagcgggtcatctcaaatctgtgaacaggttattatccaggatgatggaccggaaaagttggaccctcgatactttggcgagttgctcgccgatctgtcgcgaaagaataccgacctatatcactgccttttggaacacttacaacgcatcggcagaaagcagtcactttcttcaacttacaccattcgccatggaatccagactaaacgtacaggtattttatag

SEQ ID NO: 235986 - DNA, 1788 bp, synthetic construct
  misc_feature 1..1788: note = Description of Artificial Sequence: Synthetic coding sequence
  source 1..1788: mol_type = other DNA
atgtccagcagctattggagtgagacctcgtcttctagctgtgggacccagcagctccctgaggtattgcaatgccagccccagcactatcattgttaccaccaaagctcccaggctcagcagccacccgaaaaaaatgtggtatatgagcgggttcgaacctacagcggccctatgaacaaagtggtccaggctctggacccatttaacagccgagaagtgctttcccctcttaagacaacatcctcctatcaaaatctcgtgtggtcagaccattcccaggaactccactcaccaacccttaaaatcagtacgtgtgcgccaagcacattgcacattacccagaacaccgaacaggagttgcactctccgacagtcaagttgactacatacccacagactacgatccgcaagtatgtcgtgcagaatccagagcaggagcccttgtcccaattcttgcgaggtagccacttcttccccggaaacaatgttatttatgagaagaccatcagaaaagttgagaagcttaatactgaccaagggtgtcaccctcaagcccaatgtcaccaccatattatccagcagccccaggtcattcacagcgcccactggcaacagcctgatagcagtcaacagattcaagctatcacagggaataaccctattagtacacacataggaaacgagctatgtcattcggggagttcacagatctgtgagcaagtaataattcaggatgatggaccggagaagttggatcccagatactttggcgagctgttggcagacctctcgaggaagaataccgacttataccactgcctcctggagcaccttcaaagaatagggggtagcaagcaggacttcgaatctactgacgagagtgaagatattgagtccctgattcctaagggcctgagcgagttcacaaagcaacagattcgatacatcttacagatgaggggcatgtccgataagtcattgaggctggtcctcagtacattcagcaacatccgcgaagaactgggtcatttacagaatgacatgacctcgctggaaaacgacaaaatgaggctcgagaaagatctgagcttcaaggacacacaactcaaagaatatgaagagctgctcgcaagcgtgagagcgaataaccatcaacagcagcaaggcctgcaggacagctcctccaagtgtcaggccttggaggagaataacctctctcttcgccatactctaagcgacatggaataccgactgaaagaacttgagtactgcaagcgcaatttagagcaggagaaccagaatctccgaatgcaggttagcgagacatgtacggggccaatgctgcaagcgaaaatggatgaaatcggcaatcactataccgagatggtaaaaaatctgagaatggagaaggatcgcgaaatctgcaggctgcgctcacagctcaaccaataccataaagatgtctctaagcgggagggcagctgtagtgattttcagttcaagctccacgaattgactagtctcctcgaggagaaggattccctcataaaacggcagagcgaggagctgtccaagcttaggcaggaaatttattccagtcataaccagccgagcacaggcggacgcaccactattactaccaagaaatacaggactcagtaccccatattaggtcttttgtatgatgattacgaatatattccacctggatctgagacgcaaacgatcgtgatcgagaagaccgaggacaagtacacttgcgtgagttcattggggcacttctag

SEQ ID NO: 235987 - DNA, 921 bp, synthetic construct
  misc_feature 1..921: note = Description of Artificial Sequence: Synthetic coding sequence
  source 1..921: mol_type = other DNA
atggcaagtaggtggtggagatggaggagggggtgctcatggaagcccgcagctcgcagcccaggcccagggtcccccggaagagctggccctctggggccatcagccgctgctgaggtaagagcacaagtccatagacgaaaaggactggaccttagtcagatcccctacattaatcttgtcaaacaccttacatcagcttgtcctaatgtgtgccgcatcagccgttttcaccatactactcccgattcaaaaacccactcaggagagaagtacactgacccgttcaaactgggctggagagacttgaaaggcctgtatgaggacataaggaaggaattattgatatccacctcagagttgaaagagatgtctgagtactacttcgacggcaaaggcaaggccttccgccctataatcgtcgctctcatggcccgagcttgcaatatccaccataataacagtaggcatgtacaagcaagccaacgggctatagccctaattgctgaaatgatccataccgcttctctggtgcacgacgatgtgatcgacgatgcctccagccgtcggggaaagcacacagtgaacaagatatggggtgagaaaaaggctgtcctggcaggggacctgatcctgtcagcagcgtccattgccctcgcaaggatcggcaacaccacagtcatttccatactaacacaggtcatcgaggatctggtcaggggggaattcctgcaattgggaagcaaagaaaacgagaacgagcgcttcgcacattacttagaaaagacgttcaaaaaaactgccagcctgattgccaattcgtgtaaagccgtctttccaagaaacgagtgttacgatcatgcgaccgtccagttcgcctggcggtgtcggcagtcctcaacggtctgcaccaccgaatag

SEQ ID NO: 235988 - DNA, 1248 bp, synthetic construct
  misc_feature 1..1248: note = Description of Artificial Sequence: Synthetic coding sequence
  source 1..1248: mol_type = other DNA
atggcatctcgctggtggaggtggaggagaggatgtagttggaagcctgccgctagaagcccaggtcctgggtcacctggaagggcaggccctctgggaccatctgccgcagctgaagtgcgggctcaggtccaccggcgtaaaggactggatctctcccagataccttatattaacctcgtgaaacatttaaccagcgcgtgcccaaatgtgtgcagaatctctcgctttcaccacaccacccccgactcaaaaacgcactctggagagaagtatacggaccccttcaaattaggttggagagatctgaaaggtctctacgaagacatccggaaggaattgctgatcagcacaagcgaacttaaagaaatgtccgaatattatttcgatggaaaaggcaaagcatttagacccattatcgtagcactgatggccagggcctgtaatatccaccacaataacagtagacacgttcaagcgtctcaaagagctatcgcacttatcgccgagatgatccacacagcgagcctggtacacgacgatgtgattgatgatgcaagctcccggagaggcaaacataccgtcaacaaaatatggggggagaaaaaagctgtgcttgctggcgatctgatcctctccgcagccagcatcgcactcgccagaattgggaataccaccgtaatttcaatcctgacccaggtgatagaggacctcgtgagaggagagttcctacaattaggcagtaaagagaatgagaacgaacggtttgcccattatctggaaaagacctttaagaaaaccgcatccctcatcgccaattcctgcaaggcagtgagcgtactcggatgtcccgatccggtggtacatgagatcgcctaccagtacgggaagaacgttggaattgcctttcagctcatcgacgacgtcctggactttacttcatgctctgatcaaatgggtaaacctactagcgcagatcttaagctagggctggcaacaggcccagtgctcttcgcatgtcagcagtttcccgagatgaacgcgatgatcatgagacggttcagtttgcccggtgatgttgatcgcgctcgacagtacgtcctccagagcgatggggtccagcaaactacatacctggcccagcagtactgtcacgaggctatccgcgagatcagcaaactacgcccatcacccgagcgggacgccctaatccagctgtcggaaattgttctgacacgggacaagtag

SEQ ID NO: 235989 - DNA, 1131 bp, synthetic construct
  misc_feature 1..1131: note = Description of Artificial Sequence: Synthetic coding sequence
  source 1..1131: mol_type = other DNA
atgcccgcacacgtacacagacgaaagggactggatctgagtcagatcccgtatattaatttagtgaagcatctcaccagcgcatgtccaaatgtatgccggatctccagatttcatcacaccacgcctgatagtaagacccattctggggaaaagtacacagacccgtttaagctggggtggcgggacctgaagggcctgtacgaggatatacggaaagagttgttaatatccacatccgagttgaaggaaatgagtgaatactattttgacggtaaggggaaagcctttagaccaattatcgtggctttaatggcgagggcctgcaacatccatcacaacaacagcagacacgtgcaggcaagccagagagcgatcgccttaattgccgagatgattcacactgccagcttagtgcacgacgatgtcatagacgacgcatcttctcggagaggcaaacatactgtgaacaaaatctggggtgagaagaaagcagtgttggccggagacctcatcctgtcggcagcttcaatcgccctggccaggattggcaataccaccgttatcagcattctgacgcaggttatagaggatttggtgagaggcgagttcctgcaactgggatctaaggagaacgagaacgaacggttcgctcactaccttgagaaaacctttaaaaagacagcctcccttatcgccaatagttgtaaagcagtctctgtgcttggttgtccagaccctgtggtgcatgagatcgcataccaatacggcaaaaacgtggggattgcctttcaactgatcgacgacgtcctggacttcaccagttgctctgatcagatggggaaaccgaccagtgcagacctgaagctggggctggcgaccggcccagtgcttttcgcatgtcaacaattccctgagatgaacgccatgatcatgagacgcttcagtctccctggagatgtagatagagccaggcagtacgtgctacagagtgatggcgtgcagcagactacctacttggcacagcagtactgccacgaagctatcagggagatatccaagttacgcccaagccccgaacgggatgcgctgattcagttaagcgaaattgttctgacccgtgacaaatag

SEQ ID NO: 235990 - DNA, 723 bp, synthetic construct
  misc_feature 1..723: note = Description of Artificial Sequence: Synthetic coding sequence
  source 1..723: mol_type = other DNA
atgaatttccgtcagctgttactgcacttgcctcgatatctgggtgcatcaggctcgccaagacgtctttggtggtcacctagcctagatacaatatcaagcgtcggatcatggcgcggtcggtcgtcaaagagccccgcacattggaatcaggtggtgagtgaagcggaaaagattgtgggatacccaaccagcttcatgtcccttcgttgtttactgagtgatgaactctctaatatcgctatgcaagtccgtaaactggtgggcacccaacaccctctgttgacaactgcacgcggactggtgcacgacagttggaactccctgcagctcaggggcttagtggtccttctgatctccaaggccgctggcccaagcagcgtgaacacgagttgccagaactatgacatggtgagcggaatctatagctgtcagaggtcactcgccgaaattaccgaactgatccatatcgcactgctagtacataggggtatcgtgaatctgaatgaactgcagagctcagacggcccactgaaggacatgcagtttggcaataagatcgccatccttagcggcgattttctgttggccaacgcgtgtaacggtctggccctgctacaaaatactaaaagcttttctttcaatgggccaattgctatttaccagatgggcgactgcgaaagcgcctggatccttagcaaacatccccgagccttatcgtag

SEQ ID NO: 235991 - DNA, 270 bp, synthetic construct
  misc_feature 1..270: note = Description of Artificial Sequence: Synthetic coding sequence
  source 1..270: mol_type = other DNA
atggaacttgccaaacacgatgcggaggttcaaaatatggcctttcaatacggaaagcatatggctatgtcccacaaaataaactcggacgtgcagccatttattaaggaaaaaacatcagacagcatgactttcaacctgaattccgcacctgtggtgctccaccaggaattcctcgggagggatctttggattaaacagatcggggaaagctcctcaaccgaagtgcaacttagcaacttccagcagatgctgctgtcaacactgtag

SEQ ID NO: 235992 - DNA, 1200 bp, synthetic construct
  misc_feature 1..1200: note = Description of Artificial Sequence: Synthetic coding sequence
  source 1..1200: mol_type = other DNA
atgaactttaggcagttgcttttgcatctcccaaggtatcttggagcgtcagggtcccccagacgactgtggtggagcccctccctggacactatttcttctgtgggcagctggcgtggtcgtagcagtaagtcacccgctcactggaaccaggtggtgtcagaggcagagaaaatcgtgggatatcccacaagcttcatgtctttgaggtgcctgctgtcagacgaactgtcaaacattgccatgcaggtgcggaagctagtgggaacacagcatccactactgaccacagccagagggcttgtgcacgattcatggaactcactgcaattaagaggattggtggtgctcctgatatcgaaggcggcaggaccatcctccgtgaatacctcatgtcagaattacgacatggtctccggaatttatagctgccagagatctcttgctgagattaccgagctcattcatatcgcactgctcgtacacagggggattgtaaatctgaacgagttgcaaagctccgacgggccactgaaagatatgcagttcggcaataaaatcgcaattcttagcggtgattttctcttggcgaatgcttgcaacgggctcgctctgctccagaatacaaaggtggtggagctgttggcttctgctctgatggacctggttcagggagtctaccatgaaaactccacttctaaggagtcctatatcaccgatgatatcgggatcagtacatggaaggagcagactttcttgtcccacggcgctttgctcgcaaaatcctgtcaggccgctatggagctggccaagcacgatgccgaggtccagaacatggctttccagtacggaaaacacatggctatgagccacaagatcaattctgatgtgcagccattcataaaggagaaaacatctgacagtatgaccttcaacttaaacagcgcccctgtcgtcctgcatcaggagtttctcggtcgggacctgtggataaagcagatcggggaggcacaggagaaaggacggctcgactacgcaaagctacgggaaaggatcaaagccggtaaaggagttacttctgccatcgatctgtgtaggtaccacggaaataaggcattggaggcactcgagtcctttccaccatccgaggcccgatcggcactcgaaaatattgtgtttgccgtcacaagattcagctag

SEQ ID NO: 235993 - DNA, 243 bp, synthetic construct
  misc_feature 1..243: note = Description of Artificial Sequence: Synthetic coding sequence
  source 1..243: mol_type = other DNA
gtgcagaacatggcattccagtacggcaaacatatggccatgtcccacaaaattaattctgatgtccagcccttcatcaaagagaaaaccagtgattccatgacttttaacctaaacagtgccccagtagtgttgcatcaggaatttttggggagggacctctggataaaacagattggtgaaagctctagtactgaggtgcagctttctaactttcagcagatgttactctccacactgtag

SEQ ID NO: 235994 - DNA, 894 bp, synthetic construct
  misc_feature 1..894: note = Description of Artificial Sequence: Synthetic coding sequence
  source 1..894: mol_type = other DNA
atgaactttcgccagctgctcctccatctgccaagatacctaggggcatcaggctcaccgcgacggctatggtggtcaccgtctctggataccatctcctcagttgggtcctggcgaggtcgcagcagtaagtcccctgcacactggaatcaagtggtgtcagaggccgagaaaatagtgggatacccaacctcgttcatgtccctgcggtgtctgctgagcgatgaactgagcaacatcgcaatgcaagtacgaaagctcgttggcacccagcacccccttctgacaaccgccagaggcctggtgcatgacagttggaactcccttcaacttcggggactggttgtgttgttgatcagcaaagcagctggaccgtccagcgtgaacaccagctgccaaaactacgatatggtgagtgggatctacagctgccagagatctttggccgaaataacagagctaatacacattgcccttctcgttcacagggggatcgttaatctgaatgagctgcagtcctctgacgggcctctgaaggatatgcagttcggtaataaaatcgctatcctgtccggtgattttctcctggcaaacgcttgcaacgggctggcccttctacaaaacactaaagtggtggagctattagcatctgctctgatggacctcgttcaaggtgtctaccatgagaactcgacctctaaagcgcaggagaagggcagacttgactatgctaagctgcgcgagaggattaaggccggaaagggagttactagcgccatcgatctatgccgttaccacggtaataaggcacttgaagctttagaatcctttccaccaagtgaagccaggagcgctttagagaatattgtgttcgcagttactcggttttcctag

SEQ ID NO: 235995 - DNA, 882 bp, synthetic construct
  misc_feature 1..882: note = Description of Artificial Sequence: Synthetic coding sequence
  source 1..882: mol_type = other DNA
atggggagggtggtcgccgaactggtgtcttccttattgggtctctggttgctgctttgctcctgcgggtgtcctgagggagcagagctacgcgctccgcctgacaagatcgccattatcggggcagggattggagggacatctgcagcatactacctgagacagaagttcggcaaggacgtgaagatagatttattcgagagggaggaggttggtgggagactggccaccatgatggtgcaggggcaggaatatgaggctgggggatccgtcatccatcctctgaaccttcacatgaagcgctttgtgaaagatctggggcttagcgcggtacaagcatctgggggattactgggcatctacaatggcgaaaccctcgtattcgaagaatccaactggttcattatcaatgtgataaagctggtctggcgctatgggttccagagtcttcgcatgcacatgtgggtcgaagacgtactggataaattcatgagaatataccgctaccagagccacgattacgccttttcttctgtcgaaaagctgctccacgcactcggcggagacgactttctgggcatgctgaatcgtacactgttggagacactgcaaaaagcaggattctccgaaaagttccttaatgagatgattgctccagtaatgcgcgtgaactacggccagtccacagacattaacgcttttgtcggggctgtgtcactctcgtgctctgatagcggtttgtgggccgtggaagggggtaacaaacttgtgtgctcgggtctgctgcaggcatctaagtctaacctgatttccggctcagtcatgtacattgaggagaagactaagaccaagtacacagtcctgggactgtgtcctctttag

SEQ ID NO: 235996 - DNA, 1518 bp, synthetic construct
  misc_feature 1..1518: note = Description of Artificial Sequence: Synthetic coding sequence
  source 1..1518: mol_type = other DNA
atgggcagggtcgtcgccgagttggtgtcttcactgttggggctgtggctgctgctctgctcatgcggatgtccggagggagcagagcttcgtgcaccacccgataaaatcgccatcatcggtgcgggaatcggaggaacctctgctgcatattatttgagacaaaaattcgggaaagatgtgaagattgacctgttcgaaagagaagaggtcgggggacgccttgccaccatgatggtgcaagggcaggagtatgaggctggcggaagcgttatccaccctcttaatttgcatatgaagagattcgtaaaagacctcgggttgagcgcagtgcaggccagtggcggtctcttgggaatttacaatggcgagaccctcgtctttgaagaaagtaactggttcatcataaacgtgatcaaactcgtttggagatacggatttcagagtctgaggatgcatatgtgggttgaagatgtccttgacaaatttatgcggatttaccgatatcagtctcacgactatgcattcagctctgtcgaaaagctcctacacgccttgggcggagatgacttcttgggcatgctgaatagaacactcctcgagacactacaaaaggctggcttcagcgagaagttcttgaatgaaatgatcgccccagttatgagagttaactatggccaaagcacagacatcaacgcttttgtaggcgctgtcagtctgtcatgcagtgacagcgggttatgggcagtggaaggaggcaataaactggtgtgctctggcctgctccaggctagcaagagtaatctgatctccggcagcgtgatgtacattgaagagaagactaagacgaaatataccggaaaccccacgaaaatgtatgaagtagtgtaccagattggtacagaaacccgttcagacttctacgatatagttttggtggcaacacctttgaatagaaaaatgagcaatattacatttctgaattttgatcctcctatcgaagagtttcatcagtactaccagcatatcgtcacaacgctagtgaaaggagagttaaacacgtcaattttttcatcccggccaatagacaagttcggcctgaataccgtgctcaccaccgacaattctgacctctttatcaatagtatcggtatcgtgccgtccgtgcgtgagaaggaagacccagaaccctccactgatggaacctacgtgtggaagatcttttctcaggagaccctcaccaaggcccaaatattaaagttattcctatcatacgactacgccgtcaagaagccttggctggcatacccacattataaaccacccgagaagtgccccagtatcatcttgcatgacaggctgtattatctgaacggaatcgaatgtgccgcttctgccatggaaatgtccgctatcgccgctcataatgcagcactgcttgcctatcacagatggaatggacatactgatatgatagatcaggacggactctatgagaaactcaaaacagagctctag

SEQ ID NO: 235997 - DNA, 1287 bp, synthetic construct
  misc_feature 1..1287: note = Description of Artificial Sequence: Synthetic coding sequence
  source 1..1287: mol_type = other DNA
atgatggtgcagggacaggagtatgaagcaggaggttcagtaattcaccccctgaatctccacatgaagcgatttgtcaaggatctgggactgagcgctgtgcaagcttcagggggacttttaggtatatacaacggggaaactctggtttttgaggagtcaaactggttcatcatcaatgtaatcaaattagtgtggcggtatgggttccagagtctgagaatgcacatgtgggtggaagacgtactggataaattcatgcgaatctatcgttatcagtctcatgactatgcattcagtagcgtggagaagctgctgcacgcccttggcggagatgacttccttggtatgcttaaccggacccttctggaaacactgcagaaggcaggatttagtgagaagttcctcaatgaaatgattgcccctgtgatgagggtcaactatggacagagtactgatattaatgcgttcgtgggcgctgtttcgctgagttgctccgactcgggtctttgggctgttgaggggggtaataaactggtttgtagtggcttactgcaggcaagcaaatccaacctgatatccggtagtgtgatgtacatagaggagaaaaccaaaactaaatacaccgggaaccctacaaaaatgtacgaagttgtgtatcagataggcactgaaacacgctccgacttctatgatattgttctcgtggcgacccccctcaatcgaaagatgtccaatatcactttcttgaatttcgatccccctatcgaggagttccaccaatactaccagcacatagtaacaaccctggtgaaaggagagctaaacactagcatattttctagccggccaattgataaatttggcctgaatacagttttgacgacggacaattcagatcttttcatcaacagcattggaatcgtcccaagcgtgagggagaaggaggatccggagcctagcacggacgggacttacgtttggaagatcttttcacaggaaaccttaacaaaagcacaaattttgaagctgtttctcagttacgattacgcagtgaaaaagccctggctggcctatccgcattacaaacccccagaaaaatgtccctccattatactgcacgatcgtttatactacctcaacggtatcgaatgtgccgcatctgccatggagatgtctgctatagcggcacataatgctgcactgctggcctatcacaggtggaatggccacacagacatgatcgatcaggatggcctgtatgagaaattgaagacagagctctag

SEQ ID NO: 235998 - DNA, 1284 bp, synthetic construct
  misc_feature 1..1284: note = Description of Artificial Sequence: Synthetic coding sequence
  source 1..1284: mol_type = other DNA
atggtgcagggtcaggagtacgaagctgggggttcggtgattcaccctttaaacctgcacatgaagaggttcgttaaggatttgggcctgtctgcggtacaagccagcggcggactgctaggaatctataacggcgaaaccctggtatttgaggagtctaactggttcatcattaatgtgattaagctcgtgtggcgctacggctttcagagtctgaggatgcacatgtgggtggaagatgtcctggacaaatttatgcgcatctatcggtaccagtctcatgattatgcttttagttcagtagaaaagcttctgcacgctctcggcggagatgattttcttggaatgctcaaccgaaccctcttagagactcttcagaaagcaggctttagtgagaaattcttgaatgagatgatcgcccctgtcatgcgggtcaattacgggcagtccactgacataaatgctttcgttggcgctgttagtttaagctgctccgacagcgggttgtgggccgtggagggaggcaataaattggtttgttctgggctgctgcaggcctcgaaatcgaacctcatcagtggaagcgtgatgtacattgaggaaaaaacgaaaacgaaatataccgggaaccccactaagatgtacgaggtagtatatcagatcggaacggagacccggagtgacttctatgatattgtgctggtggctacacccctgaacagaaaaatgagtaatatcacctttctcaatttcgacccacccattgaagaattccaccaatattaccagcacattgtgactaccctcgtgaaaggcgagctaaataccagtatcttcagtagtaggccaatcgataaattcgggctgaatactgtactgacgaccgataacagcgacttgttcataaattcaatagggattgtaccctccgttagggaaaaggaagatccggagccttccaccgatggcacttacgtgtggaagatttttagccaggaaactctgactaaagcccagatactgaaactgtttctgagttacgattatgccgttaagaaaccctggttggcctacccccactacaagccacctgagaagtgtccgtccatcatattgcacgatcgactttactatctaaatggcatcgaatgcgcggcatccgccatggaaatgagtgcaatagccgctcacaacgcggcacttctcgcttatcatcggtggaacgggcataccgacatgattgaccaagacggtctgtacgaaaagctgaaaaccgagttgtag

SEQ ID NO: 235999 - DNA, 1485 bp, synthetic construct
  misc_feature 1..1485: note = Description of Artificial Sequence: Synthetic coding sequence
  source 1..1485: mol_type = other DNA
atggccagagctgcaccactgttagccgctttaacagcactcctggccgcagctgccgcaggaggagatgcaccaccgggtaagatcgcagtagtgggcgcaggcattggtggctccgctgttgcccacttcctgcagcaacacttcgggcctcgtgtgcagatagatgtgtacgagaaaggtacagtggggggtagactcgcgacaatcagcgtgaacaagcagcattatgaaagtggcgctgccagttttcatagcctatcacttcatatgcaggatttcgtgaaattactgggcctgagacatcgcagagaggttgtagggagatccgctatcttcgggggagaacactttatgttggaggagacagattggtatctccttaatctgttcaggttgtggtggcactatggaatttcgtttctgcggctccagatgtgggtggaagaggtgatggagaagttcatgagaatctacaagtaccaggcccacggatatgctttctccggagtggaggagctcctttatagtttgggcgaatcaactttcgtgaacatgacacagcatagcgttgctgaatcactgctccaggtgggcgtgactcagcgatttatagatgatgtcgtgagtgctgtcctccgcgcaagctatggacagtccgccgcaatgccagcttttgccggagccatgtccttggccggtgcccaggggtcactgtggagcgtcgaggggggaaacaaattggtctgtagcggcctgcttaagctgacaaaagctaacgtaatccatgccacggtcacctccgtaactctccattcaaccgaggggaaagcactttaccaggttgcttatgaaaatgaagtgggcaactcatccgacttttacgacatcgttgtgatagccacccccctgcatctcgataactcctcaagcaacctgacatttgcagggtttcaccctcctatcgacgacgtccaaggcagcttccaacctacagtggtgtctctcgtccacggctacctcaactcaagctattttggattccccgatcccaaactttttcccttcgccaatatccttactaccgattttcctagtttcttttgtaccctggacaacatatgtcccgtcaatatctctgcctcattccggagaaagcagccccaggaagctgccgtctggcgcgtgcaatcccccaagccacttttcaggacgcaactgaaaacactattcagatcctactacagtgtccagactgctgaatggcaagctcacccactctacggatcacgtccgacccttcctagatttgcactgcatgaccagctgttctacctgaacgctttggagtgggctgcatcttccgtagaagtaatggctgtggcagcgaaaaacgtggcactgctggcctacaaccggtggtaccaggatctggataagatagatcaaaaggatctaatgcataaagtgaagacggagctgtag

SEQ ID NO: 236000 - DNA, 531 bp, synthetic construct
  misc_feature 1..531: note = Description of Artificial Sequence: Synthetic coding sequence
  source 1..531: mol_type = other DNA
atgaaggtgcttttgtgcgaccttctacttttgagtctgttctcatccgtgttttcttcgtgccaaagagactgcctaacttgccaggaaaagctgcacccagctctggattcttttgacctcgaagtgtgtatcctagagtgcgaagagaaagtctttccaagcccgctgtggactccatgtactaaggtcatggcacggtccagctggcagctctcgcccgcagctccagagcacgtagcagcagccctctaccagccaagggcctcggagatgcaacacctgcgcagaatgccaagagttcgctccctcttccaagagcaagaggagccagagccaggtatggaagaagctggcgagatggagcaaaaacagctacaaaagagattcggaggattcacaggtgccagaaaaagcgcccgtaagctcgccaaccagaagagatttagcgaatttatgcggcaatacctggtcctttctatgcagtccagccagcgcaggagaacactccatcagaacggcaacgtgtag

SEQ ID NO: 236001 - DNA, 465 bp, synthetic construct
  misc_feature 1..465: note = Description of Artificial Sequence: Synthetic coding sequence
  source 1..465: mol_type = other DNA
atgaaggtgttgctgtgcgacttgcttctcctgtctctgttttcatctgtgtttagctcgtgccagcgggactgtctaacctgccaggaaaaactccatcccgcacttgactccttcgatctagaagtgtgtatcttggagtgtgaagagaaagtctttccctctcccttgtggacaccctgtaccaaagttatggcaagaagttcctggcagctgtcccccgcagctccagagcacgtcgccgctgctctgtaccagccacgagcaagcgagatgcaacatttgcgcaggatgccacgcgtgaggtcactgttccaggagcaggaagagcctgagccaggtatggaggaggccggtgagatggaacagaagcagctgcaaaagcgctttgggggttttactggagcaagaaaaagtgcaagaaaactggccaaccagaagcgttttagcgagttcatgcgctag

SEQ ID NO: 236002 - DNA, 1230 bp, synthetic construct
  misc_feature 1..1230: note = Description of Artificial Sequence: Synthetic coding sequence
  source 1..1230: mol_type = other DNA
atgaccgagctgcctgccccactgtcatattttcagaacgcgcaaatgagtgaggataaccatctgtcgaacacggtgaggtcacagaatgataatagagagcgtcaggaacacaacgatagacgttctctaggccacccagagccgcttagtaacggcaggcctcagggcaacagccggcaggtagtggaacaggatgaggaagaggatgaagagctcaccttaaaatatggagccaagcatgtgatcatgctattcgtacccgtgacattgtgcatggtagttgtggtcgctaccataaagagcgtttctttctacacccggaaggacggacaactaatctatactcctttcactgaggatacagaaaccgtcggccagagggccctccactcaatcctgaacgccgctataatgatctctgtgatcgttgtgatgaccattctcctagtcgtgctctacaaatatcgatgttacaaggttatccacgcctggctcatcatttcatcactcttgctgctctttttctttagctttatatacctgggtgaggtctttaagacctacaacgtggcagtggattatattactgtagcgctcttgatttggaacttcggcgtggtgggaatgattagcatccattggaaaggcccattacggttgcagcaggcctacctgatcatgatctccgcgctgatggccttggtgttcatcaaatacctgccagagtggactgcctggttaatccttgcggtgattagcgtttacgaccttgtggcagttttgtgccctaaggggcctctacgcatgctggtcgaaactgcccaggaacgcaacgaaacactgttcccagcactgatttacagctctacgatggtgtggctggtcaacatggctgagggcgacccagaagcacagcggcgtgttagcaagaacagtaagtacaatgcagaacgtggggtgaagttgggactgggagactttatattttactccgtgcttgtgggtaaagcaagcgccacagctagcggcgactggaataccacaatcgcgtgtttcgtcgccatcctgataggactctgtctaactcttttgctgctggcaatctttaaaaaggcattacccgctctgcccatttccataacattcgggctagtgttctactttgctaccgattatctagttcaaccctttatggaccagctggcttttcaccagttttacatctag

SEQ ID NO: 236003 - DNA, 1404 bp, synthetic construct
  misc_feature 1..1404: note = Description of Artificial Sequence: Synthetic coding sequence
  source 1..1404: mol_type = other DNA
atgacggagcttcctgctccgctgagttacttccagaatgcccaaatgtctgaagacaaccacttgagcaatacagttcggagccagaacgataatcgggaacgtcaggaacataatgatagacgttccctgggacaccctgagccactgtccaacggcaggccccaagggaactcgcggcaggttgttgagcaggacgaggaggaggacgaggagctcactctgaagtatggcgcaaaacacgtcataatgttattcgtgcccgtgactctgtgtatggttgttgttgtggctaccatcaagtctgttagtttttatacacgcaaggacggacagttgatttacacccccttcaccgaggacaccgaaaccgttgggcagcgcgctttacattccatcttgaatgctgctatcatgatctctgttattgtggtcatgacaatcctgctggtagtcttgtataagtatcgatgctacaaggtcatccatgcatggctaatcatttcctccctgctgttgctcttctttttctccttcatttatctgggtgaggtctttaaaacgtataacgtggcagttgactacataacggtcgccctcctgatttggaacttcggggtggtgggcatgatctctattcactggaaaggcccactacgcctgcagcaggcctatctgatcatgatcagcgccctgatggctttggtgttcatcaagtacctgcccgagtggaccgcctggctgatcttggccgttattagcgtctacgacctcgtggctgttctgtgcccgaaggggcctcttagaatgctggtcgaaactgcccaagaacgaaatgagaccttgttccctgcactgatttattcttccaccatggtgtggctggttaatatggctgaaggagacccggaagcacagaggagggtctccaagaattctaagtataacgctgaatccaccgagcgcgagtcccaggatacagtagccgagaacgacgacggcggttttagcgaggagtgggaggctcagagggattctcacctggggcctcatcgttcaactccggagtcccgcgctgccgtgcaagagctaagctcctctatcctcgccggtgaggaccccgaagaacggggagtaaagctggggcttggtgatttcatattctattcggttcttgtgggaaaggctagcgcaaccgctagcggagattggaataccaccatcgcctgcttcgtagcaatccttatcggcctgtgcctgaccctccttctgctggcaatcttcaagaaggcactccctgcgctgcctatcagcatcacatttgggctggtgttctatttcgccacggactacttggtgcaaccattcatggaccaattggcttttcaccagttttatatatag

SEQ ID NO: 236004 - DNA, 1137 bp, synthetic construct
  misc_feature 1..1137: note = Description of Artificial Sequence: Synthetic coding sequence
  source 1..1137: mol_type = other DNA
atgacagagcttcctgctcctttgagctacttccagaacgcacagatgtccgaagataaccacctgagtaacacagtgcgatctcaaaacgacaatagagaacgacaggagcataatgacagaaggagcctcggtcacccggagccactgtccaacggaaggcctcaggggaactcccgtcaggtcgtagagcaagatgaggaagaggacgaagagctcaccttgaagtatggtgcgaagcatgtgattatgctctttgtgccagtcactctgtgcatggtcgtggttgtggcgacaatcaaatcagtatccttttacaccagaaaggacggtcagctcatatataccccttttaccgaggatacagagactgtgggacagcgcgcactccactctatactgaatgcagctatcatgatctcagttattgtggtgatgaccatactgcttgtggtcctgtataagtaccgttgttataaagtcatccacgcttggctcataatcagttctctgttactgctgtttttcttttcattcatttatttgggcgaagttttcaagacatataatgtagctgtggattacattacagtagcattgctgatctggaatttcggggtcgttggaatgatttcaatacattggaagggacccctcaggctgcagcaggcgtacctaataatgatttccgctctcatggcactggtctttatcaaatacctccctgaatggaccgcttggctgatcctggcagtgatcagtgtgtacgatctagttgcagtgctttgccccaaaggcccacttaggatgctagttgagaccgcacaggagagaaatgagaccctgttccctgctctaatttattctagcaccatggtgtggctggttaacatggcagagggggaccctgaagctcaaagacgcgtgtcaaagaactccaaatataacgctgagcgtgcttgcctgccacctgcagcaatcaaccttctgtccatcgctcctatggcacctcggctattcatgcctaagggagcctgtcggcctacagctcaaaaaggctctcataaaaccttgttgcagagaatgatgatggctggaagcgtccgaaatggtaaacctcggggaaccgttatctag

SEQ ID NO: 236005 - DNA, 1392 bp, synthetic construct
  misc_feature 1..1392: note = Description of Artificial Sequence: Synthetic coding sequence
  source 1..1392: mol_type = other DNA
atgaccgaactacctgcgcctctctcatacttccagaatgcccagatgagcgaagacaatcatctaagcaacacgaacgataaccgcgagcgtcaagagcataacgatcggaggtcactgggacacccagaacccttaagtaatggcaggccacaaggcaacagtagacaagtggtagagcaggatgaggaagaagacgaagagctgacgctcaaatacggcgcaaaacacgtcattatgttgtttgtgccagtgacactttgtatggtcgttgtggtcgccacaatcaagtccgtgtccttctacacccggaaagatggccagctgatctacacaccctttacagaggacactgagactgttggccagcgggcactacattcaatcctcaacgcagccattatgatctctgtaatcgttgtaatgacaatcctgcttgtggtgctgtacaaatacaggtgttacaaggtaatccatgcatggttgatcatctctagccttctcttgctgttcttcttctccttcatttaccttggcgaggtgtttaaaacgtataatgtagccgtcgactacatcacagtcgcactattaatctggaattttggcgtcgttggcatgatatccatccactggaagggtcccctccgtctgcagcaggcgtacctcatcatgatctccgcactgatggcgctcgtttttatcaagtatttgcccgaatggaccgcctggctcatcctggctgtgatcagtgtgtatgatttggtggctgtcctgtgtcctaaagggcctctgagaatgctggtggaaacagcccaggaaagaaatgaaaccctgttccctgccctcatttactcgtccactatggtatggctcgtcaatatggccgagggcgatcccgaggcccaacgaagggtcagcaagaactctaagtataacgccgagtcgacggagagggagtcccaggatactgtggccgaaaacgacgatggaggtttctcagaagaatgggaagcacaacgagacagccatcttggaccacatcgctccacaccggaatctcgtgcagcagtgcaggagctgagtagctcaatcctcgcaggggaagacccagaagaaagaggcgtgaagcttggattgggagactttatcttctactctgtcttagttggcaaagcgtctgcgacagccagcggagactggaacactacaatcgcatgtttcgtcgccattttaattggactatgtttgaccctactactcctcgccatcttcaagaaggccttacccgcacttcctatttccattaccttcgggctggtgttttactttgctaccgattatcttgtgcagccctttatggatcagcttgcattccaccagttctacatatag

SEQ ID NO: 236006 - DNA, 555 bp, synthetic construct
  misc_feature 1..555: note = Description of Artificial Sequence: Synthetic coding sequence
  source 1..555: mol_type = other DNA
atgaccgaactcccagctcctctaagttactttcaaaacgcgcagatgagtgaagataatcacctcagtaacacggtgagatctcagaatgataaccgcgaaagacaggaacataatgatcgcagaagcctgggacaccccgagccactaagcaatgggaggcctcaagggaactcccggcaggtggtcgaacaggacgaggaagaggatgaggaactgaccttgaaatacggagctaaacacgttataatgctgttcgtgcctgtcaccctgtgcatggtagtagtcgtcgccactatcaagtccgttagtttttacactagaaaagacggccaactcatctataccccgttcaccgaggataccgaaacagtgggacaacgcgcactccactccatcctgaacgctgcaatcatgatttctgtcatcgtagtcatgaccatcctccttgtcgtcctctacaagtaccgatgctacaaagtgagcatgcggcacagaagtctgttatctacgcttttcttcctgtggctgggcatcctggtgaccgtgacatag

SEQ ID NO: 236007 - DNA, 1392 bp, synthetic construct
  misc_feature 1..1392: note = Description of Artificial Sequence: Synthetic coding sequence
  source 1..1392: mol_type = other DNA
atgacagagctgcctgcccctttgtcgtatttccagaacgcccagatgtcagaggacaatcacttgtccaacacaaatgataacagagaacggcaggaacataatgacagacggtccctggggcatcccgaacccctatcaaatgggaggccacaagggaattctaggcaggtggttgagcaagacgaagaggaggacgaggaattgactctgaagtacggagccaaacacgttattatgctcttcgtgcctgtaacattgtgtatggtggtcgtcgtggcaacaatcaaatctgtgagcttttacacaaggaaggatggccagctcatttacaccccatttacagaagataccgaaacagtgggccagcgagctctgcacagtatattgaacgccgctatcatgatttctgtgattgtagtaatgacaatcctgttagtcgttctgtataagtaccggtgttacaaagtgatccacgcttggttgatcatctctagtctgctgctgctgttcttcttcagtttcatctacctgggggaagttttcaaaacgtacaatgtggcagtggattatattaccgtcgctctgctcatctggaactttggcgtggttggcatgatctccatccattggaaaggtcccctgagactgcagcaggcctacctgataatgatctctgcgttaatggctctggtgtttattaagtaccttcccgagtggacagcgtggctgattctagccgttatatccgtgtacgatctcgttgctgtcttatgccccaaaggtcccctgcgtatgctggtggagacagcccaggaacggaatgagaccctattcccagctctgatttactcaagcacaatggtgtggcttgtgaatatggccgagggcgatcccgaagcccagcggcgagtgtccaagaactctaaatacaatgctgagtctaccgaacgagaaagccaagacaccgtcgcagagaacgatgacggcggattttcagaggagtgggaagcccagcgagactctcacttaggtccacaccgttccacccctgagagtagagcggctgtacaggaattgtcgtcgagcatcctagctggggaagatcccgaagagcggggtgtcaaattgggcctgggcgacttcatcttttattctgttttagtgggcaaggcgtcagctaccgcatccggcgactggaatacaacgatcgcatgtttcgtggccattctgattggcttgtgtttgacactcctcctgctcgccattttcaagaaggcccttcccgcactgccaatcagtattacgtttggtctggtgttctactttgccacagactaccttgttcagccttttatggaccaacttgcctttcatcagttctatatttag

SEQ ID NO: 236008 - DNA, 279 bp, synthetic construct
  misc_feature 1..279: note = Description of Artificial Sequence: Synthetic coding sequence
  source 1..279: mol_type = other DNA
atgaccgaactgcccgcacccctctcatactttcaaaacgcccaaatgtcagaagataaccacctgagtaacactaacgacaaccgggagcgtcaggagcacaacgaccgaaggagcctgggacatcccgagccattgtctaacggacgccctcagggtaattcccgccaggttgtggaacaggatgaagaggaagatgaggaactgacgttaaagtatggggctaaacacgtgatcatgttgtttgttccagtgactttgtgcatggtcgtcgtctag

SEQ ID NO: 236009 - DNA, 444 bp, synthetic construct
  misc_feature 1..444: note = Description of Artificial Sequence: Synthetic coding sequence
  source 1..444: mol_type = other DNA
atgaccgaactccctgccccattgtcctattttcagaatgcccagatgagtgaggacaatcatctgagcaacaccaatgataatcgagagagacaggaacacaacgaccggcgttccctggggcatccagagcccctatccaacgggagacctcaggggaacagtagacaagtggtggagcaggacgaagaagaggatgaggagctgacattgaaatacggcgcaaaacatgtaattatgctgtttgttcccgttacattgtgcatggtcgtcgtggtggctaccatcaagtcagtgagcttctatacgagaaaggacgggcagctgatctacacacccttcaccgaggatacggagacagtgggccagcgcgctctccactcaattctcaacgcagcaattatgatttcggtgattgtcgtgatgaccattctgctggtgtag

SEQ ID NO: 236010 - DNA, 330 bp, synthetic construct
  misc_feature 1..330: note = Description of Artificial Sequence: Synthetic coding sequence
  source 1..330: mol_type = other DNA
atgacagagcttcccgctcccctttcctacttccagaacgctcagatgagtgaagacaaccacctgtctaacaccgtgaggtcccagaatgataaccgcgagcggcaggagcataatgacagacgctcgctcggccatcctgagcctctctctaatggtcggcctcaaggtaactcccggcaagttgtagagcaagacgaggaggaggacgaagagctgacactgaagtacggcgctaaacacgtgatcatgctgttcgtccctgtgactctgtgcatggtggtggtagtggctaccattaaatccgtctcgttttacactcggaagtag

SEQ ID NO: 236011 - DNA, 468 bp, synthetic construct
  misc_feature 1..468: note = Description of Artificial Sequence: Synthetic coding sequence
  source 1..468: mol_type = other DNA
atgaccgagctcccggcaccattatcttattttcagaatgcccagatgagtgaagacaatcatctgtctaataccgttcgctctcagaacgataaccgcgagagacaggagcacaacgaccgaagatctctaggccaccctgagcccttgtcaaatggaagaccgcagggtaacagccgtcaagtggtcgaacaggatgaggaggaagacgaagaactgaccctcaaatacggagcaaaacacgtgatcatgttatttgtgccggtgacgttgtgcatggtggtggtggtcgctaccattaagagtgtctcattctacacacggaaagatggccagttaatctacacaccctttaccgaagatactgagaccgtaggccagagagcactgcactctattctgaatgccgcaataatgatttctgtcattgtggtcatgacaatcctgcttgttgtactgtataagtag

SEQ ID NO: 236012 - DNA, 177 bp, synthetic construct
  misc_feature 1..177: note = Description of Artificial Sequence: Synthetic coding sequence
  source 1..177: mol_type = other DNA
atgactgagcttcctgccccactgagttactttcaaaacgcgcagatgtctgaggacaaccacctctcaaatactaacgacaacagagaacggcaagagcacaacgatcgtcgatcattaggccatccagagcccctttctaatggaaggcctcagggaaatagtcgacaggtgtag

SEQ ID NO: 236013 - DNA, 279 bp, synthetic construct
  misc_feature 1..279: note = Description of Artificial Sequence: Synthetic coding sequence
  source 1..279: mol_type = other DNA
atgacagaactgcctgcgcctttgtcatatttccaaaacgctcagatgtcagaagataatcatctctctaatacaaacgataatcgggagagacaggaacacaatgaccgccgttctcttggccatccagagcctctaagcaatggtaggccgcaaggtaattctcgccaagttgttgagcaggacgaggaagaggacgaagaactcaccctcaagtacggagctaagcatgttattatgttgtttgtacccgtgaccttgtgtatggtggttgtgtag

SEQ ID NO: 236014 - DNA, 192 bp, synthetic construct
  misc_feature 1..192: note = Description of Artificial Sequence: Synthetic coding sequence
  source 1..192: mol_type = other DNA
atgacggaactcccagctcccctgtcctatttccagaatgctcagatgagcgaggacaatcatctcagcaataccaacgacaatcgcgagcggcaggagcataatgatcggaggagcttaggacatcccgaaccgctgtcaaacggccgacctcagggcaatagcaggcaggtcgttgagcaggacgaatag

SEQ ID NO: 236015 - DNA, 276 bp, synthetic construct
  misc_feature 1..276: note = Description of Artificial Sequence: Synthetic coding sequence
  source 1..276: mol_type = other DNA
atgaccgaactgccggcacccctctcgtattttcagaacgcccagatgtccgaggacaatcacctttccaacactaatgacaaccgggagcggcaagagcacaacgaccggaggagcctcggacatcctgagcctctgtcaaatggcagaccacaaggaaactctaggcaggtagtcgagcaagacgaggaggaggatgaggagctcacattaaagtatggggctaagcatgtgatcatgctgttcgtgcctgtgaccctatgtatggtggtgtag

SEQ ID NO: 236016 - DNA, 189 bp, synthetic construct
  misc_feature 1..189: note = Description of Artificial Sequence: Synthetic coding sequence
  source 1..189: mol_type = other DNA
atgacagaactccccgctccactgtcttatttccagaacgctcagatgtccgaagataatcacctttcaaacactaacgacaatcgagaaagacaagagcacaacgatcggcgatcactcggacacccggaaccgctttctaacggccgacctcaaggtaattcaaggcaggtggttgagcaggactag

SEQ ID NO: 236017 - DNA, 300 bp, synthetic construct
  misc_feature 1..300: note = Description of Artificial Sequence: Synthetic coding sequence
  source 1..300: mol_type = other DNA
atgactgagttaccagcccctctgtcatactttcagaatgcacagatgtcagaggacaatcatctgtcaaacaccgttagaagtcagaacgataatagagagcgccaggagcacaacgaccggagatctctgggtcatcccgaaccactctcgaatgggagacctcaggggaacagtaggcaggtggtggaacaggacgaagaagaggacgaggagctgaccttaaagtatggtgccaaacatgtaattatgctattcgtgccagtaaccctatgtatggtggtggttgtggccacgtag

SEQ ID NO: 236018 - DNA, 408 bp, synthetic construct
  misc_feature 1..408: note = Description of Artificial Sequence: Synthetic coding sequence
  source 1..408: mol_type = other DNA
atgacggagctaccggctcccctgagctacttccaaaacgcccaaatgagcgaagataaccatctcagcaataccaatgacaaccgggagcgacaggagcacaatgaccgccgttccctggggcatcctgagcccctgagcaatggcagacctcaaggcaactcacgccaagtcgttgaacaggatgaagaggaggatgaagaacttactctgaagtacggagccaagcacgtgataatgttgttcgtacctgtaaccctgtgcatggtggtcgttgttgccacgattaaatcagtgagcttctacactaggaaggacggccagctgatttacaccccttttactgaggataccgaaacggtggggcaaagggccttgcatagcatcctgaatgctgctatcatgtag

SEQ ID NO: 236019 - DNA, 330 bp, synthetic construct
  misc_feature 1..330: note = Description of Artificial Sequence: Synthetic coding sequence
  source 1..330: mol_type = other DNA
atgactgaactgcccgctcctctgagctatttccagaatgcacagatgagcgaggataaccacctgtccaacaccaacgataaccgagagagacaggagcataatgatcgcaggtcactgggtcaccctgaacccctgagcaatggcagaccgcagggtaattctaggcaagtggtggagcaggatgaggaggaagatgaggaactgacccttaagtatggtgcaaagcatgtaatcatgctattcgtgcccgtgacattgtgcatggtggttgtggtggccaccatcaagagtgtgtctttctataccaggaaggacgggcagctgtag

SEQ ID NO: 236020 - DNA, 1248 bp, synthetic construct
  misc_feature 1..1248: note = Description of Artificial Sequence: Synthetic coding sequence
  source 1..1248: mol_type = other DNA
atgttaactttcatggcatctgattcagaggaggaagtgtgcgacgagagaacatctctaatgtccgcggagtcccccacaccccgatcctgtcaggagggacggcagggcccagaagacggagagaatactgcccaatggagatcacaggagaacgaggaggatggagaggaggatcctgatagatacgtgtgttctggcgtgcccggacgcccacccggactcgaggaagagctcacgctgaagtacggcgctaagcatgtgatcatgctgttcgtgccagtgaccctttgtatgatcgtcgtagtggccacaattaagtcggtgaggttctacacagaaaagaacggtcaattgatttacacgccattcactgaggacactccttctgttggccagagactgttgaattccgtgctcaacacacttatcatgatctctgtcattgtggtgatgaccatcttcctggttgtgttgtataaatacagatgctataaattcattcacggatggctcattatgagtagcttgatgctgttgttcctgtttacctacatctacttgggggaagtgctgaagacatacaacgtggctatggattaccccaccctgttactgacagtatggaactttggggcagttggcatggtttgcattcactggaaaggacctctggtcttgcagcaggcctacctaatcatgatatccgcactgatggcactggtgttcatcaaatacctccctgaatggagcgcatgggtgatcctcggcgctataagcgtttacgccgcaatggtgtggacggtcgggatggctaagctggatccaagtagccaaggagccctccagttgccttatgatccggagatggaagaggactcttatgattcgtttggtgagcccagttatccggaggtgtttgagccgccacttacagggtatcccggagaggaactcgaggaggaagaagagcggggtgtgaagctggggttaggtgacttcatattttattcagtgctggtgggaaaggccgctgcgaccggtagcggggactggaacaccactttggcctgcttcgtggccatcctgatcggactgtgcttaactctgcttttgctggccgtgttcaagaaagccctgcccgcactcccaataagtattacatttgggctcatcttttatttttccacagacaacctagtgcgaccattcatggacacactggcatcccaccaactctatatttag

SEQ ID NO: 236021 - DNA, 1446 bp, synthetic construct
  misc_feature 1..1446: note = Description of Artificial Sequence: Synthetic coding sequence
  source 1..1446: mol_type = other DNA
atgctggctggcacagtgcggtttgccaggcactgcctcaagttttttccggctcagaaacccgcttgcgtggactttggtgcaagccggggacgcgctatgctgaccttcatggcaagtgactccgaggaggaggtctgtgatgaaaggacgagtctaatgagcgcagagtcgccaactcctcgctcatgtcaggaaggcaggcagggacccgaggacggcgagaatactgcacaatggagatcacaggagaatgaggaagacggggaggaggacccagatcggtacgtatgtagtggtgtcccaggacgacctccgggactagaggaggagcttaccctcaagtacggggctaagcacgtcattatgctattcgtgccagtcaccctgtgcatgatcgtcgtggtggcgaccattaagagtgtgagattttacaccgagaagaatgggcagcttatctatactcccttcactgaggacacccctagtgtcggccagcggcttctgaacagcgtgctcaacactctaatcatgatctcagtgatcgtcgtcatgactattttccttgtggtgctgtacaagtatcgatgctataaattcatccatggctggttaatcatgagctcgctgatgctactgttcctgttcacttacatctacctgggggaggtcttgaaaacatataacgtggccatggattatccgacactgctactgacagtttggaatttcggagctgtgggtatggtctgtatccattggaaaggccctctagttcttcagcaggcatacctcattatgatctcagccctcatggcactggtctttattaagtaccttcccgagtggagtgcatgggttatccttggggcaatatccgtttatgacctcgtcgcggtactgtgtccaaagggtcccttgaggatgcttgtggagactgctcaagaaagaaacgaaccgatctttcctgctctgatttacagttctgcaatggtttggactgtagggatggctaaactggaccccagctcgcagggagccctgcagctaccttacgaccccgaaatggaagaggatagctacgattccttcggcgaaccctcctaccccgaggtgttcgagccgccattgacagggtacccaggcgaggaactggaggaggaggaggagcggggagtgaaattaggactcggagatttcatattctattcggtgttagtcggcaaggctgccgcaacaggctctggcgactggaacaccacacttgcctgttttgttgcaatcctgatcggcctgtgtctcactctgctccttctggcagtgttcaaaaaagctctccccgctcttccaatcagcattacttttggcctgatcttctatttttccacagacaatctggtgcggcctttcatggacaccttggcctcacaccagttatatatttag

SEQ ID NO: 236022 - DNA, 1347 bp, synthetic construct
  misc_feature 1..1347: note = Description of Artificial Sequence: Synthetic coding sequence
  source 1..1347: mol_type = other DNA
atgctgacgttcatggcgagtgacagcgaggaggaagtatgcgatgaaaggacatcactgatgagcgccgaaagcccaacccccaggagctgccaggaggggagacagggtccagaggatggcgagaacaccgcacagtggagatcacaagagaacgaggaggacggagaagaggacccggacagatatgtctgcagtggtgtgccaggtcggccaccagggcttgaagaagagctcacactgaagtacggagctaaacacgttatcatgctgtttgtgcccgtcactctctgtatgattgttgtcgtggctaccataaagagcgtgcggttttataccgagaaaaacgggcagttgatctacacgcccttcacagaggatactccatctgttgggcagagactgttgaactcggtgctcaatacacttattatgattagcgttatcgtcgtaatgacaatttttctggtggtgctctataagtatcggtgttataagtttatccacggttggttgatcatgagctccctaatgttactcttcctgttcacgtatatctatctgggggaggtccttaagacctataacgtggccatggactatcctacactgctcctgaccgtgtggaactttggagctgtgggaatggtttgcatacattggaagggcccattggtgctccagcaggcctatctgatcatgatcagcgctctgatggcgttggtttttattaagtatttgccagagtggtctgcctgggtcatactgggcgcaatctcagtgtacgacctcgtcgctgtcctgtgccccaagggcccactgagaatgctggttgaaacagcccaggagcgcaatgaaccaatttttcctgcactgatctactcatcagccatggtgtggactgtaggtatggccaagttggacccctcttcccagggtgccctgcagctgccttacgacccggaaatggaagaagacagctacgatagtttcggcgaaccctcgtacccagaggtgtttgaaccacccctaaccggctatcctggcgaggaactcgaggaggaagaggagcggggagtaaaacttggcctgggggattttattttttattctgtcctggtcggaaaggcagccgctaccggctcgggggattggaacaccactctggcctgtttcgtggctattttgattggcttgtgcttaactctgctgctccttgcggtcttcaagaaagctttgcccgcactcccaatctcaatcacattcggcctcatattctatttcagtacagacaatctagtgcggccttttatggacacattggcatcacatcaactctacatctag

SEQ ID NO: 236023 - DNA, 1446 bp, synthetic construct
  misc_feature 1..1446: note = Description of Artificial Sequence: Synthetic coding sequence
  source 1..1446: mol_type = other DNA
atgctggctgggacagtccgcttcgctagacactgcctgaaatttttccctgctcagaagcccgcatgcgtagattttggcgcaagccggggtagagccatgctgaccttcatggcctcagactcagaggaggaggtttgcgatgaacggacatccttgatgagtgccgagagccccactcctcgaagttgtcaggaagggcgtcagggccctgaggatggagaaaataccgcgcaatggcgcagtcaagaaaacgaggaggacggcgaggaggaccccgaccggtacgtttgttccggtgttcccggacgcccacccggacttgaggaagagctcacccttaagtacggagcaaaacacgttattatgctcttcgtgcccgtgacgctgtgcatgattgtggtcgtggcgactataaaatcggtcagattttacacagagaaaaacgggcagctaatttacaccccattcacggaagacacgccaagtgtggggcagagactactgaactctgtgctaaacaccttgattatgattagtgtaatagtggttatgacaatctttctcgtggttctctacaaataccgttgctacaaattcatacatgggtggctgatcatgtcctccctgatgcttttattcctgttcacctacatttacctgggggaggttctcaagacgtacaatgttgccatggactatccgacgcttttgctcaccgtgtggaatttcggagccgttggtatggtctgcatacactggaagggcccactggttttgcagcaagcctatctgatcatgatttcggctttgatggcccttgtcttcatcaaatacctgccggagtggtcagcatgggtcatcctgggggcaatttctgtttacgacttggtagcagtactctgcccaaagggcccactgcggatgctggtggagacagcccaggaacggaacgagcctatttttcccgcactaatctacagttctgcaatggtgtggacagtaggaatggccaagttagaccccagctcgcagggagcgctccagcttccctacgatccagagatggaggaggattcttacgacagctttggcgaaccatcttatccggaggttttcgagcctccgctgactggttaccctggcgaggaacttgaagaggaagaggaacggggtgtgaaactgggactgggtgatttcatcttttacagcgtgctggtcggtaaggcagctgcaactggaagcggagactggaacaccactttggcctgcttcgtcgcaatcctcatcgggttatgtctcaccctcttattgttggctgtgtttaaaaaggcactgcccgcactgccgatcagtataacctttggcctgatcttttatttctctaccgataacctggtacgcccatttatggatactctcgcatctcatcaactatatatatag

SEQ ID NO: 236024 - DNA, 1344 bp, synthetic construct
  misc_feature 1..1344: note = Description of Artificial Sequence: Synthetic coding sequence
  source 1..1344: mol_type = other DNA
atgttgacattcatggcaagcgactcagaagaggaggtgtgtgacgagagaacatcgctaatgtctgcagaaagtcctactccacgtagctgtcaggagggacgccagggccctgaggacggtgaaaacacagcccagtggagatcccaggagaacgaagaagatggagaggaggatcctgatagatatgtatgtagtggggtcccaggcagacccccaggtctcgaagaggaattaactttgaagtacggtgcaaaacacgtgattatgctgttcgtcccggtgacattatgcatgattgtcgtggtcgctacaataaaaagcgtgagattctacactgaaaaaaatggccagctgatatacacaccctttacggaagatacccctagtgttggccagaggctgctcaactcagtactgaacaccctgatcatgattagcgtgatcgtagtgatgaccattttcttggtcgtgctgtacaaatacaggtgctacaagttcattcatggctggctcattatgagctccctgatgttactgttccttttcacgtatatctatcttggggaagtactcaagacttacaatgttgcaatggattatccaaccctcctgctgacagtgtggaatttcggcgctgtgggcatggtgtgcatccactggaaaggcccactggtacttcagcaagcttatctgattatgatctcagccctgatggccctcgtgttcattaagtacctgccagaatggagcgcctgggtgatcctcggcgctataagcgtatacgacctggtggctgttctttgcccgaagggccctctcagaatgctggttgaaacagcccaggagcggaacgagcccatattcccagccctcatatattcctctgctatggtatggactgttggtatggccaaactagatccaagttcacagggtgcattgcagctcccgtacgatcccgagatggaagacagctacgactcttttggagaaccctcataccctgaggtgttcgagcctccactgaccgggtacccaggcgaggaacttgaggaagaggaagaaagaggcgtgaagctgggcctgggagatttcatcttctatagcgtcctggtaggcaaagctgccgctaccggcagtggcgactggaatactacacttgcgtgctttgtcgccatcctcataggcctctgtctgacactcctgctccttgccgtatttaaaaaggcactgcctgccctgcctatcagcattacttttgggcttatcttctacttttcgaccgacaatcttgtccggccttttatggacacactcgctagtcaccagctttacatctag

SEQ ID NO: 236025 - DNA, 390 bp, synthetic construct
  misc_feature 1..390: note = Description of Artificial Sequence: Synthetic coding sequence
  source 1..390: mol_type = other DNA
atgctcacatttatggctagtgatagcgaggaggaggtatgcgacgagcgaacatccctcatgtctgctgagtccccgacaccccgtagttgccaggagggcagacagggccctgaggacggagagaatactgcccagtggcgctcgcaggaaaatgaggaggacggagaggaagaccccgaccgctacgtctgctctggagtacctggacggcctcctggacttgaggaagagctcactttgaagtatggcgctaaacacgtgatcatgctgtttgtacccgtgacgctctgtatgattgtggtggtcgcaacaattaaaagtgtgaggttctatacagagaagaacggccagctgatctatacccccttcaccgaggataccccgtag

SEQ ID NO: 236026 - DNA, 66 bp, synthetic construct
  misc_feature 1..66: note = Description of Artificial Sequence: Synthetic coding sequence
  source 1..66: mol_type = other DNA
atgttgactttcatggcctccgatagcgaggaagaggtctgcgacgaaaggacatcattgatgtag

SEQ ID NO: 236027 - DNA, 990 bp, synthetic construct
  misc_feature 1..990: note = Description of Artificial Sequence: Synthetic coding sequence
  source 1..990: mol_type = other DNA
atggcatggcgaggctgggcacagcggggatgggggtgtggccaggcatggggggcatctgtgggcggacgtagctgtgaggagttaactgcagtacttactccgcctcagctgctggggaggcgctttaacttcttcattcagcaaaaatgcggcttcagaaaggctcccaggaaggtggaaccccgacgtagtgacccgggtacttccggagaggcttataagagaagtgcgctgatacctccagttgaagagactgtattctacccatccccttatccgattagaagtctgattaagccactcttttttacggttggattcaccgggtgcgcctttgggtcagccgctatctggcagtacgaaagtctcaagtctagggtccaatcttatttcgacgggataaaggcggattggcttgactcgatccgcccacagaaagagggggatttcagaaaagaaataaacaagtggtggaacaacttaagtgacggccaacgcacggtcaccggaattatagccgctaacgttctggtgttctgcctgtggagagtccccagcctacaacgtaccatgattcgttattttacttccaaccccgcatcaagtgtgatcagcaacttcgtctcctatgtgggtaaggtggccaccggcaggtatgggccttcgctgggcgcttccggcgctatcatgacagtgttggctgcagtctgcaccaaaatccctgagggacgcctcgccattattttcctacccatgttcacgtttacagcgggaaatgctttgaaggcaattattgcgatggatacagccggaatgattctcggttggaaattcttcgatcatgccgctcaccttggtggagcccttttcgggatctggtatgtaacctacggccatgagttgatatggaagaacagggaacctctagttaaaatttggcatgagatccggactaacggcccaaagaagggaggcggttccaaatag

SEQ ID NO: 236028 - DNA, 1140 bp, synthetic construct
  misc_feature 1..1140: note = Description of Artificial Sequence: Synthetic coding sequence
  source 1..1140: mol_type = other DNA
atggcttggcggggttgggcacagcggggatgggggtgtggacaagcttggggagcgagcgtggggggtaggagctgcgaggagcttaccgcagtgctgacacccccacagttgctcggaagaagatttaacttcttcattcaacagaagtgtggcttccggaaggccccaaggaaagtcgaacctcggaggtccgaccctgggacgagcggtgaggcatataaacgatccgccctgataccccctgttgaggagacagttttttacccgtcaccctatcccatccggtctttaattaagccactgttcttcaccgtgggcttcactggatgtgcgtttggcagtgccgctatctggcaatacgagtccctgaagagccgcgtccagtcctatttcgatggcatcaaggctgattggttggacagcatacggcctcagaaggagggagactttagaaaagagatcaataaatggtggaacaatctgtcagatgggcaaaggactgtgactggtataattgctgccaatgtgctcgttttttgtttgtggcgagtgccaagcctgcaacgaacaatgatcaggtacttcacctcaaacccggcaagtaaggtgttgtgttctcctatgctgctgtccacttttagccatttttctctgttccacatggccgctaacatgtatgtcctctggtctttctcatcatcgatagtcaatattctgggccaggagcaattcatggccgtgtatctgtctgccggtgtgatctccaactttgtgagctacgttggaaaggtggccaccgggaggtatggcccaagtctgggtgccagcggcgctatcatgactgtgttggcagccgtgtgtactaaaattcccgaggggcgattggccataatatttcttcccatgttcaccttcactgctggcaatgcattaaaggcaatcatcgcaatggatacagcaggtatgatcttggggtggaaatttttcgatcatgctgcccaccttggaggggcactgttcggcatttggtatgtaacatacggccatgagctgatatggaaaaaccgggaaccactggtcaagatttggcatgaaattcgaacgaacggcccaaagaaagggggtgggtcaaaatag

SEQ ID NO: 236029 - DNA, 663 bp, synthetic construct
  misc_feature 1..663: note = Description of Artificial Sequence: Synthetic coding sequence
  source 1..663: mol_type = other DNA
atggcttcagcaactgactcacgatacggtcagaaggagtcttctgatcaaaacttcgactatatgttcaaaatcctcatcattggcaatagctccgtggggaagaccagttttctcttccggtacgcagatgacagtttcacccccgctttcgtcagtacagttggcatcgacttcaaagtcaagaccatttatagaaatgacaagaggatcaaactccaaatttgggataccgctggccaagagagataccgcactattaccacggcctactacagaggggcaatgggatttatcttgatgtatgatatcaccaacgaggagagctttaacgctgtgcaggattggtccacacaaatcaaaacctactcctgggacaatgctcaggtcctcctggttgggaataagtgcgacatggaggacgagagggtggtgtcatctgaaagaggacggcagttagccgatcacctgggatttgagttttttgaggcatctgccaaagataacataaatgtgaaacaaacctttgagagactcgtcgatgtgatttgcgagaagatgtccgaatctctggataccgcagaccctgctgtgacaggcgctaaacagggcccacagctttccgatcagcaggttccaccccaccaggactgcgcctgctag

SEQ ID NO: 236030 - DNA, 306 bp, synthetic construct
  misc_feature 1..306: note = Description of Artificial Sequence: Synthetic coding sequence
  source 1..306: mol_type = other DNA
atgaacctggaaagggtttcgaatgaggaaaaactaaatctatgcaggaagtattatttaggagggttcgcattcctgccatttctctggctggtcaatatcttttggttcttcagggaagctttcctcgtgccagcatacactgaacaaagccagattaaaggatatgtgtggcgctctgcggtgggatttctgttttgggtgatcgtgcttactagttggattacaatctttcagatctacagacctcgatggggcgcactaggggattatctgtcctttacaattccccttggaacaccgtag

SEQ ID NO: 236031 - DNA, 378 bp, synthetic construct
  misc_feature 1..378: note = Description of Artificial Sequence: Synthetic coding sequence
  source 1..378: mol_type = other DNA
atggccaaatacctcgcacagataattgttatgggagtccaggtggtgggaagagctttcgcgagagctctgaggcaggagtttgccgctagcagagccgcagctgatgcacgcggtcgggctggacaccgctcagcagccgcatcaaacctgagcggtttgtccttgcaagaagcccagcagatccttaacgtgagtaaactgtctccagaggaggtgcagaagaattacgaacatcttttcaaggtgaacgacaaaagcgtgggaggctccttttatctacagtccaaggtggtaagagctaaagagcgactagatgaggagttgaaaatacaagcccaggaggaccgggagaagggtcagatgccccatacttag

SEQ ID NO: 236032 - DNA, 2496 bp, synthetic construct
  misc_feature 1..2496: note = Description of Artificial Sequence: Synthetic coding sequence
  source 1..2496: mol_type = other DNA
atgccactggaaatggaacctaagatgtctaaactggcgttcggctgtcaacggtcaagcacctcagacgatgacagcggatgcgcacttgaggaatatgcctgggtgccacctggcttgcggcctgaacagatccaactgtattttgcctgtttgcccgaggagaaagttccatatgtgaactcgcctggtgagaagcatcgaatcaagcagctgttgtaccaacttccacctcacgataacgaggtgaggtactgccaaagcctatctgaagaggaaaagaaggaactccaggtgttcagcgctcagcgcaagaaagaagcactcggcagaggcacgattaaactgctttcaagagcggtaatgcacgccgtttgtgaacagtgtggactgaaaatcaacgggggagaggtggctgtttttgcaagtagggccggaccaggagtgtgctggcacccatcctgctttgtctgctttacatgtaacgagttgctcgtagatctcatctacttttatcaggatggtaagatccactgcgggcgacatcacgccgagcttctcaagcctagatgttctgcctgtgatgagattatcttcgctgatgagtgcacagaggccgaaggacgtcattggcacatgaagcacttttgttgcctcgagtgcgaaaccgtgctgggaggacagcgctatattatgaaagatggtagacctttttgttgtggatgcttcgagtccctctacgccgaatactgcgagacatgtggcgagcacatcggagtggatcacgcgcaaatgacttatgacggccagcactggcacgcaaccgaggcttgcttctcctgcgcccagtgcaaagcaagcttactggggtgcccctttctgccaaagcaaggccagatctattgcagcaagacctgctcgctgggggaggacgtgcatgcatctgactctagcgactctgcctttcagtccgctcgaagccgtgatagccgcagatccgttcggatgggaaaaagttcaagatcggccgaccaatgtcggcagtccttactcctgagccctgcgctcaattataagttcccagggctgtccggaaatgcggacgatacactctctaggaagctggacgatctgtccctgtcccggcagggcacgagttttgcttccgaagaattttggaagggaagggtagagcaagagactccagaagatcccgaagagtgggcagatcatgaagactatatgactcaactgctcctgaaatttggggataagtctctgtttcaaccacagcccaatgagatggatatccgcgcatcagagcattggatcagtgataatatggttaagagtaagaccgaactgaaacagaacaatcagtccttagcctcaaaaaaatatcagagtgatatgtattgggcccaatcccaggatggactcggggacagcgcttatggtagccatccgggaccagcttcttcgcgccgattgcaggaacttgagctggaccatggtgcttcagggtataatcacgatgagactcaatggtatgaggactcactcgaatgtctgtccgatcttaaaccagaacagagcgtccgtgattccatggacagtctggctctcagtaatattaccggagcctctgtggacggggaaaataaacccaggccttccctttactccctccagaatttcgaggagatggagactgaggactgtgagaagatgtccaatatggggactcttaactcttccatgctccatcggtcagctgaatccctgaaatcactctcgagcgaactctgtcccgaaaaaattttgcccgaggagaagccggtacacctacccgtcctccggaggtctaaatcgcaatcacgcccacagcaggtgaagttttcggatgatgtcattgataacgggaactacgatatcgaaatcagacagcctccaatgtccgagaggacccggaggcgcgtctacaactttgaagagcgcggatccagaagccaccatcacaggagacgacgtagccggaagtcgagaagcgataacgcccttaatctggtgaccgagagaaaatattcgccaaaagatcgactgcggttgtatacccctgataattatgagaagttcattcagaataaatctgccagggagatccaagcctacatccaaaatgccgacctttacggtcagtacgcccacgcgacttccgactatggactgcagaatcccggtatgaatcggtttctcggactgtacggcgaggacgacgacagttggtgttcaagctcatccagttcctccgactctgaggaggagggttatttcctggggcagccaatcccgcagccacggccacagcggtttgcatattatacggatgatctgtcgtcacctccctcagctttgcccacccctcagtttggccagaggactaccaagtccaagaaaaagaaaggacacaagggcaagaactgcatcatcagttag

SEQ ID NO: 236033 - DNA, 2496 bp, synthetic construct
  misc_feature 1..2496: note = Description of Artificial Sequence: Synthetic coding sequence
  source 1..2496: mol_type = other DNA
atgccgctcgaaatggaacctaagatgtctaaactggctttcgggtgccaacgatccagtacatctgacgacgactcgggatgtgcccttgaggaatacgcatgggtgccacctgggctaaggccggaacagattcagctgtactttgcatgcttgccagaagagaaagtgccttatgtcaactcgccaggagagaagcaccgaatcaagcagctcctgtatcaactccccccacatgacaatgaagtcagatactgtcaaagtctgagcgaggaagagaaaaaggagctgcaggtattctctgctcagcggaaaaaggaggctctgggacgcggaacaatcaaactgttatcgcgcgctgttatgcacgcggtgtgcgaacagtgtggactgaagatcaatggtggggaggtcgccgtgtttgctagccgggctgggcctggcgtgtgctggcacccatcttgtttcgtttgctttacatgtaatgagctgttggttgacctgatctatttctaccaggacggcaaaatccattgcggaaggcatcacgccgagttactgaagccgaggtgctccgcttgtgacgagataatcttcgctgatgagtgcacggaggccgaaggacggcattggcatatgaagcacttctgttgtctagagtgcgaaaccgtgctgggaggccagcgctacataatgaaggatgggcgacccttttgctgcggttgttttgaatccttatacgctgagtactgtgagacatgcggcgaacacatcggcgtcgaccacgctcagatgacctatgacgggcagcactggcatgcaacagaagcctgttttagctgcgcccaatgtaaggcaagcctccttgggtgcccctttctccccaaacagggtcagatttattgtagtaagacatgttcactgggtgaagacgtgcatgcttccgatagcagtgattccgctttccagtctgcacgtagtagagacagtcggagatctgtgcgcatgggaaagtcttccagatcagccgatcagtgcaggcagtcactcttattgtcccctgcactaaactataaattccccggactcagcggtaacgccgatgataccctgtctcgcaaactggacgatctatctctgtcaagacagggcacctccttcgcgagtgaggaattttggaagggtagggtcgaacaggagacgccggaggacccagaggagtgggccgaccatgaggactacatgacgcagcttctactcaaattcggcgataaatctctttttcagccccagccaaacgaaatggacattagagcatctgagcactggatcagcgataatatggtaaaaagtaagacagaactcaagcagaacaatcagagcttggccagcaaaaaataccagagtgatatgtattgggcacagagccaggatggcctgggagacagtgcttatggatctcatcctgggccagcatcttcccgtcgcctccaagagctggaactggaccacggcgcatctgggtacaaccacgatgaaactcaatggtacgaagatagtctggagtgcctgtcggacttgaagcctgagcaaagtgtcagagattctatggacagccttgcactgtccaatatcaccggcgcttccgttgacggtgaaaacaagccacggccttccctatacagtctgcaaaatttcgaagaaatggaaaccgaggactgcgagaagatgtcaaacatgggcacgctcaacagctcaatgctgcatagatctgcagaatctctgaagagtcttagctcagagctttgcccagagaaaatcctgccggaggagaagccagtacatctgccagtgctgagacggtcaaaatcgcaaagtaggccacagcaggtaaaattttccgacgatgtcatcgataatgggaactatgacatcgaaataagacaaccacccatgtctgaaaggacgcgacggagagtctataacttcgaggaaagaggaagcaggagtcatcatcatcggaggaggagatcacgtaaaagccggtcagacaatgcgctgaacctggtgaccgaacgcaaatattccccgaaggatcgattgcggctttacacccccgataattacgagaagttcattcaaaacaagagcgccagggagatccaggcgtatatccagaatgccgatctctacggacagtatgcccatgctactagcgattatggattgcagaacccaggcatgaatcgtttcctaggactgtatggggaggacgatgactcctggtgttcttcatcctcttcaagctcagattcagaggaagagggctatttcctcggtcaaccaataccgcagcctcgcccacagagattcgcgtactatacggacgatctgagcagccccccatctgctctgcccaccccacagtttggacaaagaacgaccaagtctaaaaaaaagaagggacacaaaggaaaaaactgcatcatcagttag

SEQ ID NO: 236034 - DNA, 2496 bp, synthetic construct
  misc_feature 1..2496: note = Description of Artificial Sequence: Synthetic coding sequence
  source 1..2496: mol_type = other DNA
atgccactggagatggaaccaaagatgagtaaactcgcctttggatgtcagagatcctctacttcagatgatgactctgggtgcgcccttgaggaatatgcatgggtgccaccaggactgaggcccgaacagattcaactctatttcgcctgccttcccgaagaaaaagtgccctacgtcaatagccccggtgaaaagcacagaataaagcaactgctctaccagctgccaccccatgataacgaggttagatattgccagtctctctcagaggaagaaaaaaaggaactgcaggtcttcagtgctcaacgcaaaaaggaggccctgggcaggggcaccattaaactcctgtctcgggctgtgatgcacgctgtgtgtgagcagtgcgggcttaagatcaacgggggtgaagtggcagtttttgccagccgcgctggcccaggcgtgtgttggcacccaagctgctttgtctgttttacatgcaatgagctgctggtagatctgatttacttctaccaagacggaaagattcactgtggccgacatcatgctgaactcttgaagcctcgctgctcagcctgtgacgaaatcattttcgccgatgaatgcactgaagcagaaggcagacattggcacatgaagcacttttgctgcctggagtgtgagacagtcttaggtggacaaagatacataatgaaagacggcaggcccttctgctgcggatgtttcgaatcactttatgctgagtactgcgagacctgcggtgagcacatcggagtggatcatgcccaaatgacctatgatggacagcactggcacgcgacagaagcttgcttctcgtgcgcccagtgtaaggccagcctcttgggatgccccttcttgcctaaacagggccaaatctattgttccaagacatgtagtttgggagaggatgttcatgcctccgactcttccgacagcgcttttcagagcgcacggagccgagacagcaggcgttcggtgcgcatggggaagtcatctcgatcagccgatcagtgccggcagtccctccttctttctcctgccttgaattataaatttcctggcctgtccggcaacgctgacgacaccctatcccggaagttggacgacctgagcctttccagacagggcacatctttcgcctccgaggaattttggaaagggagggtggaacaggagactcccgaggatcccgaagaatgggccgaccacgaagattacatgacccagctcctgcttaagttcggcgataaatcactgtttcagccacagcctaacgagatggacatacgcgcatctgaacattggatctccgacaatatggttaagtccaagacggagctgaagcagaacaaccagagcctggcctccaagaagtaccagtctgacatgtattgggcacaatcccaagatggactcggggatagtgcctacggcagccaccccggacctgcctcttcacgcagactgcaggagctggagctggaccatggcgctagtggttataatcatgacgagactcagtggtatgaggactccttagagtgcctgagcgatctaaagcccgagcagagcgtgcgcgatagcatggatagcctggctctgtccaatattaccggtgccagcgtagatggcgaaaacaaaccacggccatctttatacagcctgcagaacttcgaggagatggagaccgaggattgcgaaaagatgtccaatatgggaaccctcaatagttcaatgctacatcgatctgccgagagtttgaagagtctctctagtgagctctgtcccgagaagatcctgccggaggagaagccagttcatttacctgtgctgcgccgttcaaagagtcaatcgcgacctcaacaggttaagttcagcgacgacgtcatcgataacggaaattatgacatagagattagacagccacctatgtctgagagaacccggcgaagagtgtacaacttcgaagaacggggtagtcgttcgcaccatcaccgacgcaggagatctagaaagtcccgcagcgataacgccctgaacttggttactgagcgcaaatattcacccaaggaccgtctgcgcctctacactcccgacaattatgaaaagtttatacaaaacaagtctgcccgagagattcaggcctatattcagaatgccgatctgtacggccagtacgcgcatgcgaccagcgactatggattgcagaatccaggtatgaacagattcctcgggctgtacggagaggatgacgattcgtggtgttcctctagctccagttcctctgacagcgaggaggagggatactttctggggcagcccatcccccagcccagaccgcagcgctttgcctactataccgatgatctgtccagcccaccctccgcactcccaactccacagttcggccagagaaccactaagtccaaaaaaaagaaaggtcacaagggcaaaaactgtatcatcagctag

SEQ ID NO: 236035 - DNA, 333 bp, synthetic construct
  misc_feature 1..333: note = Description of Artificial Sequence: Synthetic coding sequence
  source 1..333: mol_type = other DNA
atgcctctggaaatggagccaaaaatgtcaaagctagcgttcggctgccagcgctcttctacctctgacgatgatagcgggtgtgcgcttgaggagtacgcctgggttccccctggccttagacccgaacagattcagctttacttcgcctgtttgccagaagagaaggttccttacgttaactcaccgggagagaaacacagaatcaaacaactgttataccagctcccgcctcatgacaatgaggtgcggtactgtcaaagcctgtcagaagaagagaagaaggagctgcaggtgttcagcgcacaaagaaaaaaggaggcactgggatag

SEQ ID NO: 236036 - DNA, 2496 bp, synthetic construct
  misc_feature 1..2496: note = Description of Artificial Sequence: Synthetic coding sequence
  source 1..2496: mol_type = other DNA
atgccgttggagatggaacccaagatgtccaaactggcattcggatgtcagcgtagttctacttccgacgacgacagtggctgtgcccttgaggaatatgcctgggtcccacccggacttcgccctgaacagattcagctttacttcgcgtgcttgcccgaggagaaagtgccttatgtcaattcccctggcgagaaacatcgaattaaacaattgctgtaccaactgcccccacacgataatgaggtgcgctattgtcagtcattgagcgaggaggagaaaaaagaactgcaggtgttctccgcccaacgtaaaaaagaagctcttggaagaggcactattaaactgctatctcgagcggtgatgcatgccgtgtgcgaacagtgcggtctgaagatcaatggcggagaggtcgcagtcttcgcgagccgcgctggcccaggtgtgtgttggcatccctcctgctttgtatgttttacctgtaacgagctgttggtagacttgatttacttttatcaagatggtaaaatccattgtggacgccaccacgccgaactgcttaaacctaggtgcagtgcgtgcgacgagatcatatttgctgatgaatgtaccgaagcagaagggagacattggcatatgaaacacttttgttgcctggagtgcgaaaccgtactcggtggccagaggtatattatgaaggatggcaggcctttctgttgtggttgctttgaatcgctttatgccgagtactgcgagacgtgcggcgagcacattggcgtggaccatgcgcaaatgacctatgacgggcaacattggcatgcgacagaagcttgcttcagctgcgcccagtgtaaagcctcgctgctgggctgtcccttcctacccaaacaggggcagatttattgtagcaaaacatgttcgttgggggaggacgttcatgcatccgactcctctgattccgcttttcaatccgccaggagcagagactcacgtagaagcgttcgcatgggtaagtcctcgcgaagcgcggatcaatgccgacaatccctgctcttatccccagcactcaactacaaattccctggcctgtccgggaacgcggacgacacccttagcaggaagctggacgacttaagcttaagccgacagggcacatcctttgcctccgaagagttctggaaaggacgggttgagcaggagaccccagaggatcccgaggagtgggcagaccacgaggactacatgactcagctgctgctcaaatttggtgacaaatccctgtttcagcctcagcccaatgaaatggacattagagcttctgagcactggattagcgataatatggttaagagcaagacagaactgaaacagaacaaccaaagcctggcctccaaaaagtaccagtcagacatgtattgggctcaatctcaggatgggctgggagattcggcctacggtagtcaccccggacctgcatcgtcccggcgacttcaggaactcgaattagaccatggagcatcaggatataaccacgacgagacccagtggtacgaagactccttggaatgtttgagcgatctaaagcctgagcaatcagttcgcgactcgatggactcacttgcgttatccaacattactggcgcttctgtcgacggtgagaataaaccgaggcccagtttatacagccttcagaacttcgaggagatggaaactgaggactgtgagaaaatgtctaacatgggcactcttaactcctccatgctccacaggtcagccgagtccctgaagagtctctcaagtgagttgtgtcctgagaaaatcctgccggaggagaagcccgtccacctccccgtgcttaggcgcagcaagtcccaatccagaccccaacaggtgaaattttctgacgatgtaattgacaatggcaattatgatatcgaaatcaggcagccaccaatgagtgaacgcacccggcgtagagtgtataacttcgaggagcgtgggtccaggagtcaccaccacaggcgcagacgatcacgtaaaagcaggagcgacaacgcccttaatttggttacagagcggaagtacagccccaaggataggttgcggttatacaccccagacaactacgagaagtttatacagaacaagtcagctcgcgaaatccaggcgtacattcagaacgctgacctttacggccagtacgcccacgccactagcgattacggtctgcaaaatccagggatgaaccggtttctgggactatacggtgaggacgacgactcgtggtgcagctcatcctcttccagcagcgacagcgaggaagaaggctatttcctcggccagcccattccacaaccgcgtccacaacggtttgcctactacaccgacgatctgagctctcctcccagcgctctgccgacgcctcaattcggtcagagaacaacaaagagtaagaagaaaaaaggccacaagggaaaaaactgcattattagctag

SEQ ID NO: 236037 - DNA, 360 bp, synthetic construct
  misc_feature 1..360: note = Description of Artificial Sequence: Synthetic coding sequence
  source 1..360: mol_type = other DNA
atgccactggaaatggagcctaagatgtcaaaactggctttcgggtgtcagaggtctagcacatccgatgatgatagcgggtgcgcattagaagaatacgcttgggtcccaccgggattacgccctgagcagatccaactttacttcgcgtgtctgcctgaagagaaggtgccctacgtgaattctcccggtgagaagcacaggattaagcagctgctgtatcagctgcctccccatgacaatgaagtgaggtattgtcaatctctgtccgaggaggagaagaaggagctgcaggtgttcagtgcccagaggaaaaaggaagcactgggcagagggaccatcaagctgttgagccggtag

SEQ ID NO: 236038 - DNA, 480 bp, synthetic construct
  misc_feature 1..480: note = Description of Artificial Sequence: Synthetic coding sequence
  source 1..480: mol_type = other DNA
atgccattggagatggaacctaaaatgtctaagcttgctttcgggtgtcagagatcttcaacaagtgatgatgactccggctgcgccctcgaggagtatgcttgggtgccaccaggtcttaggcccgagcagattcagctgtactttgcatgtcttcctgaggagaaagtcccatacgttaatagccccggagagaagcatcggatcaagcagctcctttatcagctccctccccacgacaacgaggtgcgatactgccagtctttgtcagaggaagagaaaaaggaattgcaggtgttcagtgctcagcgcaagaaagaggctctcgggagaggcactattaagttattgtcccgagccgtgatgcacgctgtttgcgaacagtgcggcctgaaaattaatggcggtgaggtcgccgtcttcgcaagccgcgctggtcctggagtgtgttggcacccatcttgcttcgtctgcttctag

SEQ ID NO: 236039 - DNA, 2496 bp, synthetic construct
  misc_feature 1..2496: note = Description of Artificial Sequence: Synthetic coding sequence
  source 1..2496: mol_type = other DNA
atgccactagaaatggaacctaaaatgtcgaaactggccttcggctgtcagcggagctccactagcgacgatgactctggttgtgctctggaggaatatgcatgggtaccacccggactcagaccagagcagattcagctttactttgcctgcctcccagaggagaaggtgccgtatgtgaactcacccggagagaaacatcgcatcaaacaactgctctaccaattaccaccacacgataacgaggtcagatactgtcagagcctgtccgaagaggaaaagaaagagctccaggtcttctccgcccaaagaaaaaaagaggccctgggccgaggaaccattaaactgctcagccgggctgtgatgcacgcagtgtgcgaacagtgtggacttaagatcaacgggggagaggtggcggtctttgcgagcagggcaggacctggagtatgttggcatccaagctgcttcgtctgctttacatgcaacgagttgttagtcgatcttatttatttctatcaagatggaaaaattcactgcggcaggcatcatgccgagctacttaaaccacggtgcagcgcatgcgacgagattattttcgccgacgaatgtaccgaagcggaggggcgacactggcatatgaaacacttctgctgtttggagtgtgagaccgttctgggcggtcagcggtatattatgaaggatggcaggcccttttgctgtggttgctttgagtccctgtacgccgagtactgtgaaacatgtggagaacacattggcgtggatcatgcgcaaatgacttacgacggccagcactggcacgcaaccgaagcctgctttagctgcgcccagtgcaaagcctctcttcttggatgtccatttctccctaagcagggacagatctattgctcaaagacatgttcattgggcgaggatgtgcacgcgagcgattcctcggactccgcctttcagagtgctagatcaagagacagcagacggtcagtccggatgggaaagtcatctcggtcggcagatcagtgccgccagagcctcctcctgagccccgcactaaactacaaatttcccggactctctggcaatgcagatgatacgctgagtagaaagctcgatgacttgagcctgagtcgccagggcacgtcatttgcctccgaggagttttggaagggccgtgtggaacaggagacccctgaagatccggaggagtgggcagatcacgaagattacatgactcagctgctcttgaaattcggggataagtctctcttccaaccccagccgaatgaaatggatattagggcctcagagcactggatctccgataatatggtgaagtccaagacagagctaaagcagaataatcagagtttggcctctaaaaaatatcagagcgacatgtactgggcacaatctcaggatgggctgggtgacagcgcttatggttctcacccaggcccagccagctccaggaggctccaggagctcgaactggaccacggtgccagcggctacaaccatgacgagacacagtggtacgaggatagcctggaatgtcttagcgatctcaaaccagaacaatctgttagggattcgatggactctctcgcgctgtcaaacattaccggagctagcgtggacggcgagaacaaacctagacctagcctgtacagcctccagaattttgaggaaatggagaccgaagattgcgagaagatgagtaacatgggcactctaaatagcagcatgttacacagaagcgcagagagcctgaaaagcctatccagtgaactgtgtcctgaaaagattctgccagaggaaaagccggtgcatcttccggtcctgaggcggtctaaatcccagtcgcgaccgcagcaggtgaaattcagcgatgatgtcattgacaatggtaattacgacattgaaattcggcagcccccaatgagcgaaaggacgcgccgtcgggtgtataacttcgaagaacgcggatcgcggtcacaccatcataggaggagacggagtcgcaaaagccggtcagataatgctctgaacctcgttaccgagagaaaatattctcccaaggacaggctacggctctatactcccgataattacgagaagttcattcagaataaatccgcgagagagattcaggcatacattcagaatgcagacttgtacggacagtatgcccacgctacaagcgattatgggctgcagaaccctggtatgaacagatttctggggctttacggggaagatgatgactcttggtgtagctctagctcttcctcctccgattctgaggaagagggttatttcctgggccaaccgatcccgcagcctcggcctcaaaggttcgcatattacactgatgacctctccagtcctcctagtgcacttcctactccccagttcggccagcgcacaactaaatctaagaaaaagaaagggcacaagggaaaaaactgcataatctcctag

SEQ ID NO: 236040 - DNA, 2535 bp, synthetic construct
  misc_feature 1..2535: note = Description of Artificial Sequence: Synthetic coding sequence
  source 1..2535: mol_type = other DNA
atggttaccgtcatgcccctggagatggagaagacaataagtaaactgatgtttgactttcagcggaatagtactagtgatgacgatagcggttgcgctctcgaagaatacgcttgggtgccacccggtctgaagcctgaacaggtgcaccagtactactcgtgtctgcccgaagagaaggttccgtatgttaattcccctggggaaaaactgcggatcaagcagctgctgcaccagcttcctcctcacgataatgaagtcagatactgcaattctctcgacgaggaggaaaagcgcgagcttaaactgttttcctcacaaaggaagagggagaatttgggcaggggcaacgttcggccattccccgtcacgatgactggggctatttgtgagcaatgtggcggtcagattaacgggggtgacatagccgttttcgctagtcgtgccggacacggagtgtgttggcaccccccatgcttcgtctgtacagtgtgcaacgagctgctggtggatctgatctacttctaccaggacgggaagatttactgcggccgacatcacgccgagtgccttaagccccgatgcgcggcttgcgacgaaattattttcgcagatgagtgtacagaagcggagggcagacattggcacatgaagcacttttgctgcttcgagtgcgagactgtgctgggaggccagcgttatatcatgaaggagggaaggccatactgttgccactgcttcgaaagcttgtacgctgaatactgtgatacctgcgcacaacacataggtatagaccagggccagatgacgtatgacgggcagcattggcacgcaaccgagacctgcttttgttgtgctcactgtaaaaagagccttctgggtaggccatttctcccgaaacaagggcagatcttctgttctcgggcttgctccgccggagaggatcccaatggttccgacagttctgattcggcttttcagaacgcccgagcaaaggagtctaggcggtccgctaagatcggaaagaacaagggaaaaaccgaggaacctatgttaaatcagcactcccagttgcaagtgagttctaatcgcctgtcagctgatgtcgaccccctctccctccagatggacatgttgtctctctccagccagacgcctagcctcaatcgggatcccatttggcgtagcagagaggaaccatatcactacgggaataaaatggagcagaaccagacccagagccccctccaactgctgagccagtgtaatattaggacatcatacagtcccggaggacaaggtgctggtgcacagcccgaaatgtggggcaagcacttttccaatcccaaaagatcgagcagcctagcaatgacaggacatgccggttcattcatcaaggagtgcagagaagattactaccccggaaggctgcgatcccaggagagttattcagacatgtcctcccagagtttcagtgagaccagagggagcatccaggtacctaaatatgaagaggaagaggaggaagaagggggtctgtcaacccagcagtgccggactcgccacccaatctcttcactgaagtacaccgaggacatgactccaaccgagcagacaccaagaggctctatggagagcctcgctctgagtaatgcaacaggcttatccgcagatggaggtgctaaaaggcaggaacacctgtctagattcagtatgccggatctgtctaaggattccggaatgaacgtctccgaaaagctttcaaacatggggactttaaattccagtatgcagttcaggtccgccgaaagtgttcgcagcctcctttctgcacaacagtatcaggaaatggagggaaatctgcatcagctgtccaatccaattgggtaccgggacctccagtctcatgggaggatgcaccagagttttgactttgacggaggcatggcaggctccaagctgcccggacaggagggggtcagaatccaaccaatgagtgagcgcaccagaaggcgggctaccagcagggacgacaataggcggtttcggcctcaccgctctagaagatcacgaaggtctcggtccgacaatgccctgcacctggcatctgaaagagaggccattagccgccttaaggatcggccaccactgcgggctcgtgaggactacgatcagtttatgaggcaaaggagtttccaggagagcatgggccacggcagtcgcagggacctgtatggacaatgtcctcggactgtgtccgacctggccctacaaaatgcgttcggagacagatgggggccttattttgcagagtacgattggtgtagtacgtgttccagttcaagtgaaagcgacaacgaaggctacttccttggtgaacctattccgcaacctgcaaggctccggtacgtgacctcagacgagctgctccacaaatactcgagctatggactgcctaagtcatccaccctgggtggccgtggtcagcttcactctagaaagcgccagaagagtaaaaattgcattattagttag

SEQ ID NO: 236041 - DNA, 453 bp, synthetic construct
  misc_feature 1..453: note = Description of Artificial Sequence: Synthetic coding sequence
  source 1..453: mol_type = other DNA
atggtaactgtcatgcctctggagatggagaaaaccatcagcaagctcatgttcgattttcagagaaatagtacatctgacgatgactctggctgtgcccttgaagagtatgcgtgggtgcctccaggtttgaaaccggaacaggtccatcagtactactcctgcttgccggaagaaaaggtgccatatgtcaacagccccggagaaaagctgcggattaaacaactgctccaccagctgccaccacatgacaacgaggtgcgttattgcaattcacttgatgaagaggagaaacgtgagttgaagctctttagcagtcaacgcaaacgggagaatttaggaaggggaaatgtgcggccttttcccgtgactatgactggcgcaatttgcgagcaatgtggagggcagattaatggcggagatattgcagtgttcgcctcacgggctggttag

SEQ ID NO: 236042 - DNA, 1263 bp, synthetic construct
  misc_feature 1..1263: note = Description of Artificial Sequence: Synthetic coding sequence
  source 1..1263: mol_type = other DNA
atggaaacttttgatcccactgaattgcccgaactcctgaaactttactaccgccgtctcttcccctacagtcagtattaccgctggttaaactacggcggagtgatcaagaactattttcagcacagagagttctcattcaccctgaaagatgatatctacatcagatatcaaagctttaataaccagtctgacctggagaaagagatgcagaaaatgaatccatacaaaattgacatcggcgctgtgtacagccatcggcctaatcagcacaatactgtgaagctgggagcctttcaggcacaggaaaaggagctcgtctttgatatcgacatgactgactacgatgacgtgcggagatgttgctctagcgccgacatctgcccaaagtgttggaccctcatgaccatggccataagaattattgacagggcccttaaagaagacttcggcttcaagcatagattatgggtctattccggtagacggggagtgcattgttgggtctgtgatgaatctgttagaaagttgtcctcagctgtgcgctctggtattgtggagtacttgtccctggtcaagggaggacaggacgtgaaaaagaaagtgcatctgtcagagaaaattcaccctttcatcagaaagagcataaacattattaaaaaatactttgaggagtatgcactcgttaaccaagatattctggaaaataaggaaagctgggacaaaatcctggctctggttcccgagacaattcacgatgagctgcaacagtcattccagaaaagccacaattcactgcagaggtgggagcatctaaaaaaggtcgcctcccgttaccagaataatatcaagaatgacaagtacggcccttggctcgagtgggaaatcatgctgcagtactgttttcccaggctagatattaatgttagtaaaggcattaaccatctgcttaaaagcccattcagcgttcaccccaagaccggacgtatcagtgtgcctattgatttgcagaaagttgaccaattcgacccatttaccgtccctaccatatcatttatttgccgcgagctggatgcaatctccacgaatgaggaagaaaaggaggaaaacgaggccgagagcgatgtgaaacaccgcactcgggactacaagaaaacttctctggccccttacgtgaaggtgttcgagcactttctcgagaatctggataaaagccgtaagggagagttgcttaagaaaagcgatctgcagaaggacttctag

SEQ ID NO: 236043 - DNA, 1284 bp, synthetic construct
  misc_feature 1..1284: note = Description of Artificial Sequence: Synthetic coding sequence
  source 1..1284: mol_type = other DNA
atggagacattcgatccaaccgagttgccggagctgctgaaactttattatcgccgtctgtttccatacagccagtattaccgctggctgaactacggcggagtgatcaagaactattttcaacatcgagagtttagtttcactctcaaggacgatatctacatcaggtaccaaagctttaacaatcaaagtgatctggagaaggaaatgcagaaaatgaatccatataaaatcgacatcggagccgtgtatagtcaccggccaaaccagcataataccgttaagctgggtgcttttcaggcacaagagaaagaattagtctttgacatcgacatgaccgattacgatgatgtgcgtcggtgttgctcgtcagcagacatctgccccaagtgctggacattgatgaccatggcgattcggataattgacagagccctcaaaggaaaggattttggcttcaagcatcgtctttgggtctatagtgggaggcgcggtgtgcactgttgggtctgtgacgagtcggttaggaaactgagttcagccgtaagatctggcatagtcgagtatttgtctttagtcaaggggggacaggacgtaaaaaagaaggtgcacctatcagaaaagatccacccatttattcgaaaatctatcaatataatcaagaagtatttcgaagagtacgcacttgtaaatcaggatatcctcgaaaacaaagagtcttgggataaaatcttggctcttatgggattattcctgaatgatccttccccaattcacgatgagctacagcagtccttccagaaaagccacaattctcttcagcgttgggagcacctgaagaaggtcgcttctagatatcaaaacaatatcaagaacgataaatacggcccttggctcgagtgggagataatgttgcagtactgcttcccaagactggatatcaatgtctcaaagggaattaaccacctactcaaatctccgttctctgtccatcctaagactggtaggatatccgtgccaatcgacctgcagaaagtagatcagtttgatccctttacagtgccgaccattagcttcatctgccgcgagctggatgccatctctactaatgaagaggagaaagaggaaaacgaagccgaatctgatgttaagcacagaaccagagattacaagaaaaccagtctggccccatatgtaaaagtgttcgagcatttcctggagaacctcgacaagtcccgcaagggggaacttctcaaaaagtcagacctgcagaaggacttttag

SEQ ID NO: 236044 - DNA, 762 bp, synthetic construct
  misc_feature 1..762: note = Description of Artificial Sequence: Synthetic coding sequence
  source 1..762: mol_type = other DNA
atggcgaatctgggctgctggatgctggttcttttcgttgctacatggagcgaccttggactctgtaagaaaaggcccaagcccggaggctggaatacaggagggtctaggtaccctggacaggggagtcccggaggcaaccggtatccccctcagggaggaggcggttggggccagccccacggcggaggatggggacaaccccacggagggggatggggtcaaccccacggaggaggatggggacaaccacatggtgggggttggggacagggaggcggaactcatagtcagtggaataagccctcaaaacctaagaccaatatgaaacatatggccggtgcagccgcagctggggcagttgttggaggacttggagggtacatgcttggctccgccatgtcgagaccaatcatccattttggcagcgactacgaagacagatactaccgggaaaacatgcatagataccccaatcaggtgtattacagacctatggacgaatattcaaatcagaacaatttcgtgcatgactgcgttaacattacaattaaacagcacaccgtgacaactactaccaagggcgaaaatttcaccgaaacagacgttaagatgatggagagggtcgtcgaacagatgtgcatcactcagtatgaaagagagagccaggcatattatcagaggggatcctcaatggtgctgttttcttcccctccggtgatcctcctgatctcatttctcatttttctcattgtaggttag

SEQ ID NO: 236045 - DNA, 750 bp, synthetic construct
  misc_feature 1..750: note = Description of Artificial Sequence: Synthetic coding sequence
  source 1..750: mol_type = other DNA
atggcgaaccttggatgttggatgttggtcctcttcgtggccacatggagtgaccttggtctgtgtaagaaacgccctaagcccggaggctggaacacaggcggaagtaggtatcccggacagggatcccccggtggaaacagatacccaccccagggtggaggcggatggggccaaccccatggcggagggtggggccaaccgcatggagggggttggggccagccgcacgggggtggctggggccaacctcacggaggcggttggggccagggcggaggcacccacagccagtggaacaagccctccaaacctaaaaccaacatgaagcatatggccggtgccgctgctgccggtgccgtggtggggggattgggagggtacatgctcggctctgctatgtcccgccctatcattcacttcggcagcgactatgaggacagatattatcgggagaacatgcataggtatcccaaccaggtgtattatagacccatggatgagtacagcaatcaaaataatttcgtgcatgactgcgtgaatatcacgattaagcagcacacagtcactactacaaccaaaggtgaaaacttcactgagactgatgtcaaaatgatggaacgggttgtggagcagatgtgcataacccagtacgaacgggagtcccaggcttattatcaacgaggaagtagtatggtcctattcagctcccctcccgtgatccttctcatctccttcttgatcttttag

SEQ ID NO: 236046 - DNA, 762 bp, synthetic construct
  misc_feature 1..762: note = Description of Artificial Sequence: Synthetic coding sequence
  source 1..762: mol_type = other DNA
atggctaacttaggatgctggatgctggtcctcttcgtggcaacgtggagcgacctggggctctgtaagaagcgccctaagcctggaggctggaacacagggggaagccgctaccccggacaaggcagccctggcggaaacagatatccacctcaggggggaggcggatggggccagccacacggcggaggctgggggcaaccccacggagggggttggggacagcctcatggtgggggatggggccagcctcatggaggcggatgggggcaggggggaggtactcatagccagtggaacaaaccctctaaaccaaagacaaatatgaagcacatggcaggggctgccgcagccggtgcagtggtgggcggactgggaggatacatgctcggaagtgccatgtcaagacccatcattcatttcggtagtgactacgaggaccgctattatcgtgagaacatgcacaggtaccccaatcaggtgtactatcgccctatggacgagtactccaaccagaacaactttgtccacgactgcgtcaatatcacaatcaagcagcatactgtcactacaacaacaaaaggcgaaaattttaccgagactgatgtgaagatgatggagagagtcgtggagcaaatgtgcatcacccaatatgaaagggagtcacaggcatattaccagcggggatccagcatggtccttttttcttcccctcctgtcatcctgctgatatcctttttgattttcctgattgtggggtag

SEQ ID NO: 236047 - DNA, 579 bp, synthetic construct
  misc_feature 1..579: note = Description of Artificial Sequence: Synthetic coding sequence
  source 1..579: mol_type = other DNA
atggaacattgggggcagcctcacggcggaggttggggccagccgcacggaggaggatggggccagccacacggcggtggctggggccagggtggtggcacccacagccagtggaacaagcccagcaagcccaagaccaatatgaaacacatggcaggcgcagccgcagccggagcggtggtcgggggactgggcggatacatgctggggtcagctatgagtcgcccaatcattcacttcgggtcagactatgaggatcgctattaccgggagaatatgcaccgatacccaaatcaggtatattatcgacccatggatgaatatagcaatcagaataacttcgtgcacgactgtgtcaacattactataaaacagcacacagtcacaactactaccaaaggcgaaaattttactgagactgatgtgaagatgatggaaagagtcgtggagcagatgtgcatcacacagtacgaacgcgagagccaggcatattaccagcggggaagttctatggtactcttttcttcgccccctgtcatccttctgatctcctttctgatattcctcatcgtcgggtag

SEQ ID NO: 236048 - DNA, 654 bp, synthetic construct
  misc_feature 1..654: note = Description of Artificial Sequence: Synthetic coding sequence
  source 1..654: mol_type = other DNA
atggccaacttgggctgctggatgctcgttttgtttgtggcaacctggtcggatctgggcctgtgcaagaaacggccaaagcccggaggctggaacaccggcggatcccggtatccaggccaaggcagcccgggaggcaacagatatccaccccagggagggggtggatggggtcagccacacggaggcggatggggacagccccatggaggcggttggggccagcctcatggcggaggttggggccaaccccatggcggaggctggggacaaggcggtggcacccacagtcagtggaataaaccttcaaaacccaagaccaatatgaagcacatggcgggagctgccgctgccggagcagtcgtgggagggttaggcggttatatgctgggatctgccatgtcccggcctatcattcactttggaagtgactacgaagacaggtattacagagagaacatgcaccgctaccctaaccaggtgtactaccgaccaatggatgaatatagcaaccagaacaactttgtccacgactgcgtaaatatcacaattaaacagcacaccgtaacaaccaccactaagggtgaaaatttcactgaaaccgacgtcaaaatgatggagagggtggtcgaacagatgtgtattacacagtag

SEQ ID NO: 236049 - DNA, 531 bp, synthetic construct
  misc_feature 1..531: note = Description of Artificial Sequence: Synthetic coding sequence
  source 1..531: mol_type = other DNA
atgcgcaaacacctgagttggtggtggcttgcaactgtgtgcatgctcctgttctcccacttgtcggccgtgcagactcgcggtatcaagcacaggatcaaatggaacaggaaagctctgcccagcaccgcgcaaatcaccgaagcccaggttgccgagaaccgcccaggcgctttcatcaaacagggaagaaagttggatattgactttggggcagagggtaaccgttattatgaggccaactattggcagttccccgatggtatccactacaacggatgcagcgaagctaatgtgacaaaggaggctttcgtaaccggatgtatcaacgctactcaggctgcaaaccagggagagtttcaaaaacctgataataagttacatcagcaggtgctttggaggctggtgcaggaactctgttcactcaaacactgcgaattttggctggagcggggagcaggcctgcgtgttaccatgcatcagcctgtactgctgtgcctgctggccttaatctggctgaccgtgaagtag

SEQ ID NO: 236050 - DNA, 1023 bp, synthetic construct
  misc_feature 1..1023: note = Description of Artificial Sequence: Synthetic coding sequence
  source 1..1023: mol_type = other DNA
atggcgacaggtggataccggacttcaagcggcttaggcggatctacaactgacttcttagaggaatggaaagcaaaaagagaaaaaatgcgcgcaaaacagaatcccccagggcctgccccacccggaggaggatcatcagacgccgctggcaaacccccagcaggcgcactggggactcccgctgccgctgcagctaatgagttgaacaataacctgccaggcggagcccctgccgctcctgctgttccgggaccaggaggagttaattgtgctgtgggtagcgccatgctgacgcgcgctgccccaggccctagacgatctgaagacgagcctcccgcagcatctgccagcgccgctcctccaccgcagagggacgaagaggaaccggatggggtccccgagaaaggtaagagttccggaccaagtgcccgaaaggggaaagggcaaattgagaaacgaaaactgcgggagaaacgaaggagtactggggtcgtgaacatccctgccgcagaatgcttagacgagtacgaagatgacgaggccggacagaaagaacggaagcgcgaggacgctatcacacagcagaatacgatccaaaatgaggccgttaatctgctagaccctggctctagttacctcctccaagaaccaccgagaacagtcagcggtcggtacaagtccactacctccgtgtctgaggaggacgtttcaagtcgttacagccgaacagaccgcagcggattcccgaggtacaatagagatgcaaatgtgtctggtacactggtgtccagttcaactctcgagaagaagattgaggatttggaaaaagaggtggtgagggagcgacaggaaaatctgagactagtgagactgatgcaagataaggaggagatgattggcaagctgaaggaagagatcgacttgttgaatcgcgacctcgatgatatcgaagatgaaaatgaacagctgaaacaggaaaacaagacattgctgaaagtggtaggccagctcactcggtag

SEQ ID NO: 236051 - DNA, 231 bp, synthetic construct
  misc_feature 1..231: note = Description of Artificial Sequence: Synthetic coding sequence
  source 1..231: mol_type = other DNA
atggccactggtggttaccgaacttcgagtggcttgggaggctccacaacggattttttggaggaatggaaagctaagcgcgaaaagatgcgcgctaagcagaaccctcctggacccgctccccctggcggtggatctagcgacgccgcaggcaaacctccagctggtgccctgggaactccagccgcagctgccgctaacgagttaaataataatctgcccggtggttag

SEQ ID NO: 236052 - DNA, 195 bp, synthetic construct
  misc_feature 1..195: note = Description of Artificial Sequence: Synthetic coding sequence
  source 1..195: mol_type = other DNA
atggcaacagggggataccgaaccagcagtgggctcggtggatcaacaacagattttttggaagagtggaaggccaaaagggaaaaaatgcgggctaagcagaatccacctggcccagccccacctggaggcggttcctccgacgctgctggcaaacctcccgctggagccctcgggacgcccgcagctgcctag

SEQ ID NO: 236053 - DNA, 663 bp, synthetic construct
  misc_feature 1..663: note = Description of Artificial Sequence: Synthetic coding sequence
  source 1..663: mol_type = other DNA
atgaaatcagtaatataccacgctctgagccaaaaggaggctaatgatagcgatgtgcagccctctggggctcagagggcagaggccttcgttagggcgtttctcaaacgttcaacacccaggatgtccccccaagcacgcgaagaccaactccaaaggaaagccgtggtgctcgaatacttcactcggcacaagcggaaggagaagaaaaagaaagctaagggactctccgctcgccagagaagagagcttcgcctgttcgatattaagcctgagcaacagcgttacagcttgtttctgccactgcatgaactttggaagcaatatatccgggacttgtgctctggcttgaagccagacacccagccccagatgatacaggctaagctgctaaaagcagatctgcatggggcaattatctcggttaccaagtctaaatgcccaagctacgttggaattacaggcatcctactgcaggagacaaaacatatctttaagatcatcactaaggaagataggctgaaagtcattcctaagttgaactgtgtgtttaccgtagagaccgatggattcatttcatatatttacggatccaagttccaactgcggtcatcagagcgaagcgccaaaaaattcaaggcaaaagggacgattgatctgtag

SEQ ID NO: 236054 - DNA, 1695 bp, synthetic construct
  misc_feature 1..1695: note = Description of Artificial Sequence: Synthetic coding sequence
  source 1..1695: mol_type = other DNA
atgagtagccatgggaatagcctttttttaagggagagtggccagcgtcttggaagagtcggctggctacaacgtctacaggagtcactgcagcagagggctctccggacccgtctccggctgcagacaatgacgcttgaacacgtgctccgatttctgagacgcaatgctttcattttactaactgtctccgccgtcgtgatcggagtgagcctggctttcgctcttcgcccatatcagctcacataccggcagatcaagtatttttcatttccaggcgagctgctcatgcgaatgttacagatgctggttctccctctgatagtatccagtttagtgactggcatggcaagcctcgataacaaggctaccgggaggatgggtatgcgcgcagccgtgtattatatggtgaccaccatcattgctgtcttcattgggatcttaatggtgaccatcatccacccagggaagggatcgaaggaaggccttcaccgcgagggacgcatagagacaattccaactgccgatgcttttatggatcttataagaaacatgtttcctccgaacttggttgaggcatgttttaaacagttcaaaacccagtatagcaccagggtggtcactcgaacaatggtgcgcactgagaatggctctgagcccggtgcgtctatgccacccccattcagtgtggaaaacgggacaagttttctggagaacgttacgcgggctctcgggacattgcaggaaatgttgagttttgaagaaacagtccctgtccctggtagcgccaacggaattaatgctctgggactcgtagtcttttccgtcgcttttgggctggtgatcgggggtatgaagcataagggccgtgttctccgggacttcttcgactcattgaacgaggctatcatgcgcctggtgggcattatcatctggtacgccccagtcggcattctgtttctgattgctgggaagatactggaaatggaggatatggctgttctggggggtcaactcggcatgtacactcttactgtaattgtcggactgtttctacatgcaggcattgtcctccctctgatctatttcctggtgacccataggaacccattcccgttcatcggcggtatgcttcaggctctgatcacagccatggggacctcgtcttcttccgctacactacccattacttttcggtgtctggaggagggccttggcgtggatcgtagaatcactcgattcgtgctgcccgtgggcgcaacagtaaatatggacggaactgccctgtatgaggcactcgctgcgatcttcatcgcccaggtcaacaattatgagctgaatttgggccagatcacaactatttcaatcacggcaactgcggctagcgtcggggctgcaggcataccccaggccggtctggttacaatggtgatagtgctgacatcagtgggactgcccacggaggacatcactctgatcattgcagtcgattggtttctcgacagactgcgcaccatgactaatgttctcggagatagtatcggcgcagccgtgattgaacacctgtcccagcgagagctggagctccaagaggccgagctcacccttccttccctaggtaagccttacaaaagccttatggcccaagagaagggcgcttcacggggacgaggagggaacgagtccgcaatgtag

SEQ ID NO: 236055 - DNA, 420 bp, synthetic construct
  misc_feature 1..420: note = Description of Artificial Sequence: Synthetic coding sequence
  source 1..420: mol_type = other DNA
atgcactgcctgcggaagcggaggatgacccccatgtccagatattctctgttccttccgcttcatgagctctggaagcagtacatccgcgatctgtgcagcggactgaaaccggatacgcaaccacaaatgatccaggcaaaactcctcaaggcggatctgcacggcgctatcatttctgtgactaaaagcaaatgcccaagctacgtggggatcaccggaatactcctgcaggagaccaagcacatattcaagattatcacaaaggaagacagactgaaagtgattcctaagctgaattgcgtgttcaccgtagagaccgacgggtttatttcctatatatacgggagcaaattccaactccggtcgagcgaaagaagcgcaaagaagtttaaagcaaagggcacaatcgatttatag

SEQ ID NO: 236056 - DNA, 342 bp, synthetic construct
  misc_feature 1..342: note = Description of Artificial Sequence: Synthetic coding sequence
  source 1..342: mol_type = other DNA
atggtccgtttcaagcatcgctatctgctgtgcgagttggtctccgacgatccgcgatgcagactgagcctggacgatcgggtgctgtcctctttagtacgtgatactattgccagagtccatggaacattcggggctgcggcttgttccatcggtttcgcgggtacaatccgcacctgccaaaagtttttaatacagtacaacaggcgtcagttattgatactcctgcagaactgcactgacgagggcgagagagaggccattcagaaatcagtaacgagaagctgtctgttggaggaggaagaggagagcggagaggaagccgcagaggccatggagtag

SEQ ID NO: 236057 - DNA, 492 bp, synthetic construct
  misc_feature 1..492: note = Description of Artificial Sequence: Synthetic coding sequence
  source 1..492: mol_type = other DNA
atggtgcggtttaagcatagatacttgctgtgcgagcttgtcagcgacgacccccgttgccggctgtccctcgatgatcgggtgctgagttctctcgtgagggataccatcgcgcgagtgcacggtactttcggtgccgctgcttgtagtatcgggttcgcggtgcgctacctgaatgcttacactgggatcgtccttctccgatgcaggaaggagttctatcagttagtgtggtccgccttaccgttcattacatacctcgagaataagggccaccgatacccctgtttcttcaacacgctccatgtagggggtaccattcggacctgtcagaaatttttgatccagtataatcggagacagctcctaatactgctgcagaactgcaccgatgagggcgagcgagaagccattcagaaatctgttactagaagctgcctgttagaggaggaagaggagagcggagaggaagcggctgaagctatggagtag

SEQ ID NO: 236058 - DNA, 423 bp, synthetic construct
  misc_feature 1..423: note = Description of Artificial Sequence: Synthetic coding sequence
  source 1..423: mol_type = other DNA
atggctgagaatcgcgaaccgcgtggtgccgtagaagctgagctagatcctgtcgaatatactctgcgcaaaagactgccgtctcgactgccgaggcggcctaatgatatctatgtaaatatgaaaacagactttaaagcccagttggctcgttgccagaaacttctggacgggggagcacgtgggcagaacgcctgctccgagatttacatccatggcttggggctggccattaatcgggcaatcaatatcgcgctccagctgcaggcagggtcattcggttctttgcaggtggccgcaaatacctccacagttgaacttgtcgatgagctagagcccgagacggacacgagagaaccacttactcggattagaaataactcagccatccacattagagtgttccgcgtgacccctaaatag

SEQ ID NO: 236059 - DNA, 414 bp, synthetic construct
  misc_feature 1..414: note = Description of Artificial Sequence: Synthetic coding sequence
  source 1..414: mol_type = other DNA
atggcagaaaaccgggagcctcgaggggctgtggaagccgaactagatcctgtagaatacacgctccgcaaaaggctgccatctcgtctgccacggaggcccaatgacatctatgtcaatatgaagacagactttaaggcccagttagcaaggtgccagaaactccttgacgggggagcacgtggccagaacgcctgcagtgaaatctacattcatggattgggactggcgattaatcgcgcaatcaacatagctttacaactgcaggctggttcctttgggtcactccaagtggccgctaacacgtccactgtggagctggttgacgaactcgaaccagagactgatacccgagaacccttaactcgcattcggaataactccgctatacacatccgggtgtttcgcgtctag

SEQ ID NO: 236060 - DNA, 708 bp, synthetic construct
  misc_feature 1..708: note = Description of Artificial Sequence: Synthetic coding sequence
  source 1..708: mol_type = other DNA
atgaggcgtggggcacctcaggatcaggaattagtgggccctggcccaccgggacggggaagtaggggagccccacctcctctggggccagtggtccccgtcctcgtgttcccaccagacctggtattccgggctgaccagcgtagcgggccacgccagctgttaactttatataatcccactggaacggccctaaggttccgcgttctgtgtacagccccagctaagtacactgtcttcgatgcagaaggctacgtcaagccccaatcctgtatcgatatcgttattcgccacgtggccccaatccctagccactacgacgtgcaagacagattcagaattgagttaagcgaggagggagcagaaggaagggtcgtcggaaggaaagacattacttctattttgagggctccagcttaccccctagagcttcagggtcagcctgatcccgcacccaggcctggtccacccgctggaacaccaccccctactgctaggcactttcaggaacatccgagacagcagctcgccacctcaagttttctgctcttcctgctgactggtattgtcagcgttgccttcttgctgcttcctctgcctgacgaattgggaagccaactaccacaggttctacatgtatctctgggtcaaaagctggttgccgcatacgttctgggccttttaacaatggtgttcctgaggacatag

SEQ ID NO: 236061 - DNA, 1248 bp, synthetic construct
  misc_feature 1..1248: note = Description of Artificial Sequence: Synthetic coding sequence
  source 1..1248: mol_type = other DNA
atgcgtggggcaaacgcctgggcccctctatgcctgttgttggcggctgccacccagctgagcagacagcagagcccagaaagacccgtcttcacgtgcgggggaatccttacaggcgagagcggctttatcgggagtgaggggttccctggggtatacccgccaaattcaaagtgtacctggaagataaccgttcctgagggcaaggtcgtcgtgctgaattttagattcatcgatctggagtcagacaatctgtgccgttacgacttcgtggatgtctataacgggcacgccaatgggcagcggatcggcagattttgtgggacctttaggcccggagcccttgtcagtagtggaaataagatgatggtgcagatgatctccgatgccaataccgctggtaatggctttatggccatgtttagcgccgcagaaccaaacgagaggggcgatcagtattgcggtgggctgctggacagaccctccggatcattcaagacgcccaactggcctgatcgcgactaccctgcgggagtcacatgcgtgtggcacattgtcgcccctaaaaaccagttgattgagctgaaatttgagaaattcgacgtagaaagagacaactattgccgatatgactacgtcgctgtgtttaatggcggagaggtgaatgatgcgaggaggattggtaagtactgtggtgacagcccacctgccccaatcgtgagcgagaggaatgagctgttgatccagtttctctctgacctgtcactgactgctgatggcttcatcggccactatattttcaggcctaaaaagctaccaacaactaccgagcaaccagtgacaacaacgtttccagtgaccaccggcctgaaacctacggtagcgctctgtcagcagaaatgccgtcggactggaactctggagggcaattattgttcaagtgactttgtactggcgggaaccgtgatcactacaattactagggacggatctttgcacgccacagtgtccatcataaatatctacaaggaagggaatctcgctatacagcaggccggtaaaaacatgagtgctcgactcaccgttgtctgcaagcaatgccccctccttcgacgcggactcaattacataattatgggacaggtcggcgaagacggaaggggcaaaattatgccgaattcgttcattatgatgtttaagactaaaaaccagaagctgctggatgcactgaagaataagcagtgctag

SEQ ID NO: 236062 - DNA, 2184 bp, synthetic construct
  misc_feature 1..2184: note = Description of Artificial Sequence: Synthetic coding sequence
  source 1..2184: mol_type = other DNA
atgcggcctcttctgctgctcgccctcttgggatggctgctcttagcagaggccaagggggacgcaaaacccgaggacaacttgctagtgctgactgttgccaccaaggagaccgaaggattcaggcgtttcaaaaggagtgcccagttcttcaattataaaattcaggccctcggcctgggcgaggactggaacgtagagaagggtacttcggccggaggcggtcagaaggtacgcctgcttaaaaaagcgctggaaaaacatgccgacaaggaagaccttgtgatactgttcgccgattcctatgatgtgctgttcgcctcaggccctagagagctgctaaaaaagttcaggcaggcaagatcgcaggtcgttttttctgccgaagagcttatttaccccgataggcggctggagactaagtaccctgtcgtgagcgacggcaagcgttttctcgggtcgggcggttttatcggatacgcgccaaacctgtcgaagctcgttgcagagtgggaaggccaggacagcgacagtgatcagctgttctacactaaaatcttcctggatcccgaaaaaagggagcagataaacataacgctggatcataggtgcagaatctttcagaacctagacggggctctggatgaggtcgtgttgaaatttgagatgggccacgtacgggctcgaaacctggcctatgacactctgccagtactcattcacggaaacggccctaccaagctgcagctaaactatctgggcaactatatccctcggttctggaccttcgaaactgggtgtacggtgtgcgacgagggactaaggagtctgaaggggatcggtgacgaggctctcccaacagtacttgttggtgtcttcattgagcaaccaaccccctttgtgtctttgttcttccaacggctgctccggctgcattacccacagaagcacatgaggctcttcattcacaatcacgagcagcaccacaaggcccaggtcgaagagttcttggcgcaacacggttcagaataccagtccgtgaagctggtgggtcctgaagtgcgcatggcaaacgcagacgccaggaacatgggcgctgacctttgtaggcaggatagatcatgcacgtactacttcagtgtagacgcggacgtcgctcttaccgagcccaacagcttacggctgctgattcagcagaacaagaacgtgattgcaccgctcatgacaaggcacggtcggttatggagtaatttttggggagccctcagtgccgatggatactacgccaggagcgaagactacgtcgatattgttcagggcaggagggtgggtgtgtggaacgttccttacatatctaatatctacctgatcaaaggtagtgctttgcggggagagctgcagagctcggacctgttccaccatagtaagctggaccccgacatggccttctgcgccaacatccgccaacaagatgtgtttatgtttctgacaaataggcacactctgggacacttactctctttggattcctatcgcaccactcacttgcacaacgatctgtgggaggtcttttccaaccccgaagactggaaggagaaatacatccaccagaattacaccaaggcactagccggtaaactcgtagaaacaccatgtcctgacgtgtactggtttccaatattcactgaggtggcatgcgatgaactcgtggaggagatggaacacttcgggcagtggtcgctaggcaacaataaagacaataggatacagggcggatatgaaaacgtacctactattgacatccatatgaaccaaattggattcgagcgcgaatggcacaagtttcttctggagtacatcgctcccatgaccgagaaactttatcccggatactacacaagggcacagttcgatctggccttcgtcgtccgttacaagcccgatgaacagccgtccctcatgcctcatcacgacgctagtacatttaccatcaacatcgccctcaacagggtgggagtcgactacgagggcggaggttgtcgattcctccggtataattgtagcatcagagcacctaggaaaggctggacgttaatgcaccccggacgcctgacgcactatcacgaaggccttcccacaacccgagggacacggtatatcgccgtctcttttgtggatccatag

SEQ ID NO: 236063 - DNA, 600 bp, synthetic construct
  misc_feature 1..600: note = Description of Artificial Sequence: Synthetic coding sequence
  source 1..600: mol_type = other DNA
atgagacctctgctgctcctggctcttctcggttggctgctattggccgaggccaaaggagacgctaaacccgaggataacctcctggtcctgacagtggctacaaaagaaaccgagggtttccgtcgcttcaagagatcagctcaattttttaactataagatccaggcgctgggtctcggcgaagattggaacgtggaaaagggcactagcgcagggggagggcagaaggtgcggctgttgaagaaagccctggagaaacatgccgacaaggaggacttggttattctattcgcagatagctacgatgtcctgttcgccagcgggcctcgagaactgctgaagaaattccgtcaagcccgaagtcaggtggttttttcagctgaggagcttatttacccagacaggcgcctagaaacaaaatatcctgttgtcagcgacggcaagaggtttctcggcagtgggggattcatcgggtatgctcccaatctcagcaaactcgtggctgagtgggagggtcaggattcagacagcgaccaactgttctataccaaaatatttttagacccagaaaaaagagtgagccgcttgcattcgtag

SEQ ID NO: 236064 - DNA, 2325 bp, synthetic construct
  misc_feature 1..2325: note = Description of Artificial Sequence: Synthetic coding sequence
  source 1..2325: mol_type = other DNA
atgaggcccctgttgctcttggcgctgttggggtggttgctccttgctgaagctaagggtgacgcaaagccggaggccccatgttgtcaggaaggactgcgtgccggtggcagcggaagtctccacctgggacgcgactttaccgtcctcgcaggggctaggggttcaccatctccctctgttagttcgattcctcgattctggatacctggcagcgataatctgctggtgcttaccgttgcaaccaaggagaccgagggttttaggcggttcaaacgcagcgctcagttttttaactataagattcaggcactcgggttgggagaggactggaacgttgagaagggaacttcagcagggggtgggcagaaggttcgactcctcaagaaggccctggaaaagcacgcagataaggaagacctggtgattctgttcgctgatagttacgacgtgcttttcgcctcaggcccacgagagctcctcaagaagttccgccaggcaaggtcacaagtagtgttttctgccgaggaactgatttatcctgataggcggctagagacaaagtaccccgtggtaagcgatggtaagcgcttcttgggaagtggcggttttatcggttatgctccgaatcttagcaagttggtggccgaatgggaagggcaggactcggactcagaccagcttttttacaccaagatatttctcgacccagagaagcgcgagcagatcaatatcacgttggaccacaggtgtcgaatctttcagaatctagacggagctttagacgaagtggttctcaaattcgagatgggtcacgttagagctcgaaacttagcctatgacaccctgccagtgctgattcacggaaacggtcctaccaaactgcaactgaattatctgggcaattatataccacggttctggaccttcgagaccggctgcacggtctgtgatgagggcctacgcagcttgaaaggcataggggatgaggcgctgccaaccgttctcgtgggagtttttatcgagcagcccactccatttgtgagcctgttttttcagagacttttgcgcctgcactaccctcagaagcatatgcggctcttcatacacaatcacgagcagcaccataaagctcaagtcgaggagtttcttgcccagcatggctccgaatatcagtctgtcaaactggtgggaccggaagtccggatggcaaacgcagatgctaggaatatgggcgctgacttgtgcaggcaagatcggagttgcacctactatttcagtgtcgatgctgacgtcgccctgacagaacccaatagtctccgcttgctcatccaacaaaataaaaatgtgattgcccctctgatgaccaggcatggacgcttgtggtcgaacttctggggagctctgagcgcggacggctactacgcgagatcagaagattacgtggacattgtccaggggcgaagagtaggcgtgtggaacgtgccgtatatctcaaatatttatcttatcaaggggagcgctctccggggtgagctacagagcagcgacctcttccaccactccaaattagatcctgacatggccttctgtgccaacattagacaacaggacgtgttcatgtttctgactaatagacacaccctcggacaccttctgtccctcgactcctaccggacgactcatctccataatgacctgtgggaagtattctccaatccagaggattggaaggagaagtatattcaccagaattacacgaaggccttagccggtaaactggtcgagaccccctgccccgacgtgtactggttcccaatctttacagaagtcgcctgcgatgagttggtggaggagatggagcattttggccagtggagcctgggaaacaacaaggataaccgcatccagggcggatatgaaaacgtgccaaccatagatattcacatgaatcagattggcttcgagcgcgagtggcataagttcttactagagtatattgcaccaatgacagaaaagctgtacccgggttactacaccagagcacaattcgatctggccttcgttgtcagatataagcctgatgagcaaccgtcattaatgccgcatcatgatgcctctacatttactataaacatcgctctgaatagagtcggcgtcgactatgagggaggaggatgtagattcctgcggtataactgctccattcgggcacctaggaagggttggacattgatgcatcccggtaggctgacccactaccatgaaggtctaccaaccaccaggggtacacgatatatcgcagtgtcttttgtcgatccctag

SEQ ID NO: 236065 - DNA, 1176 bp, synthetic construct
  misc_feature 1..1176: note = Description of Artificial Sequence: Synthetic coding sequence
  source 1..1176: mol_type = other DNA
atgcgtcctcttctgctgctagcccttcttggatggcttttactggctgaagctaaaggcgatgccaaacctgaggataacctcctggttttaacagtcgccaccaaggaaacggaggggttcaggcgctttaagaggagcgctcaattctttaactacaagatccaagccctgggtctcggggaagactggaatgtggaaaaaggcacctccgcaggaggaggccagaaggtgaggctcctgaaaaaggcccttgagaaacacgcagataaagaggacctggttatactctttgctgatagttacgatgttctgtttgcctcgggacccagagaactccttaagaagtttcgacaagccaggtctcaggtggtgttctctgcagaggaactcatttaccccgaccggagactggagacaaagtatccagtcgtgtccgacggaaaacggttcctactagaagatgtttttatgtttctgacgaatagacacactctgggtcaccttttgtccttggattcttatcgaacaactcatttacacaatgacctgtgggaggtgttttctaaccctgaagattggaaggagaaatatattcatcagaattatacgaaggccttggccggaaagctggttgaaaccccatgcccagacgtgtattggtttcccatctttactgaagtggcttgtgacgaactggtagaggagatggagcattttggccaatggagtctgggtaataacaaggacaatcggatccaaggaggctatgaaaacgttccaaccatcgacatccatatgaatcagatcggatttgagcgggagtggcacaagtttcttctagagtacatcgcgcctatgacggaaaaactgtatccaggctattatacacgagcccaattcgacctcgcatttgtggttcggtacaaacccgacgaacagcctagccttatgccccatcatgacgccagcacgttcactatcaacattgccctcaatcgcgtgggtgtggattacgagggagggggatgccgattcctgcgttataactgtagcatcagagcaccccgaaagggctggactctgatgcatcctggcaggctgacacattatcacgaggggctcccaaccactcgcggaactcgctacattgctgtatcatttgttgacccgtag

SEQ ID NO: 236066 - DNA, 852 bp, synthetic construct
  misc_feature 1..852: note = Description of Artificial Sequence: Synthetic coding sequence
  source 1..852: mol_type = other DNA
atgagaccattactgctgttggccctgctcggctggctcctgctcgctgaggccaagggggacgccaaacctgaggacaacctattggtgttaactgttgccacaaaggagacagaaggtttccggcgattcaaaaggtcagctcagttcttcaactataagatccaggccctcgggctgggggaggattggaatgtggaaaagggtacttcagcaggaggtggccagaaggtcaggctgctcaagaaagccctcgaaaaacacgccgataaagaggacttggtgatcctcttcgccgattcttacgatgtcttgttcgcctctggacctcgagagctcctgaagaaattcagacaagccagaagccaggtcgtcttctctgccgaagagcttatctaccccgaccggagattggaaactaaataccctgtggtgagcgacggaaaaaggttcttaggcagtggcggatttataggctatgctcccaacctctctaagctcgttgccgaatgggaaggccaggattccgacagcgatcagttgttctacactaagatttttttggacccagaaaagagagaacagataaacataactcttgaccatcggtgccggatttttcaaaacctggatggagcactcgtctctccatggggacaaggccacctccccggtgcttgctatgagctgactgcgagcgtgcttacgtccgagctgtccgtgatgcctagtttccctgccgtggttctccagctcaattacttgggaaattatatcccgaggttctggacttttgagaccggttgtactgtgtgtgacgagggcctccgatcacttaagggaattgggtag

SEQ ID NO: 236067 - DNA, 678 bp, synthetic construct
  misc_feature 1..678: note = Description of Artificial Sequence: Synthetic coding sequence
  source 1..678: mol_type = other DNA
atgcgaccactcctcctactggcattactgggctggctactcctggcagaagctaagggcgacgcaaagcccgaagcaccgtgctgtcaagagggactgagagccggtggtagtggatccttgcatttgggacgagattttacagttctggccggtgcacggggtagtccttcaccgtccgtttcctcaatccctcggttctggatcccgggaagcgataacctcttggtccttacagtggccacaaaagagaccgagggattcaggagatttaagcggagtgcccagttcttcaactacaagatccaggccttaggactaggggaagactggaacgtggagaagggaaccagcgctggagggggtcagaaggtcagactgctcaagaaagcccttgagaagcatgccgataaagaggacctggtgatcctgttcgctgatagctatgacgtgttgttcgcttctggcccaagggagctgctcaagaaattccggcaggcgcgtagtcaggtggtttttagtgccgaggagctgatttaccccgacagacgactagagacaaaatatccggtcgtgagcgacggaaaaagattccttgggtctgggggattcatcggatacgcacccaatctgtcaaagctcgtggccgagtgggaagggcaggacagcgattcatag

SEQ ID NO: 236068 - DNA, 2277 bp, synthetic construct
  misc_feature 1..2277: note = Description of Artificial Sequence: Synthetic coding sequence
  source 1..2277: mol_type = other DNA
atggggggatgtacagtgaagccccagctactcctgctggcccttgtcctacatccttggaatccgtgccttggcgcagacagtgagaagccaagttccataccgactgataagttacttgtgattactgtcgcaactaaagagagcgacgggtttcacagattcatgcagtctgccaagtactttaattataccgtgaaagtgttaggccagggagaagagtggagagggggtgacgggataaatagtatcggaggcggtcagaaggtacgcctgatgaaagaagtcatggagcactatgcggatcaggacgatctggtggttatgttcacagagtgtttcgacgtgattttcgccggtgggcctgaggaagtcctgaaaaagttccagaaagccaatcacaaggttgtctttgctgcagacggaatcctctggcctgataagcggctggctgataagtacccagttgtccatatcggcaaaagatacctcaactctggtggatttattggatatgcaccatacgtgaatcgcatagtgcaacaatggaatctccaggataacgacgacgatcagcttttctacaccaaggtttatatcgatccactgaagagagaggctatcaatatcaccctggaccacaaatgtaagatcttccagaccctcaacggtgcagtggatgaagtcgtgttgaagtttgagaacggtaaagctcgcgcaaaaaatacgttctacgaaaccctgcctgtagccattaatggcaacggacccactaagatactgctaaattactttggcaattacgtacccaatagctggactcaggacaatggctgcacactttgtgaatttgacacagttgatctgtcagcggtcgacgtccatccaaacgtgtctattggcgtgtttatagaacagcctactccatttttaccaagattcctggacattctcctgacgctggattaccccaaggaagccctaaagcttttcatacataacaaggaagtgtaccacgaaaaagacatcaaagtgttctttgataaggccaaacacgagattaagacaatcaagatagtgggacctgaagaaaatctatctcaggcagaagctcgaaacatggggatggatttttgtaggcaagacgagaagtgcgactactacttttccgttgatgccgacgttgtactgactaaccctcgaacattgaaaatcctcattgagcagaatcgcaagatcatagctccgttggtcaccaggcacggaaagctctggagcaacttctggggtgctctctcaccagatgggtactacgccaggtctgaagactacgtggacatcgtccaaggtaaccgggtgggggtgtggaacgtcccttacatggcaaatgtgtatctcattaagggcaagactcttcggtcagagatgaatgaaaggaactactttgtacgggataaacttgaccctgatatggctctttgtcgtaacgcccgagaaatgaccttgcaaagagaaaaggatagcccaacaccagagaccttccagatgctctctccgcctaaaggagtctttatgtacataagcaacagacatgagtttgggaggctgctctcaacagccaattacaacaccagtcactacaataatgacttgtggcagatctttgaaaatccggtcgactggaaggagaaatacataaaccgcgactacagcaaaatctttactgaaaatattgtggagcagccttgccctgacgtcttttggtttccgattttttccgaaaaagcttgtgatgagctcgtcgaagagatggaacattacggcaaatggtccggcggaaagcaccatgactcaaggatttccggcggatacgaaaacgtcccgacagatgacatccacatgaaacaggttgacctcgagaatgtgtggctacactttattcgagaattcattgcaccagttaccctgaaggttttcgcgggttactataccaagggcttcgcactccttaacttcgttgtcaagtactctcccgagaggcagcggtctctgcggccacaccatgatgcaagcactttcactattaatatagcactcaacaacgtcggagaggacttccagggcggaggatgtaagttcctgcggtataattgctccattgagtccccgcgtaaagggtggagttttatgcaccctggcagactgacacatctccatgaaggattgcctgttaagaatggcactcgctacattgccgtttccttcattgatccttag

SEQ ID NO: 236069 - DNA, 2214 bp, synthetic construct
  misc_feature 1..2214: note = Description of Artificial Sequence: Synthetic coding sequence
  source 1..2214: mol_type = other DNA
atggggggatgtacagtcaaaccgcagttgctcctcttggctctggtactacatccctggaatccttgcctgggcgctgactctgaaaagccctccagtatccccaccgacaaactgctggttattaccgtcgcgacaaaggaatcagacgggttccaccgtttcatgcaaagcgccaagtatttcaactatacagtgaaggtcctgggacagggcgaggagtggcgcggaggagacgggatcaactcaatcggcggagggcaaaaggttaggctgatgaaggaggtaatggaacattacgccgaccaggatgacctggtcgttatgttcactgaatgtttcgatgtaattttcgcgggtggtcccgaggaggtgctcaagaagtttcagaaagcaaaccacaaggtggtgtttgccgctgatggtatactatggccagacaagaggctcgccgataagtatcctgtggtgcatattgggaagaggtacctcaattcagggggatttataggatacgctccttacgtgaatcggattgtgcaacagtggaatctgcaggataatgacgacgatcagcttttctataccaaggtttacatagatccccttaaaagagaggccatcaatattactctcgaccacaagtgcaagatatttcagacactgaacggcgcagtggatgaggttgtcctgaagtttgaaaacggcaaggcccgtgctaagaacaccttttacgaaacgctacctgtcgcaataaacggcaatggcccaaccaaaatcttacttaactacttcggcaattatgtgcctaatagctggacgcaggacaatgggtgcacactgtgtgaattcgatacagttgatttaagtgccgtcgatgtccatcccaatgtgtccataggggtcttcatagaacaacccacgccctttctgccaaggttcctcgatattcttcttaccttggactatcccaaggaggcattgaagttgttcatacacaataaggaggtgtaccacgagaaagacatcaaagttttcttcgacaaagccaagcacgaaatcaaaactattaagatcgtgggaccagaagaaaatctatcccaggctgaggccaggaatatggggatggacttctgccggcaggacgaaaagtgcgattattatttttcagtcgatgccgatgtggtcctgacaaatccaaggacactgaaaattctgatagagcaaaacagaaaaatcatcgcaccactcgtgacaaggcacggaaaactctggtcaaatttttggggtgcattgtcaccggatgggtattatgctcggtccgaagactatgtcgatatcgtgcaagggaacagggtgggggtgtggaacgttccctacatggcaaatgtgtatctcatcaagggcaaaaccttgcgctccgagatgaacgagaggaactactttgttcgggacaaactcgaccccgatatggccctgtgccgtaatgccagggagatgggcgtgttcatgtatatctcgaataggcatgaatttggcagacttcttagcacagcaaattataacacttcccactacaacaacgacttgtggcagatatttgaaaatcccgtggattggaaggagaagtatatcaatcgtgactactctaaaatatttactgagaacatcgtggaacagccctgcccagacgtgttctggttccccatcttctctgagaaggcctgcgacgagctggtcgaagagatggagcattacggtaaatggagcggtggtaaacaccacgattctcggatctccgggggatatgagaatgtgcccaccgacgacattcatatgaagcaggtggacttggagaacgtctggctccattttattcgagaattcattgcccctgtgactctcaaggtatttgcaggctactataccaaaggctttgcactcctgaacttcgttgtgaaatattctccagaacggcaaagaagcctgcgccctcaccacgacgcatccacctttaccattaacatcgcgttgaataacgtgggggaagacttccaggggggagggtgtaagttccttaggtacaattgttccatagagtcccctaggaaaggctggtcttttatgcaccctggacgcctgacccaccttcatgagggcctcccagtaaaaaacggtacccggtacatcgcagtcagcttcattgacccatag

SEQ ID NO: 236070 - DNA, 1257 bp, synthetic construct
  misc_feature 1..1257: note = Description of Artificial Sequence: Synthetic coding sequence
  source 1..1257: mol_type = other DNA
atgctggaaaaccatatactccataaaagaatttatatactaaccttcttttcgcagcaaatcttcatcctgtgtcatgctcatttcattttctttttcacagtgcgtgatttctgtcgccaggacgaaaaatgtgattattatttctcggtggacgctgatgtcgtgttgacgaatccacggacattgaagattttaattgagcagaaccgaaaaattatagccccactagtgacacggcacgggaagctatggagcaacttttggggtgctctgtccccagacggctactacgcacgatccgaggactatgtggatatcgttcagggaaacagagtgggagtctggaacgtgccctatatggctaatgtataccttataaaagggaagacactgcgctcggaaatgaacgagcggaattattttgtgagggacaagttggacccagacatggccctgtgtagaaatgcaagagaaatgaccttgcagcgggagaaggattcacccacccccgagacatttcagatgcttagccctcccaagggagtctttatgtatattagtaataggcacgagttcggacggttgttgtctactgcaaactacaatactagtcactacaacaacgatctctggcagatctttgagaatccggtggattggaaggagaagtacataaacagggactacagcaaaatatttacagaaaatatcgtagaacagccctgcccagacgtgttttggttccctatattttccgagaaggcctgcgacgagctggtggaggaaatggagcactacggcaagtggagtggcggaaagcaccacgattccagaataagtggcggatatgagaatgtccccaccgacgacatccacatgaagcaggtggacctcgagaacgtgtggttgcactttatcagagagttcatcgccccagtgaccctaaaggtattcgctggatattacaccaagggcttcgccctcttgaactttgtggttaaatattcaccagagaggcaacggtcactgagaccgcatcacgatgcctccacgtttaccatcaacattgctctgaacaatgtcggggaggattttcagggaggaggctgcaagttcctcagatacaattgtagcattgaaagtccccgaaaggggtggtcattcatgcacccaggaagactcactcatctgcacgagggccttcccgtcaagaacggaacccgatacatcgcggtgagcttcattgacccctag

SEQ ID NO: 236071 - DNA, 2112 bp, synthetic construct
  misc_feature 1..2112: note = Description of Artificial Sequence: Synthetic coding sequence
  source 1..2112: mol_type = other DNA
atgcaaagcgctaagtactttaattatacggtcaaagtgctgggacaaggcgaggaatggcggggtggggatggcattaattctatcggagggggacagaaagtacgactgatgaaagaggtgatggaacactacgctgaccaggacgacctcgtagtcatgtttacggagtgctttgatgtgatctttgccggtggcccagaagaagtgctcaagaagttccaaaaagccaaccacaaagttgtgtttgccgcagacggaattctgtggccagacaagcgtttggcagacaagtatcctgtggttcacattggcaagagataccttaattccggagggttcatcggctacgctccttacgtcaacagaatcgtgcaacagtggaatctgcaagacaatgacgacgaccaactgttttacacaaaggtttacatcgaccctctgaagagggaggcaattaatattaccttggatcacaaatgtaagatcttccagacactgaacggggctgtggacgaggtcgtgctgaagttcgagaacggcaaagcgagggcaaagaataccttctacgagacgctgccggttgcaattaacggtaacgggccaaccaagatattgctcaactacttcggaaattacgtcccgaattcctggacccaggacaatggctgtactctctgcgaattcgatactgtagatctgagcgctgtggacgtgcacccaaacgtgagtattggagtcttcatcgaacagccgacccccttcttacctcggtttctcgacattcttttgactctggactaccccaaagaggctttgaaactgtttatacacaataaggaagtgtaccacgagaaagatattaaggtgtttttcgacaaagcgaagcacgaaatcaagactatcaagattgtgggccctgaggagaacctgagccaggcagaagcacggaacatgggcatggacttctgccgacaggacgaaaaatgcgactattacttctccgtcgacgccgatgttgtcctaacaaaccctcgtacactcaaaattctgatcgagcagaatcggaaaataatagcacctctcgtgactaggcatggcaaactttggtccaacttctggggcgcactaagtcccgacggttattacgcacggagtgaggactatgttgatatagtgcagggcaaccgagttggcgtatggaatgtcccctacatggctaacgtgtacctgattaagggcaaaaccctgaggtctgaaatgaacgagcgtaattacttcgtccgcgataaactggacccagatatggccttgtgcaggaacgctagagagatgactcttcagcgagaaaaggattcacctacacccgagacgttccagatgttgtcacctccaaagggtgtgttcatgtacatctcaaacaggcatgaattcgggcgacttctctcgacagccaactataatacatcacactacaacaatgatctatggcagatcttcgagaatcctgtggactggaaggagaaatacattaatcgtgactactccaaaatctttacggagaatatcgtcgaacagccctgcccagacgttttctggttccctatttttagcgagaaagcctgtgacgagctggtcgaggagatggaacactatggaaagtggagcggcggtaaacaccatgattctagaatctcggggggttacgaaaatgtccctacggacgacatccatatgaagcaggtggatcttgagaacgtgtggttgcatttcatacgggaatttatcgcacccgtgaccttgaaggtgtttgcagggtactacacgaagggctttgccttgctgaacttcgtcgttaaatactcccctgagaggcagaggtcgctgagaccccatcacgatgccagcaccttcaccatcaacatcgccctgaacaacgtgggggaggattttcaaggcggaggctgcaagtttctgcgatacaattgttctattgagagccctaggaagggatggtcttttatgcaccctgggaggttgactcatctccatgagggcctgccggtgaagaacggcacacggtatatcgctgtttccttcattgatccttag

SEQ ID NO: 236072 - DNA, 1092 bp, synthetic construct
  misc_feature 1..1092: note = Description of Artificial Sequence: Synthetic coding sequence
  source 1..1092: mol_type = other DNA
atggcttcaaaatcctggctaaacttcttgacatttctttgtgggtccgcgatcggctttctgttgtgctctcagctattttccatcctgctgggtgaaaaggtagatacccagcccaacgtactgcataatgacccacacgctcggcacagcgacgacaatgggcagaatcacctagagggccagatgaacttcaatgctgattctagtcagcacaaggatgaaaacacggatatcgctgaaaacctatatcagaaagtccggatcctgtgttgggtgatgaccgggcctcagaacctggagaaaaaagcgaaacatgtgaaagcaacctgggcacagagatgcaataaggtgcttttcatgagctcagaggaaaataaagacttccctgctgtcggcttgaaaaccaaggagggcagagaccaattgtattggaaaaccattaaagcctttcagtacgtacatgagcattatctggaggacgccgactggttcttgaaagccgacgacgacacatatgtcatcttggataatttgcggtggctgctgtctaaatatgaccccgaggagccaatctatttcgggcgtcgttttaagccttacgtaaagcagggctacatgtccggaggtgctggctatgtgctgagcaaggaggccctgaagagattcgtggatgcctttaagacagataaatgcacccactctagctcaatcgaggacctggctttaggacggtgtatggaaattatgaatgtggaagccggagactctcgggatacgatcggcaaggaaacattccacccattcgtgcctgagcaccacctcatcaaaggatatctgcctagaacattctggtactggaactataactattaccctcctgtcgaaggcccaggatgttgcagcgacctagcagtttccttccattatgtcgactctacaaccatgtacgagcttgagtaccttgtctaccacttgcgaccatacggctatctgtaccgatatcagcccacccttcctgagagaattctgaaggaaatcagccaggcaaataaaaatgaagacactaaggtgaaattgggcaacccatag

SEQ ID NO: 236073 - DNA, 231 bp, synthetic construct
  misc_feature 1..231: note = Description of Artificial Sequence: Synthetic coding sequence
  source 1..231: mol_type = other DNA
atgaccagcagcggacctgggcctcggttcttattgttgctccccctcttattacccccagccgcaagtgcctctgacaggccgaggggcagagacccggtcaatcctgaaaagctgctcgtaatcaccgtggccacagccgaaacggaggggtatctgaggtttcttaggagcgcagagtttttcaactacaccgttcgtaccctgggcttgggggaagagtggaggtag

SEQ ID NO: 236074 - DNA, 732 bp, synthetic construct
  misc_feature 1..732: note = Description of Artificial Sequence: Synthetic coding sequence
  source 1..732: mol_type = other DNA
atggaaaaatatgccgaccgggaagatatgataattatgttcgtggattcctatgacgtgattctggcaggaagtcctactgaactgctgaaaaaatttgtgcagtcagggagtagattgttgttctccgccgagtcgttctgctggccagaatggggcctcgcggagcagtatcctgaagttggcactgggaagcgttttcttaacagcgggggattcatcgggttcgccacaactattcaccagatcgttcgccagtggaagtataaagacgatgatgacgatcagctcttttacactaggctgtatttggaccccggactacgtgagaaactgtctcttaatttagatcataagtcacggattttccagaatctgaacggcgctctcgatgaagtggtgcttaaattcgatagaaaccgtgtccgcattcggaatgtggcatatgatacacttcccatcgtcgtccacggaaatggacccactaaactgcaactcaactatctcggcaattatgtgcccaatgggtggactcctgagggtggttgtggtttttgcaatcaagaccgcaggacactccctgggggtcctgccagccctccaggtgtgagtggccgtgtgtgcgggactgcttattccgtgtctgcccctctgcccgctgcggcagcgactcctggtctgtcacctaggcaaggtcacccctttcccgctcagcagcgtgggttaccgtag

SEQ ID NO: 236075 - DNA, 1740 bp, synthetic construct
  misc_feature 1..1740: note = Description of Artificial Sequence: Synthetic coding sequence
  source 1..1740: mol_type = other DNA
atggctgccaagtctgacggcgctgcggcttccgcaagtccagatcctgagggcgctgccggtggcgcaaggggtagtgccggtgggaggggagaagcagccgctgcagccggtccgcctggggtggtgggggcaggcggacctgggccacgctatgaattgcgggattgttgctgggtgctctgtgccttactggtcttctttagcgatggagccactgatttatggctagcggcatcctactaccttcagaaccaacatacctacttttccctcaccctcctgttcgtactgctgccaagtctggtagtacagctgctgtccttccgatggttcgtgtacgattattctgagcccgctggttcccccggtcctgcagtgtcaactaaagacagcgtggcagggggagcggcaataagtaccaaggacagcgcaggcgcatttaggacaaaggaagggagccctgagcctggacctcaacccgcaccctcatccgcctccgcttatcgacgtaggtgttgccgcctatgcatctggctcttgcagacactcgttcacctcttgcaactcgggcaggtgtggaggtacctcagagccctgtacctcggtctccagtcaaggtggagaggcgaaagactccggagacatttttactggcagatgctgtttgaatccgccgatgtatcaatgctccgcctcttggagaccttcttgcgatccgctcctcagttggtgctacagctttcgttgctggtacacagggggggtgcaccagatcttctgccagcactctctacaagtgcgtctctcgtgtccttggcctggacactggcatcttaccaaaaggtgttgcgggactcaagggatgacaagaggcccctgtcatacaaaggagcagtggcgcaggtattatggcatctgttttcgattgcagccaggggacttgcatttgctttgttcgcaagcgtttacaagctttactttggaatcttcatcgtggcccattggtgtgtcatgacattttgggtgattcaaggggagacggacttctgtatgtcgaagtgggaagagataatctataacatggtagtcggaattatctacattttttgctggtttaatgtcaaggaaggcaggtcacgtcgtagaatgactctgtatcattgcatcgtcttgctggagaacgctgctctgaccggcttctggtattctagccgcaatttttcaacagatttctattccctcatcatggtatgcgtcgtcgcctcgagctttgccctgggcattttttttatgtgcgtatactactgtctgctgcaccccaatgggccaatgctggggcctcaggccccaggttgtatattccggaaggcttccgagccttgcgggcctccagcagacgctattactagccctcctcggtccctccctaggacaactggagccgagagagacggagccagtgccggtgagcgggctggcacaccgacccctccagtgtttcaggtcaggccaggactgccacctacaccagtcgctaggactctgaggaccgaaggtcccgtgattcgaattgacttgcccagaaagaagtacccagcctgggatgcacatttcatcgaccgcagacttagaaagaccatcttggccctggaatattcttctcctgcgaccccgagactgcaatataggtccgtggggacctctcaagagctgttggaatacgaaaccacagtgtag

SEQ ID NO: 236076 - DNA, 765 bp, synthetic construct
  misc_feature 1..765: note = Description of Artificial Sequence: Synthetic coding sequence
  source 1..765: mol_type = other DNA
atggcttggcagggccttgtgctagccgcttgcttgttgatgtttcccagcaccactgccgactgcttgagccgttgcagtctctgtgctgtgaaaacacaggacggacccaagcccattaatccactgatctgcagcctgcagtgccaggcggctttactgccttccgaggagtgggagaggtgtcagtccttcctttccttcttcaccccttcgaccctgggcctgaacgacaaagaggatctgggcagtaagagtgtcggcgagggaccatattcggaactcgctaaattgagcggctcatttctgaaagaactagagaaatccaagttcctgccctctatcagcacaaaggaaaacaccctaagtaagtcactcgaagagaagttgcgtggactgagcgacggatttagggagggagccgagtctgagcttatgcgcgatgcacagctgaatgacggtgcaatggaaacaggaacattgtacctggcagaagaagatcccaaggagcaggtcaagaggtatggcggatttctgcgtaaatatccaaagaggagcagcgaggtcgcaggagagggtgacggtgacagcatgggacacgaagatctgtacaagcggtacggaggctttctgcggagaatccgcccaaagctcaagtgggataaccagaagagatatgggggattcctgcgcaggcaattcaaagtagttacccggtcccaggaggacccaaacgcctactcgggagagttgttcgatgcctag

SEQ ID NO: 236077 - DNA, 765 bp, synthetic construct
  misc_feature 1..765: note = Description of Artificial Sequence: Synthetic coding sequence
  source 1..765: mol_type = other DNA
atggcgtggcagggactggtgctggccgcatgtctcctgatgttcccttctaccacggccgattgtctcagtagatgtagtttatgcgcggtcaagactcaggacggacccaaaccaataaatccactcatttgtagtttacagtgccaggccgcactgctcccctctgaagagtgggagagatgccagagcttcctcagtttctttacgccatctactctgggtctcaacgataaggaggacctggggtctaaaagtgtgggcgaagggccatattcagagctcgccaagctcagtgggagcttccttaaggagctggaaaagtccaaattcttgccatctataagcaccaaagaaaatacattgagtaagtcacttgaggagaaattgcgagggctgtctgatggcttccgggagggggctgagtccgaattaatgcgcgacgctcagttaaatgatggtgccatggagactggtaccttgtatctggcggaagaagatcccaaggagcaagtgaaacgttatggtggctttctccgtaaatacccaaaacgatcctctgaagtggccggtgaaggggacggagatagtatgggacacgaggacctgtataaacgatatggagggtttctgcgaagaattcgacctaaacttaaatgggacaatcagaaaagatatggagggttcttacgcagacagtttaaagtagtcacacgttctcaggaggaccctaacgcctacagtggggagttgtttgatgcctag

SEQ ID NO: 236078 - DNA, 804 bp, synthetic construct
  misc_feature 1..804: note = Description of Artificial Sequence: Synthetic coding sequence
  source 1..804: mol_type = other DNA
atggcccgttttctcaccctgtgcacttggttgctgctcctgggcccagggcttctggcaactgtgcgtgcagagtgcagccaggactgcgcaacttgttcttatcgtcttgtccggccagcagacatcaactttcttgcctgtgttatggagtgtgagggaaaattgccatcactgaaaatttgggagacctgcaaggaactgctccaactcagcaaaccggaactgccccaggacggtacctcaaccctcagggaaaactccaagccggaagagagccacttgctcgcaaagcggtacggtggctttatgaaaagatatggcggatttatgaagaaaatggacgaactgtaccccatggaacccgaggaggaggccaatggaagcgaaattctggccaaaagatatggcggattcatgaagaaagacgccgaagaggatgattcattggcgaactcttcagaccttttgaaggagctgttggagacgggagataatcgggaacgttcacatcaccaggacggctctgataacgaggaagaagtgtcaaagcgttacggaggctttatgaggggcctcaagaggtcaccgcagctcgaagatgaggccaaggaattacagaaaaggtatgggggatttatgaggcgcgtaggaagacctgagtggtggatggattaccagaaaaggtacgggggattccttaaaagatttgcagaggctttgcccagtgatgaggaaggtgaaagttattccaaggaggtaccagagatggagaagcgctacgggggattcatgcgcttctag

SEQ ID NO: 236079 - DNA, 804 bp, synthetic construct
  misc_feature 1..804: note = Description of Artificial Sequence: Synthetic coding sequence
  source 1..804: mol_type = other DNA
atggcaaggtttttgacgttgtgcacatggcttcttctgctagggccagggcttctggctactgtgagggctgagtgctcacaagactgtgccacatgtagctaccgtttagttagaccagccgatattaactttcttgcatgcgtaatggaatgcgaagggaagctgcctagtctgaagatctgggaaacttgcaaggagctcttgcagctgtctaaacccgaacttccacaggatgggacttccactttaagggaaaatagcaagccggaagagtcacacctgctggcaaagagatacggtggctttatgaagaggtatggcggatttatgaaaaaaatggatgaactgtacccgatggagccggaagaagaggctaatggatctgaaatccttgcaaagagatacggagggttcatgaaaaaagatgcggaggaggacgatagcctggccaatagttctgacctgttgaaggagttgctcgagactggtgataacagggaaagaagccatcaccaggatggaagtgacaatgaggaggaggtgagtaaacgatacgggggattcatgcgcggactcaagaggtcccctcagctggaagacgaggcaaaagagctacagaagcgctacggcggtttcatgcgcagagtcggcagaccggaatggtggatggactaccagaaaaggtatgggggttttctgaagcgctttgcggaagccctgccaagcgacgaagaaggcgagtcctattcgaaagaggttcctgaaatggagaaacgttatggaggattcatgaggttttag

SEQ ID NO: 236080 - DNA, 318 bp, synthetic construct
  misc_feature 1..318: note = Description of Artificial Sequence: Synthetic coding sequence
  source 1..318: mol_type = other DNA
atggccagattcttaacactgtgcacctggcttctgctgctagggcctggtctgctggctaccgttagagccgagtgcagccaggattgcgctacttgctcataccgcctggttcgtcccgctgacattaacttcctagcgtgcgttatggagtgtgaaggcaagttgccaagcttaaaaatctgggagacctgcaaagaactgctgcagttgtcaaagccagagttgccacaggatggaactagcacattgagagaaaattctaagcccgaggaatctcatcttctcgccaagcgatatggcggattcatgaaatag

SEQ ID NO: 236081 - DNA, 570 bp, synthetic construct
  misc_feature 1..570: note = Description of Artificial Sequence: Synthetic coding sequence
  source 1..570: mol_type = other DNA
atggcacgtttcctgaccctctgtacatggttgctactgctcggtccaggcttgctcgccactgtcagggccgagtgttcccaggactgcgctacatgctcctatcgcctggtgcgccctgcagacattaacttcttggcttgcgttatggagtgcgaaggaaagctgcccagcctaaagatctgggaaacatgcaaagaattgctccagctttcaaagcctgagttgccccaggatggtactagcaccctgcgcgagaatagtaagcctgaggagtctcacctgctggccaaacgatacgggggtttcatgaagaggtacggcggattcatgaaaaagatggatgagctctacccgatggagcctgaagaagaagcgaatggctcagagattttagccaagagatacggcggatttatgaagaaggacgctgaggaagacgactcactcgctaatagttcagaccttcttaaggagttactggagacaggggacaatagagaacggagccaccaccaagatggttccgacaacgaggaggaaaaaaaaaagaaaaagcgcaaagagtag

SEQ ID NO: 236082 - DNA, 423 bp, synthetic construct
  misc_feature 1..423: note = Description of Artificial Sequence: Synthetic coding sequence
  source 1..423: mol_type = other DNA
atggccggatggcagagctacgtggacaatctcatgtgtgacggctgttgtcaagaggcggcaatagtcggatactgcgacgccaaatacgtctgggctgcgaccgccggaggcgtgttccaaagcattactcctatcgagatcgatatgatcgtggggaaagatcgggaggggttctttaccaacgggctcacactgggagctaagaagtgcagtgtgataagggacagcttgtacgtcgacggcgattgcacgatggacatccggaccaagtctcagggaggcgagcctacctataatgtggctgttggaagagcagggcgagtcctagtcttcgtcatggggaaggaaggggtgcacgggggtggtctcaacaagaaagcctattctatggctaaatacctacgcgactcgggcttttag

SEQ ID NO: 236083 - DNA, 423 bp, synthetic construct
  misc_feature 1..423: note = Description of Artificial Sequence: Synthetic coding sequence
  source 1..423: mol_type = other DNA
atggctgggtggcaaagttacgtggacaatctgatgtgtgatggttgctgtcaggaggccgcaattgttgggtattgcgatgccaaatacgtctgggcagctactgctggaggggtgtttcagtctattacacccattgaaatcgatatgatcgtcggtaaggacagagagggattcttcacaaatggactaactctaggcgcaaagaagtgtagcgtgattagggatagtctttatgttgacggcgactgcaccatggacattagaacaaaatcccaaggtggagaacccacatacaatgtggcggtgggtcgcgcaggacgggcattagtgatcgtcatgggcaaagaaggagtgcacggcggtaccctcaataaaaaagcctacgaattggccctgtatttgaggaggtctgatgtgtag

SEQ ID NO: 236084 - DNA, 414 bp, synthetic construct
  misc_feature 1..414: note = Description of Artificial Sequence: Synthetic coding sequence
  source 1..414: mol_type = other DNA
atgggtgactggaaagtgtacatctccgcagttcttcgagaccagagaatagacgatgtggccattgttggccacgctgacaatagttgtgtatgggcctcaaggccaggcggactgctggctgccatctctcctcaagaagtcggcgtcctcactggccctgatcggcacacttttctacaggctggcctatctgtcggcggtcgaaggtgctgtgtgatcagagaccatttgcttgccgaaggtgatggggtgcttgatgcccgtactaaggggttagacgccagagccgtctgtgtcggacgggctccgcgagccctcctcgttctaatggggaggcgcggagtccacggtggaatccttaataaaactgtccatgaactgattagaggcttgcgtatgcagggcgcttag

SEQ ID NO: 236085 - DNA, 1167 bp, synthetic construct
  misc_feature 1..1167: note = Description of Artificial Sequence: Synthetic coding sequence
  source 1..1167: mol_type = other DNA
atgaaatggatggtcgtcgtcttagtgtgcctccagctcctggaggcggcagtcgtaaaagtccctctgaagaaattcaagtccatccgcgaaaccatgaaagagaaaggtctcctgggcgaattcctgcgcacacacaaatacgatcctgcctggaagtatcggtttggcgatctttccgtgacctatgagcccatggcatacatggatgcagcctactttggagagatatcaattggcactcccccacagaactttttggttttgttcgatacaggcagctcgaatctctgggtcccttcggtgtattgccagtcccaggcctgcacctcccactcacgatttaacccgtcggagtcgtccacgtactctaccaatgggcaaaccttcagtctgcaatacggaagcgggagccttaccggatttttcggatatgatactcttactgtgcagtctatccaggtgccgaatcaggagttcggcctttctgaaaatgagccgggaactaactttgtgtacgcgcaatttgatggcatcatgggcctggcatacccagcactcagtgtcgatgaggccaccacagctatgcagggtatggtgcaagaaggcgctttgacctccccagtgttcagcgtgtacctttcaaatcagcaaggatcgtctggcggtgccgtagtgtttggcggagtagactccagcttgtacacaggtcagatatactgggccccagtcacccaggaactgtactggcagattggtatcgaggaattcttgatcggaggccaggcgtcgggatggtgttccgaggggtgccaagccattgtagataccgggacatctcttctgactgtcccacagcagtatatgtctgctttgctgcaggccactggagctcaggaggacgaatacggacagttcctagtgaattgtaattccattcagaatctcccttcgttgacctttatcatcaacggcgtggaatttcccctgcccccatcctcctacatactttccaacaacggatattgtacagtgggcgtcgagccaacctatctctcaagccagaatggccagcctctgtggatactcggggacgtgttcctacgcagctactattccgtatacgacttaggaaataacagggtgggattcgccacagcggcttag

SEQ ID NO: 236086 - DNA, 315 bp, synthetic construct
  misc_feature 1..315: note = Description of Artificial Sequence: Synthetic coding sequence
  source 1..315: mol_type = other DNA
atgaaatggatggttgttgtcctcgtttgcctacagctgctcgaagccgctgttgtcaaggtgcctcttaagaaatttaaatccattcgcgaaacgatgaaggagaaaggcttgctgggtgaatttttacgcacgcacaagtacgacccagcatggaagtaccgattcggagatctaagcgttacatatgagcccatggcctacatggatgccgcatatttcggagaaattagtattgggactccccctcagaatttcctagtcctgttcgatacagggagtagccccctgcccctggatcctgcccctagttag

SEQ ID NO: 236087 - DNA, 411 bp, synthetic construct
  misc_feature 1..411: note = Description of Artificial Sequence: Synthetic coding sequence
  source 1..411: mol_type = other DNA
atgaagtggatggtcgttgtactcgtgtgcttgcagctcctggaggctgcagtggtcaaggtgcctctaaagaagttcaaatccatccgcgagaccatgaaggaaaaggggttgttaggcgaatttcttcgaacccacaaatacgaccctgcctggaaatatcggtttggcgatttatccgtcacctatgagcccatggcctatatggacgtgcaaagcatacaggttcccaaccaggagttcgggctctccgaaaacgagccaggcacgaactttgtgtatgcgcagttcgacggcataatggggcttgcttatcctgcgttgtccgtggacgaagccaccacagcgatgcagggaatggtccaagaaggggctcttacctctcccgttttttctgtgtacctgtcatag

SEQ ID NO: 236088 - DNA, 948 bp, synthetic construct
  misc_feature 1..948: note = Description of Artificial Sequence: Synthetic coding sequence
  source 1..948: mol_type = other DNA
atgaaatggatggtcgtagtcctggtgtgcctacagcttcttgaggcagctgtggtcaaggtgccattaaaaaagttcaagtcaattcgcgagacaatgaaggagaagggattgcttggagagtttctgagaacccacaagtatgatcccgcatggaagtatcggtttggcgacctgagcgtgacctacgagccgatggcttacatggatgccgcttatttcggtgaaattagcattgggaccccacctcagaatttcctggtactattcgatacaggcagctctaacctgtgggtgcccagcgtctattgtcagtctcaggcctgtacatctcattctcgatttaaccccagcgagagctcaacctatagcacaaacggacaaacgttctcactccagtatggaagcgggtcactgacaggctttttcgggtacgacaccctgaccgtccagagcatccaggttcccaaccaggaatttgggctttccgagaacgaaccaggcaccaattttgtctatgcacaattcgacggcatcatgggactggcttacccagcactgtcagtcgatgaagccaccactgctatgcaaggaatggttcaggagggagctctcacatctcctgtctttagcgtgtatctgagtaacctggtgctggagagctccggactcggtcccctgctcaccccaagtcgcgctgctccaccttcgagtacattgcagctgccagaaaaaccattggagcagacttggaacattttgacaccttttactaagaccttaccggtgagcaacctgagtagaaaagtaaccagctgggcaggagtcggaattccagttacctgtctgcccgaggcaggttctggaggcgagagacgagccgaatgtggtttgggggtccccactacgaggggaccccctaggtctcagcaccactctggggcatag

SEQ ID NO: 236089 - DNA, 543 bp, synthetic construct
  misc_feature 1..543: note = Description of Artificial Sequence: Synthetic coding sequence
  source 1..543: mol_type = other DNA
atgctgtgcctgctcctgaccctgggtgttgctcttgtctgcggcgtgccagccatggatatcccacagacaaagcaagacctagagctgcctaaactcgcaggaacctggcactctatggctatggccacaaataatattagtttaatggccacccttaaagcccctttgcgggtgcacatcaccagcctgctgcctaccccagaggacaatctcgaaattgtgctgcaccggtgggaaaataattcctgtgttgaaaaaaaagtgctgggggagaagacagagaacccgaagaaattcaaaatcaactataccgttgcaaatgaagctaccctcctggatactgattatgacaacttcctgtttctttgcttgcaagacaccaccacacctattcagtccatgatgtgtcaatatttagcgagggtgctagtggaagacgatgaaatcatgcaggggttcatccgagcctttaggcccctgccacggcacctttggtaccttctggatctgaaacagatggaggagccctgccgtttttag

SEQ ID NO: 236090 - DNA, 261 bp, synthetic construct
  misc_feature 1..261: note = Description of Artificial Sequence: Synthetic coding sequence
  source 1..261: mol_type = other DNA
atgctctgccttctcttgactctcggcgtggctctcgtttgtggagtgccagccatggacataccccaaacgaaacaggacctggaacttcctaaggacacgacaaccccaatccagagtatgatgtgccagtacctggccagggtcctggtcgaagatgacgaaatcatgcagggctttatcagagcctttcgaccgttgccacgccatctgtggtacttattggacctgaaacagatggaagccccttgttggctgtag

SEQ ID NO: 236091 - DNA, 543 bp, synthetic construct
  misc_feature 1..543: note = Description of Artificial Sequence: Synthetic coding sequence
  source 1..543: mol_type = other DNA
atgctatgtttgctcctgacactgggagttgcccttgtctgtggcgtacccgcaatggacatcccccagacgaaacaggacctggaacttcccaaactggcaggcacctggcactctatggccatggcgaccaataacatttctctgatggccaccctgaaagcccctcttcgggtgcatattacaagcctcttacctactcccgaagacaacttggaaatcgtattgcacagatgggagaacaatagctgcgtggagaagaaggtcttgggcgagaagaccgaaaatccaaaaaagtttaagatcaattacacagtggcgaatgaggcaactctgctcgataccgactatgacaatttcctgtttctgtgtcttcaggatactaccacccccatccagtccatgatgtgtcaataccttgccagagttctcgttgaggacgacgagattatgcaggggtttatcagggcatttcgccctctcccaagacacctgtggtacctgctggacctgaagcagatggaggaaccatgccggttttag

SEQ ID NO: 236092 - DNA, 438 bp, synthetic construct
  misc_feature 1..438: note = Description of Artificial Sequence: Synthetic coding sequence
  source 1..438: mol_type = other DNA
atgttgtgtctactcttgacgctgggggttgcgcttgtgtgtggcgtccctgctatggacataccccagaccaagcaggatttagaacttccaaaggcgccacttagagtgcacattacatccctgttgcccactccagaagacaacctggaaatcgttctgcatcggtgggaaaataactcttgcgtggaaaagaaggtgcttggcgaaaaaaccgaaaatcccaagaagttcaaaattaattgtaaggctagcggagcccctcagctgagttggaagccacagggaccgagaaccgaccccgcaagtagcactgcccgtgtgctcgtcgaagacgacgagatcatgcaggggtttatccgggcatttagacctctaccccgacacctgtggtatcttctggatctgaaacagatggaagagccatgccggttctag

SEQ ID NO: 236093 - DNA, 399 bp, synthetic construct
  misc_feature 1..399: note = Description of Artificial Sequence: Synthetic coding sequence
  source 1..399: mol_type = other DNA
cttatggctactttgaaggcccctctcagggtgcacattacctctctacttcccacaccagaagataatctggaaattgtgctgcacagatgggaaaataactcttgcgtggagaagaaagttctgggcgagaagaccgaaaaccctaagaagttcaaaataaattacactgtagccaacgaagccactctgctggataccgattatgataactttctgtttctttgcctccaggacacaacgactcccatccagtccatgatgtgccagtatctggctcgagtccttgtggaggatgacgaaataatgcaagggtttattagagcgttccgccctctgccgcgacatctgtggtacctgctagacctgaagcagatggaggaaccctgccggttctag

SEQ ID NO: 236094 - DNA, 396 bp, synthetic construct
  misc_feature 1..396: note = Description of Artificial Sequence: Synthetic coding sequence
  source 1..396: mol_type = other DNA
tgagtccctgccatggatattcctcagacaaaacaggacctcgagctgcccaaagcaccgctgcgtgttcacatcacttctctgttgcctacaccagaggataatctggaaatcgtcctccacagatgggagaataactcctgtgtcgaaaaaaaggttctgggggagaagacagagaaccctaaaaaattcaaaatcaattgcaaagccagcggcgctccacagctgagctggaagccccaggggccacgcaccgatcctgccagtagcactgctagagtacttgtagaagatgacgagataatgcagggattcatacgcgcattcaggcccctccccaggcacctgtggtatttgctagacctgaagcagatggaagaaccctgccgcttttag

SEQ ID NO: 236095 - DNA, 381 bp, synthetic construct
  misc_feature 1..381: note = Description of Artificial Sequence: Synthetic coding sequence
  source 1..381: mol_type = other DNA
tgacctctgagggtccacataacaagcctcctacctacccccgaagataacctggagatagtgctacatcggtgggagaacaactcatgtgttgagaaaaaagtcctgggagagaagacagagaatccgaagaagttcaagattaattacaccgtcgctaacgaagccaccctgttagatactgactacgacaacttcttgttcctgtgtctgcaggacacaaccaccccaattcaaagcatgatgtgtcagtacctcgccagggtgctggtcgaagacgatgagattatgcagggtttcatcagggcttttagaccccttcctcggcatctctggtacctcctggatctaaagcagatggaggaaccttgtaggttttag

SEQ ID NO: 236096 - DNA, 102 bp, synthetic construct
  misc_feature 1..102: note = Description of Artificial Sequence: Synthetic coding sequence
  source 1..102: mol_type = other DNA
tgagagattatgcaggggttcatccgagcgttccgcccactccctaggcatctatggtatttactcgacctaaagcagatggaggagccttgtcgtttttag

SEQ ID NO: 236097 - DNA, 543 bp, synthetic construct
  misc_feature 1..543: note = Description of Artificial Sequence: Synthetic coding sequence
  source 1..543: mol_type = other DNA
atgctctgcctgcttcttacactcggagtggccctcgtctgcggggtgccagccatggacattcctcagaccaaacaggatttggagctgccgaagctcgccggaacatggcacagcatggccatggccacaaacaacatttctctcatggccacactgaaggctcccctgagggtgcacatcacaagcctgctgccaactccagaggacaacctggaaatcgtgctacaccggtgggagaacaactcatgtgtcgagaagaaggttcttggcgaaaagaccgagaatcccaaaaagttcaagattaattataccgttgccaatgaggctaccttgttggacaccgactatgacaacttcttatttttatgcctccaagacacgaccaccccgatccagagcatgatgtgtcaatacttggcaagagtgctcgtggaagacgatgaaattatgcagggctttattcgagccttccggccactcccacgacacctgtggtacctcttggacttgaaacaaatggaggagccctgtcgcttttag

SEQ ID NO: 236098 - DNA, 510 bp, synthetic construct
  misc_feature 1..510: note = Description of Artificial Sequence: Synthetic coding sequence
  source 1..510: mol_type = other DNA
atgctgtgtctattacttaccctaggggtggcgctggtctgtggtgtgccagccatggatataccacaaacgaagcaggacctggagctgccgaaactagcaggaacctggcactctatggccatggcaaccaataacatttccctgatggcaaccctgaaagcaccattgagagtacacatcacgtccctccttcccactcccgaggacaacctggagatcgtcctgcacaggtgggagaataactcctgcgtggagaagaaggtcctgggggaaaagactgagaacccaaagaaattcaaaattaactataccgtggcaaatgaagctacattactggacaccgactacgacaactttctgtttctgtgtctgcaggacacgacaactccaattcaaagtatgatgtgccaatacttggaaagctggtggcgaacaatgcgcagctgccgcgatagtagtggcctttccggcccatgtcccggaacttatggtacatgctggacttag

SEQ ID NO: 236099 - DNA, 2274 bp, synthetic construct
  misc_feature 1..2274: note = Description of Artificial Sequence: Synthetic coding sequence
  source 1..2274: mol_type = other DNA
atgtctcggaagatcagtaaggagtccaaaaaagtgaacatcagctcttctctggagtccgaagacatttcgttggagaccactgtacccacagatgatataagctcgtcagaggagagagaggggaaagtgcgcattactcgtcaacttatcgagcgcaaagaactgctgcacaacatccaacttctgaagatagagctgagccagaaaaccatgatgattgataaccttaaggttgactatcttaccaagattgaggaacttgaagaaaagctgaacgacgcgttgcaccaaaagcagctgttgaccttacgcctcgacaatcagctcgcctttcagcagaaggatgcctctaagtatcaggagctcatgaagcaggagatggagacaatactgctgcggcagaaacagctcgaggagaccaacctgcaactgagagagaaggcaggcgacgtgaggaggaacctccgggacttcgaactcactgaagagcaatacattaagctcaaggcatttcccgaggatcagttgtctattccggagtatgtctcagtgcgtttttatgagttggtcaatccacttcgaaaagagatctgtgaacttcaggtgaagaaaaatatcctggccgaagagttatccacgaataagaaccagttaaagcagctcactgagacttacgaagaggatagaaagaactactctgaagtccagattaggtgccaacggctcgccctagagctcgcagatacaaaacagctcatacagcagggtgactatagacaagagaactacgataaagtcaagtctgagcgcgatgctctggaacaggaagtgatcgagctgcgcagaaagcatgaaatcctggaagctagccacatgatccagaccaaggagcggtcagagctgtcaaaagaagtggtgaccttagagcagacagttacattactgcagaaagacaaggaatacttgaatcggcaaaacatggaattgagcgtacgttgtgcgcatgaagaagatagactcgagcgcctccaggctcaattagaggagagcaagaaggcacgagaagagatgtacgaaaagtatgtggcttcgcgcgatcattacaagacagaatatgaaaataagcttcatgacgagctcgagcagatcaggcttaagaccaatcaagagatcgaccagctcaggaacgcctcccgcgagatgtacgaaagagagaataggaacctgcgtgaagcaagggacaatgccgtcgccgagaaagaacgcgctgttatggctgagaaggatgccctggagaaacacgatcaactgttagacaggtacagagagctacagttgagtactgagagcaaggtgaccgagtttttacaccagtccaaactgaagtccttcgagagcgagcgcgtgcagctgctacaggaggagaccgcgcgtaatctgacccagtgccagctagagtgtgaaaaataccagaagaagttagaggtgcttaccaaggagttttactcgctccaagcttcatccgagaaaaggattaccgagctccaggctcaaaactcggagcatcaagctcgtctggatatctatgagaagttagaaaaggagttggacgagattattatgcagaccgccgagattgagaacgaagacgaagctgagagggtcctcttttcatacgggtatggcgctaacgtgccgacaacagccaagcgcaggcttaaacagtcagtacatctggcccgacgagtactgcagctggaaaagcagaatagtctgattctaaaggatctggagcacaggaaagaccaggttacgcaactgtcccaggaactggacagagccaacagtctgttgaaccaaactcaacagccgtacagatatctcatagagtccgtacgccagcgggacagtaagatcgactctctgactgaaagcatagctcagctcgagaaagatgtgagcaacctgaacaaagagaagtccgctctcctgcagaccaaaaaccagatggccctcgatttggaacagctgctgaatcaccgcgaggagctggccgcaatgaaacagatcctggtgaagatgcactctaaacatagcgagaactccctactgctaacaaagactgaaccaaagcacgttaccgaaaatcagaagtctaagacactaaacgtgcctaaagagcatgaagataacatctttactccaaagccaaccctgtttaccaagaaggaggcccctgaatggtcaaagaagcagaagatgaaaacctag

SEQ ID NO: 236100 - DNA, 651 bp, synthetic construct
  misc_feature 1..651: note = Description of Artificial Sequence: Synthetic coding sequence
  source 1..651: mol_type = other DNA
tttagaacagctaaggttgaaaatgaggacgaggcagaacgcgtccttttttcttacggctacggtgctaacgtgcccaccacagcgaaaagacgacttaaacagtccgtccacctcgccaggagagttctccagcttgaaaagcagaatagtctgattctaaaagacctggagcataggaaggaccaggtgacccagctgagtcaggagttagatcgcgctaactctctactcaaccagacccagcaaccctaccgatacctgattgagtctgttcgacaacgggacagtaaaatagacagcttgaccgaatcaattgcccagctcgagaaagatgtgagcaacctgaacaaggaaaagagtgcgttactgcagactaagaaccagatggctctggacttagaacagctactgaaccatcgggaggagctggcagcgatgaaacagattctagttaagatgcactcaaaacacagtgagaactccttgctgcttaccaagactgaacctaagcatgtaaccgaaaaccagaagtctaaaacactgaacgtgcctaaggaacacgaggacaacatcttcactccaaaacctacactgtttactaaaaaggaagcacctgaatggtccaaaaaacagaaaatgaagacttag

SEQ ID NO: 236101 - DNA, 1245 bp, synthetic construct
  misc_feature 1..1245: note = Description of Artificial Sequence: Synthetic coding sequence
  source 1..1245: mol_type = other DNA
atgtcaagaaagataagcaaagaaagtaaaaaggtgaatatctcctcctctctagagtccgaagatatctcacttgaaaccacagtacccaccgacgacatcagctcctctgaggaaagagaaggcaaggttcgcattacccgtcagttaatcgagagaaaagagctgcttcacaatattcagctgctgaagattgaacttagtcaaaaaaccatgatgatcgataacctgaaagtcgattatcttaccaaaatcgaggagttggaagagaagctaaacgacgcccttcatcagaagcaactgttgactcttaggctggataatcagttagcctttcagcagaaggacgcctctaaatatcaggagttgatgaaacaggagatggagaccattctcctgagacaaaaacagttagaggagacaaacctacagctccgcgagaaagctggagatgtgaggcggaaccttcgggattttgagttaactgaggagcagtatatcaagctcaaagcctttccagaggaccagctgtccattcctgaatacgtatccgtgcgtttctatgaactggtgaatcccctgcgaaaggagatctgcgaactgcaagtaaagaagaatatcctagctgaggaactgtctacaaataagaatcagttaaaacagctgactgaaacttatgaggaggataggaagaactatagcgaggtgcagatcaggtgtcagagactcgccttagaactggcagacaccaagcagcttatacagcagggagattacaggcaggaaaactatgacaaagttaaaagtgaacgggatgcacttgagcaggaagtgattgaactgcgcagaaaacacgagatcctggaggcatctcacatgatacaaactaaagagcgctccgagttatctaaagaggtagtaacgctggaacaaaccgtgactctgctgcagaaggataaggagtacctgaatagacagaatatggaactgtctgtgcgttgtgcacatgaagaggacagactggagcggctgcaggcgcagcttgaagaaagtaagaaagccagggaggagatgtatgagaagtatgttgctagccgggaccactacaagactgaatatgaaaacaagctccatgacgaactggagcaaatacgactaaaaacaaaccaggagattgaccaacttagaaatgcctcacgtgagatgtacgagagggagaacaggaagaaacgcaagaagaaatag

SEQ ID NO: 236102 - DNA, 1734 bp, synthetic construct
  misc_feature 1..1734: note = Description of Artificial Sequence: Synthetic coding sequence
  source 1..1734: mol_type = other DNA
atgaccgaactagctggagcttccagtagctgctgccacaggcctgcagggagaggcgctatgcaatccgttctgcaccattttcagcgattacgcggacgcgaggggggtagccactttatcaatactagtagccccagaggagaagccaaaatgtcaatcacatcggacgaggtgaatttcttggtgtacaggtatctgcaggagagtggcttctcccactctgccttcacgttcggtatcgaatctcatatctcccagtccaacataaacgggactttagtgccccctgccgcactgatatccatcctacagaaaggtcttcagtacgtggaggcggagattagcataaacgaagatggaactgtgttcgacgggcgtccaatcgagagcctgtctctgatcgacgcagtgatgcccgatgtcgtccagacgaggcagcaggccttccgggagaaattagcacaacagcaggcaagcgctgctgctgctgccgcagcagccacagctgcagctacggccgctacgaccacaagcgcaggagtcagccaccaaaatccttcaaagaaccgggaagcgactgttaacggggaggagaatagagcccattccgtgaataaccacgcaaaacccatggagattgatggcgaggttgagattcctagttcaaaagcaaccgtccttcgagggcacgagtccgaagttttcatctgcgcgtggaacccagtctcagatcttctcgcgagtggctcaggcgattccactgctaggatttggaacctgaatgagaattccaacgggggatctactcagctggtgttgcgccactgcatcagagaggggggtcatgacgttccgagcaacaaagatgtaacaagcctggattggaatacaaatggaacattattggcgactggaagctacgatggcttcgctagaatatggactgaggatgggaacttggcatcgactctcggacaacataaaggaccaatttttgctctgaagtggaaccgcaaaggaaattatatcctgtccgccggagtggataaaacaaccattatctgggacgctcataccggcgaagcaaagcaacaattcccttttcactcagcacctgcccttgacgttgattggcagaataatacaacttttgcatcatgctcaacagatatgtgtatccacgtttgccgcctaggatgcgacagacctgtcaaaaccttccaggggcataccaatgaagtgaacgctatcaaatgggacccgagtgggatgttgcttgcctcatgtagtgacgacatgactttgaaaatatggagcatgaagcaagaggtgtgcattcatgatctgcaggcgcacaataaggagatttacaccatcaagtggtctcctaccggcccagcaacctctaatccgaactcaaacatcatgctcgccagtgcttcctttgatagcaccgtgcgcctgtgggacatcgagaggggcgtgtgcacacataccttgacgaagcatcaagagcccgtgtactctgtcgcattctcccccgacggcaaatacctggcatccggttctttcgataagtgcgtccacatctggaacactcagagtggcaatctggtacattcctataggggcactgggggaatcttcgaagtatgttggaatgctcgcggagacaaggtaggagcgtcagcatcggatggttctgtttgcgtattggatctgcgtaaatag

SEQ ID NO: 236103 - DNA, 432 bp, synthetic construct
  misc_feature 1..432: note = Description of Artificial Sequence: Synthetic coding sequence
  source 1..432: mol_type = other DNA
atggcggcagaagatgttgttgcaacaggcgcagacccttcggacttggaatctggcggactgctccacgaaatttttacctctcccctcaatttgctgctgctaggcctgtgcatcttcctactgtacaagatcgtgaggggtgaccagcctgcagcctccggcgactccgatgatgatgaaccaccacctctgcccaggctcaagcgacgtgattttacccctgctgaactccgaagatttgacggagtgcaggaccctcgtatattaatggcaattaatggcaaggtgttcgatgtgacaaagggtcgaaagttctacggccctgtcaagtatcaccacgttggcaaattactcaaggagggcgaagaacccaccgtgtacagtgacgaagaggaacctaaagacgagtcagctagaaagaacgattag

SEQ ID NO: 236104 - DNA, 672 bp, synthetic construct
  misc_feature 1..672: note = Description of Artificial Sequence: Synthetic coding sequence
  source 1..672: mol_type = other DNA
atggcggctggagacggggacgtgaagctgggaactctgggctctggttccgagtcatcaaacgatggaggatccgagtcacctggtgacgccggagctgcggctgaggggggaggctgggctgccgctgccctagcccttcttaccggaggcggtgagatgctgctgaatgttgccctcgtggccctggttctgctgggagcatataggctctgggttcggtggggacgcagaggcctgggcgcaggcgctggcgctggggaagaaagccctgctactagcctgcctaggatgaagaaacgggacttcagtctggagcagctgcggcagtatgacggatcacgcaatcccaggattctgctcgccgttaatggcaaggttttcgacgtcactaaagggagtaagttttacggccctgcagggccttacgggatctttgccggacgagatgcaagccggggattggccactttctgccttgacaaagacgctcttagagacgagtatgacgacctgtcagacctgaatgctgtccagatggagagcgttcgggagtgggagatgcagtttaaggaaaagtatgactacgtgggccgactgctgaagcccggtgaagaaccttccgagtacacagatgaggaagacaccaaagatcataacaaacaggactag

SEQ ID NO: 236105 - DNA, 402 bp, synthetic construct
  misc_feature 1..402: note = Description of Artificial Sequence: Synthetic coding sequence
  source 1..402: mol_type = other DNA
atggccgctggcgacggggacgtcaagctgggcactctgggcagtggcagcgagtctagtaatgacggcggatcagagtcccccggagacgcaggtgccgcagcggaaggcggtggatgggcggctgctgcactggctcttctgaccggtggaggcgagatgctgcttaatgttgccttggttgccctggtgctgctgggtgcttatagactttgggtgcggtgggggagacgcggactgggggctggggcaggtgccggtctccagttaggagccgctgcacctgttcgtcgacttccccagcccgctcaccccgctaggggccagtgggaatccctgcgacgggatcagcggcagcaggtgctgcgccctggagggagtatatggaacatttgctggtag

SEQ ID NO: 236106 - DNA, 744 bp, synthetic construct
  misc_feature 1..744: note = Description of Artificial Sequence: Synthetic coding sequence
  source 1..744: mol_type = other DNA
atgggaggagcagggcgaggggtgggcgaaggacgtgggagagggggaggtggcagaaggtggcgagccgtcatggcagctggggacggtgacgtcaagctgggcaccctggggagtgggtccgagagctctaacgacggcggtagcgagagtcctggcgacgctggagcggctgccgagggcggaggctgggcggctgcagccctcgctttattgacaggcggaggggagatgctgctcaacgtggctctggtggcactagtgttactaggggcttacagactctgggtgagatggggcaggcgcggtttaggagccggtgcgggtgctggtgaggagagtcccgctactagtttgcctcggatgaaaaagcgcgatttcagcttagaacagcttaggcagtacgatggatcacgcaatcctagaatcctgttagcggtgaacggcaaggtatttgatgtcaccaagggatctaagttctacggcccagcaggaccctacggcatctttgccggacgggacgcctcaagaggactcgcgaccttttgtctggacaaagacgcactgagggatgaatatgacgacctgagtgatttaaacgcagtccaaatggaatccgtgagggagtgggagatgcagtttaaagagaagtatgactacgtcgggaggctgctgaagcctggtgaagaaccttcagaatacaccgacgaggaagatacgaaggaccacaacaagcaggattag

SEQ ID NO: 236107 - DNA, 1041 bp, synthetic construct
  misc_feature 1..1041: note = Description of Artificial Sequence: Synthetic coding sequence
  source 1..1041: mol_type = other DNA
atggccatggcccagaagctctctcaccttcttccctcgctgcgccaggtcatccaagagcctcaactgtcactacagccggagccggtctttaccgtggaccgagctgaggtcccaccgcttttttggaaaccttatatttatgcaggttacagaccgctgcaccagacatggcgattctacttccggactctctttcagcaacacaatgaagccgtgaatgtttggacgcatctgctcgccgcacttgtgcttctactgcgcctggccctgtttgtcgagacagtcgatttttggggagacccccacgctctgcccctgtttataatagttcttgcttcttttacctacctgtctttcagcgccctcgcccacctactgcaagcgaagagcgaattctggcattattcttttttcttcctcgactatgtcggcgtggcagtgtaccagttcggttccgccctggcacacttttactacgccattgagcctgcctggcatgcccaggtacaagcagtctttctccctatggccgctttcttggcttggctttcctgcatcggatcttgttacaacaagtatattcagaaaccaggcctgcttggtagaacatgtcaagaagtgccatctgtgttggcctacgccttggacattagtccggtggtccacaggatctttgtgtcatctgatcctaccaccgacgaccctgctctgttgtaccacaagtgtcaggtcgtgttctttcttttggctgcagccttctttagcacttttatgcctgagcggtggttccccggttcttgtcacgtgtttggccaagggcaccagctctttcacatcttcttagtgctctgcacactcgctcagcttgaagctgtggcactagactatgaagctcggagacctatatacgagcccctccatacacattggcctcataatttttcagggctgttccttctgactgttggctcatcaattctgaccgctttcttgctgagccaactggtgcagcggaagttggaccagaaaacaaagtag

SEQ ID NO: 236108 - DNA, 867 bp, synthetic construct
  misc_feature 1..867: note = Description of Artificial Sequence: Synthetic coding sequence
  source 1..867: mol_type = other DNA
atgcagatcccccaagcaccatggccagtcgtctgggccgtattacagctgggctggcgaccaggatggtttttggactctcctgacaggccttggaaccctcctacattctctcccgctttgctcgtggttactgaaggggataacgccacgtttacatgtagcttcagcaacacatccgagagttttgtcttgaattggtaccggatgtcacccagcaaccaaacagacaaactcgcggcttttcctgaagaccggtcgcagccaggacaggactgcagatttcgagtgacacaactgcccaacgggcgagacttccacatgagtgtggtgagagctcggagaaacgactctggcacatacctgtgtggagccatcagcctggcgccaaaggcccagatcaaagagtccctgcgggctgaactgcgtgttaccgagcgcagggcagaggtcccaaccgcccatccatctccaagcccccgaccagctggacaatttcagactctggtggtgggagtagtcggcggacttctggggtctctggtcctgttggtgtgggtgctggccgtaatatgcagcagggccgctaggggcacaattggggcaagacgtaccggccagccgcttaaagaggatccttcagcagtacctgtatttagcgtcgactacggcgaacttgacttccagtggcgagaaaagactcccgaacctcctgtgccttgtgtgcctgaacagaccgagtacgccaccattgtctttcccagcggcatgggaaccagcagccccgctcgacgcggtagtgctgacgggcctcgctccgcgcagccgcttaggcccgaagatggccattgctcctggccgctttag

SEQ ID NO: 236109 - DNA, 540 bp, synthetic construct
  misc_feature 1..540: note = Description of Artificial Sequence: Synthetic coding sequence
  source 1..540: mol_type = other DNA
atgcagatccctcaggcaccatggccagtggtgtgggctgtcttgcagttgggctggagaccgggatggttcctagattcacctgatagaccttggaatccacccaccttctcccctgcgttgctcgtcgtgactgaaggtgataatgcaacttttacgtgctccttctctaacacctccgagtcgtttgtcttaaactggtaccgcatgtccccatcaaatcagactgataagctggctgcattccccgaggaccgatctcaaccgggtcaggactgtaggtttcgtgtgacccagcttcctaacgggagagacttccacatgtccgtagtaagagcaagaaggaacgattccggcacctatctgtgtggagctatcagtctggcaccgaaagcccaaatcaaggaatcacttagagcggagttgcgagtgacagggactatcggggcaagacgcaccggacaaccactaaaggaggacccatctgccgtccctgtgttttcagtggactacggggaactggattttcagtggcgatag

SEQ ID NO: 236110 - DNA, 639 bp, synthetic construct
  misc_feature 1..639: note = Description of Artificial Sequence: Synthetic coding sequence
  source 1..639: mol_type = other DNA
atgcggatgaccatggaggagatgaagaatgaggccgagaccacatccatggttagcatgccgctatacgcggtgatgtatcccgttttcaacgagttggagcgcgtgaatctttcagccgcacaaactttgcgcgctgctttcatcaaggcagagaaagagaatcccggtctgacccaggatatcataatgaaaatcctggaaaaaaagagcgtggaagtgaactttaccgaatcacttctgcggatggccgcagatgacgtcgaggagtacatgattgagagaccagagcctgagtttcaggacctgaacgaaaaagcccgtgctctgaagcagattctttcaaaaatacccgacgagattaacgacagagtacgattccttcaaaccattaaggacatcgcgagtgctatcaaggagttgcttgacaccgtaaataatgttttcaagaaataccagtaccagaataggcgcgctttggagcatcagaagaaagaatttgtgaagtattcgaagagcttttcagataccttgaaaacttatttcaaagatggaaaggcaattaatgtctttgtgtcagccaatagactcattcatcaaacaaatctgattctgcagacgtttaaaactgtagcctag

SEQ ID NO: 236111 - DNA, 639 bp, synthetic construct
  misc_feature 1..639: note = Description of Artificial Sequence: Synthetic coding sequence
  source 1..639: mol_type = other DNA
atgcgaatgactatggaggaaatgaaaaatgaggctgagactacatccatggtgtctatgccactttacgccgttatgtaccccgtgtttaacgaactggagagagtgaacctgtccgcagcccagaccctccgtgccgcattcatcaaggccgaaaaggagaacccaggccttacacaggatattatcatgaagattctggaaaagaagagtgtcgaagtcaacttcacggagtcactccttaggatggccgcagatgacgtggaagaatacatgatcgagcgccctgagcctgaattccaggatttaaatgagaaagcgcgagctctgaaacagatcctgtctaaaattccagacgagatcaatgatagggtgcgctttctgcagactatcaaagacatagcctccgcaatcaaggaactcctcgatacggtgaataacgtgttcaagaaataccagtaccaaaacagaagagcactcgagcatcagaagaaagagtttgtcaagtattccaaaagtttttccgacaccttaaagacctacttcaaagatgggaaagccattaacgtgtttgtgtccgcgaacagactcattcaccagacaaatctcatacttcagaccttcaagaccgtggcttag

SEQ ID NO: 236112 - DNA, 441 bp, synthetic construct
  misc_feature 1..441: note = Description of Artificial Sequence: Synthetic coding sequence
  source 1..441: mol_type = other DNA
atgcggatgacgatggaggagatgaaaaatgaagccgagactaccagtatggtctccatgcctctgtacgccgtaatgtatccagtatttaatgaattagagcgggtcaacctttccgccgcacaaacactcagagccgctttcatcaaggctgaaaaggagaaccccggactgacacaggacataataatgaaaattttggaaaaaaagagtgtggaggttaatttcaccgaatccctccttcggatggctgcagatgacgtggaagagtatatgatcgagaggcctgaacccgagtttcaagatctcaatgagaaggcacgcgctttaaagcagatactaagtaagattcccgatgagataaacgacagagtgagattccttcagaccattaaggatattgcgtcagcaattaaggaactgctcgacacagtgaattag

SEQ ID NO: 236113 - DNA, 240 bp, synthetic construct
  misc_feature 1..240: note = Description of Artificial Sequence: Synthetic coding sequence
  source 1..240: mol_type = other DNA
atgcgtatgacaatggaggaaatgaagaacgaggccgagactacctctatggtgagcatgccattatacgccgtgatgtaccctgtcttcaacgaacttgaacgcgttaacctgtccgctgcccaaacgctgcgagccgcatttataaaggccgagaaggagaatcctggcttgacacaggatattatcatgaaaatactggagaagaagtccgtggaggttaattttacagaatcatag

SEQ ID NO: 236114 - DNA, 639 bp, synthetic construct
  misc_feature 1..639: note = Description of Artificial Sequence: Synthetic coding sequence
  source 1..639: mol_type = other DNA
atgaggatgacaatggaggagatgaagaacgaggctgagactacttcgatggtctctatgcccctctacgcagtgatgtacccggtgttcaatgagctggaaagggttaacttgagcgctgcacagaccttgagagctgcattcattaaagcagagaaggaaaacccaggtctcacccaggatatcataatgaagattctggagaagaagtctgtggaagttaacttcaccgaatcattattgagaatggctgcggatgatgtggaagagtatatgatcgaaagaccagaaccggagtttcaggacctaaatgagaaagcgagggccctaaaacagattctgagcaagattcccgacgagatcaacgacagggtgcgctttttgcagacaatcaaggatatcgcctcggccatcaaagaactgttagatacagtcaataatgtgttcaagaaatatcagtatcagaataggagagcattggagcatcagaagaaagaattcgttaaatatagcaaaagcttcagcgatacgttgaagacctactttaaagatgggaaggccattaatgttttcgttagtgccaacaggttgatccaccagaccaatctgattctgcaaacctttaagaccgtcgcctag

SEQ ID NO: 236115 - DNA, 639 bp, synthetic construct
  misc_feature 1..639: note = Description of Artificial Sequence: Synthetic coding sequence
  source 1..639: mol_type = other DNA
atgaggatgactatggaagagatgaagaacgaggcagagacaacgagtatggtgtctatgcccctgtacgctgtcatgtatccagtatttaatgaacttgagcgcgtgaatctgtcagccgctcagactctgagagccgctttcattaaagcagaaaaggaaaatcccggtttgactcaagacatcattatgaaaatccttgagaaaaaaagcgtggaggtcaactttactgagtccttactgcgcatggcagccgacgacgtcgaggaatacatgattgagcgaccggaaccggagttccaagaccttaacgagaaggccagggccctgaaacagatcctgtccaagatcccagatgagattaatgatagggtgagatttctgcaaacaatcaaggatatcgcttctgccattaaggaactcctcgatactgtcaacaacgtattcaagaagtatcagtaccagaaccgtcgggcactcgaacaccagaaaaaggagttcgtgaagtactctaagagcttctccgataccctgaagacatacttcaaagacggcaaggctataaacgtcttcgtgagcgcgaacaggctgatccaccagaccaacttaatcctgcagaccttcaagactgtggcctag

SEQ ID NO: 236116 - DNA, 609 bp, synthetic construct
  misc_feature 1..609: note = Description of Artificial Sequence: Synthetic coding sequence
  source 1..609: mol_type = other DNA
atgcggatgacaatggaggagatgaaaaacgaagctgaaacaacctccatggtaagtatgcctctctacgcagtgatgtaccccgtgttcaacgagcttgaacgtgtgaacttaagcgccgctcagaccctccgtgccgcatttataaaagccgagaaagaaaaccccggtctgacacaggatatcatcatgaagattctggagaaaaaatccgtggaagtgaatttcaccgaaagtcttttgcgtatggcagctgatgacgtggaggagtatatgatcgaaaggcctgagccagagtttcaggacctgaacgaaaaggccagggcccttaagcagatcctttccaagatccctgacgagatcaacgacagagtaaggtttttgcagacgattaaggacatcgcatctgcgattaaggagctcttggatactgtaaacaacgtgttcaaaaagtaccagtatcagaaccgccgagccctcgaacatcagaaaaaggaattcgtcaaatattcaaagagcttttcagacacattaaaaacttattttaaagatggtaaagcaattaacgtgttcgtaagcgccaacagactgatccaccaaactaattag

SEQ ID NO: 236117 - DNA, 561 bp, synthetic construct
  misc_feature 1..561: note = Description of Artificial Sequence: Synthetic coding sequence
  source 1..561: mol_type = other DNA
atgcggatgacaatggaggagatgaaaaacgaggccgaaaccacctcgatggtctccatgcccctgtacgctgttatgtaccccgtgtttaacgaactggagagagtcaacctgagcgccgctcagacccttcgcgctgccttcattaaggcggagaaggaaaatcctggcctcacgcaagacatcatcatgaaaattctggaaaaaaagtctgtcgaagtgaactttaccgagtctttgttgcggatggccgcagatgacgtggaagagtacatgatcgagagaccagaaccagagtttcaggacctgaatgaaaaagcccgtgcattaaaacagatcctatccaagatcccagatgaaattaatgacagggtgaggttcctgcagactatcaaggacatcgccagcgcaattaaagaactgctcgataccgtcaacaatgtgtttaagaagtaccagtaccaaaaccggagggctcttgagcatcaaaagaaggagtttgttaaatatagtaagtcattctctgacactctgaaaacctattttaaggacggaaagtag

SEQ ID NO: 236118 - DNA, 405 bp, synthetic construct
  misc_feature 1..405: note = Description of Artificial Sequence: Synthetic coding sequence
  source 1..405: mol_type = other DNA
atgaggatgactatggaggaaatgaaaaatgaagcagagaccacgagcatggttagtatgccgctctatgctgtgatgtaccccgtgttcaacgaactggaacgggtcaatctttccgctgcgcagacgctgcgcgcagccttcataaaagccgagaaagagaatcctgggctcactcaggacatcatcatgaaaattttggaaaagaaatcagtggaggttaactttacagagtctctgctcaggatggccgctgacgacgtcgaggagtatatgatagaacgacctgagccggagtttcaagatctgaatgaaaaggccagagctctgaagcagatcctcagcaagattccagacgaaatcaatgaccgggtgaggttcctgcagacaatcaaggatatttag

SEQ ID NO: 236119 - DNA, 639 bp, synthetic construct
  misc_feature 1..639: note = Description of Artificial Sequence: Synthetic coding sequence
  source 1..639: mol_type = other DNA
atgcggatgaccatggaggagatgaagaacgaagctgagacaactagcatggtttctatgccactgtatgcagtgatgtaccccgtcttcaatgagctggaacgggtgaatctgtctgccgcacagaccctgcgagcagcttttataaaggcagagaaagagaaccctggtctcacacaggatattataatgaagatcctcgagaaaaaatcagtggaggtgaacttcacagagagcttacttcggatggctgctgatgacgtcgaagagtacatgatcgaacgacctgaaccagaatttcaagacctgaatgaaaaagcgagagccctgaagcaaatactttccaagataccagacgaaataaatgatagagtgcgctttctccaaacaatcaaagacatcgcgagcgcaataaaggaacttctggacactgtgaataatgttttcaaaaagtaccagtatcagaatcgcagggcgctggaacaccagaagaaggagtttgtgaaatattccaaatcattctccgacacactgaagacctactttaaggatggtaaggctattaacgtgtttgtgagtgcgaacaggctgatccaccagaccaaccttatcctccagacctttaagactgtcgcttag

SEQ ID NO: 236120 - DNA, 5615 bp, synthetic construct
  misc_feature 1..5615: note = Description of Artificial Sequence: Synthetic coding sequence
  source 1..5615: mol_type = other DNA
atggccaacctggaggagtcttttcctagaggcggaacccgaaaaatccataaaccagagaaagcttttcagcagagcgtggaacaggataacttattcgatatctctaccgaggagggtagtacaaagcgcaagaagtctcagaagggtcctgccaaaactaagaaactgaaaatagagaaaagggagtcgagcaaaagtgcccgagaaaaatttgagattctcagcgtggagtcattgtgtgagggaatgcggatccttgggtgtgtcaaggaagtcaacgagctggagttggtgatatccttgccgaacggactgcagggttttgtgcaggtcacagagatttgtgacgcctacacaaagaagctgaatgagcaggtgacgcaggagcaacccttgaaggacctgctccacctaccagaactgttctctccgggaatgcttgttcggtgtgtagtgtcatcactaggcatcacggataggggcaagaagagcgtaaaactgagccttaaccctaaaaacgtcaacagagtgctttccgctgaagcccttaagcctggtatgctgctcaccggaactgtttcttctctggaagaccacggatatctggtggacattggagtagatggcaccagagcctttcttcctctgcttaaagctcaggaatacatcaggcagaagaacaaaggggcaaagctgaaagtaggccagtacttgaactgtattgttgagaaggtcaagggcaacgggggagtagtcagcttgagtgttggacacagtgaggtcagcaccgccatagctacagagcaacagtcctggaacctgaacaacctcctcccaggcttagtggtgaaggcacaggttcagaaagtcactccttttggcctgacacttaattttctaacattttttactggtgttgtggattttatgcacctggatccaaagaaggctgggacatacttctccaatcaggccgtgcgagcatgtatcctttgcgttcacccacgcactcgtgttgtccacctgtccctgcgccctatttttttacagcctgggaggcctctgactcgattatcttgccaaaatctaggcgcagttttggatgacgttcctgttcagggcttcttcaagaaagccggtgccacctttcgcttaaaagacggggtgttggcttacgccagactgagccatcttagtgatagtaagaatgtgtttaatcccgaggccttcaagccaggaaatacacacaagtgcaggatcatcgactacagccagatggacgagctggctcttctcagcttacgcacctcaatcatcgaagcccagtatctgagataccacgatatcgaacctggagctgttgtgaaaggcaccgtgttgacaattaaatcttacggcatgctggttaaagtcggcgaacaaatgcgtggcctggtaccacccatgcatcttgcggatatactcatgaaaaaccccgagaaaaagtaccacatcggcgatgaggtgaaatgtagagtgttactgtgtgatcccgaggcaaagaagttgatgatgactcttaaaaaaaccttgattgagtctaaactcccggtcatcacttgctacgccgatgccaaacctggtctgcagacgcacgggtttataattcgggtgaaagactacggctgtatcgtcaagttttacaacaatgtccagggtctggtccccaaacacgaactctccacagagtacattcccgatccagagagagtgttctacactgggcaggtcgttaaggttgtagttctgaactgtgaaccctccaaagagagaatgctgctttcttttaaactgtcaagcgacccagaacctaaaaaggagcctgccggacatagccaaaaaaaagggaaagcgattaacattgggcagctggttgacgtgaaggtcctcgaaaagacaaaagatggattggaagtggcagtgttaccacataacatacgggcatttcttccaacctctcacctctccgatcatgtagccaacggacctctgctgcaccactggctccaggccggtgatatacttcaccgcgtcttgtgtcttagtcagtcggaaggtagagtcttgctgtgccggaagccagccctggtctccacagtcgagggaggccaagaccccaagaactttagcgaaatacaccccggaatgcttctcattgggttcgtcaagagcattaaggactatggcgtgttcatccagttcccttctggcctgtcaggcctcgctccaaaagccattatgagtgacaagtttgtgacaagtacctccgaccacttcgtcgaaggccagacagtcgccgcaaaggtaaccaacgtggacgaggagaaacagaggatgttactgtccctgcggttgtccgactgcggccttggagatctggcgattactagcctcttacttctcaaccagtgtctggaggagctgcagggcgtcaggtcactgatgtcgaaccgggatagtgtgctcattcagaccttggctgaaatgacacctggaatgttcctggatctcgttgtgcaggaggtgcttgaggatggatcggtcgttttttcaggcggacccgtgcctgaccttgttctgaaggcctcccgctaccacagagccggacaagaggtggagtccggacagaagaagaaagttgtgatcctcaatgtcgatctgctaaaactcgaagtgcacgtgtcactgcatcaggatctggtgaatagaaaggccagaaagctgaggaagggctctgaacatcaggctattgtgcagcatctggaaaagagcttcgccatagcaagcctggtagaaaccggccacctcgccgcattctccctgacaagccatctgaacgacacgttcagattcgactccgagaaactccaggtaggacagggcgtcagtctgacacttaagactacggagccaggggtgaccggccttctgttggcagtagaaggacctgctgccaaacggactatgaggccgacacagaaagactcagaaacagtagacgaggacgaggaggttgatccagctcttactgtgggtactatcaagaagcatacattgagcatcggagacatggtcacaggcaccgtcaagagtattaaacctacgcacgtggtggtcacactggaagatggtataatcggttgcattcatgctagccatattctggacgacgtcccagaggggacaagtcctactaccaagctcaaggtggggaagaccgtaacggccagggtaatcgggggacgcgacatgaagacattcaagtacctgcctatcagtcaccccaggtttgttcggacaattccagagctgtctgtgcgtccatctgaacttgaagacggacataccgccctcaatacccacagtgtgagtcccatggaaaagattaaacagtaccaagccggacagacagtgacttgtttcctcaaaaaatacaacgtggtgaagaagtggcttgaggtcgaaatcgcgcctgacatcaggggacgtattccgttactactgaccagcctgagctttaaagtgctgaagcaccccgataaaaaattcagggtcggacaggcattgagggcaacagtggtgggcccagattcttctaaaacattattatgtctgagcctgaccgggccacacaaactggaggagggtgaagttgcaatggggagagtggttaaggtgactcctaatgagggcctgacggtgtctttcccctttggcaagatcggaaccgtgtcaatttttcacatgtctgacagctatagcgaaacccctctggaggacttcgtccctcagaaagtcgtcagatgttacatcctcagcacggctgacaacgtgctgacactctctctccggagcagccgcacaaacccagagacaaaatctaaggtggaagatcctgagataaactctattcaggatatcaaagagggccagctgcttcggggatacgtgggctcgattcagccccatggagtcttttttcggctgggcccaagcgtggtagggctggcacggtacagtcatgtcagccagcactctccatccaagaaggccttgtataataaacacctgccagagggcaagctgctcaccgcacgggtgctccgactcaaccatcagaaaaatctggtcgagctgtcctttctccccggtgataccggaaagccagatgtcctttctgcgagcctcgagggtcagctgactaaacaggaagagaggaaaactgaggccgaggaacgggatcagaaaggggagaagaagaatcagaaacggaatgagaaaaagaaccaaaaaggacaggaagaggtggagatgccgagcaaggagaagcagcagccacagaagcctcaagcccagaagcgaggcggacgcgagtgtcgggaaagtgggtctgaacaggaaagggtgtccaagaaacctaagaaagccggtcttagtgaagaggacgactccctggtggacgtttactaccgcgaagggaaagaagaggccgaggagaccaatgtactcccaaaagagaagcagacaaaacctgccgaagcccctcgtctccaactctcctctgggtttgcctggaatgtcggactggattccctcacgccagccctgccaccattagctgagtcttcggacagcgaggaggatgaaaaacctcatcaggctacaataaagaaaagcaagaaagagcgcgagctggaaaaacagaaagcagaaaaggagttgtctagaatcgaagaagcactaatggaccccggtcggcagcccgagagcgccgacgatttcgacaggttagtcctttcatcaccaaactcctccatcttatggttgcaatacatggccttccatttacaggctaccgagatagagaaggctcgtgccgtggccgaacgggcattaaagaccatcagcttccgagaggaacaggaaaaactcaatgtctgggttgcactccttaacttggagaatatgtatggatcacaagagtcactcaccaaggtgtttgagcgggctgtgcagtacaacgaacccctgaaggtgtttttgcacttagccgacatttatgccaagtcagaaaaattccaggaggcaggcgagctctataaccgaatgctgaaaagatttcgacaggagaaggccgtgtggattaaatacggcgctttcctgctcaggagaagtcaggcagccgcttcacaccgggtcctgcagcgagcccttgagtgtctgccctcaaaggagcatgtggacgtgatagccaagttcgcgcagctggaattccagctaggcgacgccgagagagcaaaagccatcttcgagaacacattgagcacttatccgaaacgaacggacgtgtggtccgtgtatatcgatatgaccatcaagcatggcagtcagaaagatgtgcgcgacatcttcgagagagttatccatctcagcctagcaccaaagaggatgaagttcttttttaagaggtacttggactacgagaaacaacatggcacagagaaggacgtacaggctgtgaaggcaaaggcattagaatatgtcgaggccaaatcctcagtgcttgaggacta

SEQ ID NO: 236121 - DNA, 3705 bp, synthetic construct
  misc_feature 1..3705: note = Description of Artificial Sequence: Synthetic coding sequence
  source 1..3705: mol_type = other DNA
atggcaaatcttgaggaatcgttccctagagggggtacgaggaaaattcataaacctgaaaaggcctttcagcagtctgttgagcaggataacctgtttgacatctccaccgaggaggggtcaactaagaggaaaaagagccagaaaggccctgccaaaacaaagaaactgaaaatagagaagagagaaagctccaagagcgcaagggaaaagttcgaaatccttagcgtcgagtctctgtgtgagggcatgcgtatcctcggctgtgtcaaggaggtgaatgagttggaactagtcatctccctccctaacggtctgcaaggctttgtccaggtgacggagatctgcgatgcgtacaccaagaaacttaatgaacaggtgacacaggagcaaccactgaaagacctgttacacctgcctgaactgttctctcccggaatgcttgtacgctgtgtggttagcagtctggggataacagatcggggtaaaaaatcagtgaaactgtcccttaatccaaaaaacgtgaaccgcgtgctgtccgctgaggccctcaaacccggtatgctgcttaccggaacagtgtctagtttagaggaccatggctatttggtggacattggcgtcgacggtactcgcgcattcctgccactgctgaaagctcaggagtacattaggcagaagaacaaaggggcaaagctcaaagtggggcaatacctcaactgcattgtagaaaaagtaaaaggcaatgggggtgtggtgtctctgtccgttgggcatagcgaagttagtacggctatcgccacagagcagcagtcctggaacctcaataatctgcttccaggactcgtggtgaaggcccaggtccagaaagtcactccattcggcttaaccctcaacttcctaaccttctttacaggagtagtagacttcatgcatcttgatcccaagaaagccggaacttacttctcaaatcaggctgtgagagcctgtattctctgcgtgcacccacgaacgagagttgtccacctgtccttaaggccaatttttctccagcccggaagacctctgacaagactgtcatgtcagaacctgggcgctgtgcttgatgacgttccagtacaaggcttctttaagaaggcaggggctacctttcgcttgaaggacggggttctggcatatgcaagactatcccacctttcagacagtaaaaatgtgttcaacccagaggcattcaagccaggcaacactcacaaatgtaggattatcgattattcgcaaatggatgagcttgcactactctccctgcgcacctccatcatcgaggcacaatacttgagataccatgatatcgaaccaggcgcagtggttaaagggaccgtgttaactataaagagctatggaatgctcgttaaggtgggcgaacaaatgcggggactggtcccccctatgcacctggccgatattctgatgaaaaacccagaaaagaaataccatattggcgacgaagtgaagtgtcgggtgctcctttgcgaccccgaggccaaaaaattaatgatgaccttaaaaaagacactgatcgagtctaagcttcctgtgatcacctgttacgctgacgctaagcccggattgcagactcatggcttcatcattcgagtgaaagactatggatgcatcgtgaaattctacaataacgttcaaggcttggtccccaaacacgagttgtctacagagtacatccctgatccggaacgcgtgttttacactggccaagtagtcaaagtggttgttctgaactgtgagccatccaaagagaggatgcttctctctttcaagttatcatccgaccctgaacccaagaaagaacctgcgggacatagccaaaagaaaggcaaagccattaacataggtcaactcgtcgatgtgaaagtgctcgagaagacaaaggacgggctggaggtggccgttctgccacacaacattcgggcatttctgcctacatcacacctttcagatcatgtggccaacggtcccctgctgcatcattggctacaggctggggacatcctccacagggtactctgcctatcacagtccgaaggcagagttctgttgtgccgtaaaccggcactggtgtcaaccgtggaaggcggtcaggaccccaagaacttctccgagatacatcctgggatgctgctgataggcttcgtaaaatccatcaaggattacggggtttttatacagtttccatcagggttatcaggactggcgccaaaagccatcatgtctgataagttcgttacatctacaagcgatcattttgtcgaggggcagaccgtagccgcaaaagtcacaaatgtggacgaggagaaacagcgcatgctacttagtctcaggctgtcagattgcggccttggggacctcgccataacttcacttctcctactgaaccagtgtctagaggaattgcagggcgttcgctcactgatgtccaacagggattctgtgcttatccagactctagccgagatgacccccggaatgtttctcgacctggtggtccaagaggtgcttgaggatggctcagtcgtgttttcaggcggaccagtcccagacttggtactgaaggccagcaggtatcaccgcgcaggacaggaagtagaaagtgggcagaaaaagaaggtcgtcatcttgaacgtcgatctgcttaaactagaagttcacgtatccctgcaccaagatctggtaaatagaaaagcacgaaagctgcgaaagggttcagagcaccaggcaatcgtccagcatttggagaagtcgtttgccattgcatctctggtcgaaacgggccacttagctgcattttcgctgacatctcaccttaacgacaccttcaggtttgattctgagaagctgcaggtaggacagggagtgtccttaactctcaaaactactgaacctggtgtgactggattgttgctggctgtggaagggcctgctgcaaagagaacaatgagacctacacaaaaggactcagaaaccgtggacgaagatgaggaggttgatcctgcgctgacagtgggaactataaagaagcacactctctcaattggcgacatggtgacaggcacagtgaagtccatcaaaccaacacacgtggtagtcactcttgaagacgggattattggttgcatccacgcaagccacattctcgatgacgtccccgaaggaacttcaccaaccactaaactgaaggtcggaaaaaccgtgaccgcaagggtaatcggagggcgagacatgaagaccttcaaatatctgcctatctcacacccaaggtttgtgcggaccattcccgagttgtcagtcaggccatcagagcttgaagatgggcatactgcactgaacacacacagcgtatccccaatggaaaagattaagcagtaccaggccggtctctcagaggaagacgattcactagtggacgtttattaccgcgagggcaaggaagaagctgaggagacgaacgtcttacccaaagagaaacagacaaaacccgctgaagcccctcgcttgcagctttcttccggcttcgcttggaatgtcggactcgactctctgactccagcgctgcccccactagccgaatcatctgactctgaggaggacgagaagcctcaccaggctactcagatcaaaaaaagcaaaaaatag

SEQ ID NO: 236122 - DNA, 936 bp, synthetic construct
  misc_feature 1..936: note = Description of Artificial Sequence: Synthetic coding sequence
  source 1..936: mol_type = other DNA
atggcggctgcgggagctcgtccggtagaactcggatttgccgaatccgcacccgcatggagattaagaagcgagcagtttccgagcaaggtctacgccccactgccaggacgcccagatgcctttcatcgctgtatctttctgttttgctgtagggagcaaccttgttgcgcaggcctgagagtctttcgaaatcagctaccaaggaagaatgatttttattcctatgagcctccgagtgagaatccaccccctgaaaccggggagagcgtttgtctccagcttaaaagcggagctcacctttgccgagtgtgtggatgcctcgggccaaaaacctgttctaggtgccacaaggcttactattgttctaaagagcaccagaccctggattggcggctgggccacaaacaggcctgcgctcagcctgaccacctggaccacatcataccagatcacaatttccttttccccgaatttgaaattgtgatcgagaccgaggacgagattatgcccgaggtcgtagagaaggaggactattccgagatcattggatctatgggggaagcgctcgaggaggaacttgatagcatggccaagcatgagtcccgggaagataagattttccagaagtttaaaacacagatcgctctagagcctgaacagatcctcaggtatggaaggggaatcgctccgatatggatctccggagaaaatatcccccaggagaaggatatccccgactgcccctgcggggcaaaaagaatccttgagtttcaagtaatgccccagttactgaattatctaaaggctgaccgcctggggaaatctatcgactgggggatactcgctgtcttcacttgcgcagagtcttgttccttgggaaccggatacaccgaagagttcgtctggaaacaggatgtcactgatactccatag

SEQ ID NO: 236123 - DNA, 687 bp, synthetic construct
  misc_feature 1..687: note = Description of Artificial Sequence: Synthetic coding sequence
  source 1..687: mol_type = other DNA
atggctgccgctggcgctcgcccagtggagctggggtttgctgaatctgcccctgcttggagactgagatccgagcagtttccatcaaaagttggaggacgccctgcctggttaggggctgccggattgccaggtccccaggcgctagcctgtgagctgtgcggaagacccttaagcttcctgctccaagtctacgcacctctgccagggagaccggatgcatttcacaggtgcatttttctcttctgctgtcgagaacagccctgctgtgcaggcttgcgcgtgtttcgaaatcagctgcccagaaagaacgacttctatagttacgaacccccttccgagaaccccccacctgagaccggcgagagcgtgtgcttgcagctcaaaagcggagcccatctttgtagggtctgcgggtgcctgggcccaaaaacatgttcacggtgccataaggcatattattgtagcaaggagcaccagaccctcgattggagactaggtcataagcaggcgtgtgctcaaccggatcacttggatcatatcatcccagatcataattttctgttcccagagttcgaaattgttattgaaactgaggatgagatcatgccagaggttgtggagaaggaagactatagtgaaattataggttccatgggcaaacagttccaggacttcatccactag

SEQ ID NO: 236124 - DNA, 1035 bp, synthetic construct
  misc_feature 1..1035: note = Description of Artificial Sequence: Synthetic coding sequence
  source 1..1035: mol_type = other DNA
atggccgctgctggcgcacgaccagtagaactgggattcgccgaatcggcgcctgcatggaggttgcggtccgaacaattcccatccaaagttggcggacgaccggcatggctgggggcagccggactcccgggtcctcaagctctggcttgtgaactttgcggtcggccactatctttcttgcttcaggtgtacgcgcctttgcctggcaggcccgacgcttttcatcgctgcattttcctgttttgctgccgtgagcagccttgttgtgctggccttagggtctttcgcaaccaactgcctagaaagaacgacttttactcctatgaaccccctagcgaaaacccaccaccagagaccggagaatccgtctgtctacagctgaagtcaggcgcacacttatgccgggtatgtggctgtctcggccctaagacctgcagcaggtgccacaaggcctactactgctcaaaagaacaccagactttagactggagactgggccacaagcaggcctgcgcccagcccgaccacctggatcacattatccccgatcataatttcctgtttccggagttcgaaattgtcattgagactgaagacgagataatgccagaggtcgtggaaaaggaagactacagcgagataattggatctatgggcgaagccctggaagaggagctcgattccatggctaaacacgagtccagggaagataaaattttccagaaattcaagactcaaattgcgctcgaaccagagcaaattttgagatacgggaggggcatagctcccatctggattagtggcgagaatattccccaggaaaaggacatccccgattgcccttgcggcgctaaacgtatacttgaattccaagtcatgcctcaactcttaaattacttgaaggctgaccgcttgggcaagtctatcgattgggggattctggccgtgttcacatgcgccgaatcctgtagtctgggaactggctacacagaagagtttgtttggaagcaggacgtgacagatacaccgtag

SEQ ID NO: 236125 - DNA, 588 bp, synthetic construct
  misc_feature 1..588: note = Description of Artificial Sequence: Synthetic coding sequence
  source 1..588: mol_type = other DNA
atggccgctgccggtgcacgccctgtggagctggggtttgcagaatcggccccagcttggaggctgcgctctgaacagttcccgtctaaagtttatgccccactgccaggtaggccagatgcatttcacaggtgtatctttttgttctgctgtagagagcaaccttgctgcgccggactgagagttttccgcaatcaactgcccagaaagaacgacttttactcgtacgagcccccaagtgagaatccaccacccgagacaggagagagtgtttgtttacagttgaagagtggagctcacctgtgccgggtgtgcggatgtttggggcctaagacatgttcgcggtgtcataaggcctactattgttctaaagagcatcaaaccctggattggagactggggcacaagcaggcctgcgcacagcctgatcacctcgatcatatcatcccagaccataactttctgttcccagaattcgaaatcgtgatcgaaactgaggacgagatcatgcctgaggtggtggagaaagaagattattccgaaatcattggctccatggggaagcagttccaggacttcattcattag

SEQ ID NO: 236126 - DNA, 567 bp, synthetic construct
  misc_feature 1..567: note = Description of Artificial Sequence: Synthetic coding sequence
  source 1..567: mol_type = other DNA
atggccgcagcaggagctcgccctgtggagctcggattcgccgagagtgccccagcttggcggctgagatccgagcagttccccagtaaagtgtatgcgcctctgcccggacgccctgatgcctttcacaggtgcattttcctcttctgctgtcgcgaacaaccctgttgcgccggattacgggttttcaggaaccagctgccacgaaagaatgacttttactcctatgaaccaccatccgaaaacccgcctccggagactggagagtccgtttgcctgcagcttaaatccggggctcacctgtgcagggtgtgtgggtgtctggggcctaaaacttgctctaggtgtcataaggcttactattgtagtaaggagcaccagacgctcgactggagattggggcacaaacaggcctgcgctcaaccagatcacctcgaccatatcattcccgaccacaacttcctcttccctgagttcgagatcgtgatcgagactgaggatgaaatcatgcccgaagtggtcgaaaaagaggactactcggagataatcggatctatggggatttag

SEQ ID NO: 236127 - DNA, 2607 bp, synthetic construct
  misc_feature 1..2607: note = Description of Artificial Sequence: Synthetic coding sequence
  source 1..2607: mol_type = other DNA
atggccaccttcatttcagtgcagcttaaaaaaacgtccgaagtcgatttagcgaaaccactggttaaatttattcagcagacttacccatcagggggagaggagcaggcccagtattgtcgcgcagcagaggaactgtctaaacttcgtagggcagctgtcggcaggcccctggataaacacgagggcgcactcgaaactttgctgcgttattatgaccaaatctgcagtatcgagcccaagtttcctttcagcgagaaccagatctgtttaacatttacgtggaaggatgccttcgataaaggttccttgtttggagggagcgtcaaactggctctggcaagcttaggctatgagaaatcctgcgtgttgtttaactgcgctgctctggccagtcagatagccgctgagcagaatctcgataatgacgagggactgaagattgcagccaagcattaccaattcgcaagcggcgctttcctgcacattaaagaaactgtgctttcggccctttctcgggaaccaactgtggatattagtcccgacactgttggcacactttcactcattatgctggcccaggctcaggaggtgttcttcctgaaagccacacgcgataaaatgaaggacgcaataatagccaaactggccaatcaggctgccgactattttggggatgcgttcaagcaatgccagtataaggacacactccctaaggaggtgttccccgtcctcgcggctaagcactgtataatgcaggctaacgccgagtaccaccagtcgattctggcaaagcagcagaagaaatttggggaggagatcgctaggcttcaacacgcagccgagctgatcaaaaccgttgccagccggtacgatgagtatgtgaacgtgaaagatttttctgacaagataaatagagccctagcggctgctaagaaggataatgattttatataccacgacagagtgccagatctgaaagacctcgatccgataggcaaagccacactggtcaagagcacaccagtgaacgtgcctattagccagaaatttaccgacctgtttgagaaaatggttcctgtgtctgtgcaacagtctctcgcagcgtacaaccagcgtaaggctgatctagtgaatcggagcatcgctcagatgagggaggccacgaccttggccaatggcgtgctcgcgagcctgaacctgccagccgcaatcgaggacgtgagtggcgacaccgttccccaaagtattctgaccaagtccagaagcgttattgagcagggaggaattcagaccgtcgaccagcttataaaggaacttcctgagctgcttcagcgcaatcgagaaatacttgatgaatctttgaggctgctggatgaagaagaagctacggacaatgatttgcgcgcaaaatttaaggaaaggtggcagagaacaccatccaacgaattgtacaagccattgagagctgaaggaaccaatttccgcaccgttctggacaaagcagtccaagctgacggtcaggttaaggaatgctaccaatctcaccgcgatactattgtgctcctatgcaaaccagagcccgagctcaacgctgccattccctctgccaaccctgccaagactatgcaaggctctgaggtggtaaatgtgctgaaatcactgctttcgaatctcgacgaagtgaagaaagagcgtgagggtctggagaatgatctcaagagcgtaaacttcgatatgactagcaaatttctgactgcactcgcacaggatggcgtaattaatgaggaggctctgtccgtgacagaactcgaccgagtctatggtggattgaccacgaaggtgcaggaatctctcaaaaaacaggaagggttgttaaagaatattcaggtctcacatcaggaattctcgaaaatgaaacagagcaataacgaagcgaatctgcgcgaggaggtactcaagaatttggcaacagcgtacgacaattttgtcgaacttgtggcaaatctcaaggagggcacaaagttttataatgaattaaccgagatattagttaggttccagaataaatgtagtgatatagtgtttgccagaaagactgagcgggatgagcttctgaaagatctgcagcagtcgatcgcacgcgagccaagtgctccgtcgattcccacccccgcttatcagtcctcaccagcaggaggccacgcaccaactcccccaactccggcacctcgtactatgccaccaaccaaacctcaacccccagctagaccccctccgcctgtgttgcccgcaaaccgcgctccgtcagccaccgctccttcaccggtgggggctggcacagcagcgccagcgcctagccagacaccaggcagcgccccaccaccacaggcgcaggggcctccttacccaacataccccggatatcccggatattgtcagatgccaatgcccatgggatataatccctacgcttacgggcagtacaacatgccgtatccccctgtttatcaccagagccctgggcaagctccataccccggtccccagcagccttcatacccttttccccagcctccacagcagtcctactatccacagcagtag

SEQ ID NO: 236128 - DNA, 2622 bp, synthetic construct
  misc_feature 1..2622: note = Description of Artificial Sequence: Synthetic coding sequence
  source 1..2622: mol_type = other DNA
atggcaacttttatctctgtacagctgaagaagacatcagaagtcgacctcgcaaagccactggtgaagttcattcagcagacctatccctccgggggagaggagcaagctcagtattgtagggccgcagaagagctgagcaaactccggcgtgcagccgtgggcagaccactcgacaagcatgaaggtgcactggaaactctcctccgatactatgaccagatctgctcgatcgagccgaaatttcccttcagtgaaaaccagatctgtctcacttttacctggaaggacgccttcgataaagggagtttatttggcggatcggtcaagttagccctcgcaagtcttgggtacgagaagtcttgcgtgttgttcaattgcgcagccctggccagccagatcgccgcagaacaaaatcttgacaatgacgagggcctgaagatcgccgcaaagcactaccagtttgcatctggagccttcctacacattaaggaaaccgtcctctcagccctgtcaagagagccgacagtcgatatatccccagatacggtgggtaccctaagcctgattatgcttgctcaagctcaggaggtgttttttctcaaagctaccagagataaaatgaaggatgcgattatcgctaagctggccaatcaggctgccgattattttggggatgcgtttaagcagtgtcaatataaagacaccctcccgaaatacttctattttcaggaagtgtttcctgtgctggccgcaaaacactgcatcatgcaggcaaacgctgagtaccaccagtctattcttgccaagcaacagaaaaagttcggcgaggaaattgctcgcctgcagcacgcggcagagctcattaagaccgtcgcaagccgatacgacgagtatgtgaacgtcaaagatttttcagacaagatcaatcgcgcattggcagccgcaaagaaggacaatgacttcatttaccatgaccgggttccagatttgaaggatctcgatccaatcggtaaagcaacgctcgtcaaatctacccctgtcaatgttcccattagccagaagttcaccgatctgtttgaaaagatggtcccagtgagcgtacaacagagccttgccgcatataaccagaggaaggccgacctggtcaaccggagcattgcacagatgagagaggccactacactggcgaatggtgtactcgcatctctcaacttgcctgctgcgattgaggacgtttctggagataccgtgccacagtcaatactgacaaagagcaggagcgtcatcgaacagggagggatacagaccgttgaccaacttatcaaagagcttcctgaattgctccaacgcaatagggagatccttgatgaatccctgagattgctggacgaggaggaggcaactgataacgacctgcgagccaagtttaaggagagatggcaacgcaccccgagcaacgaactgtacaagccgctccgcgcagagggtaccaatttccggactgtgctagacaaggccgtacaggccgatggacaggtgaaggagtgttaccagtcccatcgcgataccatcgtgttgctctgcaaacctgagcctgagttaaatgccgctatccctagcgcaaatccagccaagaccatgcagggatctgaggtcgtcaacgtgctgaagtccctgctttccaacctggacgaagtgaagaaggaacgcgagggcctcgagaatgatctgaagtctgtgaatttcgatatgacgtcaaagttcctgacagccctggctcaggatggcgtcatcaacgaggaggcgctgtctgtcactgagctagacagagtgtacgggggtctgacaacaaaagtacaagaatcattaaagaagcaggaggggttgttgaagaatatccaggtttcacaccaagagtttagtaagatgaagcagagcaataatgaggctaatcttagggaggaggtcctcaaaaacttggccactgcttacgacaacttcgtcgagctggtcgccaatttaaaggaaggaactaaattctataacgaactgaccgagattctcgtccggttccagaataaatgttctgacattgtgttcgcacgcaaaacagaacgggacgaactgctgaaagaccttcagcaatccattgctcgggaaccctccgcgccatccatcccgactcccgcttaccaatcatcccctgcgggagggcatgcccctacccctccgacccccgctcccagaacgatgcctccaaccaaacctcagcctccagctagacctccaccccctgtcctgcccgctaatagagccccatcagcaacagcaccttccccagtgggcgcagggacagccgcacctgcaccatcacagacacctggctccgcccctccccctcaggcccagggacctccttatccaacatatccgggataccctggttattgtcaaatgcccatgccgatgggatacaacccatacgcctacggacaatacaatatgccttaccctccagtgtaccaccaaagccctgggcaagcgccttatcccggaccacagcaacccagttaccccttcccgcagccccctcagcagtcgtattacccacaacagtag

SEQ ID NO: 236129 - DNA, 1458 bp, synthetic construct
  misc_feature 1..1458: note = Description of Artificial Sequence: Synthetic coding sequence
  source 1..1458: mol_type = other DNA
atggccttacctcctttctttggacagggccgaccaggtccacccccaccacagcccccacctcccgctcccttcgggtgccctccaccacctctaccgtcccccgctttcccacctccgctaccgcaacggccaggcccatttccaggagctagtgcacccttcctccagccccctctggcactgcaaccacgcgcttctgcagaggcatctcgcggtgggggaggtgcaggcgctttctacccagtcccgcctccacctctgccgcctccccctcctcagtgtaggcctttccccggtaccgatgcaggcgaacggcctcgaccacccccacccggacccggacccccttggagcccgagatggcccgaggcccctcctcctcctgcggatgtcttaggcgacgctgctctacagcgcctgagagataggcagtggttggaggcggtgttcgggaccccgaggagagctggatgcccggtgccccaacggacccacgccggaccctccctgggtgaagtgcgggcaaggctgctgagggccttgcgactcgtgcgaagattgcgtggcctgtcccaagcgctccgcgaggctgaggccgatggcgcagcctgggtgctcttgtattcgcagaccgccccactgcgggcagaacttgccgaacgtctacagcctctgacacaggcagcctatgtcggagaagccagaagaagactcgaacgcgtcaggagaagacgcttgaggctcagagagcgtgctagggaacgcgaggcggagcgcgaggcagaggcagccagggctgtcgagcgggagcaggagattgatcggtggcgtgtgaaatgtgttcaggaggtggaagagaaaaaaagggagcaagagctcaaggccgcagccgacggcgtgctgtccgaggtgagaaagaagcaggccgacaccaagcgcatggtcgacattttaagggcactagaaaagttgcgtaagctacgaaaagaggctgctgctcgtaagggagtgtgtccacctgcaagcgccgacgagaccttcacgcatcacttacaacgactgcgcaaactcattaagaaacggtctgagttatacgaggctgaagaaagagctctgcgcgtgatgctcgaaggggagcaggaggaagaacggaaacgcgagctagagaaaaaacagagaaaagagaaagagaagattctcctgcagaaaagggagatcgagtcaaaacttttcggggaccccgatgaattcccattggcacacctgcttgagcccttcagacaatactacttgcaagcagagcatagcctgcctgccctgattcagatcagacatgattgggatcagtatctggtcccttccgatcaccctaaaggaaatttcgtgcctcaagggtgggtgttaccgcctttaccttctaacgacatttgggctactgccgtgaaactgcactag

SEQ ID NO: 236130 - DNA, 840 bp, synthetic construct
  misc_feature 1..840: note = Description of Artificial Sequence: Synthetic coding sequence
  source 1..840: mol_type = other DNA
ctgatgcggtctcattcggatagttgccacttcagcaaacatctgaggcgcgagcacggacctgctaccattctcagacccggtagccctaggccgccacctccgccaagcttctcactcagaaggttgagagagcgcgctagggagcgtgaggctgagagagaggctgaagcggcaagggccgtcgagcgcgaacaggaaatagatagatggagggtgaaatgcgtgcaggaggttgaagaaaagaagcgggagcaggagctgaaggccgcagcagacggcgtattgtcggaggtgcgcaagaagcaggccgacacaaagcggatggttgacattttgagggctctcgagaaactgcggaagctacggaaagaggccgcagctcgaaagggcgtctgtccacctgccagtgccgacgagactttcacacaccatcttcagcgcctcagaaaactgatcaagaaacgctcggagctctacgaggctgaagaaagagccctgagggtaatgttggaaggcgaacaggaagaggaaagaaagcgagagttggaaaagaagcaacgcaaggagaaggagaaaatcctccttcaaaaaagagagattgaatctaagctgttcggagatcctgacgagtttcctctggcccatttgctcgaaccctttagacagtactacctgcaggcagagcattctctgccagctctgattcagattcggcacgactgggatcaataccttgtcccctccgatcaccctaaagggaacttcgtgccacagggatgggtgctgccacccttgccatccaacgacatttgggcgaccgcagtaaaacttcactag

SEQ ID NO: 236131 - DNA, 813 bp, synthetic construct
  misc_feature 1..813: note = Description of Artificial Sequence: Synthetic coding sequence
  source 1..813: mol_type = other DNA
tcccactcagactcttgtcatttttctaaacatttaaggcgcgaacacggtcctgctacaatcctcagacccggatcccccagaaggaggcgtcttaggctgcgcgaacgcgcacgtgagcgagaggccgaaagggaagctgaggcagccagggcggtggagcgggaacaagaaattgatcggtggagagttaagtgcgttcaggaggtcgaggaaaagaagagagagcaggaacttaaggcggcagctgatggcgtcctctcagaggtgcgaaagaaacaggctgacaccaagagaatggtggacatcctgcgcgctctggaaaaacttagaaagttgcgcaaggaggctgcagccaggaagggagtgtgcccacctgcttccgccgatgagacgtttactcaccacttacaacgcttgagaaaactcattaagaagcggtctgaactctatgaggctgaggaaagagctctaagggtgatgttggagggcgaacaagaggaagagcgcaagcgagaacttgaaaagaagcagcgcaaggagaaggaaaagatactgctgcagaagagggaaatcgagagcaagcttttcggcgacccagacgaatttcctctggcgcacctgttggagccgtttaggcagtattatctgcaggcggagcattctctcccagcgctgatccagattcgacacgactgggatcaatacctcgtgccatcggaccacccaaaaggcaacttcgtcccgcagggttgggttctgcctcccctgccaagcaatgatatatgggctacggccgtgaagctccactag

SEQ ID NO: 236132 - DNA, 165 bp, synthetic construct
  misc_feature 1..165: note = Description of Artificial Sequence: Synthetic coding sequence
  source 1..165: mol_type = other DNA
atgtgtactaccctctttctgctctcaacactggcaatgctatggcggagaagatttgcaaacagggtgcagccagagcctagcgatgtagatggggcagcgagaggaagttccctggacgcagaccctcagagttccgggagagaaaaggaaccattgaagtag

SEQ ID NO: 236133 - DNA, 246 bp, synthetic construct
  misc_feature 1..246: note = Description of Artificial Sequence: Synthetic coding sequence
  source 1..246: mol_type = other DNA
atgactcgcacagagagccctgccacctggatgggtcaactgggggctgccgcttggatgcgcacacttagcccgcaggccgcacaggtgcttgtgcgaccgcttgcgcaagaagatgcagtcggggctgccgcagcagcaagaggtcggatgggcggttcctccacccgcgaagtgccaagggcacaccccgtgaccgggtgctctgcggagattatcaacaagaagtgtcaactggacctttag

SEQ ID NO: 236134 - DNA, 819 bp, synthetic construct
  misc_feature 1..819: note = Description of Artificial Sequence: Synthetic coding sequence
  source 1..819: mol_type = other DNA
atggctgctaaagtattcgagagtatcggcaagttcggtctggctctcgcagtagctgggggtgtggttaactctgcactttataacgtcgacgctgggcacagagccgtgatcttcgatcgcttcagaggagtgcaggacatcgtggtcggggagggcacccattttcttatcccctgggtgcaaaagcccattatattcgactgccgtagccggcctagaaacgtgccggtgattaccggatcaaaagatctgcagaatgttaacataacattgcgtatcttgttccggcctgtggccagccagctcccacgaattttcacgagcattggcgaggactacgacgaaagggtattgcccagtatcaccacagaaatcttgaaaagtgtagttgccagattcgacgcaggcgaactcattacccagcgggaactcgtctctcgccaggtgtctgatgacctcaccgaacgagctgccacatttggcctgattctggatgacgtgtcattgacccatctcacatttgggaaagagtttactgaagctgttgaagctaagcaggtggcgcaacaggaggcagagagagcaaggtttgtggttgaaaaagctgaacaacagaagaaagccgcaatcatttcagctgagggtgactctaaggctgctgaactgatcgctaattcgctcgccactgctggggacggcctgattgagctcaggaaattggaggctgcagaagacattgcatatcaactgagcaggtcaagaaacatcacctaccttcctgcaggtcagagcgtactgcttcagttgccccagtag

SEQ ID NO: 236135 - DNA, 741 bp, synthetic construct
  misc_feature 1..741: note = Description of Artificial Sequence: Synthetic coding sequence
  source 1..741: mol_type = other DNA
atggccgcaaaggttttcgaatccatcgggaaatttgggttagccctggctgtcgcaggtggcgtggtgaatagcgctctgtacaatgtggacgccggtcaccgcgctgtaatctttgaccggttccgaggagtccaggacattgtggtcggggagggtactcattttctgattccttgggttcaaaagcctattatcttcgattgccgatctcgtccaagaaacgtgcctgtcattactggcagcaaggatctgcaaaacgtgaatattaccctgcgcatcctgttccgacctgtggcttcacagttgccccgaatatttaccagcatcggcgaggactatgacgagagagttctaccctcaataactactgagattctcaaatccgtggttgccaggtttgatgcgggagaactcatcacccaacgggagctggtttcacggcaggtcagcgatgatttaactgaaagagccgctacattcggcctgatcctggacgatgtatcgctgacacaccttacctttggcaaggaattcacggaggccgtggaggcgaaacaagtggcacagcaggaggctgaacgggctcgttttgttgtcgagaaagccgaacagcaaaagaaagctgcaatcatctctgccgaaggagattcaaaggcagccgaactgatcgcaaactcacttgctacagccggtgatggactgatagagttaaggaagcttgaagccgcagaggactag

SEQ ID NO: 236136 - DNA, 375 bp, synthetic construct
  misc_feature 1..375: note = Description of Artificial Sequence: Synthetic coding sequence
  source 1..375: mol_type = other DNA
atggctgccaaagtcttcgagagcataggaaagtttggcctagctctggccgtcgcgggtggggtggtcaactccgctttatataacgtcgatgcaggccatcgggctgtgatttttgaccgcttcagaggtgtgcaggacatcgtggtgggcgagggcactcatttcctcatcccctgggttcagaaacctatcatcttcgactgtcgttctaggccgcgtaatgtgcccgtgataacaggtagcaaagatctgcagaatgtgaacattacactgaggattttattccgcccagtcgcctctcagctgcctaggatattcacctctatcggtgaagactacgatgaaagggtgctcccaagtataactacctag

SEQ ID NO: 236137 - DNA, 606 bp, synthetic construct
  misc_feature 1..606: note = Description of Artificial Sequence: Synthetic coding sequence
  source 1..606: mol_type = other DNA
atggccgctaaggtgttcgaaagcatcggcaagttcgggctcgcgcttgcagtagcaggaggggttgtgaattccgctctttataatgtggacgccggtcaccgggctgtgatctttgacagattccgaggggtccaggacatagttgtcggtgagggtactcactttcttattccgtgggtgcagaaaccaattatttttgattgtcgctccagacctaggaacgtccccgtcataactggatcaaaagacctccaaaacgtgaacattaccctaaggatcctgtttcgacccgtcgccagccagcttccacggatttttacaagcataggtgaagattatgatgagagggttctgccgtctatcaccaccgagattctgaagtctgtggttgctcgatttgatgccggagaattaatcacacagagagagctcgtgtcacgtcaagtttccgacgacctaacagagcgcgcagctactttcggcctcatcctagacgacgtgtcactaactcatctgaccttcggcaaagaattcacagaggcagtggaggcaaagcaggtggcccaacaggaagctgagcgggcaaggttcgtagtggaatag

SEQ ID NO: 236138 - DNA, 645 bp, synthetic construct
  misc_feature 1..645: note = Description of Artificial Sequence: Synthetic coding sequence
  source 1..645: mol_type = other DNA
atggctgccaaggtctttgagagtatcgggaaatttggtctggcactggccgtcgcgggaggtgtagtgaactccgctctttataacgtggatgctgggcatcgcgcagtcatttttgaccgtttcaggggcgttcaggatatagtcgtgggtgaagggacacactttctgatcccctgggttcagaagcctataatttttgactgtcggtcgcgaccgaggaatgtgccggtcatcacaggaagcaaggacctccaaaacgtgaacatcactctcaggatcctgtttcgccctgtggctagccagctgccacggattttcacaagcattggggaggattatgacgaaagagtgctgccatccatcacgaccgaaatcttgaagagtgtggtggctcgattcgacgccggagagttgataacacagagagagctagtttcacgtcaagttagcgacgacctgactgaacgagccgctaccttcggtctgatcttagatgacgtgagcttgacccatctaaccttcgggaaggaatttaccgaggctgtagaggctaagcaagttgcccagcaagaagccgaaagagcacgttttgtcgtcgagaaagcagagcaacagaaaaaggctgcaatcattagtgcctag

SEQ ID NO: 236139 - DNA, 468 bp, synthetic construct
  misc_feature 1..468: note = Description of Artificial Sequence: Synthetic coding sequence
  source 1..468: mol_type = other DNA
atggcagcgaaggtattcgaatcaataggcaagtttggtctggcattggcggtcgctggcggtgtggtaaacagtgccctgtataacgttgatgctggacaccgggcagtgatattcgatcgttttcggggtgtgcaggacatcgtagtaggtgagggcacccacttcctgatcccttgggttcaaaaacctataatcttcgactgtcgaagtaggccacgtaacgtccccgtgatcactggatcgaaagacctccagaacgtgaatatcaccctccgaatattatttcggccagtggcttctcagcttcctcgcatctttacaagcattggggaggactatgatgagagggtcctcccctctataactaccgagatattgaagtctgtggtcgcgagatttgacgcaggtgaactcattacatacctgccagctggtcagtctgtgttgctccagcttccccaatag

SEQ ID NO: 236140 - DNA, 615 bp, synthetic construct
  misc_feature 1..615: note = Description of Artificial Sequence: Synthetic coding sequence
  source 1..615: mol_type = other DNA
atggcagccaaagtgttcgaatccattggaaagttcggacttgctttggcagtagccggaggtgtggtgaacagtgcactctataacgtggatgccggacacagagcagtaatattcgatagattccgaggcgttcaagatatcgtggttggggaaggcactcactttctcattccctgggtgcaaaagcccatcatctttgactgcagaagccggccacgtaacgtcccggtcattacaggctctaaggatctacaaaacgttaacataacactgcggattctgttcaggcccgttgccagccaactcccgagaatcttcacctctattggtgaggactatgacgaaagagtgctgccgtctattaccaccgaaatcctgaaaagcgtggttgcacgctttgatgctggtgagcttattactcaacgggagctcgtcagtcgtcaggtgtccgacgacctgacagagcgggctgctaccttcgggttaatcctcgatgacgtctccttgacccatctcacttttggtaaagagtttaccgaagctgtcgaagcaaaacaggtcgcccagcaggaagctgagcgagctcggttcgtcgttgaaaaggtgtcttag

SEQ ID NO: 236141 - DNA, 900 bp, synthetic construct
  misc_feature 1..900: note = Description of Artificial Sequence: Synthetic coding sequence
  source 1..900: mol_type = other DNA
atggcccagaacttaaaagacctggccggacggttaccagcgggtccaagggggatgggcacggccttgaagctgcttctgggtgctggagccgtagcctacggagtgagggagagtgttttcacggtagagggtgggcatagggccatcttcttcaaccgcatcggcggtgtccagcaagataccattctcgcagaggggttgcacttccgaattccctggtttcagtacccaatcatttacgatatccgggcaaggccaagaaagatcagctccccaaccggatcgaaggatcttcagatggtcaacattagtctgagagtcttgtctaggcccaacgcacaggagctacccagtatgtaccagcgactgggtctcgactacgaggagagggtcctgccttctatcgtgaacgaggtattgaagtccgtggtcgccaaattcaacgccagtcagctgatcacgcagagagcacaggttagtctcctcatcagaagggaactaactgagagggcaaaggacttcagcctcatactcgacgacgtggctatcacagagctgtcgttcagccgcgaatacaccgcggcagtggaagcaaagcaggtcgcccaacaggaggcccaacgtgcccagtttttggtggagaaggccaagcaagagcagcgtcaaaagatcgtccaagccgaaggcgaggctgaggcagcaaagatgctcggggaggctttgtctaaaaaccctggctatatcaaattgcgtaagattagggcagctcagaacatttctaagaccattgccacttcccagaacaggatatacctcacagctgataacttggtgttgaatctccaagatgagtcattcaccagatactccgacagcttgattaagggaaagaagtag

SEQ ID NO: 236142 - DNA, 786 bp, synthetic construct
  misc_feature 1..786: note = Description of Artificial Sequence: Synthetic coding sequence
  source 1..786: mol_type = other DNA
atggcacagaaccttaaagatttagcagggaggctgcccgctggaccaaggggcatgggcacagcactgaagctgctgctcggagccggtgccgttgcgtacggagtgagggagtctgtatttactgtagagggtggccacagggcgatattctttaatcggattgggggagttcagcaggataccatcctggcagaaggacttcattttcggataccgtggtttcaataccccattatttacgacatacgggctcggcctagaaagatcagctccccaacaggaagcaaggacctgcaaatggtcaacatctcgcttcgtgtattgtctcgccctaacgcacaggaattgccgtctatgtatcagcgacttggcttggattacgaggaaagagtcctgccatctatcgtgaatgaggtgctgaaatccgtggtcgccaaattcaacgcgtcccagctcatcacacagagggcccaggtgagcctgctcatccggagggagctcaccgaaagggcaaaagacttctctctaatcctggatgacgtcgctatcactgagttgtcctttagcagagaatacacagctgcagtggaggcaaaacaggtcgctctttctaagaatccaggttatattaagctgcgaaagatccgggctgcacagaatatttcgaagacaatagcgaccagccaaaatcggatctatctcaccgctgataacctagtgctgaatctccaagatgaatctttcacccggggatccgactcactcataaagggcaaaaagtag

SEQ ID NO: 236143 - DNA, 900 bp, synthetic construct
  misc_feature 1..900: note = Description of Artificial Sequence: Synthetic coding sequence
  source 1..900: mol_type = other DNA
atggctcagaacttgaaagacctggccggtagacttcccgctggacccagaggaatgggaaccgctcttaagctactgcttggagccggtgccgtggcctatggggtacgggagtctgttttcactgtggagggaggccatagggccattttcttcaaccggattggaggcgttcaacaggatactatcctcgctgagggactccacttcagaatcccctggtttcagtaccctatcatttatgacatacgggctcggcctcgaaaaatttcctccccaaccggctcgaaggacctgcagatggtcaatatcagtctgagagttctgtctagacctaacgcccaagaactgccctccatgtatcagcgattgggcctagactacgaggaacgcgttcttccttctattgtgaacgaggtgcttaagagcgtggtggccaagtttaatgcgtctcagttgatcacccagcgagcacaagtgtcactgctgattcgacgggaattaaccgaacgggctaaagacttttccctgatactggatgacgtggcaattactgagttgtctttctctcgggagtatacagccgcagtcgaagcaaaacaggtggcccagcaggaagcacaacgcgcacagtttctggtggagaaggccaaacaagagcagcgtcagaaaattgttcaggccgagggcgaggctgaagcagccaaaatgctgggcgaggctcttagtaaaaatccaggctacattaagctccggaaaattagagctgcccaaaacatttcaaaaacaatagcaacctcacaaaatcgcatttacctcactgctgacaacctggtgctgaatttgcaggatgagtcttttaccagggggtcagattctctcatcaaaggcaagaagtag

SEQ ID NO: 236144 - DNA, 642 bp, synthetic construct
  misc_feature 1..642: note = Description of Artificial Sequence: Synthetic coding sequence
  source 1..642: mol_type = other DNA
atggcacaaaacctgaaggacctggccggtcgacttcccgctggaccacggggtatggggactgcattaaagctcctactcggagccggagcggttgcctacggcgtgcgggagagcgtctttactgtagagggaggacacagggctatttttttcaaccgcatcggcggagtgcagcaggacacgatactggcggagggtctccacttcaggataccgtggtttcaataccctattatttacgacatcagagcgcgtccccgaaaaattagtagccccacaggtagcaaagacctacagatggtgaacatttctctgagagtcctgtctcggcctaacgcccaggagctgcccagcatgtaccagaggcttgggctcgactatgaagagcgggtcttaccctctatagtgaacgaagttctcaagtccgtggttgccaagtttaatgctagccagttaatcacccagcgggctcaggtgtctctcctcatcagacgtgagctcacagagcgggcaaaggacttcagcttgattttggatgatgttgcaatcaccgaactgtcctttagtagggaatacaccgccgctgtcgaagccaagcaggtgggagagagccaggagccttggggagaaggcttctag

SEQ ID NO: 236145 - DNA, 318 bp, synthetic construct
  misc_feature 1..318: note = Description of Artificial Sequence: Synthetic coding sequence
  source 1..318: mol_type = other DNA
atgcgtggagcgacacgggtgtcgatcatgctactcctggttactgtgtccgattgcgccgtgataaccggagcctgcgagcgcgacgttcaatgtggggcaggcacttgctgcgctatctcactttggctgcgcggactaaggatgtgtactcccctcggtagggagggggaagaatgccatccaggttctcacaaggttccattcttccggaagcggaagcatcacacatgcccttgcctgcccaatctactgtgctctcggttccccgatggacgatataggtgcagcatggatcttaagaacatcaacttttag

SEQ ID NO: 236146 - DNA, 390 bp, synthetic construct
  misc_feature 1..390: note = Description of Artificial Sequence: Synthetic coding sequence
  source 1..390: mol_type = other DNA
atgcgcagcctttgctgtgctcctttgctcctcctcctgctcctgccccctttactcctgactcccagggccggagatgccgctgtgattacaggggcatgtgacaaagatagccaatgcggtgggggtatgtgctgcgcggtgagcatttgggtgaagtccatccgcatctgcacccctatgggcaaattgggtgactcttgtcaccccctgactaggaaaaacaactttggcaacggaagacaggaacgtcggaagcggaaaaggtccaaacgtaagaaagaggttccattcttcggcaggcgcatgcaccacacttgtccttgcttgcctgggctggcctgtttgcggacctcatttaatcgattcatttgcctcgcacagaagtag

SEQ ID NO: 236147 - DNA, 327 bp, synthetic construct
  misc_feature 1..327: note = Description of Artificial Sequence: Synthetic coding sequence
  source 1..327: mol_type = other DNA
atgaggagcctgtgctgcgcaccattactgctgctgctgttactgccacccctgctgctgacgcccagagcaggcgacgcagctgtgatcacgggtgcttgcgataaggattcacagtgtggaggaggcatgtgctgtgctgtgtccatctgggtgaagtctattaggatttgtacacccatgggcaaactcggagactcatgtcacccactgacccggaaagtgccctttttcggcagacgtatgcaccatacatgcccttgtctccctgggctagcctgcctgagaacatcgttcaatagatttatctgtctagcacagaagtag

SEQ ID NO: 236148 - DNA, 705 bp, synthetic construct
  misc_feature 1..705: note = Description of Artificial Sequence: Synthetic coding sequence
  source 1..705: mol_type = other DNA
atgcgcgctccactttgcctgctgctgctggtggcacatgccgtggacatgctggcactgaatagacggaaaaagcaagttgggactgggcttggcggaaactgcaccggttgtattatctgctccgaggaaaacggttgctcaacatgtcagcagagactgtttctctttattcggcgtgagggcattagacaatatgggaagtgcctccatgactgccctccagggtacttcggcatccgagggcaggaagtcaatagatgcaaaaagtgcggggctacatgcgaatcttgttttagtcaggacttttgtattaggtgtaagcgtcagttttacttgtacaagggtaaatgcctccctacatgccccccagggaccctggctcaccagaatactagggaatgccaaggcgaatgtgagctgggaccctggggtggttggagcccgtgtactcacaacggcaagacatgcgggtctgcctggggcttggagagcagggttcgggaagccggaagggctggacacgaggaagccgctacctgtcaggtgctgagtgaaagcagaaagtgtccaatccagcggccttgtccaggcgagagatctcccggtcaaaaaaagggccgtaaggacagacgcccaagaaaggaccgcaagcttgacaggcgacttgatgtgcggccacggcagcccggactgcagccgtag

SEQ ID NO: 236149 - DNA, 1155 bp, synthetic construct
  misc_feature 1..1155: note = Description of Artificial Sequence: Synthetic coding sequence
  source 1..1155: mol_type = other DNA
atggcagctcaaaatggcaatacctcattcaccccaaactttaacccccctcaggaccatgcaagcagtctgtcatttaatttctcttatggagactatgatctccccatggacgaggatgaggacatgacaaagaccagaaccttttttgccgcaaagattgtaattgggatagccctggcaggcattatgttggtctgcggaataggcaatttcgtctttattgcggcactgacacgttataagaaactccgtaacctcaccaatctgttgatcgcgaaccttgcaatttcagacttccttgtggccatcatctgttgcccctttgagatggattattacgtcgtgcgtcagctgagctgggagcacggacacgtgctatgcgcttcagtcaattaccttaggactgtgagtctctacgtatctacaaacgcgctgcttgcgattgccatcgacaggtatttggccatcgtacaccccctcaagcctagaatgaattaccagaccgcctcatttctcatcgcattggtgtggatggtatccatcttgattgccatccctagcgcatacttcgctactgaaacagtgcttttcatcgtgaaatcccaggaaaaaatcttttgcggtcaaatctggcccgtggaccagcagctgtattacaagagctacttcctcttcattttcggcgttgagttcgtgggcccagtggttaccatgactctgtgctacgcaagaatctctcgtgaactgtggttcaaagccgtcccaggctttcagacagagcagattcgtaaacggctgcgatgccgccgaaagacagtactggttctcatgtgcatactcactgcctacgtgttgtgttgggcccctttttatgggttcacaatcgtccgggattttttcccaactgttttcgtgaaagagaagcattacttgacagctttttacgtagtagaatgtattgctatgtctaattctatgattaataccgtctgtttcgtgactgtgaagaataacaccatgaaatacttcaaaaagatgatgctcttacactggcggccttcccagagaggctcgaagtcctcagcggacctcgatctcaggactaacggcgttccaactacagaggaagttgattgtatccggctgaaatag

SEQ ID NO: 236150 - DNA, 684 bp, synthetic construct
  misc_feature 1..684: note = Description of Artificial Sequence: Synthetic coding sequence
  source 1..684: mol_type = other DNA
atgaacataaaaggctcaccgtggaagggctcattactgctgctcctagtgtctaacttattattgtgtcagtccgtggcacctctgcctatctgtcctgggggagctgcacgatgtcaggtcaccctccgcgaccttttcgacagggccgttgttctcagtcactacatccacaacctgtcttccgagatgttttccgaatttgataaacgctacacccacgggcgtggattcattacaaaggctattaactcctgccatacctcttcgctggccacacctgaggataaagaacaggcccagcagatgaaccagaaagatttcctgtcactgatcgtgagcatattgcggagttggaacgagcccctgtaccaccttgtgactgaggttcggggtatgcaagaagctcctgaagccattttgtctaaagctgtcgagatcgaggaacagacaaaacgactgttggagggcatggagctaattgtctcccaggtccatcccgaaaccaaagaaaacgagatataccccgtctggagtggactcccatctctgcagatggctgacgaagaaagtcgactgtccgcctactacaacctcttgcactgtcttagacgcgatagccataagattgataattatctcaagctcctgaaatgccgtattatacataataacaattgctag

SEQ ID NO: 236151 - DNA, 591 bp, synthetic construct
  misc_feature 1..591: note = Description of Artificial Sequence: Synthetic coding sequence
  source 1..591: mol_type = other DNA
atgaacatcaaaggttccccttggaaggggagcctgctcctgttactggtgagcaacctgctactgtcccactacattcacaatctgtctagcgaaatgttttccgagttcgataaaagatatacgcacggtaggggctttatcaccaaggccatcaacagttgccacaccagctcccttgccacacctgaagataaggaacaggcgcagcagatgaaccagaaagatttcctctctctgattgtgtctattctcaggagctggaatgaacccctgtatcacctcgtcacagaagtgcggggaatgcaagaagcccctgaagctattctcagcaaagctgtcgaaattgaagaacagaccaagcgtcttctggagggcatggagcttattgtcagccaggtgcatccagaaacgaaggagaacgaaatctatcccgtttggtcgggacttccctctctgcaaatggctgatgaagagagccggctgtcagcctactacaacctcttgcactgcttgcggagggactcgcacaagattgataattatctcaaactgctgaaatgccgaataattcacaataataactgctag

SEQ ID NO: 236152 - DNA, 1545 bp, synthetic construct
  misc_feature 1..1545: note = Description of Artificial Sequence: Synthetic coding sequence
  source 1..1545: mol_type = other DNA
atgaccctcatctggagacacttactgcggccactgtgtctggttaccagcgcaccccgaattctggaaatgcacccgtttctgtctttggggacatcacgaacaagcgttaccaaactgtccctgcataccaagcctcgcatgcccccttgcgatttcatgcccgagcggtatcagtccctaggatacaaccgagtgcttgaaatacacaaagaacatctgtctcccgtggtgactgcttatttccagaaaccgctgcttctacatcaagggcatatggagtggctgttcgatgcggaggggagtaggtatctcgatttcttctctgggatcgtgaccgtctccgtgggccattgtcatcccaaggtgaacgctgtggcacagaagcagctgggcaggctgtggcacacttctacagtcttcttccaccctccaatgcatgagtacgccgaaaagcttgccgctctcctgccagaacctctgaaggttatctttctggtcaatagcgggtcagaagctaacgaactggcaatgctgatggctagggctcactctaataacatcgatattatctctttccgcggtgcataccacgggtgctccccgtacactcttgggcttaccaatgtgggtacctataaaatggaattgcctggaggtacagggtgccagcccactatgtgcccagatgtgtttcgcggaccctgggggggaagccattgcagagattcgcccgtgcagacaattagaaagtgttcctgcgcgcctgattgctgccaggcgaaggaccagtatattgagcagtttaaagatacactcagcacgtctgtagccaaatcgatagctggattcttcgctgaacccattcagggggtcaatggagtggtgcagtatcccaaaggattcctgaaggaagcgtttgagcttgtgagagccaggggcggtgtgtgtatcgcggacgaggtacaaaccggctttgggagactgggatcacacttttggggttttcagacgcacgatgtattgcctgatattgtgaccatggccaaaggcatcggaaacggcttccccatggccgcagtgatcactaccccggagatcgcaaagtctctggctaagtgcctgcagcacttcaacactttcggagggaaccctatggcttgcgcaattggttccgcagtcttggaggtaataaaagaggaaaacttacaggaaaactcccaagaggtgggcacctatatgctcctcaaattcgccaagctaagggacgaatttgagatcgtaggggatgtgcggggaaagggcctcatgataggcatagaaatggtgcaggacaaaatctcttgtcgccctcttccccgagaagaggtcaaccagatacatgaagattgtaagcatatgggactcctggtgggaagggggagtatcttttcacagacctttcggatcgccccatcaatgtgtatcacaaagccagaggtggacttcgccgttgaagtgttccgcagtgccctgacacaacacatggaacgcagggccaagtag

SEQ ID NO: 236153 - DNA, 1050 bp, synthetic construct
  misc_feature 1..1050: note = Description of Artificial Sequence: Synthetic coding sequence
  source 1..1050: mol_type = other DNA
atgaaggagaatgtggcgtcagcaaccgtgttcaccctccttctctttctgaacacttgccttcttaacggtcaactgccgcctggcaagcccgaaattttcaaatgtagatcacccaacaaggaaacattcacatgctggtggaggcctggcaccgatgggggtctcccgaccaattactccttaacatatcatcgcgagggtgagactcttatgcacgagtgtcccgattacattactggaggcccaaattcatgccactttggaaaacaatatacgagcatgtggcgtacctacattatgatggtgaatgctaccaatcaaatggggagcagttttagcgatgagctgtatgtggacgtcacatatatcgtgcaaccagacccacccttagagcttgccgtggaggtcaaacagcctgaagatcgcaaaccctacctctggattaagtggagcccccctactctcatcgatctgaaaacaggctggtttacactcctgtacgagatcaggctgaaacctgagaaggcagctgaatgggagattcacttcgcgggacaacagacagaattcaaaatcctgagcttgcatcccggacagaagtacctggtgcaggtccggtgcaaacctgatcatgggtactggagcgcttggtcacccgcaacatttatacaaattcctagtgatttcaccatgaatgacactaccgtttggatcagtgtggcagtgctttccgcagtgatctgtctgatcattgtgtgggccgtggcgctgaaggggtactcaatggtaacgtgtatcttcccgccagtccccggtccaaagatcaagggatttgacgcacatctgttagaaaagggaaagtccgaggaactgctgagcgccctcggatgtcaggatttcccccctacctctgattatgaggaccttttggtggagtatctggaggtggatgacagcgaggaccagcacctcatgtcagtacacagtaaggaacatcctagccaggagcgcgagcagaggcaagcacaggaggcacgcgactcatag

SEQ ID NO: 236154 - DNA, 1566 bp, synthetic construct
  misc_feature 1..1566: note = Description of Artificial Sequence: Synthetic coding sequence
  source 1..1566: mol_type = other DNA
atgaaagagaatgtcgctagtgcgacagtgttcaccctcctgctttttttgaatacgtgcctcctcaacgttcagcctgacccgcctctcgagcttgccgttgaagttaagcagccagaagaccgcaaaccatacctgtggatcaagtggtcaccgcctacattgattgaccttaaaacaggctggttcactctactttacgagataagacttaagcccgagaaagccgctgaatgggagattcacttcgcaggccaacagaccgagttcaaaatcctgtctctgcacccaggtcagaagtaccttgtgcaggtgcgatgtaaacctgaccacggctactggagcgcgtggtcccccgcaacattcatacagataccctccgactttactatgaatgacactaccgtatggattagcgtggccgtgctctccgccgtgatatgcctgatcattgtgtgggcagtggcgctaaaaggttatagcatggtgacatgcatctttccgccagtccccggacccaaaatcaagggattcgatgcccacctgcttgaaaagggtaagagtgaagagttattgtctgctttgggttgccaggattttccgccaacaagcgactacgaggatctcttagtagagtatcttgaggtcgatgacagcgaagaccagcacttaatgagcgtccattctaaagagcacccgtcccagggcatgaagccaacctacctagatcctgacaccgatagtgggagaggctcctgcgatagtccctcgctcttgtcagagaaatgtgaggagcctcaggctaatccctcaactttctacgaccccgaggtgatcgaaaagcctgagaatcccgagacaactcacacgtgggacccacagtgcatttccatggaagggaagataccatacttccatgcagggggaagtaagtgctccacatggcctctgccacagccttcacagcataaccctcgcagcagctaccataacattacagacgtgtgcgagctggcggtgggacccgcaggcgcacccgcaaccttgctaaacgaagcaggaaaagatgccctcaagtccagccaaaccattaaatcacgggaggaggggaaagccacgcaacaaagggaggtggaaagctttcacagcgagaccgatcaggacactccgtggttactgcctcaagagaaaacccctttcggctccgcgaaaccactggactacgttgagatccataaggtaaataaggatggggctttgagtctgcttccaaaacagcgtgagaacagcggtaagccaaaaaagcctggcactccagaaaataacaaggagtatgcaaaagtgtccggggtaatggacaacaatattctggtcctggttcccgatccacacgctaagaacgtggcctgcttcgaagaatccgccaaagaagctcccccttctctggaacaaaaccaggccgagaaagctcttgcaaattttaccgctacctcatctaagtgtcgactccagctggggggactagattatctggaccccgcatgtttcacccactcattccactag

SEQ ID NO: 236155 - DNA, 807 bp, synthetic construct
  misc_feature 1..807: note = Description of Artificial Sequence: Synthetic coding sequence
  source 1..807: mol_type = other DNA
atgaaagaaaatgtcgcttcagctactgtgtttaccctgcttctgtttctcaacacttgcttgctgaacggtcagctgccgccaggtaagcccgagatattcaagtgccggtctcccaacaaggagactttcacttgttggtggcggcctggtaccgatggcggacttccaaccaactactcacttacgtatcaccgggaaggggaaacactcatgcacgagtgcccggattacatcaccggcggtcccaattcttgtcattttggaaaacaatacacttctatgtggagaacttacatcatgatggtcaatgcaacaaaccagatgggatcttcattctctgacgagctgtatgtagatgtcacctacatcgtgcagcccgatcccccactcgaattggccgttgaagtgaagcaacctgaggatagaaaaccctacctgtggataaagtggagtcctcccacattaatcgatctgaaaactgggtggttcactctgttgtatgaaattaggctgaaacccgaaaaggcagccgaatgggagatacatttcgccggacagcagacagagtttaaaatccttagcctacacccgggacagaaatacctggtgcaggtgcgctgtaaacccgatcatgggtactggtcagcttggtccccagccacgttcatacagatcccaagcggtgaccctctgatgctcggagcgtcccattacaaaaatctgaagtcataccggcctcgcaaaatctccagtcaggggcgtttagctgtattcaccaaggctactctgaccacagtgcagtag

SEQ ID NO: 236156 - DNA, 1869 bp, synthetic construct
  misc_feature 1..1869: note = Description of Artificial Sequence: Synthetic coding sequence
  source 1..1869: mol_type = other DNA
atgaaggagaatgttgcgagcgctaccgtgtttaccttgctgcttttcctcaacacctgccttctgaatggacagcttccaccagggaaacccgaaattttcaagtgcagatctcctaacaaagagaccttcacttgttggtggcggccaggaactgatggcggactccctaccaactattctctgacatatcaccgcgaaggtgagacactgatgcatgagtgtccagattacattaccgggggaccgaatagttgccacttcggcaagcaatatacttccatgtggcgcacatatataatgatggtgaatgcgaccaatcagatgggatcctctttttctgacgagctctacgttgacgtaacatacatcgtccaacctgaccctccattagagctggcggtggaagtcaagcagcccgaggatcgaaaaccttatctttggataaaatggagcccccctacactaatagatctaaagactggctggttcaccctgctgtatgagatccgcctgaaacccgagaaagctgcagagtgggagatccacttcgccggtcagcagactgagtttaaaatcttatctttgcatccagggcaaaaatacttggtccaagtgcgctgtaaacccgaccacggatattggagtgcgtggagccctgccacctttattcagattccgtccgactttaccatgaacgatacaaccgtctggatttctgtggcagtgctgagtgctgtcatttgcctgatcattgtgtgggctgtcgccctcaagggctattctatggtgacatgcatatttccgcctgtgcctggtcctaagattaaaggcttcgatgctcacctactcgaaaaagggaaaagcgaagagcttctatcagctcttggttgtcaagactttcctcctacatctgattatgaggatctcctggtcgagtaccttgaggtggatgattcggaggaccagcacctgatgtcagtccactcaaaagagcacccttcacagggtatgaagccaacttacctagatcctgataccgatagtggccgtggatcttgtgacagtccctctcttttgtcagagaaatgcgaggagcctcaggctaatccaagcactttttatgaccctgaagtgattgaaaaacccgaaaaccccgagacaacacacacatgggatccccagtgtatctccatggagggtaagatcccatatttccatgcaggtggaagcaaatgtagcacttggcccttgccacaacctagtcaacacaacccacgatcttcttatcataacataaccgacgtctgcgagctggccgtcgggccagccggtgctcccgcaacactgctgaacgaagcaggtaaagacgccttaaagtcttcccagacaattaagagtcgcgaggaagggaaggccactcagcagagagaggtagaatctttccactcagaaaccgaccaggataccccctggctcctgccgcaggagaaaacaccatttggctcagcgaagcccctggattatgtggagatccataaagtcaacaaggacggagccttaagtctgttgccaaagcaacgcgagaatagtggcaagcccaagaaacccggtacccccgaaaataataaagagtacgcgaaagtctctggtgttatggacaataacatcttggtgcttgttcctgacccgcacgccaaaaacgttgcatgcttcgaagagtctgccaaagaggctcctccttcgcttgagcagaaccaagccgagaaggcattggctaattttactgcaacaagtagtaaatgccgcctccaattaggcggactggattacttggaccccgcttgctttactcactcctttcattag

SEQ ID NO: 236157 - DNA, 594 bp, synthetic construct
  misc_feature 1..594: note = Description of Artificial Sequence: Synthetic coding sequence
  source 1..594: mol_type = other DNA
atgcatgaatgtccagactatatcacgggcggacctaacagctgccacttcggcaagcaatacacgtctatgtggcgcacctatattatgatggtgaatgccacgaaccagatgggtagcagcttcagcgatgaactctacgtggatgttacctatatcgtccagcccgatccgcctctggagttagcagtcgaggttaaacaacctgaggaccgcaagccttatttatggattaagtggagtccgcctactctgattgacctgaagactggttggttcacactgctttacgaaattagattaaaacctgagaaagcagcagaatgggagattcactttgccggtcagcagaccgaatttaagatcttgtcacttcacccaggtcaaaaatacctggtccaggtgagatgtaaaccggaccacggctattggtccgcttggagcccagccacatttatccagatacctagtggcgaccccctaatgttaggcgcaagtcattataagaatttaaagagttaccgcccaagaaaaatcagctctcagggcaggctagctgtttttaccaaagcgactttgaccacggtacagtag

SEQ ID NO: 236158 - DNA, 312 bp, synthetic construct
  misc_feature 1..312: note = Description of Artificial Sequence: Synthetic coding sequence
  source 1..312: mol_type = other DNA
atgaaggagaacgtcgccagcgctaccgttttcacacttttgttattcctcaatacctgcttgctcaacggtcaacttccccctggcaagccagagatcttcaaatgtaggagccctaacaaggagactttcacctgttggtggaggccaggcacggatggcggactgcctacgaattatagcctcacctaccatagggagggcgaaacattgatgcacgaatgccccgattacattactgggggtcctaattcctgccactttggtaaacagtacacgagcatgtggcggacttacattatgatggtttag

SEQ ID NO: 236159 - DNA, 189 bp, synthetic construct
  misc_feature 1..189: note = Description of Artificial Sequence: Synthetic coding sequence
  source 1..189: mol_type = other DNA
atgaaagagaatgtggctagcgcaaccgttttcacactgctgctgtttctgaacacatgcctactcaatggccaactcccgccaggaaaaccggaaatctttaaatgcaggtctccaaataaagaaacattcacgtgttggtggcggcctggcacagacgggggtctgcccacgaactatagcctctag

SEQ ID NO: 236160 - DNA, 336 bp, synthetic construct
  misc_feature 1..336: note = Description of Artificial Sequence: Synthetic coding sequence
  source 1..336: mol_type = other DNA
atgaaggaaaatgttgcttccgctacggtcttcactctcttgcttttcctcaacacctgcctgctgaacgggcagttaccaccaggcaaacccgagatcttcaagtgccggtcccctaacaaagagacattcacttgctggtggagacccggaacagatggcggactgcctactaattactccttgacttaccacagagagggcgagacactcatgcacgagtgccctgactacatcactggcggacccaactcatgtcactttggtaagcaatacaccagtatgtggaggacttacataatgatggtgaacgccaccaatcagatgggctcatag

SEQ ID NO: 236161 - DNA, 1566 bp, synthetic construct
  misc_feature 1..1566: note = Description of Artificial Sequence: Synthetic coding sequence
  source 1..1566: mol_type = other DNA
atgaaggaaaacgtggcatccgcgacagtgttcacactgttactgttcctgaacacttgcctattaaacgtgcagccagatcctcccctggagctggcagtcgaggtaaagcagccagaagatagaaaaccgtacctgtggattaaatggtcccctcccaccctgatcgacctcaaaactggctggttcacccttttatacgaaattcgtcttaagccggaaaaggcggcagagtgggaaatccattttgccggacaacagaccgagttcaaaattctgagtctccatccaggacaaaaatatctcgttcaagttaggtgcaaacctgatcatgggtactggagtgcctggtcgcctgcgactttcattcagattcccagcgactttactatgaacgacaccactgtgtggatctctgtcgcagtactctctgcggtaatctgtctgattatcgtgtgggccgtagccctcaaggggtactcgatggtgacatgcatcttccccccagtgcccggacctaagattaagggcttcgacgcccaccttttggagaagggaaagagcgaagagcttctttccgcactgggttgccaggacttccctcctacaagcgactacgaagatctgctggtcgagtacctcgaagtggatgactctgaggaccagcatcttatgtcagttcactcaaaggagcacccttcccaggggatgaaaccgacttatctggaccccgatacagacagcgggagggggtcttgcgactcaccatcccttttatcggaaaagtgcgaggaaccacaggcaaacccctccactttttatgaccccgaggtgatagagaagccagaaaacccagagacaacacatacctgggaccctcagtgtatttcaatggagggcaagatcccctattttcatgccggtggatccaagtgctcaacgtggcctcttcctcaaccatctcaacacaacccccgtagcagctaccacaacataaccgacgtgtgcgaactagcggtcggtcctgccggagcaccagcgaccttgctgaacgaggcgggtaaagatgcgctgaaaagttcccagaccatcaagtctagagaggaaggcaaggccactcagcagagagaagttgagtcatttcacagcgagacagaccaggacacgccatggcttttgccacaggagaaaactcccttcggctctgctaagcctttagattatgttgaaatccacaaggttaacaaggacggcgcattgtctctattgcctaagcaaagggagaactcggggaaaccaaagaagccagggaccccagagaacaacaaggagtacgccaaggtgagcggcgtcatggataacaacatcctggtactcgtgcctgatccacatgccaaaaacgtggcctgctttgaagagtctgccaaagaagcaccacccagcttggagcagaatcaagccgagaaggctcttgccaactttaccgctacgtcatcaaaatgccgtttacaactgggcggactagattacctcgatccggcatgttttacacactcctttcattag

SEQ ID NO: 236162 - DNA, 867 bp, synthetic construct
  misc_feature 1..867: note = Description of Artificial Sequence: Synthetic coding sequence
  source 1..867: mol_type = other DNA
atgaaagaaaatgttgcgtcagccactgtgttcacactactccttttcttgaatacatgtttattgaacggtcagctgccacctggtaaacctgaaatttttaaatgccggtcccctaataaagagactttcacgtgttggtggcgacccggtaccgacggaggcctgcctacgaactattctttaacataccacagagagggtgagacacttatgcacgagtgtccagattacatcactggtgggcctaactcatgtcactttgggaaacagtacaccagcatgtggaggacctacatcatgatggtgaatgccacgaaccaaatgggttcgtctttttccgatgaactgtacgtggacgttacatacatagtgcaacctgacccaccgctggagctcgctgttgaggtcaaacagcccgaggacaggaagccatatctatggatcaagtggagtccaccaacactgattgacttgaagactggatggtttactttgctgtatgagatccggttgaaaccagagaaggcagctgagtgggaaatccacttcgccggacagcaaactgaattcaagattctgtcactgcacccgggacagaagtatctggtgcaggtcagatgcaaaccagaccacggctattggagcgcgtggtcacctgcaacatttattcaaatcccctctgatttcaccatgaatgacactacagtatggattagtgtggctgtgctgtccgcagtgatctgtctgatcatcgtgtgggcggtggcactgaaaggatacagtatggtgacttgcatttttcctccagtccctgggcctaagataaaaggcttcgacgcacacctgctagaagtcactccatag

SEQ ID NO: 236163 - DNA, 363 bp, synthetic construct
  misc_feature 1..363: note = Description of Artificial Sequence: Synthetic coding sequence
  source 1..363: mol_type = other DNA
atgaaggaaaacgtagctagcgccactgtcttcactctcctgctgtttctgaacacatgtctgctgaacggccagctcccgcctgggaagccggagatttttaaatgccgctcccccaataaggaaaccttcacgtgctggtggagacccggtaccgacggaggcctcccgacaaactattctttaacatatcatagggagggcgagacactgatgcatgagtgtccggactacattacaggtggccctaactcctgtcactttggtaagcagtacacctctatgtggcgtacctacataatgatggtgaatgcgaccaatcagatgggttcatccttttcagacgaactgtacgtcgattag

SEQ ID NO: 236164 - DNA, 105 bp, synthetic construct
  misc_feature 1..105: note = Description of Artificial Sequence: Synthetic coding sequence
  source 1..105: mol_type = other DNA
atgaaggagaatgtcgcctccgcgaccgtgtttaccttgttactcttcctgaatacctgcctgctcaacggccagctgcctcctggtaagcccgaaatcttttag

SEQ ID NO: 236165 - DNA, 930 bp, synthetic construct
  misc_feature 1..930: note = Description of Artificial Sequence: Synthetic coding sequence
  source 1..930: mol_type = other DNA
atgaaagagaacgtggcctctgccacagtgttcaccctgctgctcttcctcaatacctgtctgctgaacggccagctgcccccaggcaagcccgagatctttaaatgccggagccccaacaaagagaccttcacctgttggtggcgtcccggaacagacgggggtctcccaaccaactattctcttacgtatcacagggagggcgaaactctgatgcatgagtgtcccgactacattacaggaggaccgaactcttgccactttggcaagcagtatacctccatgtggagaacctatattatgatggttaacgcaacaaaccaaatggggtccagcttctcagacgagctgtatgtggatgtgacttatatcgtccagccggacccacctctggaactggcagttgaagttaaacagccggaagatcgtaaaccctacctgtggatcaagtggtcacccccaactttgatagatctgaaaaccggctggttcactctcttatatgaaatcagactgaagccagagaaggccgctgagtgggagatacacttcgccggacagcagaccgagtttaagattctttcactgcatccaggtcaaaaatacctggttcaagtgaggtgcaagccagatcacggatattggtctgcatggagccctgcaacgttcatccagatcccttccgattttaccatgaacgatacgacagtctggatctccgtggctgtgctaagtgccgttatctgtttaattatcgtgtgggccgtggcgttgaaaggatactcgatggtgacttgtatttttccacctgtcccagggccaaagattaagggtttcgatgcccacttgttggaagataggttgtgtactcctggacgatgctgtgtaagcactggtctgacagacctggactacagttgctctacttag

SEQ ID NO: 236166 - DNA, 1254 bp, synthetic construct
  misc_feature 1..1254: note = Description of Artificial Sequence: Synthetic coding sequence
  source 1..1254: mol_type = other DNA
atggggaggcgtcgtgcaccagagttatatagggctccttttcccctttatgcacttcaggtggaccctagcacaggcctcttgatcgctgcaggagggggaggagccgctaagaccgggattaagaacggtgtgcacttcctccagctcgaattaatcaacggacgtctgtcggcttcactcctccacagccatgacacagagacacgtgcaactatgaacctggccttagctggggatattttagccgcaggccaggacgcccattgtcaactgctgcggttccaagcacaccagcagcaggggaataaagccgagaaagccggatcaaaggagcaagggccacgacagcgcaaaggagcagcccctgccgagaagaaatgcggggcagaaacacaacatgaggggctggagctgagggttgaaaatctacaagccgtacaaaccgacttttcaagcgaccccctacagaaagttgtgtgctttaatcacgacaacactttacttgccactggcggtactgatggatatgtacgggtctggaaagtgccctctctagaaaaggtactcgagttcaaagcacacgaaggcgagatcgaagatctcgctctagggccagatggcaaactggtaacagtgggtcgcgacttgaaggcgagtgtgtggcagaaggaccagctggtgacccagcttcattggcaggagaacgggcctacgttctcgtctactccctatcgttatcaggcctgtcgattcgggcaggtgcccgatcagccggctggtttgagactatttacggtccagattccacacaagcgcctgagacagcccccaccatgttacctcaccgcatgggatggtagcaacttcctccccctgagaactaagtcatgcggccatgaggtggtcagttgtctcgacgtgtccgagagcggcactttcctgggcctgggtaccgtgaccggctccgtcgccatctacattgccttctccctgcagtgtctgtactatgtgagggaggctcacggcattgtggtaacagatgtcgcctttctgcctgagaaaggtcgagggccagagctgctcggttctcacgagaccgctctctttagtgtggctgtggacagccggtgccagcttcatctcctgccttcccgcaggtccgttccggtatggcttcttttgttactgtgcgtaggcctgatcatcgtgacaattctgttgttacagtccgcttttccagggttcttgtag

SEQ ID NO: 236167 - DNA, 1254 bp, synthetic construct
  misc_feature 1..1254: note = Description of Artificial Sequence: Synthetic coding sequence
  source 1..1254: mol_type = other DNA
atgggacggagaagggcccctgaactgtatagagcacccttccccctgtatgcgctccaagtcgacccctcaaccggactgctgattgcagccggtggcggtggcgcagctaagacgggcattaagaacggggtacatttcttgcagttagagctgattaatggacggctgagtgccagcctgttacattctcacgatactgagacaagagcaaccatgaatcttgctcttgctggagatatcttggccgcagggcaggacgcccactgccaattgctccggtttcaggctcaccaacagcaaggcaataaggcagagaaggccggtagcaaggagcaaggacctcgccaaaggaagggtgccgctccagccgagaaaaaatgcggggctgaaacccagcatgagggccttgaactgagagtggagaacttgcaggcagtgcagaccgatttctcatcagaccctctccagaaagtggtctgttttaatcacgacaacacgctgctcgctacaggagggaccgacggatacgtgagggtgtggaaggtgccatccctggaaaaagtcctcgaatttaaagcccatgagggcgagatagaagatttggcactcggaccagatggcaagctggtgactgtgggcagggacttgaaggcatccgtctggcagaaagaccagctagtcacccaactgcattggcaggaaaatggccctactttcagttcaaccccctaccgctaccaggcctgtagattcggacaagtgcctgatcaaccagcagggctccgactgttcacagttcagattcctcacaaaagacttagacagccccctccatgctacctgaccgcctgggatggatctaatttcctacctctcagaacgaaatcgtgcgggcatgaggtggtatcctgtctcgatgtcagtgagagcggtacattcctggggctcggcactgttacagggtcggtcgctatctatattgcattctcccttcagtgcctctattatgtcagggaagctcatggaatcgtggtgacggatgtggccttcctcccagaaaagggccgtggccctgagctgctggggtcacacgaaacggctctcttcagtgttgccgtggactcgcggtgccagcttcatctgctgccctcgagacggagtgtccctgtgtggctgcttctgctattgtgcgtagggctgatcattgttaccattctccttttgcagtctgcattccctgggtttctttag

SEQ ID NO: 236168 - DNA, 441 bp, synthetic construct
  misc_feature 1..441: note = Description of Artificial Sequence: Synthetic coding sequence
  source 1..441: mol_type = other DNA
atgcgtctgctacaattacttttcagagccagtcctgcaaccctgctactggtcttatgtctgcagctgggtgccaacaaggcccaggataatacacgaaagatcatcattaagaactttgacatccctaagagtgttcgccctaatgacgaagtgacggcggtgttggctgtacaaacagagttgaaggaatgtatggtggtgaagacctatctgatctctagtataccacttcagggcgcattcaattacaagtacacagcctgcctgtgtgacgacaatcctaagactttttactgggatttttatactaatcgaactgtccagattgccgctgtggtggacgtcattcgggaactggggatctgccccgacgacgcagctgtaattcctattaagaacaatcgtttttacaccatcgaaatcctcaaagttgagtag

SEQ ID NO: 236169 - DNA, 1185 bp, synthetic construct
  misc_feature 1..1185: note = Description of Artificial Sequence: Synthetic coding sequence
  source 1..1185: mol_type = other DNA
atgtctggcgaagatgaacagcaggaacagaccattgccgaagacctcgtggtcaccaaatataaaatgggcggtgatatcgccaaccgggttctaagaagtctagttgaggcctctagttccggcgtctcagttctgagtctttgcgaaaaaggcgatgcgatgataatggaagagacgggaaaaattttcaagaaagaaaaagaaatgaagaagggcatcgctttcccaacctcaatttctgtgaataactgcgtgtgtcatttttctcctctgaaaagtgatcaggattacatactcaaagagggcgacttggtgaagatcgatctgggagtacatgtcgacggattcattgcgaacgtggcccatactttcgtcgttgacgtcgcacagggaacccaggtgacagggagaaaggccgatgtcataaaggctgcccatctgtgcgccgaggccgcacttcggctggtgaagcccggtaaccagaacacccaggtgacggaagcttggaacaaagtcgctcacagtttcaactgcactccaatcgaggggatgctgtcccaccagcttaaacagcatgtgatcgacggggaaaaaaccattattcaaaaccctaccgaccagcagaagaaggatcacgagaaagctgagttcgaggtacacgaggtctatgccgttgacgtcctggtgtcttcaggtgaaggcaaggcaaaggacgcaggccagcggaccaccatctataaaagagacccatctaaacaatatggacttaaaatgaaaaccagtagagccttcttctcagaggtcgagcgcaggttcgacgctatgccatttacgctgcgcgcttttgaggatgaaaagaaagctcgcatgggggttgttgagtgtgctaagcacgagctcctgcagcccttcaacgtgctctatgaaaaggaaggtgagttcgtggcccagtttaaatttaccgtcctgctgatgccaaacggccctatgcgcattaccagtggccctttcgagccagacctttataagtccgagatggaggttcaggatgcggagctgaaggcactccttcagtcttccgcctcaaggaagacgcaaaaaaagaagaagaagaaggcatccaaaaccgcagaaaacgccaccagtggggagactctcgaagagaacgaagccggtgattag

SEQ ID NO: 236170 - DNA, 1218 bp, synthetic construct
  misc_feature 1..1218: note = Description of Artificial Sequence: Synthetic coding sequence
  source 1..1218: mol_type = other DNA
gcatgtcctgcgcctcagcccgctcgctcccagctgctagccctggcgtgtctgccagcgccattgctagcccgagccttcgcccgacctctgctggaagaccggggagactcagaccacagtccagaggatctagtggtcacaaaatacaaaatgggcggtgatattgccaatcgagttctccggagtcttgtagaagcttctagcagcggagtcagtgtcttatcgctatgtgagaaaggggacgcaatgatcatggaagaaacagggaaaatattcaagaaggagaaggagatgaagaaaggaatcgcattccctacatccatatctgttaacaactgtgtgtgtcatttcagtcccctgaaaagtgaccaggattacatcctgaaggagggggacctcgttaagatcgatctgggcgttcatgtagacggattcatcgccaatgtcgcccatacattcgtcgtggacgttgcacaaggaactcaagtgacgggcaggaaggcagatgttataaaggccgctcacctgtgcgccgaggccgcactccggctagtaaaaccgggaaatcagaacacccaggtaacggaagcctggaataaagttgcgcactccttcaactgcaccccaatcgagggaatgctttcccaccagcttaagcagcacgtgatcgacggcgaaaagaccattatccagaaccccactgatcaacagaagaaggaccatgaaaaagccgagttcgaagtccatgaagtctacgctgttgatgttttggtgtcctctggggaggggaaagccaaggatgcgggtcaaagaactaccatctataaaagagatccctctaagcagtacggtctgaaaatgaaaacaagtagggccttcttttccgaagttgaacgacggttcgacgctatgcctttcacgttacgcgctttcgaggacgagaaaaaggccagaatgggagtagtggagtgcgctaagcacgagctcctgcagcccttcaacgttctttatgagaaggagggcgagttcgttgcccagtttaaattcacagtccttttgatgcccaacgggccaatgagaatcacaagtgggccttttgaacccgacctgtataagtcggaaatggaggtccaagatgccgaactgaaagccctgctgcagagcagtgcctcgcggaagacacaaaaaaagaagaagaagaaaaagaaaaagtag

SEQ ID NO: 236171 - DNA, 738 bp, synthetic construct
  misc_feature 1..738: note = Description of Artificial Sequence: Synthetic coding sequence
  source 1..738: mol_type = other DNA
atgacgcgcatgctgcaacgtatggatgtcctggctaagaaggcaaccgagatgggcgtgcgactgatggtagatgcggaacaaacttattttcagcctgccatatctcggcttactcttgagatgcaaaggaagtttaatgtggagaagccactgatttttaatacctaccagtgctacctgaaagatgcctatgacaatgtgactctggacgttgagctggcccgacgggagggctggtgtttcggggcaaagctggtcagaggggcttacctagcccaggagcgcgctagagcagccgagatcggttacgaggatcccattaaccctacttatgaggctacgaatgccatgtaccacagatgcctagattacgttcttgaagagttgaaacataacgcaaaggcaaaagtaatggtagcctcccataacgaagacaccgtgaggttcgccctgcggcgaatggaggaactcggcttgcatcccgcagatcatagggtgtattttgggcaattgctgggcatgtgcgatcaaatttcttttcctctgggtcaggcagggtacccagtctacaagtacgtaccctatggaccagttatggaggtgctcccttacctaagtcgcagggcattggagaatagcagtctcatgaaagggactcatagggaaaggcagctactgtggctcgagctcctgcggagacttaggacaggaaatttgttccatagacctgcgtag

SEQ ID NO: 236172 - DNA, 1803 bp, synthetic construct
  misc_feature 1..1803: note = Description of Artificial Sequence: Synthetic coding sequence
  source 1..1803: mol_type = other DNA
atggcactgcggagggctctcccagccttaaggccctgcattccgagatttgtgcccctctctacagctcccgcatcgcgtgagcagccagctgcaggacccgctgcagtccccggtgggggatcggcgaccgcagtgcgaccgcctgtccccgcagtggattttggcaacgctcaggaggcttaccgcagcagaaggacatgggagctcgctagatcccttttggtgttgagattatgcgcttggccagccctcttggcaagacatgagcaactactgtatgtgtctcgaaaactacttggccagcggcttttcaataaactcatgaaaatgaccttctatggtcacttcgtcgcaggtgaggaccaagaatcaattcagccactgctgagacactatcgggcattcggagtgagtgcaatcctggattatggtgtggaagaggatttgtccccagaagaagcggaacataaggagatggaaagctgtacttcagctgcagagagagacgggtcggggaccaataagagagacaaacagtaccaggctcactgggcctttggggatcgtcggaatggcgtcatcagcgccagaacgtatttctacgctaacgaggccaagtgcgatagccatatggagacatttcttcggtgtatcgaggcctctggtagagtaagtgatgacggttttatcgcaataaagctgactgcacttggcagaccccagttcctgctgcagttctccgaggttctggctaaatggcggtgcttcttccaccaaatggctgtggaacagggccaggcagggcttgccgcaatggatactaaattggaggtagccgttctgcaggagtcagtagcgaaactcggcattgcttcccgcgcagagattgaagattggtttacagctgaaacactgggcgtgtcaggaactatggacctgctggattggagctcactcattgactcccggaccaaactgagcaagcaccttgttgttccgaacgcacagaccgggcagctggaacctctgctctcgaggttcacagaagaggaagagctgcaaatgacgcgtatgctgcagcgtatggacgttctggcaaagaaagcaacggaaatgggcgtcagactgatggtagatgctgagcaaacctactttcagcctgccatctcgaggctgacactggagatgcaaagaaaattcaatgtggaaaaaccattgatcttcaatacataccagtgctatttgaaagacgcttatgataacgtgacacttgatgttgaactcgctcggagagagggctggtgtttcggtgcaaaactggttcgaggagcctacctggcgcaggagagagctagggcagccgagatcggctacgaagaccccatcaatcctacctacgaggccacgaatgctatgtaccaccggtgcctcgactacgtgctggaagagctgaaacacaatgccaaagccaaagttatggtggcatcacataacgaggacacagtgaggtttgctctacgcaggatggaggagctaggactgcacccagccgatcaccgggtttactttgggcagcttctgggaatgtgtgatcagatctcctttcctctgggccaggccggataccccgtctataagtacgtgccatatggtccagtgatggaggtcttgccttacctttccagacgcgcattagagaatagctcattaatgaagggaacacaccgcgaacggcagctgctgtggctggagcttttgaggagactgcgcactgggaacctgtttcaccggccagcatag

SEQ ID NO: 236173 - DNA, 1479 bp, synthetic construct
  misc_feature 1..1479: note = Description of Artificial Sequence: Synthetic coding sequence
  source 1..1479: mol_type = other DNA
atgaagatgaccttctatgggcattttgtggctggggaagaccaggagtccattcaacctcttttaaggcattaccgcgctttcggcgtgagcgccatactggactacggtgtggaagaggacttgtctcccgaggaagcggagcacaaggaaatggagtcctgtacatccgcagccgagcgggacggctcaggcacgaacaaaagggacaaacagtaccaagcgcattgggcatttggggatcgccgaaatggtgtgatctcagctagaacatacttttatgctaacgaggctaagtgcgacagtcacatggagaccttcctgagatgcatagaggcatccggcagagtgagcgacgacgggtttatcgctatcaagctaaccgctctggggaggccccaatttttgctccagttttcagaagtactggctaaatggaggtgtttcttccaccaaatggccgtggaacagggacaggctggactggctgccatggacaccaaactggaggtggccgtactgcaggagagtgtggccaagctcgggatcgcaagcagggccgaaatcgaggattggttcaccgccgagacattgggcgtcagtggaacaatggacctcctggactggagcagcctgatcgactctcgtactaagttgtctaagcatctggtggtgcctaatgctcaaactggccaactagagcctttactgtcaaggtttaccgaggaggaagaacttcagatgacccggatgttgcaacgtatggacgtcctggcgaaaaaagcaacagagatgggagtgcgtcttatggtagatgcagagcaaacctactttcaacctgccatctcccgcctcactcttgagatgcaacgtaaattcaacgtggagaagcctctgatcttcaacacctatcagtgctacctcaaggatgcctatgacaacgtaacacttgacgtcgaactcgcgagaagggagggatggtgtttcggcgctaagctggtgcggggagcctatttggcgcaggaacgggctcgggcagcagaaattgggtacgaggaccccattaaccctacttacgaagcaacgaacgctatgtatcacagatgtttggattacgtcctggaagaactaaagcataacgcgaaagcaaaagtaatggtggcttcccacaatgaggacactgtccgcttcgctctaaggagaatggaggagctgggacttcacccggcagaccatagggtctacttcgggcagctgttagggatgtgtgaccagatatcctttcctttaggccaggccggatatcctgtatataaatatgtaccttatggcccagtgatggaggtcctgccctatctaagccggagggctctggaaaattcatccctgatgaagggaacacaccgagaaagacagctgctgtggcttgaacttcttagaagactgcgcaccggcaacctctttcacaggcccgcatag

SEQ ID NO: 236174 - DNA, 1611 bp, synthetic construct
  misc_feature 1..1611: note = Description of Artificial Sequence: Synthetic coding sequence
  source 1..1611: mol_type = other DNA
atgtcacctagagtagtctcgaacagttctgttctggcatcccagagcgtcggaattaccaatgtgcggacagtgttcagcaacgtgtttaacaatactacagccttccccattttgagaggtagcaattgtcacaaaattacagccccagggctgggaaaaggtcaactggtgaatctgctgcctccagagaatctgccttggtgcgggggaagccaagggccaagaatgctgcggacttgctacgtactgtgtagccaggccggaccgcctagtagaggatggcaaagcttgtcctttgacgggggtgctttccacctgaaaggtactggggaactcactagagctctgcttgtgctcaggctttgcgcctggcctccattggtgacccatggcttgctcctgcaggcttggtcccggcgactacttggatctcgcctttcaggggctttcctccgcgcatctgtttatggtcagttcgtggccggagagacagcagaggaggtgaaggggtgtgtgcagcagttgcgcaccctgagtctgagaccactgctggctgtcccaacagaggaggagcctgatagtgctgccaagtctggagaggcgtggtacgagggcaatttaggcgctatgctcaggtgcgtcgacctgagtcgaggcctactagaacccccatccttggccgaggccagcttgatgcaacttaaggtcaccgcccttacctctacaagactgtgcaaggagttagcgagctgggtccgcaggcccggtgccagtctggaactatcacctgagcggcttgccgaagctatggactcaggccagaatttgcaggtaagttgcctgaatgcagagcagaaccaacatcttcgcgcatcactctcacggcttcatagagtcgcacagtacgccagagcccagcacgtcaggctcctggtcgacgcggaatatacatctctgaaccctgcattgtccctgctcgtggcagctctcgccgtcaggtggaattctcccggagagggtggtccctgggtgtggaacacttatcaggcttgtctcaaggacactttcgaaaggctgggacgggacgccgaagcagctcacagagctggactagcattcggagttaagttggtgagaggggcttacctagataaggaacgcgcagtagctcagctgcacggtatggaggaccccacgcagccagattacgaggctacttctcagagttatagccgctgcctcgagttaatgctcacccacgtggcacggcacggcccaatgtgccatctcatggtggcatcacacaatgaagaaagtgtgcgtcaggcaaccaagcggatgtgggaactgggtatcccgcttgacgggaccgtttgttttgggcagttacttggaatgtgtgatcatgtctccctcgccttggggcaagccggttacgtggtgtacaaatctatcccatatggctccttggaggaggtgattccttacttgattcgacgtgctcaggagaatcgatctgtactccagggagctaggcgcgaacaggagcttctctcacaggagctttggaggcgtttattgcccggttgccggagaatcccgcactag

SEQ ID NO: 236175 - DNA, 762 bp, synthetic construct
  misc_feature 1..762: note = Description of Artificial Sequence: Synthetic coding sequence
  source 1..762: mol_type = other DNA
atgcctgggaggacagagggtgggagctggttgcgtaatgccgcagctgccgacgtcctcaggaatcttcccgaagttgaatggagggagccccagcactgttgcccacctaccccgcgtaagcggaaacagaacccacgcgtgcctctgccccattacccccctaacccagcggcagcaatcgccgcagataccatgcctaagaggaaaaaacagaaccaccatcaacccccaactcaacaacaacccccactgcctgagcgggaagaaactggagacgaggaagatgggtcccccattggaccgccttcgctgctggggcctccacccatggccaacggtaagcccggagatcccaagagcgctctacatcggggtccaccgggatcccgcggacctcttataccgcctctgctcagccttccaccaccgccatggggcagagggccaattcggcgaggcttagggccaaggtcctcaccctatggtcggggttggtggggggtaaacgctgagccaccctttcccggacctggtcatggcggaccaacccgaggatcatttcataaggaacagcgaaatccaagaagactgaagagctggtccctaatcaaaaatacgtgtccgccaaaggacgacccacaggtgatggaagacaagtccgatagaccggtgtgtaggcatttcgctaagaaaggccactgtagatacgaggacctgtgcgcattttaccacccaggggtaaatggcccacccttatag

SEQ ID NO: 236176 - DNA, 504 bp, synthetic construct
  misc_feature 1..504: note = Description of Artificial Sequence: Synthetic coding sequence
  source 1..504: mol_type = other DNA
atgcccaagagaaaaaaacaaaatcatcaccagccccctactcaacagcaaccacccttaccagagcgcgaggagaccggagacgaggaggatggatcccccatcgcccttcatcgcggacccccaggcagtaggggccctctgattcctcctttgctttccttgccgcctcctccatggggcagagggccaatcagacgcggattgggtcccaggtcatccccctacggcagagggtggtggggtgtgaatgccgagccccctttcccgggaccgggacacggaggccctactcggggaagctttcacaaggagcagcggaatcctcgccgtcttaagtcttggagtctgatcaaaaatacatgtccgccaaaagacgatccccaggtgatggaggacaagagtgaccgccctgtatgcagacacttcgccaagaagggccactgccgttacgaggacctttgcgccttctatcatcccggtgtaaatgggcctccgctctag

SEQ ID NO: 236177 - DNA, 567 bp, synthetic construct
  misc_feature 1..567: note = Description of Artificial Sequence: Synthetic coding sequence
  source 1..567: mol_type = other DNA
atgcccaaaaggaagaaacaaaatcatcatcagccacccacccagcagcagccccctctgcccgagagggaggagaccggcgatgaagaagacgggagtccaatcggccctccttctctgctcggcccacccccaatggctaacggcaagccaggtgaccccaagagcgccctgcataggggccctccaggttcacgtggaccactgatcccgcctctgctgtccctgcctcccccaccatgggggcgagggcctattcggaggggcctggggcctcgcagctctccttatggcaggggttggtggggcgtgaatgcagagcccccttttcccggaccagggcatggcggacccactcgtgggtcttttcacaaggaacagaggaatccacggaggctgaagtcctggtcattgatcaagaacacctgtcctcccaaagatgacccacaggtcatggaggacaagtctgatcggcctgtctgccgccacttcgcaaaaaaaggtcactgcaggtatgaggatctttgtgcattctaccaccctggcgtgaacggccctcccctatag

SEQ ID NO: 236178 - DNA, 567 bp, synthetic construct
  misc_feature 1..567: note = Description of Artificial Sequence: Synthetic coding sequence
  source 1..567: mol_type = other DNA
atgcctaaaaggaaaaaacaaaatcaccaccagcctcctacacaacagcagcctcccttgccagagagagaggaaactggggacgaagaagacggcagtccaatcggacctccatctttactgggcccaccacccatggccaatggaaagccaggcgacccaaaatctgcgttacatagaggtcctcccggatcacggggacctctcattcctcctctgctgagtctgcctccaccaccatggggtcggggaccaatcaggagagggctgggacctcgatctagcccctatggacgtggatggtggggcgtgaatgcagaacctccctttcccggtccgggtcacggcggtccgactagaggttcattccataaggagcagagaaacccccgaaggctaaaatcatggtccctcataaagaatacgtgtccacccaaggatgatcctcaggtcatggaagacaaatcggaccgcccagtgtgtaggcactttgcaaagaagggtcactgcaggtacgaggacctctgtgccttttaccatccaggcgtgaacggaccgcctttgtag

SEQ ID NO: 236179 - DNA, 504 bp, synthetic construct
  misc_feature 1..504: note = Description of Artificial Sequence: Synthetic coding sequence
  source 1..504: mol_type = other DNA
atgcctaaacggaaaaagcagaatcaccatcagccgccaacacaacagcagcccccactgcctgaaagggaggaaaccggggacgaggaagacggctctcctatcgcactgcaccggggaccaccaggatcgagggggccattaatccccccacttctatcccttccccctcctccatgggggagggggccaatccggagaggcttaggtcctaggagtagcccatacggtagaggttggtggggagtcaatgccgagcctcctttccctggcccaggacatggagggcctacacgcggatcctttcacaaggaacagcgtaacccccgtcgattgaaaagttggtccctgatcaagaatacttgccctccaaaagacgatcctcaagtgatggaagacaaatctgacagaccagtctgtcgacacttcgcaaagaaaggccactgtaggtatgaagatctctgtgcattctaccaccccggtgtgaacggtcctccactgtag

SEQ ID NO: 236180 - DNA, 504 bp, synthetic construct
  misc_feature 1..504: note = Description of Artificial Sequence: Synthetic coding sequence
  source 1..504: mol_type = other DNA
atgccaaagcggaagaagcagaatcaccaccaaccaccaacacagcagcagccaccccttcccgaaagagaggaaaccggcgatgaggaagacgggtcccctatcgcactgcacagaggacctcccggtagccggggacccctgattccgccacttcttagtttgccccctcccccttggggtagaggcccaatacgccgaggtctgggccctcggtcttctccatacggaagaggctggtggggtgtgaatgcagagcccccattcccgggtcctggtcacgggggacccacgcggggttcattccacaaggaacagcgcaacccacggagactaaagagctggtccctcatcaagaacacttgtccacccaaggatgaccctcaggttatggaggataaatctgacagacctgtgtgtcggcactttgcaaaaaaaggacattgtcgctacgaagacctctgtgccttctaccaccctggcgtgaatgggccaccactctag

SEQ ID NO: 236181 - DNA, 504 bp, synthetic construct
  misc_feature 1..504: note = Description of Artificial Sequence: Synthetic coding sequence
  source 1..504: mol_type = other DNA
atgcccaaacgcaagaaacaaaaccaccaccagcctccgactcaacagcaaccccctctgcctgagcgggaagagaccggggacgaagaggacggaagccctatcgctctgcacagaggaccccctggtagccgcggaccattgattccaccactgctgtcactgcccccacccccatggggcaggggtcctatcagacgtggtctcggcccacgcagcagcccatatggtcgaggctggtggggtgtgaacgctgagcctccattcccagggcctgggcatggtggacctaccaggggcagttttcacaaagagcagaggaatccacgtcggctgaagtcgtggagtctcatcaaaaacacttgcccacccaaagacgacccccaggttatggaggataagagcgacagacctgtgtgcaggcactttgcaaagaaagggcactgcagatacgaggacttatgcgcgttctatcatcctggggtgaacggtccccctctgtag

SEQ ID NO: 236182 - DNA, 567 bp, synthetic construct
  misc_feature 1..567: note = Description of Artificial Sequence: Synthetic coding sequence
  source 1..567: mol_type = other DNA
atgcctaagcgtaagaaacagaatcaccaccagcctcccactcagcagcagccacccctgccagagcgcgaggaaacgggcgacgaagaggatggcagcccaattggccctccctccctccttggccctccacccatggcaaatggaaagcccggagatccgaaatctgctctgcaccggggaccacccggtagccggggaccactaatccctcccctactgtccttaccgcctccaccctgggggagaggccctattcgcagagggctggggcctcgttcctccccctacggccgtggctggtggggagttaacgctgaacctccctttcccggtcctggccatggtggcccaacacgcggatccttccacaaggaacagcggaaccctcgcagacttaaatcatggtccctcataaaaaatacctgtccccctaaggatgaccctcaggtgatggaggataagtcagatagacctgtgtgccgacacttcgccaaaaaaggtcactgtaggtacgaggacctttgtgccttttatcatcccggtgtaaatgggccaccgctgtag

SEQ ID NO: 236183 - DNA, 567 bp, synthetic construct
  misc_feature 1..567: note = Description of Artificial Sequence: Synthetic coding sequence
  source 1..567: mol_type = other DNA
atgccgaagagaaagaaacaaaatcatcatcagccccctactcagcagcaaccccctttacctgagagggaggagaccggagacgaggaagacggatcccccatcggccctccttctctactgggcccaccacctatggctaatggcaagcctggggatcccaaatcagccctccatcgcggacccccaggctcaagaggccctttaattccacctcttctgtccctgcctccacccccatggggtcgtggtcctattaggcgaggcctcggccctcgtagttccccttacggcaggggctggtggggagtgaacgcggagccccctttccccggaccaggccacggcggtcctaccaggggaagctttcacaaagagcaaaggaatccgagacgcctgaagagttggtcccttataaagaacacctgtcctcctaaagatgaccctcaggtgatggaagacaagagcgacaggcccgtatgtagacactttgccaaaaagggccactgtcggtacgaggacctctgtgcattttatcaccccggtgtgaacgggcctccactgtag

SEQ ID NO: 236184 - DNA, 504 bp, synthetic construct
  misc_feature 1..504: note = Description of Artificial Sequence: Synthetic coding sequence
  source 1..504: mol_type = other DNA
atgcccaagcgcaaaaagcaaaatcaccatcagcctccaacgcaacagcaaccccctcttcccgaacgagaggaaactggcgacgaggaagacggctcccctatagctctacacagggggcctccaggttctcgtggccctctcatcccgcctttgcttagcctgccgccacctccatggggccgtggccctatccgtagggggcttggaccaaggtcttcaccgtatggcagggggtggtggggagtgaacgccgaaccacctttccctggccctggccatggagggcctactcggggatcctttcacaaggaacagcggaatccacgtcggttgaaaagttggtctctgattaagaatacgtgcccaccaaaagatgatccccaagtaatggaagacaagtccgatagaccggtctgccggcattttgctaaaaaggggcactgtagatatgaggatctgtgtgccttttaccacccgggagtcaacggcccaccgttatag

SEQ ID NO: 236185 - DNA, 504 bp, synthetic construct
  misc_feature 1..504: note = Description of Artificial Sequence: Synthetic coding sequence
  source 1..504: mol_type = other DNA
atgccgaaacgcaagaagcagaaccatcatcagccaccaacacagcagcagcctccattaccggaaagggaagagacgggggacgaagaggatggatcccctatcgccttacacaggggaccgcctgggtctcggggacccttaataccccctttgctgtctctaccacccccaccttggggtagggggccaatcagacgaggccttgggccaagatccagcccttatggcaggggctggtggggcgtgaatgccgagccgccttttcctggtccgggtcatgggggacccacccggggttcctttcacaaggagcagcggaatcctagacggcttaagtcatggtctctgatcaaaaacacctgcccaccgaaggacgacccccaggtaatggaagataagagcgaccgacccgtgtgccgtcactttgccaaaaagggacattgccgatacgaggatttatgtgcgttctatcacccgggagtgaatggccctccgctttag

SEQ ID NO: 236186 - DNA, 504 bp, synthetic construct
  misc_feature 1..504: note = Description of Artificial Sequence: Synthetic coding sequence
  source 1..504: mol_type = other DNA
atgcccaagaggaagaagcagaatcatcatcagccccctacacagcagcagccaccccttccagaacgcgaagagacaggggatgaggaggacggttccccaatcgccctgcacaggggccctccgggtagccgaggcccactgatcccacctcttcttagcttgccacctcctccatggggtcggggaccaattcggagggggctggggcctcggagtagtccctacgggcgtggatggtggggcgtgaacgcggaaccacccttcccaggccctggacatggcggacccacgagagggtcttttcataaagagcagcgaaacccaagacgtctcaaaagctggagtctcataaagaatacctgtccacccaaggacgatcctcaggtgatggaggataagtctgatcggccagtctgtcgtcattttgccaagaaaggccattgtcgctatgaggacctgtgcgctttttaccacccaggtgtcaacggccctccactgtag

SEQ ID NO: 236187 - DNA, 567 bp, synthetic construct
  misc_feature 1..567: note = Description of Artificial Sequence: Synthetic coding sequence
  source 1..567: mol_type = other DNA
atgcctaaacgtaagaagcagaatcatcaccaacccccaactcagcaacagcccccactacccgaaagagaagagacaggagatgaagaagacggatcccccataggtcctccctctctgctcggccctccccctatggccaatgggaagcctggagatccaaagtccgccctccaccgtggaccaccaggtagccgaggccctctaatacctcctcttctgtctttgcctcctcccccttggggtcgcggacctatccgacgtggactgggtccgcgatcttccccttacgggaggggctggtggggcgtcaatgccgagcccccattcccaggaccagggcatggcggaccgactagagggtccttccacaaggagcagagaaacccacgcaggctgaaaagctggagcctcattaaaaacacctgtcctcccaaggacgacccacaggttatggaggacaagagtgatcggccagtgtgccgtcactttgctaaaaagggacattgccgctacgaagatctttgcgccttttaccatcctggggtcaatggaccgcctctgtag

SEQ ID NO: 236188 - DNA, 567 bp, synthetic construct
  misc_feature 1..567: note = Description of Artificial Sequence: Synthetic coding sequence
  source 1..567: mol_type = other DNA
atgccaaaaaggaaaaagcagaatcatcaccaacctcctacccagcaacagccgccacttccagaaagggaagagacaggggacgaagaggacggaagtcccatagggcctccatcgttgctcggccctccgccaatggcaaatggaaagcccggagaccctaagtctgctctacaccgtgggccaccagggtctaggggcccattgattccaccactgctaagcctccccccacctccctggggacgtggccctatccgacgcggacttggccctcgaagtagcccctacggccgtggctggtggggcgtgaacgccgagcctccgttccccggacctgggcatggcggaccaacacggggatctttccataaagagcaaaggaatccccgacggctgaagagctggagcctgattaagaatacatgccctcctaaagacgacccacaagttatggaagataagtcagatcgcccagtgtgtcggcatttcgccaagaagggtcactgtcgctacgaggacctgtgtgcgttctatcatcctggagtgaacggaccaccattatag

SEQ ID NO: 236189 - DNA, 567 bp, synthetic construct
  misc_feature 1..567: note = Description of Artificial Sequence: Synthetic coding sequence
  source 1..567: mol_type = other DNA
atgcccaagcgaaagaaacagaaccaccatcagcccccaacacagcagcagccaccactgccagaacgagaagagaccggtgacgaagaggacggttcacctattggccctccttccctcctgggaccgccacctatggccaacggcaaaccaggggatcccaagtccgccctgcataggggaccacccggatccagggggccactaatccccccattgctttctctccctcctcctccttggggcagagggcctataagaaggggcctcggcccaagatcttctccatatgggagaggatggtggggtgtgaacgccgagcccccatttcctggtccagggcacggcggacctaccagagggtccttccacaaggaacagcgtaacccaaggaggcttaagagttggagcctgatcaagaatacatgccctccgaaagatgaccctcaggtcatggaggacaagtcagatcgaccggtatgccggcacttcgccaaaaaggggcattgccggtacgaggacctatgtgccttctaccatccgggtgtgaatggccctcccctgtag

SEQ ID NO: 236190 - DNA, 762 bp, synthetic construct
  misc_feature 1..762: note = Description of Artificial Sequence: Synthetic coding sequence
  source 1..762: mol_type = other DNA
atgccagggaggacggagggtggtagctggctccggaatgctgccgctgcagacgttctgcggaaccttccagaagtggaatggagagagccccagcactgctgcccacctacccccaggaagcgcaagcagaacccaagagtaccactgccacactatccacccaatcccgctgctgccatcgccgcagacaccatgcctaaacggaaaaagcagaatcaccaccagccccctacgcaacaacagcccccacttcctgagcgggaggagaccggggacgaagaagatggatcccctatcggtccgccatccttactaggacctcccccaatggcgaatgggaaacccggtgaccccaagtccgccctgcacagaggcccacccggatcccggggtcctctgatccctccattgctctctctccccccacccccatggggcagaggtccaattcggagggggttaggtccacgatccagcccttatggacgcggttggtggggtgtgaacgccgagcccccatttcctggaccaggccacgggggtcctacccgaggctccttccacaaagagcaaaggaacccgagaaggttaaagagctggagcctgatcaagaatacatgccctccaaaagatgatccacaggtgatggaggataaaagtgaccgcccagtctgtaggcattttgcaaagaaagggcattgtcggtacgaggatttatgcgcattctaccacccaggcgtgaatggacccccattgtag

SEQ ID NO: 236191 - DNA, 762 bp, synthetic construct
  misc_feature 1..762: note = Description of Artificial Sequence: Synthetic coding sequence
  source 1..762: mol_type = other DNA
atgccagggaggaccgaaggcggatcctggctgaggaacgctgccgcagccgacgtcctgcgcaatctgcccgaggtggagtggcgggaaccacagcactgctgccctcccacccctaggaaaagaaagcagaatcctcgggtaccccttcctcactatccacccaatccagcagcggcaatcgctgctgacaccatgccaaagcggaagaagcagaaccaccaccaacccccaactcaacagcagccaccactgcctgagcgcgaggagacaggggatgaagaggatggctctcccattgggcctccctcccttctgggccctccccctatggccaacggcaaacctggggatccgaagtcagcgctccatcgcggaccacctgggtcacggggaccactcattccccctctcctgtcgttgccaccccctccatgggggagggggcctatccggagaggccttgggcctcgcagctccccttatggaaggggttggtggggtgtgaacgctgaacccccttttccaggaccgggacacggcggaccgacacgtggtagtttccacaaagagcaacggaacccaagacgactcaaaagctggagccttataaagaatacttgtccccctaaagatgatccacaagttatggaagacaagtctgatcggccagtgtgtcgtcacttcgctaaaaagggacactgcaggtatgaggatctctgtgcattttaccatcctggtgtgaacggaccgccactgtag

SEQ ID NO: 236192 - DNA, 762 bp, synthetic construct
  misc_feature 1..762: note = Description of Artificial Sequence: Synthetic coding sequence
  source 1..762: mol_type = other DNA
atgccgggtcgcactgaaggagggtcttggctgcgcaatgccgctgcagcggacgtattgagaaacctgcccgaagttgaatggcgggaaccccagcactgctgcccaccgaccccgcgaaaacggaaacagaacccgcgagtaccgttgccgcattatcccccaaatccggctgccgcaatcgctgccgacaccatgccaaagcggaagaaacagaaccaccaccagccccctacccagcaacagcctcccttacccgaacgagaggagactggagacgaagaggatggtagcccgatcggacctccttctttgctcgggccacctcctatggctaacggaaagcctggggatcccaagtccgccctgcaccgaggtccacccggttctagaggccctctgatcccgccacttctttctcttccaccacctccgtggggcagaggaccaatcagacgtggcctggggcctagaagctccccatatggccgtgggtggtggggcgtgaatgctgagccgccatttcccggtcccggtcacgggggtcctacaagaggctccttccataaagagcagaggaaccctcggagactcaaaagctggagcctgataaagaacacatgccctcccaaggatgatccacaggtgatggaggataaaagcgatagacccgtctgccgccactttgcaaaaaaagggcactgtcgttatgaggacctgtgcgctttctaccatcctggggttaatggaccacctctctag

SEQ ID NO: 236193 - DNA, 762 bp, synthetic construct
  misc_feature 1..762: note = Description of Artificial Sequence: Synthetic coding sequence
  source 1..762: mol_type = other DNA
atgccaggccgaactgaaggagggtcgtggcttcggaatgccgctgccgcagatgtcttacggaaccttcccgaggtcgagtggcgagagcctcagcactgctgcccaccaactcccaggaagcgtaaacagaatccacgggttcccctgccccattatccaccaaatcccgcagcagccattgccgctgacacgatgcccaaacgtaagaagcagaaccaccaccagcctcccacacagcagcagccacctctcccagagcgggaagaaactggcgatgaagaagacggctcaccgattggacctccctccctgcttggccctcccccaatggcaaacgggaaacctggagatccaaaatccgcactacaccggggacctcctggcagccgcggaccactgattccccctctgctatccctccctcctccaccctggggaagaggaccaatccgcagaggattgggacctaggagctcaccatacggcagagggtggtggggagtgaatgcagagccaccatttcctggacccggacacggcggacccactaggggatcattccacaaggagcagcgtaatcccagacgattgaaaagttggtccttgatcaaaaacacttgcccgcctaaggacgacccccaagtaatggaagataagtccgatcgccctgtctgtcgacactttgccaaaaagggccactgtaggtacgaggatctctgcgccttttatcacccaggtgtgaacggtccaccactatag

SEQ ID NO: 236194 - DNA, 762 bp, synthetic construct
  misc_feature 1..762: note = Description of Artificial Sequence: Synthetic coding sequence
  source 1..762: mol_type = other DNA
atgccaggcaggactgagggaggctcctggctgaggaacgccgctgcagccgacgtgttgcgcaacctgccggaggtggaatggagagagcctcagcactgctgcccccctacaccccgaaagaggaaacagaaccccagagttccgctgccccactatcctccaaaccccgcagctgcaattgccgcagacacgatgccgaagcgcaagaaacagaaccaccaccagcccccaacccagcagcagccacccctcccagagcgcgaggagactggcgatgaagaggacggaagcccaatcggcccaccctccctgctgggtcctccacctatggctaatggcaagcctggtgacccaaagtccgctttgcatcgcggtccccctggaagcagaggtcccctgatcccaccactgctgagtctgccaccgccaccatgggggagaggaccgatacgcagaggcctggggcctcggtcatctccgtacgggcgtggatggtggggggtcaacgctgagccaccatttcctggcccagggcatgggggtccgacaagaggctccttccacaaggagcagaggaaccctaggcgacttaagagctggagcctgattaagaatacatgtccacccaaggacgatcctcaagtgatggaggacaaatccgaccgccctgtttgtaggcacttcgccaagaagggacattgccgctacgaggacctctgtgccttctaccaccccggtgtgaacggtccacctctgtag

SEQ ID NO: 236195 - DNA, 762 bp, synthetic construct
  misc_feature 1..762: note = Description of Artificial Sequence: Synthetic coding sequence
  source 1..762: mol_type = other DNA
atgcctggaagaacggaaggagggagctggctacgtaacgccgctgcagccgatgtgctcaggaatctgccagaggtggaatggagggagcctcaacactgttgcccacccacccccaggaagaggaaacagaaccctagggttccactcccgcactaccctccaaatcctgcagcggctattgcagcagacaccatgccaaaaagaaaaaaacagaaccaccatcagccacccacccagcagcagcctccacttccggagagggaagagacaggtgacgaagaggacgggtcgcccatagggccaccttctctcctcggccctccccctatggccaacggtaaacccggtgaccctaagtctgctttacatcggggaccaccaggatcaagaggaccactcattccacccctgttaagtctcccacctccgccatggggaagagggccaatacgccgtgggctgggccctcggagctcaccatacggtaggggctggtggggggttaatgccgagccaccttttcctggtccaggccatgggggaccgactaggggctcattccataaggagcagaggaaccccagaaggctcaaatcatggagcctgatcaaaaatacttgccctccgaaggatgacccgcaggttatggaagataaaagcgatcggccagtctgccggcatttcgcaaagaaaggccactgtaggtatgaagatctctgtgctttctaccatcctggtgtgaacggccctccactgtag

SEQ ID NO: 236196 - DNA, 1344 bp, synthetic construct
  misc_feature 1..1344: note = Description of Artificial Sequence: Synthetic coding sequence
  source 1..1344: mol_type = other DNA
atgagatctgtctcttacgtgcagagggtggcgctagaatttagcgggagcctctttcctcacgccatctgcctgggcgatgtcgacaacgacacactaaatgaactggtggtcggagatactagtggtaaggtgagtgtatataagaatgacgattcacgtccctggctgacctgctcatgccagggcatgctgacttgcgttggagtcggagacgtgtgtaacaagggcaagaacctgttggtggcagtcagcgcagaaggctggtttcatctatttgatctgactcctgccaaagttctggacgcttcagggcatcacgagacactaatcggcgaagagcagcgtcctgtatttaagcaacacatcccagcaaatacgaaagtgatgctcatttcggatatagacggggacgggtgtcgcgagttggtggtcggctacaccgacagggtggtgcgagcatttcggtgggaggagttgggtgagggcccagaacacctgaccgggcagcttgtttctctgaaaaaatggatgctcgagggccaggtggacagcctgtctgttacccttggacccctcgggcttcccgaactgatggtgagtcagccagggtgcgcttacgctatcctgctgtgcacgtggaaaaaagacactggttcgccaccagcatccgagggaccaactgatggttccagagaaacaccagcggcacgagacgtagtgcttcatcagacaagcggtcgcatccacaacaaaaatgtgtcgacacacctcatcgggaatattaaacaggggcacggaacagaatcctcagggtccggtctgttcgcactgtgcacccttgatggtacccttaagcttatggaggagatggaagaggcagacaaactgctttggtccgtacaggtggaccaccagctgttcgcattagagaaacttgacgttacagggaacggacacgaggaagtcgtggcctgtgcatgggacggccagacatatatcattgatcacaacagaactgtcgtgcgctttcaggtggacgagaatatccgagccttctgtgctggcctatacgcgtgcaaggaaggtcgtaacagcccatgcctagtgtacgttacgttcaatcagaagatatacgtatactgggaagtgcagctggagagaatggagtctacgaatttagtgaagttacttgagaccaagccagagtaccacagtctgttgcaggagctaggggtagatcctgatgacctccctgttactagagctctccttcatcagaccctctaccatcccgaccagccaccacagtgcgcgccttcaagcctccaggatccaacctag

SEQ ID NO: 236197 - DNA, 381 bp, synthetic construct
  misc_feature 1..381: note = Description of Artificial Sequence: Synthetic coding sequence
  source 1..381: mol_type = other DNA
atgcttcttgtgctactctccgtggttttattagccctgtcaagcgcacagtcgacggacaatgatgtcaattatgaggactttactttcaccatccccgacgtggaggattcctacctggatcccctggtcattgtcgtcaccaagatgatggtgctgagccgggatcaccagaatcaggaggctataactgcaatcttgcctcatctcctgtttaaaatctctaatgaccaccctgatgaagacacggttaatagcttatatccagattttctgctttccgcctgtcgaaaacaccaccattcttcccggggaaccgaccagcaggacataccaaggagtaaccactctggcaacctggagtttagtggaagaaaatag

SEQ ID NO: 236198 - DNA, 198 bp, synthetic construct
  misc_feature 1..198: note = Description of Artificial Sequence: Synthetic coding sequence
  source 1..198: mol_type = other DNA
atgctgctagtgctgctctcagtggtgctgcttgctctttccagtgcccaatcaacagacaacgacgtcaattatgaggatttcaccttcaccatcccagcttgcagaaagcaccaccactcaagccggggtactgatcagcaggatattcccagaagcaaccacagcgggaatctcgaattctcaggacgcaagtag

SEQ ID NO: 236199 - DNA, 696 bp, synthetic construct
  misc_feature 1..696: note = Description of Artificial Sequence: Synthetic coding sequence
  source 1..696: mol_type = other DNA
atggccgtgtttctggaggccaaagatgcacacagcgttctcaagcggtttcctcgcgctaatgaattcttagaagaattgcgtcaggggaccattgagcgcgaatgcatggaagagatttgttcctacgaggaggtgaaggaggtcttcgagaacaaggagaagactatggagttctggaagggctacccgaatgccgtctacagcgtaagagacccctcccagagttcagatgcaatgtacgtcgttgtgcctctgctgggggttgctctcctgatcgtgatcgcccttttcattatctggaggtgtcaacttcagaaggccactagacaccacccaagctacgcccagaaccggtatctggcctcacgggctggccacaccctgcctcgggtgatggtttatagagggacagtacactctcagggagagccaagtggccacagagaagcagccaactcaccccaggttgtgctcggaccaagccgtggcggtcgcacaacagtaagactcgaaagtactctctatctccctgaattaagtctgagccggctgtcgtcaacaacgcctccaccaagctatgaggaggtaaccgcaccgcaggagtctagttccgaggaggcttcggttagctattctgaccctcccccaaagtatgaggagatagttgctgctaaccccggagctgataaatag

SEQ ID NO: 236200 - DNA, 309 bp, synthetic construct
  misc_feature 1..309: note = Description of Artificial Sequence: Synthetic coding sequence
  source 1..309: mol_type = other DNA
atggcagggctgtcccgggcactatcttccgtgtttctcgaagctaaggatgcccatagcgtgttgaagcgctttcctagagccaatgagtttctcgaggagctgaggcaggggactatcgagagagagtgcatggaagagatatgcagctacgaagaggttaaagaagtattcgagaacaaggaaaaaaccgcctgtacaaccctcggtctcgtgcttggcgtgggggtggccagcggtattgccaggacagggccaggtaacgcggatcagagtgaggcacgcaaggatactcagcccaaggcatag

SEQ ID NO: 236201 - DNA, 276 bp, synthetic construct
  misc_feature 1..276: note = Description of Artificial Sequence: Synthetic coding sequence
  source 1..276: mol_type = other DNA
gaccccagccaaagcagcgacgctatgtatgtggtggtccccctcctgggcgttgcgctgttgatagtgatcgcactgtttatcatatggcgctgccaactgcagaaagccactaggcaccatccgtcttatgctcagaatagacgatgctttgcggtgagacttgccgctccttcctttgcgagtaaatattcaaacgtgggagcctttccttttagactgtgggcagcttctttgagcctagcccgtatctatctgaccaacatccccaagtag

SEQ ID NO: 236202 - DNA, 159 bp, synthetic construct
  misc_feature 1..159: note = Description of Artificial Sequence: Synthetic coding sequence
  source 1..159: mol_type = other DNA
atggccgtcttcctagaggcaaaggacgcccactccgtccttaaacgttttccaagagccaatgagtttttagaagaactgcgacagggcacaatcgagcgcgagtgcatggaggagatttgctcttatgaagaggtaaaagaggtcttcgagaactag

SEQ ID NO: 236203 - DNA, 696 bp, synthetic construct
  misc_feature 1..696: note = Description of Artificial Sequence: Synthetic coding sequence
  source 1..696: mol_type = other DNA
atggccgtgtttttggaagcaaaagatgctcactccgtgttaaaaagattccccagggccaatgaattcctcgaggaactgaggcagggcaccattgaaagagaatgcatggaggaaatctgctcttatgaggaggttaaggaggtttttgagaacaaggagaagaccatggaattttggaagggctatcctaatgccgtgtactcagtgagggacccatcccagtctagcgacgccatgtatgttgtcgttccgcttctgggtgtggctttgcttatcgtaattgctctgttcataatctggaggtgccagttgcaaaaagctacaagacatcaccctagttacgcccagaatagatacttggcttccagagcagggcatacactcccgcgagttatggtgtacaggggtaccgtgcatagccagggagagccgtccggacaccgagaggctgccaactccccccaggtcgttcttgggccatcccgtggagggcgtacaacagttcgcctcgagtcaaccctgtacctcccagagcttagcctgtctagacttagtagtactaccccccctcccagctacgaggaggttactgctccacaggagagttcatccgaggaggcctccgtctcctatagcgatcctccgccaaagtatgaggaaattgtggccgcaaatccaggcgctgataagtag

SEQ ID NO: 236204 - DNA, 681 bp, synthetic construct
  misc_feature 1..681: note = Description of Artificial Sequence: Synthetic coding sequence
  source 1..681: mol_type = other DNA
atgttcacccttctggtgttattgtcgcaacttcctactgtgacattagggtttccacactgtgcccgtggccctaaagcaagcaaacacgccggtgaagaagtgtttacctctaaagaggaagccaacttctttatacaccgtcgattgttatacaatcggtttgaccttgaactgttcacccccggaaatctcgaacgagagtgcaatgaggagctgtgtaattatgaagaagccagggaaatcttcgttgatgaggataaaacgatcgcattctggcaggagtattccgccaaggggccaacaaccaagtccgacggaaatcgggaaaagatcgacgtgatggggctactcaccggcctgattgcggcaggggtgttcctggttatattcggattgctcggatattatctgtgtattacgaaatgcaacagactgcagcacccttgttcctcagctgtgtatgaacgtggaaggcataccccatcgatcatcttccgaagacctgaggaggccgctctgagccccttaccaccctctgtggaggatgccggtttaccttcttatgaacaagcggtcgcactcacacgcaagcattcggtgtcgcctccacccccttacccaggccataccaaaggttttcgcgtgttcaagaagtctatgagcctgccctcccactag

SEQ ID NO: 236205 - DNA, 375 bp, synthetic construct
  misc_feature 1..375: note = Description of Artificial Sequence: Synthetic coding sequence
  source 1..375: mol_type = other DNA
atgctccttagagatttagtgctgcggcgaggatgctgctggagcagccttctgttacactgcgccctgcacccactgtggggttttgtgcaggtgactcatggagaaccacagaagagttgctctaaagtgactgacagctgccggcatgtctgtcagtgccggcctcccccaccgctgccaccccctcctccacctccacctcctccccgactactctcagctccagcccctaactccacctcttgccccaccgaggagtcttggtggagcggtttggtcatcattattgccgtgtgttgtgccagcttggttttccttacggttctggtgattatatgctacaaggccataaagcggaatcatgcaatctag

SEQ ID NO: 236206 - DNA, 462 bp, synthetic construct
  misc_feature 1..462: note = Description of Artificial Sequence: Synthetic coding sequence
  source 1..462: mol_type = other DNA
atgcttctcagagaccttgtgttgcgcaggggatgttgctggtcttccttactattacattgtgctctccatccactctggggatttgtgcaggtgactcacggtgagcctcaaaagagttgctctaaggtgacagactcctgtcgccacgtgtgtcagtgccggccaccgcctccgctaccgccacctccaccacccccacctccacctcgcctgctgtctgccccagcccctaattccactagctgtcccacagaggagtcctggtggtcaggccttgtgataatcattgccgtttgttgcgccagtctggtgtttcttactgttctggtgatcatatgttacaaggcaatcaaaaggaaaccgctcagaaaggatgaaaacggaacctctgtggcagagtatccaatgagcgccagtcaaagcaataaaggcgtggatgtgaacaatgccgtcgtatag

SEQ ID NO: 236207 - DNA, 462 bp, synthetic construct
  misc_feature 1..462: note = Description of Artificial Sequence: Synthetic coding sequence
  source 1..462: mol_type = other DNA
atgctgctgagggatctggtactgcgacggggatgttgctggtcaagcctgttgctgcattgcgccctccaccccctgtggggattcgtgcaggtgacacacggggagccgcaaaaatcctgttcaaaagtgaccgactcctgccggcatgtttgccagtgccgaccgccacctccgctgccacctccacctccgcctccaccaccccctcgcctcttaagcgcccctgctccaaacagcacctcctgtcctacagaggagtcctggtggagcggccttgtgatcatcatagcggtgtgttgcgccagtctggtctttctgaccgtgcttgtaatcatctgttataaagctataaagaggaagccgcttaggaaggatgagaatgggaccagcgtcgcagagtatcccatgtctgcaagccaaagcaataagggggttgatgtcaacaatgccgtggtgtag

SEQ ID NO: 236208 - DNA, 828 bp, synthetic construct
  misc_feature 1..828: note = Description of Artificial Sequence: Synthetic coding sequence
  source 1..828: mol_type = other DNA
atgtggcgggctggtagcatgagcgctgagcttggggtcgggtgtgccctgcgagccgttaacgagcgagtgcagcaggctgtcgcccgtagacccagagacctgcccgcaattcagccccgattagtggccgtatcaaagaccaagcctgcagacatggttatagaagcttatggtcatggtcagcgaacatttggagaaaattacgtgcaggagcttctggagaaggcctctaatcccaaaatattaagcctctgtcctgaaatcaagtggcactttatcgggcacttgcagaaacaaaatgttaacaaactaatggccgttccaaatctgtttatgcttgaaaccgtggatagtgtgaagcttgctgacaaagttaattcgtcctggcagaggaagggatcaccagagcgtttgaaagtcatggtgcaaataaatacaagtggggaggaaagtaagcacggcctccccccttccgaaaccatcgcaatcgtggaacacatcaacgctaagtgcccgaacctagaattcgtaggactcatgaccatcgggtcgtttggtcacgatttgagccagggcccaaaccccgacttccagctcctgctatctcttagggaggagctatgcaagaagcttaacatccctgcagatcaggtggaactatccatgggtatgtctgccgacttccagcatgcggtagaagtggggtctactaacgtcaggattggttccacaatctttggtgaacgcgattatagtaaaaagccaacacccgacaagtgtgccgctgatgtcaaagctcccctagaagttgcacaggagcattag

SEQ ID NO: 236209 - DNA, 1149 bp, synthetic construct
  misc_feature 1..1149: note = Description of Artificial Sequence: Synthetic coding sequence
  source 1..1149: mol_type = other DNA
atgcggtcccctttgtgttggctgctgccgctgctgattctcgcttcagtggcacagggccagccaacccggcgaccacgaccagggacagggccaggcaggcgtccaagacctaggcctcgccctacccccagcttcccccagcccgatgagcctgctgaaccaacagacctgcctccgccattaccgccaggcccacctagtatttttcctgattgtccccgagaatgctattgtcctcccgacttcccgtcagctctctactgcgacagcagaaaccttcgaaaagtgcctgtgattccgcctagaatccattatctctatttacagaacaattttattacagagctgccagtcgagagttttcagaatgccactggactgcgctggattaacctggacaacaatagaatcaggaaaatcgaccagagggttttagagaagctgcccggactggtgtttctgtacatggagaaaaatcaacttgaggaggtgccgtccgccctccctcgcaatctcgagcaactccgcctgagccaaaaccatatctcccggatccctccaggtgttttcagcaagttagaaaatctgctcctcctggatctccaacataacaggctgagcgatggcgtttttaaaccagacacgtttcatgggctaaagaatctgatgcaactgaacctggcgcacaatatcctcaggaagatgccaccgagagtgcccaccgctattcaccagctctacctggattccaataagatagagacgatacccaatggatattttaaatcattccctaacctggcatttattcggcttaattataataaactcaccgatcgaggccttcccaaaaatagtttcaatatctcgaacctgctggtgttacacctgagtcacaatagaatcagtagtgtacccgcaataaacaaccgtctggagcacctctatcttaataacaacagtatagagaaaataaatggaacccaaatttgtccaaatgacctggtcgccttccatgacttcagcagcgacctagagaatgtcccacatcttagatatctgcgcctggacggcaactatttgaaaccaccgattcccctcgacttgatgatgtgcttcaggttattgcaatcggttgtgatttag

SEQ ID NO: 236210 - DNA, 1002 bp, synthetic construct
  misc_feature 1..1002: note = Description of Artificial Sequence: Synthetic coding sequence
  source 1..1002: mol_type = other DNA
atggaggatctggaggaggacgtgaggttcattgtggatgagaccctcgatttcggcggattaagcccctccgatagccgggaagaggaggacatcacagtcctggtgactccagagaagccactcaggcggggtctgagccataggtccgaccccaatgccgtcgcccctgccccacagggcgtgcggctttctctcggcccattgtctccagaaaaactggaagaaatcctggacgaggcgaaccgcctggctgcacagcttgagcagtgtgccctccaggaccgggagagtgcgggtgaaggcctcgggccacggagagtgaagcccagccctcgccgagagacatttgtcctgaaggactcgcctgtgcgggacctcctccccacagtcaactccttgacccgttccaccccttccccgtccagtctgaccccacggctgcgcagtaacgatagaaaaggcagtgtcagggctctgcgggcaacctccgggaaacgcccatcaaacatgaaaagagaaagcccaacttgtaacctgtttcccgcatcaaaaagcccagcaagcagcccgttaaccaggtcgacaccccctgtgcggggtcgggctggcccttccggacgggctgcggcaagcccacctaccccgatcagaagtgttcttgccccacagccgagtaccagcaacagccaacgtctgcctcgaccccagggagcggctgccaagtctagcagccaactgcccattccaagcgctatcccacggcctgccagccgcatgcctcttacctcacggagcgtgcccccaggcaggggtgcactccccccagactccttgtcaaccaggaagggtcttccacgcccttccacagccggtcatcgcgtgcgggagtcggggcataaggtccccgtatctcaacggttgaacctgcccgtaatgggggcaactcgctccaacctgcaacctccacgcaaggtggcagtcccaggacctacacggtag

SEQ ID NO: 236211 - DNA, 933 bp, synthetic construct
  misc_feature 1..933: note = Description of Artificial Sequence: Synthetic coding sequence
  source 1..933: mol_type = other DNA
atggaagacctggaggaagatgtaagatttatcgtcgatgaaactcttgatttcgggggactgtctccctctgattccagggaggaggaggatatcactgtgctggtgacaccagaaaagccactgcgcagagggttgtcacacaggagcgaccctaatgcagttgccccagcaccccagggcgttcgcctgtccctcgggcctctttccccggagaaactggaagagatcctcgatgaggctaaccgcctggctgctcaattggagcagtgtgcgcttcaggaccgagagtctgcaggtgagggactcggtccaagacgggtgaaaccatctccaagacgcgagacatttgtcctcaaggattcccctgtccgagatctactgcctactgtcaattcgttaacaagatctaccccctctcccagctccctgacaccgaggctgaggagcaatgaccggaaaggctcggttagagccctgcgggctacatccggtaagagaccctcaaatatgaagagggaaagccccacatgcaatttattccctgcttcaaagagtcccgcatcgtcgcccctgacaaggagcacaccaccagtgcggggtcgagccggtccaagcggtagagcggctgcgagcgaggaaacccgtgccgcaaagttgagagcctgccagccgaacgcaacccatcagcccgaatgtgccacttggcagaggtgtcccacgagtggtttttccgtcaactccaaacgggcaagtaaaaccaaacattgtcgcacgcagagcgcaggcaagtggactcagggcagttgctttccggcaacaaagtcctcgtgccatggctgccattctcagcaaagcgctgctccgcaagaaagcggatccccacgcacgtatcaggtgaagcgaagtggacagcaggccagattacaatag

SEQ ID NO: 236212 - DNA, 1002 bp, synthetic construct
  misc_feature 1..1002: note = Description of Artificial Sequence: Synthetic coding sequence
  source 1..1002: mol_type = other DNA
atggaggatctggaggaagatgttagattcattgtggacgaaaccctcgactttggaggattaagcccgtcagattcccgtgaagaagaagatattacagtccttgtaactccggaaaagcctcttcggagaggcctttctcaccggtctgaccccaatgctgtagcgccagccccacagggtgtgcgcctctccctggggcctttgtctccagagaaactggaagaaatcctggatgaagcaaacaggctggcagctcagctcgagcagtgcgctctccaggaccgggaatccgccggagagggcctcggaccacggagagtcaaaccctccccccgaagagaaactttcgtgctgaaggattcgccagttagagacctgctgccgacagtaaactcccttacaaggtccactccctctcctagctccttgacaccgaggttgaggtctaatgatcggaagggttcggttagggcgctgagggctacatcgggcaaaagacccagcaacatgaagcgcgagtcccctacatgcaatctcttccctgcatcgaagtccccagcctcgtcccctttaacacgatcgacacctcccgtgcggggacgcgcaggacccagtgggagagccgctgcgtcgccacccactcctatccggtccgtattggcgccacagccaagcactagcaattctcaacgcctgccacgtccccagggagccgctgctaagtcgagcagccaactcccgattccttcagctatccctcgtccagcctccaggatgccattaacatcccgcagtgttccaccaggacgcggtgctcttccgcctgactccctctcgactcgcaaaggtcttccgaggcccagtacggccggtcacagagttcgggagtccggtcacaaggtccccgtgagccagaggctgaatttgcctgttatgggggctacaaggtcaaatttacagcctcccaggaaggtggcagtgcctggacctacacgctag

SEQ ID NO: 236213 - DNA, 1002 bp, synthetic construct
  misc_feature 1..1002: note = Description of Artificial Sequence: Synthetic coding sequence
  source 1..1002: mol_type = other DNA
atggaggacctcgaagaggacgtgaggtttattgtggacgaaacgctggacttcgggggtcttagtcccagcgactcccgtgaagaagaggacattacagttttggtgacaccagaaaaacctctgcgacggggtctcagtcacaggtccgaccccaacgctgtggcacccgctccacagggagtccgactgtcactgggccctctgtccccggagaagttggaggagatcctagatgaagcaaaccgtctggctgcccagcttgagcaatgcgctctgcaggaccgagagtccgccggagaaggcctcggcccaaggagggtgaaaccaagtccccgacgggaaacttttgtcctgaaggacagtccagtgcgggatctattgcccacggtcaactccctgaccagatccactcccagtccctcttctctcacacccagactacgaagcaacgatagaaaaggttccgtacgagctctgcgcgcaaccagcggaaaacggccaagcaacatgaaacgggagagcccaacctgtaacctcttcccagcatcaaagtctccagcctctagtccactcactaggtcaacaccgcctgttcgtggacgtgctggcccttccggccgtgcagccgcaagtccaccaacacccattaggtctgtgctggccccacagccaagcacctctaattcgcagcggttgcctagaccccagggcgcagctgctaaatctagctctcaattgccaattccatctgccatccccagaccagcctcccggatgccgctgacttcacggagcgtccccccaggcaggggggcattgccccctgactccctgtcgacccggaaggggctccccagaccctctactgccggacatagagtgagagagtcaggacataaggtcccggtgagtcagagactcaacttaccagtcatgggagcaactcgttctaacctccagcccccaagaaaggtggctgtgcccggaccgacccgctag

SEQ ID NO: 236214 - DNA, 1002 bp, synthetic construct
  misc_feature 1..1002: note = Description of Artificial Sequence: Synthetic coding sequence
  source 1..1002: mol_type = other DNA
atggaagacttggaagaggatgttaggtttatcgttgacgagacactggacttcggaggcctatccccgtctgacagccgagaagaagaggacatcactgtgctggtgacccccgagaagcctctacgcagggggttgtcccacaggagtgaccctaacgcagttgcacctgctcctcaaggggtgcggctctctctgggcccactgtctccagagaagttagaagagattctggatgaagccaaccgccttgcggcacagcttgaacaatgcgcacttcaggatcgcgagtcggcaggcgaggggctggggcctcggagggttaaaccgagccctaggcgagagacctttgtattgaaagacagcccggtgcgcgatctgttaccgacagttaactcactgacgcgcagcacacctagtccaagttctttgacaccacggctgcgctcaaacgacagaaaggggtcggtccgggctctgagggcgacctctgggaagcgaccttcaaatatgaaacgcgagtcccccacctgcaacctcttcccagccagcaaatccccggcatcttctccactcacccgctcgaccccgccagtgaggggtcgggctggcccatctggcagagccgcagcttctccccctactcccatcagaagcgtcctggccccacaacccagtacatccaactcacaacggctgccgaggccgcaaggggctgctgccaagagctcctctcagctgcctattccctcagctatccccaggccggctagtagaatgcccctcacatcccgaagcgtgcctccaggcaggggcgcattgcccccagatagtctctcaacccgcaagggactgcccagaccttctaccgcaggccatagagtgcgcgaatccgggcataaagtcccagttagtcaacgcctgaatctccccgtcatgggggctacacgttccaatctgcaaccgcctagaaaagtagcagttccaggccctacacggtag

SEQ ID NO: 236215 - DNA, 666 bp, synthetic construct
  misc_feature 1..666: note = Description of Artificial Sequence: Synthetic coding sequence
  source 1..666: mol_type = other DNA
atggaggatctagaggaggatgtaagatttatagtcgatgaaacacttgatttcggcggacttagtccgtccgactcaagagaagaggaagacatcaccgtcctcgttaccccggagaagcccctgcgccgtggtttaagtcacagatctgatcccaacgctgtcgcacccgctcctcagggcgtgagattgtcacttgggcctctgtctcctgaaaagttggaagaaattctggatgaggccaacagactggcggctcaactcgagcagtgcgccctgcaagatcgcgaatccgctggcgaagggctggggccacgcagagtgaagccgagtcctcgaagggaaaccttcgtcctcaaggacagcccggttcgagatttactgccgacagtgaattccctcacgagatccactccatctccctcgtcactgacaccaagactcagatcaaatgaccgtaaaggctcagtcagagcactgagggctacctccgggaaacgaccaagtaacatgaaaagggaatctcccacctgtaacctatttcccgcatctaaatcccccgcaagctcacccctaacccgatccacccccccagtaaggggccgagcaggtcctagcggcagggctgccgctagcgaggaaactagggcagcaaagctccgatag

SEQ ID NO: 236216 - DNA, 699 bp, synthetic construct
  misc_feature 1..699: note = Description of Artificial Sequence: Synthetic coding sequence
  source 1..699: mol_type = other DNA
atggaggacttggaagaggacgtacggttcatagtcgacgagacactcgacttcggcggactctccccaagcgactctcgggaggaggaagatataacagttctagtgacccctgagaagcctctgaggagaggactgtctcaccgcagcgatccgaacgccgtcgccccagccccacaaggcgttcgcctttccctgggtccactttccccagagaagctcgaggaaatcttggacgaggccaaccggctggccgcacagctggaacagtgcgcacttcaggatcgcgaatccgcaggagaaggcctgggccctagaagggtcaagccttctcctaggagagagacctttgttctgaaagacagtccggtgagagacctgcttcctaccgtaaacagcctgacgagaagtacgcctagtccttcttccttgacacctcgcctccgtagcaacgatagaaaagggagtgtccgggcactgcgtgccaccagcggcaagcgaccatccaatatgaagcgggagtcccctacgtgtaatctgtttcccgctagcaaatctccggctagctccccactaacccgaagcaccccccctgtgagggggcgagctggtccatccggtcgggcagccgcttctccacccactcccatacgcagtgtgttagctccacaacccagcacctccaattctcagagatag

SEQ ID NO: 236217 - DNA, 1092 bp, synthetic construct
  misc_feature 1..1092: note = Description of Artificial Sequence: Synthetic coding sequence
  source 1..1092: mol_type = other DNA
atggaagaccttgaggaggacgttcgctttattgtggatgaaacactcgattttggaggactctccccatctgacagccgcgaggaggaagacattaccgttttagtgactccagagaagcccttacggagagggttgagtcacagaagcgatcccaacgccgttgctcctgcacctcagggggtaagactcagccttggcccactctccccagagaagctcgaggaaattctagacgaggccaacaggctggcagcacagttggaacaatgcgctctgcaggaccgcgaatccgccggagaaggtttaggcccacgtcgtgtgaaaccatctccaaggagggagaccttcgtcctgaaggattctcccgtgcgcgacctgctgccgaccgtcaacagtctaacaagatccactccgagccccagcagcttgacccctaggctgcgatctaacgatagaaaggggtctgtacgggcactgcgggctacctctgggaaacggccttccaatatgaaaagggaatcccccacctgtaatttgtttcccgctagtaagtcaccagccagttcgccactaactagatccacgcctccggtaaggggccgagccggacctagcgggcgagccgcagcatctgaagagacccgggcagccaaactccgcgtgagtggctccggggaattcgttggattgacgctgaaatttcttcatccctcccctcctggaccgccaacccccattcggtcagtgctggccccacagccctccacgtccaactctcagcggttgccgcgtcctcagggtgctgctgcgaaatcttctagtcaattacccataccaagcgctatcccgagacctgcttcccgaatgcccttgacgagtcgcagcgtcccgccaggccgtggagctctcccaccagacagtctctctactagaaaaggactgcccagaccctcaaccgccggtcatcgggtgagagaatctgggcacaaagttccggtatcacagaggctgaatctgcctgtgatgggcgcaacaaggtcaaatctgcaacccccacgaaaagttgccgtaccaggtcctaccagatag

SEQ ID NO: 236218 - DNA, 273 bp, synthetic construct
  misc_feature 1..273: note = Description of Artificial Sequence: Synthetic coding sequence
  source 1..273: mol_type = other DNA
atgagacgactgctcttggttacgtccctcgtcgtcgtgctcttgtgggaagcaggagccgtgcccgcaccaaaggttcccatcaaaatgcaggttaagcactggcccagcgaacaggacccagaaaaggcgtggggtgcccgtgtcgtggaaccccctgagaaagacgatcagttagttgtactgtttcccgtccagaagcctaagcttctcaccaccgaggaaaaaccacggggaacaaaagcatggatggaatctagagcgagaccttag

SEQ ID NO: 236219 - DNA, 459 bp, synthetic construct
  misc_feature 1..459: note = Description of Artificial Sequence: Synthetic coding sequence
  source 1..459: mol_type = other DNA
atgaggaggctgctcttggtgactagcttagttgtcgtccttctgtgggaggctggcgcagttcctgccccaaaagtccccatcaaaatgcaggtcaaacattggcccagtgagcaggatcccgaaaaccgagcctggggagcaagagtggtggagccccctgagaaggatgaccagttggtagtgctgtttcctgtgcagaagcccaagctgttgacaacagaagagaagccacggggtcaggggaggggtcccattctcccaggcactaaggcgtggatggagacagaggacaccctcggccacgtgctgagcccagaaccagatcatgactcactctatcacccgcctccagaggaagaccaaggggaggagcgccctagactttgggtgatgccaaatcaccaagtgctgttaggccctgaagaggaccaggaccatatatatcatccccaatag

SEQ ID NO: 236220 - DNA, 456 bp, synthetic construct
  misc_feature 1..456: note = Description of Artificial Sequence: Synthetic coding sequence
  source 1..456: mol_type = other DNA
atgcgtaggctcctcctggtcacctctctggtcgtcgtgctgctgtgggaggctggcgctgttccagccccaaaagttccgattaagatgcaggtcaaacactggccttctgagcaggatcccgaaaaagcctggggggcacgggtcgttgaaccgcctgagaaggacgaccaattggtggtgctgtttccagtccagaagccaaaattgctgacaacagaggaaaaaccacgaggtcaaggacggggtccaattcttcctggcaccaaggcgtggatggagaccgaggataccttaggccacgtgctgtccccagagcccgaccatgattcactgtatcacccacctcctgaggaggatcagggggaggaacgccctcgattgtgggtcatgccaaatcatcaggtgctgcttgggcctgaggaagatcaggatcacatctaccatcctcagtag

SEQ ID NO: 236221 - DNA, 429 bp, synthetic construct
  misc_feature 1..429: note = Description of Artificial Sequence: Synthetic coding sequence
  source 1..429: mol_type = other DNA
atgcgcaggctgctccttgttaccagtttggtcgtggtgcttctgtgggaagccggagctgtcccagccccaaaagtgcctatcaagatgcaggtgaagcattggcctagtgagcaggatcccgagaaggcgtggggcgcaagggtggtggagcctcccgagaaggatgaccagctggtggtgcttttccctgtccagaagccaaaactcttaaccactgaggaaaaaccccgagggacgaaagcttggatggagaccgaagatacgctgggtcacgtgctctcccccgaaccagaccacgacagcctctaccatccgccacctgaagaagaccagggagaggagcgaccaagactttgggtaatgcctaaccaccaggtcctcctaggacctgaggaagatcaggaccatatctatcatcctcagtag

SEQ ID NO: 236222 - DNA, 6473 bp, synthetic construct
  misc_feature 1..6473: note = Description of Artificial Sequence: Synthetic coding sequence
  source 1..6473: mol_type = other DNA
atgtcggatcgcagcggccctacggccaagggaaaggacggtaaaaagtattcatctctcaacttgttcgatacctataagggaaaatccctagaaatacaaaaacccgctgtggctccaaggcacggtctgcagtccctcggtaaggtcgccatcgcaaggaggatgcctccgccagccaatctgccctccctaaaggccgaaaataagggcaatgatcctaacgtttctctcgtgcccaaagatggcacagggtgggctagcaaacaggagcagtccgatcctaagtcttctgatgcctcaacagcgcaacctcctgaaagccagccactgcccgcaagccagacgcctgcctctaaccagcctaagagaccacctgccgctccagagaacacccctttggtgcctagcggtgtaaagtcatgggcccaggcgtcagtcactcacggggcacacggggatggcggaagagcctcctcattgttgagcaggttctcaagagaagaattcccgactttgcaggcagctggcgaccaggataaagccgcaaaggagcgggagtccgccgaacaatcttcaggcccaggcccatctctgcgaccccagaactctacaacatggcgtgacggcggtggacgtggacccgatgaactcgaaggaccagatagcaagcttcatcacggccatgaccctcgcggaggcctgcagcctagcgggcctcctcagtttccaccctatagaggcatgatgccacccttcatgtaccccccttacctgcctttcccccctccatacggacctcaagggccataccggtatccaacacccgacggcccttctcggtttcctagagtagctgggcctagaggatccggcccaccgatgcgccttgttgagccagtgggcagacctagcatactcaaagaagataatctgaaggagtttgaccagctggaccaggagaacgatgatgggtgggccggtgcacacgaagaggtggactacactgagaagctaaaatttagcgatgaagaagacggcagggactcggatgaagaaggcgcagagggccacagagatagtcagtcagcaagtggtgaggaaagaccacctgaggcagatggtaagaagggaaactctccaaattcggaacctcccacccctaagacagcatgggccgaaaccagtcgccctccagagactgagccaggacctcccgctcctaaaccaccactcccaccccctcacaggggtccggcagggaattggggtcccccaggcgactatcccgacagaggcggtcccccttgcaagccaccagcccctgaagacgaagatgaggcatggagacagaggcggaaacagagcagcagcgagatctcacttgctgttgaaagagccaggaggagaagagaagaagaagagcggagaatgcaggaggaaagacgagctgcctgcgctgagaagctgaagagacttgatgaaaagtttggggctcccgataaaaggctgaaagccgaacctgcagctcctcccgctgccccaagcacacccgcacccccacccgcagtgcccaaagaactcccagcaccccctgctccccctcctgccagcgcgcctactcctgaaacagaacctgaggaacccgcacaggcgccacctgctcagagcacccctacccctggcgtcgcagccgctccgacgctggtgtctggcggagggtctacttcctcaacatcttctggatcctttgaggccagtccggtggagccgcagctgccctctaaagagggacccgaacctcctgaggaggttccccctccgaccacccccccagtgcctaaggtagaaccaaagggcgacggcatcggtcctactaggcagccgcctagccagggcctgggataccctaagtaccaaaaaagtctaccacccaggttccagaggcagcaacaggagcagttgctcaaacaacagcagcagcatcagtggcaacaacaccagcaaggcagcgccccaccaacccctgtaccccctagcccgccacagcctgtgaccctgggcgctgttcccgctccccaggcccctccacctcccccaaaagcgctgtatccaggcgctctgggtaggccgcctccaatgcctccaatgaacttcgatccccgatggatgatgatcccaccctacgtagatccaaggctgctgcaggggagaccacctctggacttctacccccctggcgtccacccaagtggactggtgccgcgagagcgtagcgattctgggggatcttccagtgagcctttcgacaggcacgcaccagcaatgctgagggagcgagggacacctcccgtggatcctaaactggcctgggtaggggatgtgtttactgcaacgccagctgaacctagaccactgacttcccctctgagacaagccgcagatgaagatgataagggaatgcgcagtgagaccccacccgtaccacctccaccaccctatctggcctcttatcctggctttccagaaaatggagctcctgggccaccaatcagccggttccccctggaggagcccggacctaggccgctgccttggccccctggctctgacgaggttgccaagatccagaccccccctcctaagaaggagccccctaaggaggaaactgcccagttgaccgggcctgaagctgggagaaaaccggcacggggagtcgggtccggcggacagggccctccacctccccgtcgggaaagtcggaccgaaacccgctggggccctcgacctggaagtagccgcagaggaatccccccagaggagcctggagcacctccgcgaagagccggacccattaaaaagcccccaccaccaactaaagtcgaagaactgccccctaagcctctcgagcaaggggacgagactccgaagccgcctaaacccgatccactcaagatcactaaaggaaagttaggcggaccaaaagagacaccgcctaatggcaatctcagcccggctccaagattgagaagggactactcctatgaacgcgtcgggccaaccagctgtcgcggaaggggcaggggagagtattttgcacgcggtcggggttttcgaggcacctacgggggtcgcggaagaggtgcccgttctcgggagttccgatcctatagggaatttcggggagatgacggtaggggcggaggtacgggaggccctaatcaccctcccgcaccacgcggaagaaccgcctctgaaacgagaagcgagggcagcgagtacgaggaaattcccaagcgccgtaggcaaagagggtccgaaaccgggtccgagactcatgaatccgatctggcgccttcagataaagaggcacccactccaaaagagggaactctgactcaggtgcccctggccccaccaccaccaggagctccgccaagcccggctccggctaggttcacagcacggggaggacgggtattcactcccagaggcgtgccttctagacgcggacggggtggcggacgcccacccccacaggtgtgccccggttggtcgcctcctgcaaaatctctggctcctaagaagcctccaacaggccctttgcctcccagcaaggagccactgaaagaaaaactcattcccggaccgctcagccccgtcgcacgcggtgggagtaatgggggtagcaacgtgggtatggaggacggggagaggcccagacggcgaagacatggtagggcccaacagcaggataaaccaccacgatttcggaggctgaagcaagaaagggagaatgcggcacgcggttcagaaggaaagccaagcctgaccttacccgctagtgctccgggacctgaagaggcccttacgacggtaactgttgcccctgctccgcgtagagccgcagccaaaagcccagatctgagtaatcagaactctgaccaggctaacgaagaatgggaaaccgcatctgagtcctctgacttcactagtgaaaggagaggcgataaggaggctccccctcctgtgttgcttaccccaaaagccgttgggaccccaggaggtgggggagggggtgccgtccccggaatcagcgcaatgtctaggggggatctgagccagagagctaaggatttgtcaaaacgctctttttcttcccagcgacccggtatggaacgacaaaataggcgcccaggacccggtggcaaggcaggttcttccgggagctcgagcggtggtgggggtggcggtccgggaggccgtaccggacccggtcgtggggataaacgcagctggcccagtccgaaaaataggtcaagacctccagaagaaaggcctcccggtctgccactacctccccctcctccaagctcatccgcggtgtttcgactcgaccaggtcattcattcaaaccccgctgggatccagcaggctctcgcacagttgtccagcagacagggatctgtgacagcacccggaggccatcccagacacaagcctgggctgcctcaagcaccacagggaccatccccaagaccccctacacgctacgaaccacagagagtgaactcaggcctgagctccgatccccactttgaagagccaggacctatggtgagaggtgtgggtggtaccccaagagattctgccggtgtcagtccttttccgcctaagcggcgtgagcgccctccaaggaagccagaacttttacaggaagagagtctcccaccccctcattcctctggattcctgggctcaaaaccggaagggccaggccctcaagctgagtcccgggacaccggaactgaagctctgacacctcacatctggaaccggctacacacggcaaccagcagaaagagctaccgccctagctccatggaaccctggatggagccactgtcaccttttgaagatgttgcgggaacagaaatgagccaatctgacagcggagtggatctttcaggggattcccaggtctcttctggaccttgcagccaaaggagcagccctgatgggggtctgaaaggggctgctgagggccctccgaagcgcccaggtgggagctctccactgaatgccgtcccatgtgaggggccaccaggatcagagccaccacgaagaccacccccagcccctcacgacggtgatcggaaagaactacctcgcgagcagccgctaccccctggaccaatcggcactgagagaagccaacggaccgaccgcggaacagagcctggccctatccgaccgagccaccgaccagggccaccggtgcagttcggcacctccgacaaagattctgacttaaggctcgtagtcggcgatagccttaaagccgagaaggagcttaccgcttcagttaccgaggccatccccgtatcccgcgactgggagctcctgccttcagcagctgcttcagctgagccgcagtcgaaaaacttagattccggccactgtgtgcctgagccatcatcatcgggccagaggctgtatccagaagttttctatggttcagcaggtccaagctcttcacagatcagcggtggggctatggactctcaacttcatccgaacagcggagggttccggccagggacaccatccctgcatccttacaggagtcagccactgtatctgcctccaggcccagctccaccgtctgcactgctgtcaggcttagcgctgaaaggtcaattcctggacttcagcactatgcaggccactgagctaggaaagctccctgccggaggagttctgtatccccctccttctttcttgtacagcccggcattctgcccctcccctcttcctgatacatccttgctccaggtgagacaggatcttccgtcacccagcgacttttattccacccccctgcagccaggaggccagagcggattcctcccttcaggggctccggcacagcagatgctcctccccatggtggactctcagctccctgttgtgaatttcggctccctccctccagcacctccaccagcccctccacccctgagccttctgccagtgggacccgcactccaacctccgagccttgcagtgcggccacctccagccccagcaaccagggtcctccctagtccagcaagacctttccccgcttctctcggcagagctgaactccacccggtggaacttaagcccttccaggattatcagaagttaagttctaacttagggggaccgggaagcagtcggacccctcccactggtcgctccttttcaggcctaaacagccggctgaaggccaccccgtccacctacagcggggttttcagaacccaacgagttgacctgtaccaacaggcttcgcctccagacgcattgcgctggattcccaagccctgggagaggaccggaccgccaccaagagagggtccatcccgccgagcagaggagcccggaagtaggggcgacaaagaaccaggcctccctcctccgcgata

SEQ ID NO: 236223 - DNA, 4149 bp, synthetic construct
  misc_feature 1..4149: note = Description of Artificial Sequence: Synthetic coding sequence
  source 1..4149: mol_type = other DNA
atgctgagggaacgaggcacccctccggtagaccctaaattggcttgggtaggcgacgtcttcactgccacacctgccgagccacgccctttgacgagtccattgaggcaggcggctgatgaggatgacaagggcatgagatcggagacaccgccagtgccacccccaccaccctatttggccagttaccctggatttccggagaatggtgcacccggtcctcctatttctagatttccactggaagaacctggacctcgacccttgccctggccaccaggctctgatgaggtagctaagattcaaaccccacctccaaagaaggagccacccaaggaggaaactgctcagcttacgggaccggaggcaggaaggaaaccagcccgaggagtgggctcggggggacaaggtcctccaccccctcggagggagtctaggaccgagactcgctggggaccgaggccgggttcatccaggagggggatcccaccagaggagccaggtgcacctccaaggcgcgctggtcctataaagaagccaccacctcccacaaaggtagaagagcttcccccaaagcccctggaacagggcgacgagacacctaaacccccaaagccagatccactgaaaattaccaaggggaagttagggggaccaaaggagacacctcccaacggaaatcttagccccgctcccaggctgcggcgagactactcgtatgagcgcgtgggaccaacctcatgtagagggcgaggcagaggcgagtacttcgcgcgtggcagaggattccgcggaacctatggcggtagggggaggggtgccagatctcgggaattccggtcatatagagagttccgtggcgacgacggcaggggaggcggtacaggtggccctaatcacccccctgcaccacggggacgtactgcctccgagacccggtccgaaggtagtgaatatgaggagattccgaaacgccgacggcaacggggaagtgaaacaggcagcgagacccacgagtccgatctagcccctagcgataaggaagcacccacgccaaaagaaggaactctgacacaggtacccctcgctcctcccccaccaggcgcacccccttcacccgctccagccagatttactgctcgcggaggtagagtgttcacaccaagaggcgttccttcacgccgaggcagaggtggcggacgacctccccctcaggtatgcccaggctggtcccctcccgctaaaagtctggcccctaagaagccacccaccggacctctgccaccctccaaggaacctctgaaggaaaagctgataccaggcccactgtctcctgtggccaggggtggctcaaacggcggatcaaacgttgggatggaagatggtgagaggccccgtaggcgcagacacgggagggctcaacagcaagataaaccgccacggttccgacggctgaagcaagagagggaaaacgccgctcgaggctcagagggcaagcctagcctgacactcccagctagcgcacctgggccagaagaggcgctaacgaccgtgaccgttgctcccgctcctcggagagctgctgccaaatccccggatttgtccaatcaaaattccgaccaggccaacgaagagtgggagacagccagcgaaagtagtgattttacgagcgagcgacggggagataaggaagcccctcctcccgtcctgctaacgccaaaggctgttggcactcctggcggtggcggtggaggtgcagtgcccggtatttctgctatgagccggggagatctcagccagcgggctaaggaccttagtaaacgtagctttagttcacagagaccgggtatggagagacagaacaggcgtcccggtccgggaggcaaggctggttctagcgggagttcatcaggcggaggagggggtgggccaggaggcaggactggccctgggcgtggggacaagaggagttggccctctcccaagaatcgtagtaggccacctgaggagcgtccccctggcctccctctgccacccccacccccatctagttccgccgtgttccggctggatcaggtcatccacagcaatcccgctggcatccagcaggctcttgcacagctttcttccagacaggggagcgtcactgcgcctggcggacaccctagacataaaccaggccttccacaggccccacagggaccgtcccctcgccctcccacgcgatacgaaccacagagggttaatagtgggctgagcagcgatccccacttcgaggagcccggaccaatggttcgaggcgttgggggtaccccacgcgactctgcaggagtgagtccattccctccaaaaaggcgagaacgccctcctagaaaacctgagctgctgcaggaagagtccctgccaccgcctcacagcagcggctttttaggctcaaaaccagaggggccaggacctcaggcagaatcccgggacaccgggaccgaagccctaactcctcatatctggaatcgcctgcacacggccacttccaggaagtcataccgcccatcgtccatggagccatggatggagcctctatccccattcgaggatgtggccggaacagaaatgtcacagtccgactctggtgtcgatcttagtggggactcccaggtgtctagcggaccatgcagccaacggagctctcccgacgggggtctcaagggcgctgccgaaggaccgccaaagcggccaggtggttcgagcccactgaatgcggttccatgcgagggacctcctggctcagaacccccacgcaggcctcccccagctcctcacgatggggaccggaaggaactgcctagggagcagcccctgccaccaggcccaatcgggacagagaggtctcaacgcaccgataggggcaccgaacccggtcccattcggcctagccacagacctggccctccagtacagttcggtacatctgacaaggacagtgatctgaggcttgtggtcggcgattccctcaaagctgagaaagagctgactgccagcgttacagaggcgattcccgtttctcgtgactgggagcttttgcccagtgcagccgcatccgccgaaccccagagcaagaatctggactcaggacattgtgtacccgaaccaagctcatccgggcaaaggctctaccctgaagtgttttacggttccgccggaccttcaagctctcaaatctccgggggtgccatggactcccagttgcatcccaatagtgggggattccggcctggcaccccaagcctccacccatacagatctcagcctctctatttacccccaggacctgcacccccatccgcacttcttagcggcttagccctaaaaggtcagtttttggatttttctacaatgcaggcaacagagcttggcaagctgcctgcagggggtgtgttgtatccaccgccttcatttctgtattccccggctttttgtccatccccgcttcctgacacgtcgctcctgcaggtccgacaggacctcccaagcccgagtgatttttacagcacccctctgcagcccggtggccaatccggttttcttccttcaggcgctcccgctcagcagatgctgctcccaatggtcgattcccagctgcccgttgtcaactttggctccttgccccctgctccaccaccagctccccctcccctgtccttattgccggtgggccctgccctgcagccgccaagcttggctgtgcgtccccctccagccccagccacccgggtgctgccttcgcctgccaggccatttcctgccagtctcgggagggccgagttgcatcctgtcgaactgaaaccctttcaggattaccagaagctcagttccaaccttggaggccctggtagctcccggactccacctacagggcgatcattttctgggctgaacagccgcttaaaggctaccccatccacctacagcggcgtgttcaggacccaaagggttgacctttaccagcaggcctccccccctgacgctctgagatggattccaaaaccctgggagaggacagggcctcctccacgcgagggcccttcaaggcgagctgaagagccgggaagccgaggcgacaaggagccaggcttgccccctcctcgctag

SEQ ID NO: 236224 - DNA, 6473 bp, synthetic construct
  misc_feature 1..6473: note = Description of Artificial Sequence: Synthetic coding sequence
  source 1..6473: mol_type = other DNA
atgtccgacagatccggtcctacagctaagggaaaagacgggaagaagtacagcagtctgaacctgttcgacacatataagggaaagagccttgaaatccaaaaacccgcagtggctccacggcacggcctccagtccctggggaaagtcgctatcgctcgtcgcatgcccccaccagccaacctgccttcactaaaggctgaaaataaagggaacgaccctaatgtctcactcgtgcctaaagatgggactgggtgggccagcaagcaggagcagagcgatccaaagtcctctgatgcaagcactgcacagccacccgaatctcagcccctgcccgcttcccagaccccggcttctaatcagcccaagcgacctcccgctgccccagagaacacacccctggtgcccagtggcgtcaaatcctgggctcaggctagcgttactcacggagcccacggagatggagggagagccagctctctgctgtcgaggttcagtcgggaagagttcccaacattacaggcggctggcgatcaagataaggctgccaaggagcgtgaaagcgccgagcagtcctccggtcccggaccaagcctgagaccgcagaacagcactacatggcgggacggaggaggacgagggcctgacgaactggaagggcctgattctaaactgcaccacggccatgacccgcgaggagggttgcaacctagcggaccacctcaattccccccttaccgcggtatgatgcccccttttatgtatccgccatacctgccattcccaccaccttatggcccacagggcccttacagatatccgacgcctgatgggccatcccgcttccctcgcgtggccggtccgaggggctctggccctcccatgagacttgtggaacccgtcggacgcccttcaatactcaaggaagacaacttgaaggagttcgatcagcttgatcaagagaatgatgatgggtgggcaggtgcacacgaagaggtcgactataccgagaaactgaagttctcggacgaggaagacggcagggactctgacgaggaaggcgcagagggccaccgggactctcaatcagcctctggggaagagaggcctccggaggctgacggtaaaaaaggaaattcacccaattcggagccccctactcctaaaaccgcctgggccgaaacatcgaggccacccgagactgagcctggccctccagctcccaagcctccccttccaccccctcatagaggccctgccggaaactggggccctccaggtgactaccctgatcgcggagggccaccctgtaaaccgcctgctcccgaagatgaagatgaggcttggagacagaggcggaagcaaagctcaagcgaaatttcccttgcggtggaaagggctcgacgtcggagagaggaggaggaaagaagaatgcaagaggagaggagagctgcctgcgctgagaagttgaaacgtttagacgagaaattcggggcacccgacaaacgcctgaaagccgagcctgccgctccacctgccgcaccctccacgccagccccacctcccgcagtgcccaaagagctcccagcccctccggcaccaccccctgcgagcgccccaacccccgaaaccgagcccgaagaacccgcacaggctcccccagcgcagtccacaccaactcccggagtggcggcagcccctactttagtcagcgggggagggtctaccagctcaacaagctctgggagcttcgaggcaagcccggttgagccccagctccccagtaaagagggccctgagccaccagaggaagtcccaccccctacaactccgcctgtgcccaaagtggagcctaagggggacggaatcggcccaactcgtcaaccaccatcccaaggtctggggtatcccaagtaccaaaagtctttaccccctagattccagagacaacagcaggagcaactgctcaagcagcagcagcagcatcagtggcaacagcatcagcagggatctgcaccacccacgcctgtgcccccatccccaccccagccagttaccctgggggcagtcccagcccctcaggcccctcctcccccaccaaaggcgttataccccggtgcacttggacgccctcccccaatgcctcccatgaatttcgatccgcgttggatgatgattccaccgtacgtggatccccgactcctgcagggcagacctccattagacttctatccaccgggtgtacacccttccggcctggttccaagagaaaggtcagacagtggcggatcctctagcgagccgttcgacaggcatgcccctgcaatgttacgggaaaggggcactccacccgttgatccgaagcttgcctgggtgggcgatgtcttcactgccactcccgctgaaccacggcctctgacctctccactgcggcaggccgctgacgaagacgacaagggcatgagatctgagacccctcctgtacctcccccaccaccgtacctcgcatcctaccctggcttcccagagaacggagctccaggtccacctatcagcagattcccactggaggagcccggacccaggccactgccttggcctccaggcagcgatgaagttgctaagatacagaccccaccacctaagaaagaaccaccgaaagaggagacagcccaacttacaggaccagaagccggtagaaagccggcacggggtgtgggttctgggggacagggaccccctcccccacggcgtgaaagcagaaccgagaccaggtggggcccacgccctggaagttctcgccgaggaatcccacccgaggaacctggtgcccctccccgacgggcagggccaatcaaaaaaccacctccgccaactaaagtggaagagcttccccctaaaccactcgaacagggagatgagaccccgaagccccctaagcctgacccactgaaaataacaaagggcaagttaggagggcctaaggaaacccccccaaatgggaatctttcccccgctcccaggttgaggcgcgactactcctatgaaagagtgggaccaaccagctgtcggggtcgtggacgcggagaatacttcgccaggggcagggggtttcgaggtacctacggtggaagggggcgaggagcacgtagtcgagaatttaggagctatcgtgagtttaggggagacgatggaaggggtggcggtaccggaggcccaaatcaccccccagccccacgcggacgaactgcgtccgaaactcgcagtgaaggctccgagtacgaggagatcccgaaacgcaggcgccagaggggctccgagactggaagcgagactcacgagtcagacctggccccatctgacaaggaagccccaactcctaaggagggcacgctgacccaagtaccattggcgccacctccgccaggggctcctccctctcctgctcctgccaggtttacagcaagaggaggtagggtgttcacacctagaggcgtgccaagcaggcgcggtcggggtggcggacgcccaccaccccaagtctgtccaggatggagccctccggcaaagtctcttgcccctaaaaagccccctacaggcccactccctccttcaaaggaacccctaaaggagaaattaattcccggacctctcagcccagtcgcccgtgggggaagtaatggaggatctaacgtgggaatggaagatggcgagcgccctcgacgtagacgccacggtagagcccaacagcaggataagcctccccgatttcgcaggctgaaacaggagagggagaatgccgctagaggtagtgaaggaaagccctctttgacgctgcccgcatctgcgccaggtccagaagaagcccttacgaccgtgacagtggcacctgccccacgcagggcagccgctaaatcaccggacctctccaatcaaaacagtgaccaggctaacgaggaatgggagaccgcctcagaaagtagtgacttcacttctgagcgccgtggtgacaaagaagcccctcctcccgttctcctaactccgaaagctgtaggcactcccggagggggaggagggggagctgttcctggaatttcggccatgtccagaggcgatctatctcagcgagccaaggatttgtccaagcggtcttttagctcccagagaccgggtatggagcgacagaatcggagaccgggaccagggggtaaggcgggtagcagtggctcttcctccggagggggtggtggtgggccaggcggacggactggtcccggtaggggtgataagcgcagctggccatccccgaagaatcggagccgtcctcccgaggaacgcccaccaggccttccgctccccccacctcccccttcctcctctgcagtgtttaggttggatcaggtgattcatagcaaccctgcgggaattcaacaggccttggcccagttgtcttctagacagggctcggtgaccgctcccggtgggcatccaagacataaacctggattgccgcaggcaccgcagggcccttctcccaggccaccgacccgatatgagcctcagagggtgaacagcggactcagctctgacccccactttgaggagcctgggccaatggtcaggggcgtggggggaacaccccgagactccgccggagtttcaccattcccccctaagcgcagagagagaccaccaaggaaaccggaactattgcaggaggaaagccttccaccacctcactcctccggattccttggctcaaagcctgaggggccaggacctcaggccgagtccagagataccgggacagaagctttaacgcctcacatttggaatcgactgcacacagccacctcccgaaagtcctaccgaccttcatctatggaaccatggatggaaccgctgagtcccttcgaggacgtcgcaggtaccgagatgtctcagtcagacagcggcgtagatctgtctggggattcacaggtgagttctggcccatgcagccaacggtcaagtcccgatggaggcctgaaaggagctgccgagggacctcccaaaaggcctggtgggtcaagtccactgaacgccgtcccttgtgaagggcctccagggtctgaaccccctcgcaggccgcctccagccccacatgatggggatagaaaagagctgccacgtgagcagcctctgcccccaggaccaattggaacggagcggtcccagcgaactgataggggcactgaacctgggccaattcggccatctcacagaccaggcccaccagtgcagtttgggacaagtgacaaagatagcgatttacgcttggtggttggagattccctaaaggccgagaaggagctcacagcatccgtgaccgaggctatcccagtctctcgtgattgggagcttttgccgagcgcggcagcatccgccgagccccagtcaaaaaacctggactctggccattgtgttcctgagccatcatcaagtgggcagagactatatcccgaagtgttttacgggagcgcgggtcccagcagctcgcagatatccggtggagcaatggatagtcagttgcatcccaactccggcggttttcggcctggtactccatccctgcatccttatcgcagtcagccactctacctgcccccaggccctgcacctccgagcgccctgctcagcgggctggctctgaagggtcagtttttggacttcagcactatgcaagctacggagctagggaaactccctgccggtggggtgttgtacccaccaccaagcttcctgtattccccagcattttgcccaagccctctgccggacaccagccttttgcaagtcaggcaggacctgcccagcccatcagacttctactcgacacccctccaaccgggtgggcagtccgggtttctgccttcaggagcccctgcccagcagatgctgctccccatggttgattcccaattacccgtggtcaactttggctccctgccacccgctccaccccctgccccacctccactgagtctgctgcccgtcggcccagcactccagcctccatccctggcggtgcgccctccccctgctccagcaacaagagtgcttccctctcctgcccgtcctttcccagccagtttaggcagggcagaactgcaccctgttgagctgaagccttttcaggactatcaaaaattgtcaagcaacctcgggggaccaggatcatccagaaccccgccaacaggcagaagttttagcgggcttaacagcagactcaaagccacgccatctacctacagcggcgtgttcagaacccagagggtggacttatatcagcaagcctcaccacctgacgccctgaggtggatacctaagccgtgggagcgcactggtcctccacccagggagggccctagtcgcagggctgaggaacccggtagcagaggggataaagagccgggactccctcccccaaggta

SEQ ID NO: 236225 - DNA, 6473 bp, synthetic construct
  misc_feature 1..6473: note = Description of Artificial Sequence: Synthetic coding sequence
  source 1..6473: mol_type = other DNA
atgagcgacaggtctgggccaaccgctaaaggtaaggacggcaagaagtactctagtctgaacctgttcgacacatacaagggtaagagtctggagatacaaaagcctgctgtggctcccagacacggcctccaatccctggggaaggttgctatcgcaaggaggatgccacctcccgctaatcttccctcccttaaagccgagaacaaggggaacgatccgaatgtgagcctggtccctaaagatgggacaggttgggcctctaaacaggagcagagcgaccccaaatcttctgacgcaagcactgcccagcctcctgagtcacagccacttcccgctagtcagacgccagcaagcaatcagcctaaaaggccccctgctgctcctgaaaatacccccttggtgcctagcggagtgaagtcgtgggcccaggcatcagtgacccacggggctcacggcgatggcggacgagcttcctcattgctgtccagattcagtcgggaagaattccccacactgcaggccgctggagaccaggataaggccgctaaggagcgcgaaagcgccgaacagtctagcgggcctgggccttctctcaggccacagaatagcaccacttggagagacggaggcggacgaggcccagatgagctggagggcccagacagcaaactgcaccatggccatgaccctaggggagggctgcagccaagcggaccaccacaattcccaccttacagaggaatgatgccgccttttatgtaccccccttaccttccgttcccaccaccttacggcccacaaggaccctatcgttacccgacgcctgatgggcctagccgctttccacgcgtggccggtccccgaggatcaggcccaccgatgcgcctagtggagccagtggggaggccttcaatcctgaaagaggacaacctgaaagaattcgatcagttagaccaagaaaatgatgacggctgggctggagcacacgaggaggtggattatacggagaaactgaagtttagcgacgaagaggatggcagagatagcgatgaggaaggagccgagggtcaccgggacagccaaagcgcctcgggtgaggagcggccacccgaagctgatgggaaaaaagggaatagccctaatagtgagcccccaaccccgaagactgcttgggccgagacctctcgcccaccagagaccgagcccggacctcctgctcccaagcctccgttgccgccaccacatagaggccctgccggtaattgggggccacctggggattatccggacagaggcggaccaccttgcaagcctccagcacccgaagacgaggatgaagcatggcgccagcgcagaaagcagtcaagcagcgagatcagtctggccgtagagcgggctcgtcggaggagagaagaggaggagcgaaggatgcaggaggagcgccgtgcggcttgtgcagaaaaacttaaaaggctggatgagaagttcggagcccctgataaacgacttaaggccgagccagccgcaccgcctgcagctccaagtactccggcaccaccccctgcagtgcccaaagagctgcccgcaccccctgcaccgccacccgctagcgctccaaccccggagaaggaaccagaggaacctgcacaagctccccctgctcagtccactcccacacctggcgtagccgcagctcccacactggttagtgggggtggatctacgtcctccacttcctcaggatccttcgaggccagtccagtggagccacaattgccctccaaagaaggcccagagccgcctgaggaagtaccaccacccaccactcctccggtgccaaaggttgaaccaaagggggacggtattggccctacccggcagccaccgagtcagggcctggggtacccgaagtatcaaaagagccttcccccacgcttccagagacaacagcaagagcagctccttaagcagcagcaacagcatcagtggcagcagcatcagcagggttcagcaccccctacccctgttccaccctcaccccctcaaccggtaacactgggagcagtaccagccccacaagcaccgccacccccaccaaaagccctgtatcccggtgcactcggccgacctccgccaatgcccccaatgaactttgatccaaggtggatgatgatccccccttatgtcgacccgagattattgcaaggtcggcctccactcgatttttatccgcctggagtgcacccaagcggactggtccccagggaaagatctgacagtggcggatcaagctccgagcccttcgaccgacatgctcctgccatgctgagagagcgcggaaccccgcctgtcgaccctaagctcgcctgggttggtgatgtgttcactgccaccccggcagagcctcggccactgaccagccctcttcgacaggctgcagacgaagatgacaagggaatgaggtccgagaccccacccgttccgcctccaccaccctatctggcctcctacccaggcttcccagagaatggcgctccgggaccccctattagccgctttccacttgaagaacccggtccccgtcccctgccttggccccctgggtctgatgaggttgcaaagattcaaactccccctcccaagaaagagcctccaaaggaggagacggctcagctgaccgggcctgaggctggcaggaagccagctcgcggtgtgggctccgggggacaggggcctcctccacctcggagggagtctagaaccgagactagatggggccctagacccggttctagcagacgcggtatccccccagaggagccaggcgcaccccctaggagggccggtccaataaaaaagcctcctccccctaccaaggtcgaggaattgccaccaaagccactggagcaaggagacgaaacgcccaagccgccaaaacccgatccactcaaaattactaagggtaagctgggcggaccaaaggagacaccacccaatggaaacctctcgcccgctccaagactgcgacgagactacagttacgagagagtgggacctaccagctgtcgcggacggggtcgcggtgaatattttgcacggggtagggggttcagagggacctatggaggtaggggacgaggcgcaagatctcgggaattcaggagctacagagagtttcgcggagatgacggaagaggcggaggcactgggggacctaatcacccacctgcaccacggggaagaaccgcatctgagacgcgatcagaagggagcgagtacgaggagattcccaaacgcaggcgccaaaggggctctgaaactggctctgagacccacgagtcagacctggccccaagcgacaaggaggctccgaccccaaaggagggtacgttgacccaggtgcctctcgcccctccacccccaggcgctcctcctagtcccgctccagcacgctttaccgctcgaggagggcgtgtgttcactccccgaggtgtccctagcaggagggggcgaggcggagggaggccacctccccaggtttgccccggatggagtcctcccgctaaatccctcgcaccgaaaaaacccccaacgggcccattgccgccaagcaaggagcctctcaaggaaaagttgatcccgggtcccctcagcccggtggctagggggggttccaatggcggaagcaatgttggaatggaagacggcgaaaggccacgtcgcaggagacacggcagagcacagcagcaggacaagcctcctcggttcaggcgtctcaaacaagagagggagaatgcagccagggggagcgagggaaaacccagtttgacccttcctgcttccgctcctggccctgaagaggccctcactacggtgaccgttgcccctgccccacgccgagctgccgcaaagagtcccgacctctccaaccaaaactctgaccaggccaacgaggaatgggaaacagctagcgaatcttccgactttacgagtgagcgcaggggagacaaggaagctcccccacctgtactcctgactcccaaggcggttggcacccccggaggcggaggtgggggtgcggtgcccggtataagcgcaatgtcacgcggagacttgtcacagcgggctaaagacctgtctaaaaggtcattctctagccagcggccagggatggaaaggcagaataggcgtccaggtccaggaggcaaggcgggatcgagcggttcatctagcgggggaggaggcggaggtcccggtgggagaacgggacctgggcgaggggacaagaggtcatggccgtcacccaagaacaggtccaggcccccagaggagcggcctccgggacttcctctcccgcctccccctccttcttcttctgcagtctttcgcctcgatcaggtgatccattcaaatcctgcaggaattcagcaggctttggctcagctgtcttccagacaaggaagcgtgaccgcgccaggaggccatccgaggcacaaaccgggtccaccacaggcccctcagggtccaagtccaagaccccctacacgatacgaaccgcagagggtgaacagcggactgagctcagacccgcattttgaggagccaggacctatggtccggggagtgggcggtacgcccagggactctgcaggggtttcccctttcccgcctaagagacgagaaagaccccctcgcaaacctgaactgcttcaggaggaatctctcccaccccctcacagtagtggctttcttggctcaaagcctgaaggtcctgggccacaggcagaaagccgagatactgggactgaggctctgacacctcacatttggaacaggctccataccgccacctcacgaaagtcgtacagaccaagcagcatggagccgtggatggagccactctcaccgtttgaagatgttgcaggtactgagatgagccagtctgatagcggagtggatttgagcggcgatagccaggtgtcaagcgggccttgttcgcagcgcagtagccccgatggaggactgaagggagccgctgaggggcctcctaagcgtccaggcggatcgagcccactgaacgcagttccttgcgaaggacctcctggcagcgagccaccacgcaggcccccacccgctccacatgacggggatcgaaaggagctgcccagggagcagcctctccctccaggccctatcggaaccgagaggtctcagcacacagatagggggacggaaccgggaccgattcggccttcacacagacccggtcccccagtgcagttcgggacatctgacaaggattctgatctgagactggtggtaggagactcacttaaagcagaaaaggagctgacggccagtgtgaccgaagcaatccccgtcagtagagactgggagttgttacccagtgctgccgctagcgccgagccacagagtaaaaacttagactccggacattgtgtccctgaaccaagctcttccgggcagagactgtatccagaagtgttttacggaagcgccggtccttcttcctctcagatctccggaggagccatggacagccaactgcaccccaatagtggaggatttaggcctggcacaccctcgctccacccttatagatctcagcctctgtacctgcctcccggtccggcaccgccatctgcactcctatcaggcgtggctctgaagggccaatttctggacttttctacaatgcaggctacagaacttgggaagttacctgctggaggcgtcctctaccctcccccaagtttcctgtacagccctgccttctgtccatctcccctgccagatacctcacttcttcaggtgcgtcaggatctgcctagtccgtccgatttctattctacacccctgcaaccagggggacagtcagggttcttaccctcaggggcacccgcacaacagatgctgctgcctatggtggattctcagctgccggtggtgaacttcggctccctcccaccagcacctccccctgcacccccttctctgtctctgctgcccgtaggacccgctctgcagcccccaagccttgccgtacgccctccacctgcccctgccacacgcgtgctgccttcacctgcacgacccttcccagccagcctcggacgcgctgagctccatccagtcgaacttaagcccttccaggactatcagaagctgtcaagtaacctaggaggcccaggctcatctcgcacacccccaacaggaaggagtttcagcggcctgaatagccggctcaaagccactcccagtacttactctggagtctttcggacccaaagagtagacctgtatcagcaagcgtcgccacccgacgcactgaggtggatccccaagccatgggaacggactggccctcctcccagagagggccctagccgacgggctgaggagcccggttctaggggcgacaaagaacctggattacctcctccaaggta

SEQ ID NO: 236226 - DNA, 6474 bp, synthetic construct
  misc_feature 1..6474: note = Description of Artificial Sequence: Synthetic coding sequence
  source 1..6474: mol_type = other DNA
atgagtgaccggtccggtcccaccgcaaagggtaaggacgggaagaagtactcctcactaaatctctttgacacctacaaaggtaaaagtctagagatccaaaagcccgctgtcgcgccaagacacgggttgcaatccttggggaaagtagcaatcgcaagacggatgccgccacccgcaaatctgccaagtctgaaggctgagaacaagggtaacgaccccaacgtgtctctggttcccaaggatgggaccggctgggcaagcaagcaggaacagtctgatcccaaatcttccgatgcgagcaccgcccagcctcccgagtctcaaccgctgcctgcttcccagacacctgccagtaaccagccaaaaaggccaccggctgcacctgagaataccccattagtcccaagtggcgtgaagagttgggcccaagcttccgtgactcacggggcacacggcgatggcggaagagcctcatcactcctgagccggttctccagagaggagttcccgactctgcaagctgccggagaccaggataaggccgcaaaagagcgggagagtgccgagcagtcgtctgggcctggcccaagcttgagaccacagaactctaccacttggcgagatggagggggtcggggtcccgatgagctcgagggcccagatagcaaactgcatcatggtcatgatcctagaggagggcttcagcccagcggaccccctcaatttcccccttaccggggaatgatgccaccattcatgtaccctccctacttgcctttccctcccccatatggaccacagggtccatatcgttatccgacccccgacggaccgagccggttccctcgcgttgccggacccagaggatccggtcctcctatgcgcctggtggaacctgtcggtagaccctctatacttaaggaggacaacttaaaggagttcgatcagctggatcaagagaacgatgatgggtgggccggagcccacgaagaggttgattatacagaaaagctaaagttttccgatgaagaagacggccgagatagtgacgaggagggagctgaggggcacagggacagccagtctgcttctggtgaggagcggcctcccgaggctgatggaaagaaggggaatagtcccaactcagaaccacccacaccaaagaccgcatgggcggaaacctcccggcctccagagacagaaccaggcccacctgctccgaagcccccactcccacctccgcaccgtggcccagctggcaactggggccctccaggagactaccctgacaggggtgggcctccttgtaaaccccctgcccctgaggatgaagacgaggcttggcgacaacgccgaaaacagtcaagctcggaaatttctttagcagtcgagcgggcaagaagacgacgggaagaggaggagcgccgaatgcaggaagagagacgtgctgcctgcgcggaaaaactgaagcggttggatgagaaatttggagccccagataagcgattgaaagcggagccagctgcaccccctgctgcccctagtacgccagcgcctccaccagccgtccctaaggagctcccagcacccccagcccctccgcctgcaagtgctccaacccctgagaaagagccagaagaacccgcacaggcccctcctgcacaatccacgccaactcccggagtggcagcagcccctaccctggtgtccgggggagggagtacttccagcacctcctcgggatcctttgaggcatctcctgttgaaccacagttgccaagtaaggaggggccagaacctcccgaagaagtgccaccacctaccacccctcccgttccaaaggtggagccaaaaggcgatggaatagggccaaccaggcagcccccatctcagggactgggctaccccaagtatcaaaagtcacttcccccaaggtttcaacgacagcaacaggaacagctcctgaaacagcagcagcagcaccagtggcaacaacaccagcagggctcagccccacccacccccgtgccgccatccccccctcaacccgtcacactgggcgctgtacctgcaccgcaagcgccacctcctccacctaaggccttgtatccaggagcgctggggcgtcctccccctatgcctccaatgaactttgatcctagatggatgatgattcccccttacgtggatcctcgtcttctccagggcaggcctcctcttgacttttatcctccaggcgtgcacccctccgggctcgtgccgcgagagcggagtgacagtggcggttcatcatccgagccatttgacagacacgcccctgccatgctgagggaaagggggacgccaccagttgaccctaagcttgcctgggtgggcgatgtcttcacagcaactcccgctgagccacgaccactcacatcccccctcagacaggctgccgatgaggacgacaaggggatgcgctctgagacccctccagtgccaccaccaccaccctatcttgcttcttaccccggtttcccagagaatggagccccaggtcctcccataagtaggtttcccctggaggagcccggtccaaggccactaccctggcccccaggatccgatgaggtggctaaaattcagactccgcctccgaagaaggaacctcctaaggaggagacagctcagttgaccggtccagaggctggcagaaaaccggctagaggcgtcggttcagggggacagggcccacccccaccccgtagggagagtcgtacggaaaccagatggggccctcggcctggtagctcacgaagggggattccccctgaagagccaggagctccccctcgccgtgcgggacctattaagaaaccgcctcccccaaccaaggtggaggaactgccccctaagcccctcgagcagggcgatgaaacacccaaacctccgaagccggacccgttaaagattactaaaggcaagctgggaggacccaaggaaactcctccaaatggaaatctctcaccggctccgcgtctgcgcagggactatagctacgagagggtggggcctacttcttgtcggggacgcggacgcggagagtactttgcaagaggtcgcggtttccggggaacttacgggggaagaggtcggggtgcacgttccagggaatttaggagctacagggagttccgcggtgacgacggccgaggtgggggaaccggcggtccgaaccatcccccagctccccgaggaagaactgcaagtgagacaagatcagagggctccgaatacgaggagatcccaaaacgcaggcggcagcgagggagcgaaactggctctgagacacatgaatctgaccttgcacccagtgacaaagaggcccctacccccaaggaaggtactctaacacaggttccacttgccccaccaccccctggggctccaccctcacccgctcctgcacgatttacagctagagggggtagagtgttcacaccgaggggagtgccatctcgccgagggaggggcggaggccgaccaccccctcaggtgtgccccggttggtcccctcctgctaaaagcctggcccctaaaaaaccccctactgggccattacctccctctaaggagccactaaaggaaaaactgatacctggcccacttagtcccgtagcgagggggggatccaacggcggttccaacgtcggtatggaggatggcgagaggcctcggcgtcgtagacacggccgtgcccaacagcaggacaaaccacccaggttccgccgtctgaagcaggaaagggagaatgctgccagaggcagtgaggggaaaccaagcctgactctgcctgccagcgcccctggcccagaggaggcgctgactaccgtaaccgttgcccctgccccacggagggccgcagccaagtcgcctgatctgtctaatcagaacagcgatcaggccaacgaggagtgggagaccgcctcagagagctctgactttacatccgaaaggcggggtgacaaggaagcaccccctcctgtgctgctcacaccaaaagctgtgggcacaccaggaggtgggggaggtggggctgttcctgggatcagcgctatgtcccggggagacctgtcccagcgggctaaagatctctccaagcggagctttagctctcagaggcctggaatggagcggcagaataggcggccagggccaggagggaaagctggctcaagcgggtccagcagtggcggtggtggaggcggtcccggaggacgaactggccctggcaggggtgacaagcgttcctggccctcaccaaagaacaggtctagacctcctgaggaacggccaccaggcctacccctgccccctcctcccccatcatcctccgctgtcttcaggctggaccaggtaatccattcgaatcctgctggaatccaacaagctctggcacagttgtcatcaaggcagggctctgtcaccgccccaggaggtcatcctcgccataagccaggcccaccccaggcaccccagggccctagtcccaggccgcctacccgttatgaacctcaacgcgtcaactcaggcctgagttcagatccccacttcgaggaaccaggcccaatggtcagaggagtggggggaacccccagggacagtgctggcgtgtcgcccttcccacctaagcgtagggagaggccccctcgtaagccagaacttttgcaagaagagtctctgccccctcctcacagcagcgggttcctgggaagtaaaccagagggtcccggtccccaagcagaaagcagggacactggcacggaggcactgactccacacatctggaatcggctgcataccgctacaagccgaaagagctacagaccctctagcatggagccgtggatggaacccctgagcccattcgaggatgtcgccggaacagaaatgagccaatctgattcgggcgttgatctgagtggtgacagccaagtctcctcagggccttgctctcaacgtagcagccccgatggcggactgaagggtgccgcagagggccctccaaaaaggcccggtggatctagtccgctcaacgccgtcccctgcgagggcccacccggaagcgagcctcctaggcgacccccacccgctcctcatgatggcgatcgcaaagagctccctcgtgaacagccgttaccaccaggcccaattggcactgagagaagccaacacaccgatcgcggaaccgagccgggtcccattagaccaagtcaccgacccggaccaccagtgcagttcggtacgagtgacaaagacagtgacctgaggttggttgtgggagatagcctaaaagccgaaaaagagctcacggcaagcgtgactgaggccatcccagtaagccgagattgggagcttctgccaagcgcagctgcctcggccgagccacagtccaaaaacctagattcaggccactgcgttcctgaaccatcatcatctgggcagcggttgtacccggaggtgttctacggctctgccggtccgagcagttctcagataagcgggggagctatggattctcaactgcatcctaacagcggtgggtttcgcccaggaacacccagcctgcacccctacagatctcaacccctttatctgccccctgggccagcaccaccgtccgcactcctgtcaggagtggccttaaagggccaatttctagattttagcacaatgcaggctaccgagttgggcaaactgcccgcaggtggagtcctgtaccctcccccatcttttctgtacagccccgctttttgcccttctccactccccgatacatccctgctgcaggtacgccaggatctaccttccccgagtgacttctattctaccccactgcagcccggagggcagtccggattcttgccaagtggcgctcctgctcagcaaatgctgctccctatggtggattcccaactgcctgttgtgaactttggttccctgccacccgctcccccacccgcaccaccctccctgagcttgcttccagtgggtcccgctctgcagccccctagtctggctgtgagaccccctccggcacctgcaacccgagtgctcccatctccagcgagaccattcccggcttctctcggcagggccgagttgcacccggtggaactgaaaccattccaggattaccaaaagcttagttccaatctaggaggccctggaagctcaagaacaccgccaaccggcaggagcttcagcggcctcaattcccggttaaaggcaacaccctcgacctatagcggggtctttcgcactcaacgcgtggacctctatcagcaggccagtcctcccgatgctttaaggtggattccaaagccttgggaacgcacgggacccccacctagagaggggccatctcggagagccgaggagcccggtagcaggggggacaaggaacctggcctaccccctcccagatag

SEQ ID NO: 236227 - DNA, 6473 bp, synthetic construct
  misc_feature 1..6473: note = Description of Artificial Sequence: Synthetic coding sequence
  source 1..6473: mol_type = other DNA
atgtctgacaggtccggccctacagccaagggaaaggatggcaagaagtactccagcctgaatttgttcgacacatacaaaggtaagtccttggagatccaaaagcctgctgttgcccctagacacggattacagtctctgggaaaggtggccatcgcacgcagaatgccccctccagctaatttaccatcattgaaggcagagaataaagggaatgatcccaacgtgtctctcgtgcccaaagacggtactggctgggcctccaagcaggagcagagcgatccgaaatcatctgacgccagcactgcacagccaccagagtctcagcctcttcccgcttctcagacccctgcctctaaccagcctaaaagacctcccgcagctcccgaaaataccccccttgtaccctccggcgtgaaaagctgggctcaggcatccgtgacccacggcgcacatggggacggaggtagagcctcttcacttctttcccgctttagcagggaagaatttcccactttgcaggccgctggggaccaggacaaagccgctaaggaaagagaatccgcggagcaaagttctgggcctggcccatccctgcggccacagaattctactacttggagggacggcggtggcaggggcccagacgaacttgaaggtcccgattctaagctgcaccacggacacgatccgaggggcggtctgcagcctagcggacctccccagttccctccataccggggaatgatgcccccatttatgtacccaccatacctgccattccctcccccatacgggcctcaggggccttaccgataccccacgcccgacggcccttcacggtttccccgtgttgcaggccctcggggatccggtcccccaatgcgattagtggagcccgttgggaggccctcgatactcaaagaggataacctgaaagagttcgatcaactggatcaggagaacgacgatggttgggccggagcacacgaggaggtggactacacagaaaagctgaagttctccgatgaggaggacggtcgggatagcgatgaagaaggggcagagggccacagggatagtcagagtgcgagtggcgaagagcgccctcctgaggccgatggcaagaagggcaacagccccaattctgagccgcctactccgaaaacagcgtgggccgaaacaagccgccctcccgaaaccgaacctggacccccagcacctaagccccctctgcccccaccccataggggccctgccggaaattggggacccccaggagactaccccgataggggcggacctccctgtaaacctcctgcacccgaggacgaagacgaggcctggagacagaggcgtaaacagtccagctcagaaatcagcctcgcagttgaacgcgcaaggcgacgccgtgaagaagaggaacgtaggatgcaggaggaacgcagggccgcatgcgctgaaaagctgaaacgactggatgagaagtttggagcaccagataaaaggttaaaagcagaacccgcagcccctcccgctgcacccagcactcccgcacccccacccgctgtgcctaaggagctgcctgcacccccagccccaccaccagcttccgccccaacacctgaaaccgagcccgaggagcccgcacaggcccctcctgcccaatcaactcctacccctggggtagctgcagcacctacactagtctccggcggaggttccacctcttcaactagcagcggctcgttcgaggctagtcccgtggaaccacagctgccctcaaaggagggcccagaacccccagaagaagttccaccacccaccaccccaccagtcccgaaggttgaacctaaaggcgacggaatcgggccaactcgccagccaccgagtcagggcttaggttaccctaagtatcaaaagagcctgccccctcgatttcaaaggcagcagcaggagcagctactgaagcagcagcagcagcaccaatggcagcagcatcagcaggggagcgccccacccacacccgtgccaccaagccctcctcagcccgtgacactgggcgcagtgcccgctcctcaggcccctccgccaccaccaaaggctttgtatcccggagctctgggaaggcctccccctatgccgcctatgaacttcgacccgcgatggatgatgattcccccatatgtggaccctaggctgttacagggaagaccaccattggatttctacccaccaggtgttcaccccagtgggctcgtcccgagagagaggagcgattctggcggttcatcaagcgagcctttcgatagacacgcacctgcaatgctgagggagcggggaaccccgcctgtcgatcctaaactcgcatgggtgggagacgtgtttacggcgactccagcggagcccagacctctcaccagcccgttaagacaggccgcagatgaggatgataaaggtatgcggagcgagaccccccctgtccctccccctcctccttacctggcaagttatcctggtttccccgagaacggagccccaggacccccaataagcaggtttcctctagaagaaccgggaccacgacccctgccctggcctcccggatccgacgaggtggccaaaattcaaacgccgccacccaaaaaggaaccacctaaggaagagaccgcccagcttaccggcccagaggccggacggaagcctgcccgtggagtcggctctggtggacagggaccaccacccccacggagggaaagtagaacagaaactcgatggggcccacgcccaggctcctctcggcgtggcattcccccagaggagcccggagcaccacctcgcagggccggaccgattaaaaagcctccccctccaaccaaggtggaggagctgccccctaaaccactggagcagggggacgagaccccaaaacccccaaagcccgacccactgaaaattaccaagggcaagcttggcggtcccaaagaaacccctccgaatggcaatctcagtccagcacccagactcaggcgagactattcttacgagcgagttgggccaacaagttgtagaggcaggggaagaggggaatactttgccagaggacggggattcagaggaacatatggcggacgaggcagaggagcaagatccagggaattccgctcttaccgtgaatttaggggggacgatgggagggggggaggcacagggggtccaaaccatcctccggctcccagagggaggacagcatccgaaaccaggtcagagggcagtgagtacgaagagataccaaaacggcgaaggcaacgtggctcagagactggtagcgaaacacatgaatctgaccttgcaccgtccgacaaggaggctccgacaccaaaggagggaacgctaactcaagtgcccctggcgcctccgcctcccggtgcgccaccatcacctgccccagctcgctttactgccaggggcggacgggttttcacccctcggggtgttccatcacgaaggggcagaggtggagggagaccaccccctcaggtgtgtcccggatggtcaccaccggcaaagtcacttgctcccaagaaaccgccaaccggtcccttgccgccatctaaagagcctctcaaggagaagctcattccgggaccactctcacccgttgccaggggcggttctaatgggggtagtaacgtcgggatggaggatggggagcggcctagacgcagaagacatgggagagcacagcagcaagacaaaccccctaggtttcgacgattgaagcaagagcgggaaaatgctgcccgaggctcagaaggaaagccttccttgaccttgcccgcttccgcccctgggcctgaggaagccctcactaccgtgacagtggctcctgcgccacggagagctgccgctaagtcgccagacctgtctaaccaaaattctgaccaggccaacgaagagtgggagacagccagcgagtccagtgactttacatccgagaggaggggggataaggaagctccccctcctgtactgcttacgcctaaagcagtcggaacccccggtggcggaggagggggtgccgtgccaggcatttccgcgatgtccaggggtgacctctcccagcgggcaaaagacttgagtaagaggtccttttccagtcagagaccgggtatggagaggcagaaccgcaggcccggtcctgggggaaaagccggatcctccggaagctcaagcggcggtggaggcggtggacctggcggaagaaccggccctggacggggtgacaagaggtcctggccttccccaaagaaccgaagccggccaccagaagagcgtcccccagggctgcccctccctcctcccccaccatccagcagtgcagtgttccggctggaccaagtaatccactccaacccagccggaatccaacaagcgttggcccaactgtctagtaggcaggggagcgttacagctcctggtgggcatcctcggcataaacccggtctgccgcaggcgccacagggcccttctcccaggcctcctacccgatatgagccacagagggtgaactcaggacttagcagtgatcctcacttcgaagagccaggaccaatggtgcgaggtgtcgggggtactccgagagacagtgctggagtgtctcctttcccccctaagcgacgggaacgcccacccaggaaaccagagctcctgcaggaagagtcactcccaccccctcattcctccggctttctcggctccaaaccagagggaccagggcctcaggcagaaagcagagacaccggcaccgaagccctcacaccacacatttggaacaggcttcacaccgccacctcgaggaaatcctaccgaccatcgtccatggagccttggatggagccactaagccctttcgaagatgtggccggtacggagatgagtcagagtgacagtggagtggacctctccggggactcccaggtatcaagtgggccatgctctcagaggagctcacctgatgggggactaaagggggcagccgaggggccacctaaacgtcccggtggcagtagcccactgaacgccgtcccttgcgagggcccacccggttctgagcctccccgtagacccccaccagcaccacacgacggtgacagaaaggagctgcctcgggagcaaccactcccccctggccctattggaactgagaggtcccagcgtacagacaggggcacagagcccggacctatccgtccttcacatcggccaggccctcccgtccaatttggtacatctgacaaggactctgatttaagactagtggtcggagattctctcaaggccgaaaaagagctcaccgccagcgttactgaagccattcccgtttcccgggactgggaactcctgccatctgctgctgcatcagcagagccacagagcaagaatctcgactccggacactgtgtgcctgaacccagttccagtggccagaggctgtaccccgaggtgttctacggctcagccggaccctctagctcacagataagtggaggggctatggattcccagctgcacccaaattcaggagggttccggccaggcacccccagcctccatccatacagaagccagcctctatacttgccccctggccctgcaccaccttctgccctcctatccggagtggctctcaagggccagtttttggattttagtactatgcaggccaccgagttgggcaaactgcctgccggaggtgtgttgtacccccctcctagtttcctgtattccccagctttttgccccagccccctgcctgacaccagtctcctgcaggttcgccaggacttgccttcaccctctgatttttattcaacaccactgcaacccggaggccagtccgggtttctgccgtcaggggcaccagcacagcagatgcttctgcccatggtagactcccagcttccagtggtgaactttgggtccctgcccccagccccacccccagcaccaccccctctcagcctgcttcctgttggcccagcactccagccgcctagcttagcagtgaggccccctccagcccctgcgacccgggtgctcccttcgccggctcgcccattccccgcaagcttgggacgtgcagagcttcacccagttgaactgaagcccttccaagactaccagaagctttcatctaatcttggaggcccaggctcctcccggaccccacctaccggccgttcttttagcggccttaacagtagactgaaggctaccccctcaacgtacagcggtgtttttaggacgcagagggtcgacctgtaccaacaagctagtccccctgacgccctccgttggatcccaaagccctgggagagaactggccctccgccacgggaaggcccatcccgcagggcagaggaaccaggatcgagaggcgataaggaacccggactgcctccccctcggta

SEQ ID NO: 236228 - DNA, 6473 bp, synthetic construct
  misc_feature 1..6473: note = Description of Artificial Sequence: Synthetic coding sequence
  source 1..6473: mol_type = other DNA
atgtcagaccggagcggacctactgccaaggggaaggatgggaagaagtatagtagcctgaatctgtttgacacatataagggaaaatcgctggagattcagaaacccgctgttgcccctcgccacggtctacagtccctcgggaaagtggccattgcgaggcgcatgccaccacctgccaatcttccgtctctaaaggctgagaacaaaggcaatgatcccaatgttagtttggttccaaaggatggaaccggctgggcatccaaacaggaacaatccgatcccaaaagctcggatgctagtacagctcagcctctcgagagtcaacccttacctgcttcccagactcctgcctcaaatcagcccaaaagacctcccgcagcccctgagaacacccctttggttccttctggggtaaaatcttgggcacaagcttccgtaacacacggcgctcacggggatgggggaagagcgagctctctgctgtcacgcttttcccgggaagaatttcccacactgcaggctgcaggggaccaggacaaggcggcaaaggagcgagagtctgcagaacagtcaagcgggcctggccctagcctgcgtcctcaaaacagcacaacttggagggacggcggtggacggggacctgatgaactcgagggtccagactcaaagttgcatcatggacacgatccaagggggggactccagccaagcgggccacctcaatttcccccatatcgcggtatgatgcccccttttatgtaccctccgtacctcccttttccccctccttacgggcctcagggaccatatcgatatcccactcccgacggtcccagcaggtttccgagggttgctggcccaagagggagcggaccacccatgagattggtggaacccgtggggagaccctcaattctaaaagaagataatttaaaagagttcgatcaacttgaccaggaaaatgacgacggttgggccggagcccacgaggaggttgactacaccgaaaagcttaaattttcagatgaagaagacggacgggactcggatgaagagggagccgagggccaccgggattctcaatctgcctcaggggaagagcgcccaccagaagccgatggtaagaaaggcaacagcccaaattccgagccaccaacacctaagacggcttgggccgaaacctcccgtccacccgagacagaaccaggcccaccagcccctaagcctccattaccgcctccacataggggtcccgctgggaactggggcccacctggtgattatccagatagaggcggtcctccctgcaaacctccagcgccagaggatgaggacgaggcctggcgccagcgacgtaaacaaagctcttctgagattagcctggcagtggaacgggcaagaagaaggcgcgaggaggaggaacgcagaatgcaagaagagcgacgcgctgcctgcgccgagaaactgaaacgtcttgacgagaagtttggggctcctgataaacgcctaaaagcggaacctgccgcaccccctgcggcaccctctactccggcacctcccccagccgtccctaaggaacttcctgctcccccagccccacctccggctagtgcccctacacctgagaaggaacccgaggaacctgcacaagctccgccagcccagagcactcccacccctggcgtggcagccgctcccacacttgtgagcggtggaggatctacgtcttccaccagcagtgggtcattcgaggctagcccagtggagccccagctgccctccaaagaaggccctgagcccccagaggaggtaccaccccctaccactccgcctgtgcctaaagtcgagcccaagggcgatggaattggccctaccagacagcctcccagccaggggttaggctaccctaaataccagaagtctcttcccccacgattccagaggcagcagcaggaacagcttttaaagcagcagcagcagcaccagtggcaacagcaccagcaggggagtgcccctcccacgcctgtccctccctctccgccacagccagtgactctcggagctgtgcccgctccacaggcaccacctcctccacctaaggccctctaccctggcgcactgggcaggccacctccaatgccaccgatgaactttgaccccaggtggatgatgatcccgccatacgttgatccgaggctgttacaaggacgcccacccctggacttttaccccccaggcgtgcaccccagcggtcttgtgccacgggaacgcagtgatagcgggggtagcagcagtgagcccttcgaccgccatgcgccagctatgctgcgggaaagaggcactcctccagtggaccccaagctcgcttgggtgggggacgtattcaccgccacacccgctgaacctcgccctctgactagtccactccggcaagccgcagacgaggacgacaaaggcatgagatcagaaacgcctccggtgcctccaccaccgccttacctcgcttcgtaccctgggttcccggaaaacggagcgccagggcctcccataagccggtttcctctggaggaacctgggccacggcctctgccctggccgcctggctcggacgaggttgcaaaaatacagaccccccctcctaagaaggaaccccctaaggaggaaacagcacagctcactgggccagaagcgggaaggaaaccggcacggggtgtgggcagcggaggccaggggcctccaccacctcgacgcgagagtagaacagaaacccgctgggggccacgcccagggagttctaggagaggtatcccaccggaggaacctggagccccacccaggcgcgctggcccaatcaagaagcctccaccaccaacgaaggtggaggagctgccccctaaacccttggagcagggtgatgagactcctaagccccctaagcccgacccactgaagattacaaaaggcaaattgggcggtcccaaggaaacgcctccaaatgggaatttgtcgccagccccacgcctgaggagagattattcatacgagcgagtgggtccaaccagctgccggggtagaggcaggggagagtattttgctcgagggcgtggcttccgcggaacctacggcggaagagggcgaggtgcccgaagccgcgaattccggagttatcgagaatttagaggcgatgacggtcgaggagggggaacagggggtcccaatcacccgccagcccctaggggaaggacagcttcagaaacgagatctgagggcagtgaatatgaggaaataccaaaaaggcgcagacaaaggggatctgagactggatctgagactcatgaatcagaccttgctccaagcgacaaagaggccccaacccccaaagagggcaccctaacgcaagttcctctggcccctcccccaccaggcgcaccccctagtcctgctcccgctcgttttactgcacgaggaggccgtgtgtttactccaaggggagtgccgtcaaggaggggcagggggggagggcgacccccaccccaggtatgcccgggatggagccccccagcaaaaagcttagcccctaagaagccgcctacaggacccctgcccccaagcaaagagccccttaaggagaaactcattccagggccattatcacctgttgctcggggaggttccaacggaggctctaacgtaggtatggaagatggagaacgacctcgtaggcgtagacatggaagagctcaacagcaggacaagccgcctaggtttaggaggctaaagcaggagcgggagaacgccgctcgcggatcagagggaaaaccttctctgactctccccgcaagcgctcccggacctgaagaggctctcacaacagtgacagtagcccctgcacccagacgggcagccgctaaaagtcccgatcttagtaatcagaatagcgaccaagccaacgaggagtgggagaccgcctctgaatcatccgatttcactagcgaacgcagaggagacaaagaggccccaccccctgtcctgctaactcccaaggcggttgggacaccaggaggcggaggaggcggagccgtacccggtattagcgcaatgtcacggggagaccttagccaaagggcaaaagatctaagcaaaagatcattctctagccagcgtcccggaatggagcggcagaaccgaaggccaggccctggagggaaggcagggagcagcggcagttcatccggtggcggtggcggagggccaggtgggcgtacaggcccaggaagaggggacaagcgttcctggcccagtcccaagaatcggtccagaccaccagaagaaaggccacccggattgcctctgccccctcccccaccgtcttcatctgctgtctttcgattagaccaggtgattcacagtaaccccgcaggcattcagcaggctctggcccagttgtcttctcggcagggtagtgttaccgcccctgggggacatccccgacacaagcctggaccgccacaggcaccgcaggggcctagtccaaggccgcctaccaggtacgaacctcagagggtcaactccggactgtcttcagatccgcacttcgaagagcctggccctatggttagaggcgtgggagggacccccagagattctgctggggtttctcccttcccgccaaagcgcagagaacgcccacctaggaagcctgaattactgcaggaggagtccctgccccctccacacagcagcggcttcctggggagtaaacccgagggacccggtcctcaggccgagtctcgagatacgggcacagaggccctcacaccacacatctggaataggttacacacagccacttctagaaaaagctataggccctcatccatggagccgtggatggagcccctgtcaccttttgaagatgtggccggaaccgaaatgagtcagtccgactccggggtggacctgtccggggatagccaagtaagctctgggccatgttcccagcgctcttcacccgatggcggactcaagggcgcagccgaagggcctcccaagagacctgggggatccagtcccctcaacgcagtcccctgtgaaggccctcccggttctgaacctccaaggcgcccaccacctgcgcctcacgacggggaccggaaggagctcccccgagagcagcctcttccacctgggccaatcggtaccgaacgatctcagaggaccgataggggcacagaaccagggccaatacgcccatcccaccggcctggccctccagtgcaattcggtactagtgacaaggacagcgacctccggttggtagtgggtgactctctgaaggctgagaaggagctcactgcctccgttactgaggcaatacctgtgagtagggattgggagcttctccccagcgcagccgctagcgccgagccccagagtaagaatctcgacagcggccactgcgtccccgagccaagcagctcaggacaaaggttgtatccggaggtgttctatggatcagccggacccagttcctcgcagatttctgggggagcaatggactcccagctacatccaaattctgggggatttcggccaggcacccctagcctccacccttatcgctctcagcctttatatctccctcccggacccgctccgccaagcgctctgctgagcggagtggctctgaagggccagtttctggactttagcactatgcaagcaactgaactgggaaagctccctgccggtggcgtgctgtatcctcctccaagctttttgtattcccctgccttctgcccgtcccctttgccagacacctctctgctgcaggtgcggcaggacctgccttctccgtccgacttctacagtacacccctgcagccaggtggacaatccggattcctgcctagtggagcacctgctcagcaaatgttactccccatggttgattcccagctccccgtcgtcaacttcggtagcctgccccctgctccacctcctgcccctcctcctctgtccctgctgcctgtcggccctgccctgcaacccccttcactcgccgttagaccacccccagcacccgctacccgagttttgccctctcctgctaggccattcccggcatctctggggagggcggagctccacccagtggagctaaaacctttccaggactatcaaaaactttccagcaatttaggcggacccggaagctcacgtacaccccctactggacgttcattctccggtctgaattcaagactgaaggccaccccctctacatattccggagtcttccggacacagagagtcgacctttatcagcaagcctcaccaccagacgctctccggtggattccaaaaccgtgggagcggacaggtccacctcccagagaaggcccaagcagaagggccgaggaacctggctctaggggggataaggagcctggcttaccaccacccaggta

SEQ ID NO: 236229 - DNA, 6473 bp, synthetic construct
  misc_feature 1..6473: note = Description of Artificial Sequence: Synthetic coding sequence
  source 1..6473: mol_type = other DNA
atgtccgatcgcagcggccctacagctaagggtaaggatggcaagaagtactccagcctcaatctctttgatacatacaagggcaagagtctcgaaattcagaagccagccgtggcccctcgtcacggcctgcagtctctgggcaaagtagccattgctagacggatgccgcctcctgccaacctgccttctctgaaagcagaaaataaaggcaatgaccccaacgtatctctcgttccaaaggacggtaccggctgggcttctaaacaggagcaatccgatccaaagtccagcgacgctagcactgcccagcctcccgaaagtcaacccttgccggcttctcaaacccctgccagtaaccagccaaagcggccaccggctgcccctgagaatacgcctctagtgccatcaggtgtgaagtcctgggcgcaagcttctgtcactcatggcgcacacggagatggcggacgcgcttcgtcactgctgtcaaggttttcacgcgaagagtttccgacactgcaggccgctggagatcaggacaaggctgctaaagaacgggagtctgcggaacagagctccggacctggtccatccctgcgcccacagaattccactacttggagagacggtggcggacgcggacctgacgagttggagggacccgatagcaagctgcatcacggccacgatccaaggggcggactccaaccctcaggcccaccccaattccccccatatcgcggaatgatgccaccgtttatgtatccgccatacctcccgttcccaccgccatatggccctcaggggccttatcgctatccaacaccagacggtccaagccgattcccacgagtggcagggcctcgcggaagcggtcctccaatgaggctggtggaacccgttggcagacccagtattttgaaagaagacaatttgaaagagttcgatcaactggaccaagagaatgacgacggctgggctggcgcacacgaagaagtcgattacacagaaaaactcaagtttagcgatgaagaagatggcagagattcagatgaggagggggctgaagggcaccgggattcccagtccgcatcaggagaagaacgcccacccgaggcagatggtaagaagggtaatagccccaattccgagccccctaccccgaagacagcttgggccgaaaccagtagacccccagaaacggagccaggcccacctgctccgaagccgccacttcctccgccacacagaggccctgccggtaactggggtccaccgggtgactacccagacagaggcggaccgccatgcaaaccaccagccccagaagacgaggacgaggcttggcgtcaacgcagaaagcagtctagctccgaaatcagcctggcagtcgaacgggcaaggcggcgacgagaggaagaggaaagacggatgcaagaggaacggagggcagcatgcgcagagaagctcaaaagactggatgagaagtttggcgcacctgacaaaaggctgaaagcagagccagctgctccaccggctgcccctagtacacccgctccccctcctgcggttcccaaggaacttccagctccccctgccccaccacccgctagtgcccctacacccgaaaaggagcctgaagaacccgctcaagcacccccagctcagagcacgccaactcccggagtggctgcagcccctactctggtgagcggcggaggcagcacctctagcacatccagcgggtccttcgaagcctctccggttgaacctcaactgcccagcaaggaggggcctgaaccgcctgaagaggtgccaccacctactacccccccagtgccaaaagtagaacccaaaggggacggcattggtccgacacggcagcccccatcgcaaggactcggctatcctaagtaccaaaagtcattgccacccaggtttcagcggcagcagcaggagcagctgctgaaacagcagcaacagcatcaatggcagcaacaccagcagggctcagccccacccactccagttcccccttctcctcctcagcctgtcaccctcggtgccgtcccagctccgcaggcgcctccccctcctcccaaggctctttacccaggtgccctgggaagacctcctcctatgcccccaatgaacttcgacccgagatggatgatgattcctccgtacgtggatccaagactgctacagggtcgacctcccctagatttctatcctccgggagtccacccctctgggctagtgcctagggaaagaagtgattccggcggttcgtcttccgagccattcgatcggcatgctcctgccatgctgcgggagcgagggactccgcctgttgacccaaagctggcctgggtgggggatgtgttcacagctacgcctgctgagccccgaccccttacctcgcctctgcggcaagccgctgatgaggatgacaaggggatgcgatccgaaacccctcccgttccaccaccgcctccgtatttggcgtcttatcctggcttccccgaaaatggcgctccgggacctcctatcagcagattccccctggaggagccgggacccaggccactcccatggcctcctgggagcgacgaagttgcaaagatccagactccccctccaaaaaaagagccacctaaggaggagactgctcaactgacggggccagaggccggtcgaaaacctgccaggggagtggggtccggcggacaagggccaccgccacctagacgggagagccgcaccgaaaccagatgggggccaagaccgggtagcagtcgtaggggaatcccacccgaggagcccggtgccccacctcggagggccggacccattaaaaagccaccccctcccacaaaggtggaggaactgcctcctaaaccccttgaacaaggagatgagacacccaagcccccaaagcccgatccgcttaagatcactaaaggcaagttgggcggaccaaaggaaacaccacccaatgggaatctttctccagcccctcggctgagacgtgattactcctatgaaagagtgggacccacctcgtgtcgcggaagagggcgtggtgaatacttcgctagagggaggggatttagggggacatacggtggcagaggaaggggggctcggagtagagaatttcggtcttaccgagaattccgaggagacgacggaagaggaggcggaactggcggtcctaatcaccctcctgctcctagaggcaggaccgccagcgaaacaaggtcagagggctctgagtatgaagaaattcccaagaggaggaggcagagggggtcagagaccgggtcggagacacacgaaagtgacctagctccttccgacaaagaggctccaacgccaaaggaggggacactgacccaagtgccactggcacccccaccaccgggagcccctcccagtccagcaccggctcgcttcacagccagaggcggtcgagtgtttacgcccaggggtgtgccttcccgcagggggagaggtggagggcgtcctcccccacaagtgtgcccagggtggtcgcctcccgcaaaatccttggcccctaaaaagccaccaacaggcccactgccacctagcaaggaacctctcaaggaaaaattaatccctggccctctgtcccctgtggcacgagggggatctaatgggggatccaacgtagggatggaggatggtgaaagacccaggaggcgccgtcatggcagagcccagcagcaggacaagccgcctcgctttagaagattgaagcaggaaagggagaacgccgcaagaggttcggaaggcaaaccaagccttactctacctgcgtcagctcccggaccagaggaggcgctcaccacagtaacggtggccccagcccctcggagagccgcagccaagagccccgatctctctaaccaaaattctgatcaggcgaacgaagaatgggaaacagctagcgaaagcagcgatttcacctcagaacggaggggagataaggaggctccacccccagtgctgttgaccccaaaggctgtcggaacccccggaggtgggggagggggagcggtgccagggatttccgctatgagccgcggagacctgagccaacgggctaaagatctgtccaaacgctccttctcaagtcagagaccaggcatggaaagacaaaacaggcggccaggccctggaggtaaagccggatcctcaggcagctcttctgggggaggcggaggagggccaggtggaaggacaggaccgggtcgcggagataaacggagctggccaagccctaaaaacagatcacgccctccagaagagcgtccccctggacttcctctgccccctccacctccgagcagctccgctgtgtttcgactcgaccaggttattcactcgaatccggctgggatccagcaggctctggcccagctcagcagtaggcaggggtcagtgaccgcaccaggcggtcatccgaggcacaagcctgggccaccccaggctcctcaagggccatctcccaggccgccaactcgttacgaacctcagagggtaaattctggcttgagctctgatcctcacttcgaagaacctggcccaatggtgcgaggagttggcggaactcccagggactcagctggggtctctccattcccacctaaacgtcgggaacggcctcccagaaaacccgaactcttacaggaagagagcctccctcctcctcacagttcgggatttctcggttcgaagccagaagggcctggaccacaggccgaatcccgtgacactgggacggaggcactaaccccccacatctggaacaggcttcacactgcaacaagccgaaagtcgtatcggcctagttccatggagccctggatggaacctctttctccatttgaagatgtggcgggtacagagatgtcccagagcgatagcggcgttgatctctccggggattctcaggtcagttccgggccttgttctcagcggtccagtccagacgggggattaaaaggagctgccgaaggccctcccaaacgacctggaggttctagcccactgaacgctgtaccgtgtgaaggccctcctggttctgaacctccaagacgtccaccacccgctccccatgacggcgatcggaaggagctccctcgagaacaaccactccctcccggacctatcggcactgagaggtcccagcatacagaccgcggtacagaacctggaccaatccgaccaagtcaccggccaggtccccctgtgcagttcggtacctccgacaaagacagcgacctcaggctggtggtcggggacagcctaaaggctgaaaaggagctgaccgccagcgtgaccgaggccatccctgtttctagggactgggagttgctgcctagcgctgccgctagcgccgaaccccaaagcaagaacctggattctggccattgcgttcccgagccaagctcctccggccagagactttaccctgaggttttctacggcagcgccggacctagtagcagccaaatctccggtggcgctatggacagccaactgcacccgaatagcgggggattcagacccggtacaccctctctgcatccataccgttcccaacctttatatctgcctcccggtcctgctccaccctcagctctgcttagtggcgttgccctgaagggacaatttctcgatttttccacgatgcaggcaaccgaattaggaaaattgcctgcaggaggcgtattgtaccccccaccatctttcctttattctcccgctttctgcccgtcaccgctgccagatactagtttgttacaggtcagacaggatttaccctcacctagcgatttctactccacaccacttcagcctggtgggcagtcgggcttcctgcccagcggggctccagcacagcagatgctgctgcccatggtcgattcacagcttcctgtggttaatttcgggtcgctgccgccagcccctccacctgcacctccttccttgtccctgctgccagtgggccctgctctccagcccccaagcctggcagtgcgacccccaccagcaccagccacgagagtactccccagtcctgccaggccatttccagccagcctgggtagagcagaactgcaccctgttgaattaaaacccttccaagactaccagaagttgagctccaatctcggcggacccggtagttcacgcactcctcccacggggaggagctttagcgggctcaatagcagactgaaagctacgcccagtacatatagcggggtgtttagaactcagagggtggacctttatcagcaggccagccctcccgatgcactacgctggattcccaaaccctgggaacgaactgggccaccgcctagagaggggccatcacgcagagccgaggaaccaggcagtcgcggagataaggaacctggactcccacccccaagata

SEQ ID NO: 236230 - DNA, 6449 bp, synthetic construct
  misc_feature 1..6449: note = Description of Artificial Sequence: Synthetic coding sequence
  source 1..6449: mol_type = other DNA
atgtccgatcggagtggaccaactgctaagggtaaagatggaaaaaaatacagtagcctaaatctcttcgacacctacaagggaaaatcacttgagattcagaagccagccgttgctcccagacacggcttgcaaagtctggggaaggtggcaatcgcacggaggatgcccccacccgcaaatttaccgagtttgaaggctgaaaacaaaggcaatgacccaaacgtgtcactggtgccaaaggacggaacaggctgggctagtaaacaggagcagagcgatcccaagagcagcgatgcatctacagcccaaccacctgagagtcagccactccctgcgtctcagacacctgcatcaaaccagccaaaacgaccgccagcggctccagagaatacccccctggtgccttctggcgtgaaaagctgggcccaggcgagcgttacacatggagctcatggggatggtggcagggctagctcccttctgtctaggtttagtcgcgaagagtttccaactctgcaggccgcaggagaccaagataaggcagctaaggagcgcgaaagcgcagagcagtccagtggaccgggaccttccttacgtccccaaaacagtaccacttggcgggacggagggggacgcggaccagacgagctagagggccctgactcaaaactgcatcacggtcacgatccacgcggtggacttcagccatccggaccccctcagtttccaccgtacagagggatgatgcctccttttatgtatccaccttacttgcccttcccgccaccctatgggccacagggcccttaccggtatcctactcctgatggaccaagccggttccctagggtcgccggaccgagaggtagcggcccaccaatgcgcttagtcgaaccggtggggcgtcctagtatcctaaaggaagacaacctcaaggagtttgatcagctggaccaggaaaacgacgacggctgggcaggcgcacatgaggaggtcgattacactgaaaagctgaagttctccgatgaggaggatggcagagatagcgatgaagagggggcagagggacaccgtgatagtcagtctgcttccggagaggaaaggccacctgaggcagacgggaagaaagggaactccccaaacagtgagcctcctactcccaagaccgcttgggccgagacgagcagacccccagagaccgagccaggaccacctgcccctaagccacccctgccgcctccccaccgcggacccgctggcaattggggaccccctggcgactacccagatcgaggagggcctccctgcaagcctccggcacccgaggatgaagatgaggcctggcgacagaggaggaagcagtctagttcagaaatcagcctggctgtagagcgcgcacgtcgcagaagagaggaggaggagcgacgtatgcaggaggaaaggcgggctgcgtgtgccgagaagctaaagagattagacgagaagttcggtgctcctgataagcggctgaaagctgaaccggctgcccctcccgcagcccctagtacgccagcaccacctcctgccgtgccgaaggaactgcctgccccaccagcccctccaccagccagtgctcctactccggagaccgaaccggaagaacccgctcaggcccctcctgcacagagcactcccacccctggagtagcagcagctccaaccctggttagcgggggtgggtccacatcgagcaccagcagcgggagctttgaggcttccccagtggaacctcagctgccctctaaggagggccctgaacccccagaggaggtgccacccccaacgacccctccagtgcctaaagtggaaccaaagggggatggtataggaccaacaagacagccgccatcccagggactgggataccccaagtaccagaagtccctgccgcctcgtttccagcgacagcagcaagaacagctgctgaaacagcagcagcagcaccagtggcagcagcaccagcaggggagcgcgccaccaacacctgtacctccttccccgccacagccagtcacgctgggggcagttcctgcccctcaggcacccccacccccacctaaggctctataccccggagccctcggtcgtccaccaccgatgccccctatgaattttgacccgagatggatgatgatccccccttacgttgaccctcggttactccagggcaggcctcccctggatttttaccctccaggtgtgcatccgagtggtctggtgcccagagaaagatccgattccggcggtagttcaagtgaaccattcgatcgtcacgcacccgcaatgttgcgagagcgcggtacgcccccagtggatccaaagctcgcctgggtgggagatgtatttaccgctacaccagcagagcctaggcccctcactagcccccttcggcaggcagccgatgaggacgacaagggtatgcggagcgagacccctccagtacccccaccacccccatatctggcaagctatccaggcttcccagaaaacggagcccctggcccacccatttccaggttccccctcgaagaacccggaccaagacctctaccctggcccccaggttctgacgaggtggccaaaatacagacacctccaccgaaaaaagagccccctaaagaggagactgcacagctaaccgggccagaggccggaaggaaacccgcaagaggcgttgggtctggtggacaaggtccacctcctcccaggcgcgagtcccgcacagagacgaggtggggaccaaggcctggctctagtcgacggggaataccaccagaggagcccggagctccgcctcgcagagctggacccataaaaaaacctccaccccctactaaggttgaggagctccctccaaaacccctggaacagggagatgagactcctaagccgcctaagcccgaccctcttaagatcacgaaagggaaattgggagggcctaaggaaactcctccaaacggcaatctgtcccctgccccaaggttgcgaagggactacagttatgagagagtcggtcccacatcatgcagagggaggggcagaggcgaatactttgcgagaggccgaggcttccgaggcacatatggtggccgtgggcgtggagccgcagggaacagcgccgtgactgaaagctttgaagagatgatgggcgtcgaggtagggcagggcgatcagaccacccttcttctgcctgaggcagcccttccagctcgacatggagctagggtccagagcatgcgcaagagcccatcaggggcaggatctggcgctcagaagcaggccgctcggcctatgcgcgttatctggctcctgcagacgagaagactgccacacccaaggagggagcactccccaaggtcgaggtcccccaccactaggtcacccacattcccagcgccagcgagatttaccccaggcgtgggagagtccagcttgcccgaaggcatctctcccggtccccgtcggcgtgagcccccacaggtgtgccctgggtggtcacctccagcaaaatcacttgcacctaaaaagcccccaacgggacccttgccaccctctaaggagccactgaaggagaaactgatcccgggtccgctgtctcctgtggcacgagggggatccaatgggggtagcaatgtgggaatggaggacggagagaggccccgtcgcaggcggcacgggagggcccagcagcaagataagcctccaagattcagacgtctcaaacaagaacgtgaaaatgctgctcgcggttctgagggtaagcccagcttaacgctgcccgcaagcgctccaggtccagaagaggccctaaccacagtgacagtcgcccctgccccacggagagcagccgcaaagtcacctgatctatctaaccagaactccgaccaagctaatgaagaatgggaaactgcctctgagagctccgatttcacaagcgagcgcaggggcgacaaagaggcacccccaccagtcctgctgactcccaaagcggtgggcacccccggtggcggaggtggaggggctgtgccaggaatttcggctatgagccgaggcgacctcagtcagcgcgctaaggatctctccaaacgctccttcagcagccagcgaccgggaatggagcgacagaatcggaggcccggtcccggaggaaaggccggtagttctgggtcatcatccggcggtggtggaggcggaccagggggtcggaccggccctggcaggggcgataaaaggagttggccaagccctaagaaccgaagcaggcctcccgaggagagacctccaggcttaccgctgccaccacctccgccatccagctccgccgtatttcggttagaccaggtgatacacagcaaccccgctgggattcagcaagcactggctcagctgtccagtcgacaggggtctgtcacggcaccaggaggccacccgcgtcataaaccaggcttacctcaggcgcctcagggtcccagccctagacctccaacgcgatatgagcctcagagagtgaacagcgggctgtcctctgaccctcacttcgaggaaccaggcccaatggttagaggcgttggcggtacacctcgtgactccgcgggtgtttctcccttcccccctaagagacgcgaaaggcctccgcgaaaacctgagcttcttcaggaggagagtctcccacctcctcatagctccggcttcctgggcagcaaaccggaagggcctggaccacaggccgaatcacgagacactggaactgaggcactgacgccccatatctggaaccgtctacacacggcaacaagccggaagagttaccgcccatcttcaatggaaccgtggatggaacctttgagccctttcgaagatgtagccggtacagaaatgagccagagcgattcaggcgttgacctgtctggagactcccaagtctcttctgggccatgctctcagcgatcttccccagatggaggccttaagggcgctgcagagggacccccaaagcgcccaggcggaagcagcccattgaacgctgttccatgtgaaggaccaccaggaagtgagccaccgcgaagacctcctccagccccacacgacggtgatcgcaaagaacttccaagagagcagccgctgccgcctggcccaatcgggaccgagagatcccaacggaccgacagaggtactgagccaggccctatccgcccttcccatcgccctggccctccagtacagttcggcacatcagacaaagacagcgacttacgactcgtggtgggcgacagcctgaaggccgagaaggagttgacggcttcagttacggaagccatccctgtgagtagggactgggagctgctgccaagtgcggctgccagtgccgaaccacagtctaaaaacctcgatagtggtcactgtgtgcccgagcccagctcatcaggccagaggttatacccagaggtgttttacggcagcgccggaccaagttccagtcagattagcggcggtcatggcttgtcgattacttccaagcagtggcgcaggcctgggaccccatcccttcacccctatcggtcacagccactgtatttgccccctgggccagcgcctcccagtgccctattatctgggctggccctcaagggccagtttctcgactttagtactatgcaagcaaccgagctgggtaagctgcccgctggtggtgttctctatcctccgcctagctttttatattctcccgctttctgcccttcccccctccccgatacatcactcctgcaagttcggcaggacctgccctcaccttcggatttctactcaacacccctccagcccggtgggcagagcggcttcctgccctctggtgccccagcccagcaaatgctgcttcctatggtcgacagccagctgccagtggtaaactttggctcgctccctccagccccacccccagccccaccgccactgtcactgctccctgtcggtcctgcactgcagcctccctctcttgccgttaggccccctccggctccagccacgagggtgttgccaagccccgcacggccattcccagcaagcctgggccgtgcagaactgcacccagtcgagcttaagccttttcaggactaccagaagctttcatcaaatctcgggggacccggtagctctaggacaccccctaccggacgatcctttagcggactgaactcacggctgaaggctactccttcaacatattctggcgtcttccggacccagcgtgtggacctctaccagcaggcctcaccccctgatgcgttgcgctggatcccaaagccctgggaaaggactggaccaccacctagagagggcccatctcggagggcagaggagccgggttcccgcggtgataaggagcccggtttacctcccccacggta

SEQ ID NO: 236231 - DNA, 6473 bp, synthetic construct
  misc_feature 1..6473: note = Description of Artificial Sequence: Synthetic coding sequence
  source 1..6473: mol_type = other DNA
atgtctgaccggtccggccctactgccaaaggaaaagatggaaagaaatacagttctctaaacctgtttgacacttataagggaaaatcattagagatccaaaagccggctgtagccccacgtcatggcttgcagtccctggggaaggtggccatcgccagacgaatgcctccccctgccaatctgcctagcctgaaggcggaaaataagggaaatgaccccaatgttagtctggtgcccaaagatgggacaggctgggcctccaagcaggaacaatctgaccctaagagcagtgacgcatccacagcgcaaccccctgagtcgcagccattgccagcgtctcagaccccagcttccaaccagcctaagaggcctcctgctgccccagagaacacgccgctggtaccatcaggggttaagtcctgggcccaggccagcgtgactcacggagctcacggggacggcggacgggcatccagcctcctgtcccggttctctcgcgaggagtttcccactttacaagcggcaggtgaccaagataaagccgctaaggagcgggagtccgcggaacagtcttctggacccggtccctcgctcagacctcagaatagcactacatggagagacggaggcggacgcggtcctgatgaactggaaggccctgactcgaaactgcatcacgggcatgatccaaggggcggtctgcagccatctggaccccctcagtttcccccataccggggaatgatgcccccatttatgtatcctccatatcttccattccccccaccatatggaccacagggcccatatagataccctacaccagacggcccttcccgcttccccagggtggcaggccctcgcggttctgggcctcctatgcgcctcgtcgagcccgtgggaaggccgtcaattctcaaagaagacaaccttaaagagttcgaccagctggaccaggagaacgatgacggatgggccggtgcacacgaggaagtcgactacacggagaagctcaagttcagtgatgaggaggatgggcgagactcagatgaggaaggtgccgaagggcatcgcgactcccaatccgcctctggcgaggagcggcctccagaagcagacggcaagaaaggtaattcacccaactctgaaccccctacacccaagacggcctgggcggagaccagtcgtccgcctgagaccgaacccggtcccccagccccaaagccgcctttgcctcctccacacaggggcccagcagggaattggggaccccctggcgactacccggatagaggcggtcctccatgcaagccccctgcccctgaagatgaagacgaggcttggagacaacggagaaaacaatccagtagcgaaatctcattagctgttgagcgagcaaggcgccgtcgagaggaagaggaacgcagaatgcaggaagaacggagagcagcatgcgctgagaaactcaagcggctggacgaaaaatttggcgctccagacaagaggcttaaggcagagcccgcagcgccaccagccgcaccctcaacaccagctccaccccctgctgtgcccaaggaactgcccgcacctcccgcacccccaccagccagcgcacctacacctgaaaaggaaccggaagaacctgcgcaggcaccccctgctcagtccacccccacaccgggagtcgccgcagcaccaaccctggtgtcaggcggaggcagcactagctccactagttccggaagcttcgaggcatctccggtggagccacagctcccctctaaggagggacctgaacctccagaggaagtgccacctccaacgactccaccggtgccgaaggttgaaccgaaaggggacggaatcggcccaactcgtcaaccaccaagccaggggctggggtatcctaaataccagaagagtttaccccctcgatttcaacgtcagcagcaggagcagttgctcaaacagcagcagcaacatcaatggcagcagcatcaacaggggtccgcccctcctacccctgtaccgccatcgcctccgcagccagtcactctcggggctgttcctgccccacaggcccctcctccacctccaaaggccttatatccaggagctctgggtagacctccgccaatgcctccgatgaactttgacccccgatggatgatgattccaccatatgttgacccacgcctgctgcagggtagaccaccacttgacttctacccacccggtgtgcaccccagtggcttagtgccaagagaaaggtccgattctggaggatcttcatcagaacccttcgacagacacgcacctgccatgctgcgcgagagaggcacccctcctgtcgatcccaaattggcctgggtcggagatgtttttaccgccactcccgcagagccccgaccactgacttcccctctgcgccaagctgctgacgaggatgacaagggtatgcgctcagagactccccctgttcctccacctcctccttacctggcaagttatccgggatttcctgaaaacggcgctccaggacccccaatctcccgcttccccctggaagaaccaggcccacgcccactcccatggccaccaggctctgatgaagtggctaagatccagacacccccaccaaagaaagagcctcccaaggaggagaccgcccagttaaccggccctgaggcgggaagaaaacccgcacgtggcgtcggctccggcggacaaggaccacctcctccacggagggaaagcaggactgaaaccaggtgggggcctagaccaggaagctcccgcaggggaattccacccgaggagcctggcgctccccctcggagggctggccctataaagaaaccccctcctccaaccaaggtggaagagcttcccccaaaacccctggaacagggtgatgagactccaaaacctccaaaaccagacccccttaagatcaccaaaggcaagttaggcggacccaaggaaacgcctcctaatggcaacctgtcacccgcacctcgcttaaggagggactattcgtacgagagggttggccctacctcgtgccgcggacggggtagaggagaatactttgccagggggcgaggattcagaggtacttacggaggcagagggagaggagcgagatcgagagagttccgaagctatagagagtttaggggtgatgatggcaggggtggaggtaccggagggccaaaccatccacccgctcctagagggcgtacagcttcggagaccagaagcgaaggcagcgaatatgaggagatcccgaagcgtcggcgtcagagggggagcgaaactggctcagaaacgcatgagtctgacctggcccctagcgataaggaagctcctacgccaaaggaaggcacgctgactcaggtgcccctggccccaccaccacctggtgctcctccctcccctgcccctgctcggtttactgcgaggggaggaagagtgtttactccacgaggtgttccctcccggaggggtaggggcggtggccgtcctccccctcaggtctgtccagggtggagcccacccgcaaaaagtttggcgcctaagaagccaccaaccgggcctctcccgccttctaaagagcccctgaaggagaagctaattcccggaccactcagcccggttgcccgaggcggatccaacggcggatccaatgtcgggatggaggacggagagcggccacggaggaggcgtcacggcagagcccagcagcaagacaagccaccacggtttaggcggctaaagcaagaacgggaaaacgcggctcgaggaagcgaagggaaaccatcacttactctaccagccagtgcaccaggaccggaagaggccctgaccactgtcactgtagcgcctgcacctcgtcgcgcagcagccaagtcccccgatctgagcaaccagaatagtgaccaagccaatgaagaatgggaaacggctagcgagtccagcgacttcacttctgagagacggggagataaagaagctccgccacctgtgttgttgacccctaaggccgtcggaactcccggaggcggaggcggtggagctgtgcccggtattagtgccatgtcccgcggagatcttagtcagcgcgctaaagacttaagtaaacggtcattttcaagccagcgccctgggatggagcggcagaacaggaggcccggaccaggaggtaaggcaggatcctctggctctagctcggggggtgggggaggaggcccaggcggtaggactggtccgggtagaggcgacaaacgctcctggccctcaccaaagaaccgcagcagacctcccgaagaaagaccaccaggattgcccctacccccacccccacctagttccagtgctgtgttccggctggaccaggtgattcacagcaatccggcagggatccagcaggctctggcccaactgagttctcgccagggcagtgtgactgcgccaggtgggcatccgagacataagccaggaccacctcaggcacctcagggaccttctccacgaccccctacacgttatgaacctcagcgcgtcaacagcggcctgtctagtgatccgcatttcgaagagcctgggcctatggtacgcggagttgggggaactccgagggatagcgcgggagtgtctcctttccccccaaaaagaagggagaggcctccgagaaaacctgagcttctgcaggaggagagcctgccccctccgcacagcagcggattccttggcagtaagccggagggacccggtcctcaggctgagtcacgggacaccggaacagaagctctaactccccacatttggaacagactccacactgccacatcccggaagtcgtatcgcccatcaagcatggagccttggatggaaccgctctctcccttcgaggacgttgccggtaccgagatgagtcagtccgattcgggagttgacttaagtggtgactcccaggttagcagcgggccttgctcgcagagaagctcaccagatggaggcctgaagggtgcagctgaaggacccccaaagaggcctgggggtagtagtcctctgaacgccgtgccctgtgagggaccacctggctccgagcctccccgacgtcctccccctgcaccccatgacggtgaccggaaagaattgccaagagagcagcctttacctccaggaccaataggtactgaacgaagtcaacatacagatcgcggtactgagcccggacccatccggccaagccaccggccaggacctcccgtgcagtttgggaccagtgataaggacagcgacctccggctcgtggtgggcgactcactaaaagcagaaaaggagttgacagctagtgtcaccgaagccattccggtctcacgtgattgggagctcttacccagcgctgccgcaagcgctgaaccccagagtaaaaatcttgactctgggcactgtgtaccagagccctccagctccgggcagcggctttacccagaagtgttttatggttctgccggaccctcaagctcccagatctctgggggagcaatggattcccagctgcatccaaattcaggagggtttcgcccagggactccaagcctccatccctacaggtcccaacccctgtacctaccacccggtcccgcaccacctagtgctttgttaagcggcgtggctcttaagggccagttcctggacttttcaacaatgcaagcgacagaacttggtaagttacccgctggcggagttctctacccccctccatcttttctctactcccccgcattctgtccgagtcctttaccagatacgagcctgctgcaagtgaggcaagacctcccaagcccatcagacttctattcaaccccccttcagccagggggtcaatctggctttttgcctagcggtgcccctgcacaacaaatgttgttacctatggtcgacagccagctgccagtcgtgaactttggctcgctgcctccggctcctcctcccgcaccgccttccctctctcttctgcctgtgggtccggcactgcagccacctagcttagcggtcaggccaccgccagctcctgctacaagagtgcttccttcaccagccagaccttttccagcatcccttgggagagctgagctccaccctgtggagcttaaaccctttcaggactatcagaagctttcttcgaatctcggaggccctggaagttcacgcactcctcccacagggaggagctttagcggtctcaactcaagacttaaggctactccttccacctatagcggcgtttttcgcacccagagggtggatttgtaccaacaggcctctcctcctgacgcgctgcgctggataccgaagccttgggaaagaaccggccctccccctcgtgaggggccatctagacgtgccgaggagccaggttctcgcggtgacaaagagcccggattaccaccaccacggta

SEQ ID NO: 236232 - DNA, 6473 bp, synthetic construct
  misc_feature 1..6473: note = Description of Artificial Sequence: Synthetic coding sequence
  source 1..6473: mol_type = other DNA
atgtctgatagatcggggccaacagccaaaggcaaggacggaaagaaatacagctccctaaatctgtttgatacatacaaggggaagtccctcgaaattcagaagcccgcagtggcaccacgccacgggctgcagtctctcggcaaagtagccatcgctcggagaatgcccccacctgcaaacctccccagcctcaaagccgagaataagggcaacgatcctaatgtgtcactagtgccaaaagatggcactggctgggcgtcaaagcaggaacaatccgatcctaaaagctcggacgcatcaacagcacagccccctgaatcacagcctttgcccgcatcacagacgccagcttccaatcaaccaaagcggcctccagccgctcctgagaatactccgctggttccgagcggagtgaaatcatgggctcaggcttccgtgacccacggggctcacggagatgggggtagggcatcatccttactgagccggttttcacgagaagagttccccacattacaggcagccggagaccaagacaaagctgctaaagagcgggagtccgccgagcagtcttcgggcccaggcccaagcctccggccacaaaactctacaacctggcgagacggcggaggtcggggtcccgacgaacttgaggggcctgactccaagctccaccacggacacgacccaaggggcggtctccagcccagcgggcctccacagtttcctccatacaggggaatgatgccaccattcatgtatcctccatacctccccttcccacctccttacggccctcagggaccatataggtacccaacccctgacgggccttcacgtttcccaagagttgccggaccccgtgggtccgggcctccgatgagactggttgagccagtgggcaggccctctatattgaaagaggataatctcaaagaatttgaccagttggaccaggagaacgatgatggctgggctggcgctcatgaggaggtcgattatactgaaaaattaaagtttagcgacgaagaagacggtcgcgattctgacgaagaaggggctgaaggccaccgagattcccagagtgccagcggagaagagaggccccctgaagccgatggaaagaaagggaactccccaaacagcgagcctcctacaccgaagaccgcctgggccgagacaagtaggccccctgagactgaaccagggccaccggcacccaagcccccattgccaccgcctcatagaggcccagccggaaactggggccctcccggagattatccggatcgcggaggccctccctgcaaaccacccgcacccgaagatgaggacgaggcctggcgtcagcgcagaaagcagagctctagcgagatctccctggccgtggagagggccaggaggagaagggaggaagaggaacgccgtatgcaggaggagcgtagagccgcttgcgccgaaaagttgaagagactagacgagaagtttggagctcctgataaaaggctaaaggctgaacccgcagcaccccctgcggcaccatctacgcctgcccctcccccagccgtccctaaagaattacctgctcccccagctcccccacccgcttccgctcctacgccagaaaaggagcctgaggagcccgctcaagcccctccagctcaaagtacaccaaccccaggggttgcggctgcccctaccctggtcagcggcggaggatccacatcatccactagctccggctctttcgaggcctcccccgtagagccacagttaccgagcaaggaaggacccgagcctccagaggaggttccccctccgaccacaccccctgtgccaaaagtcgaaccaaaaggcgatgggatagggccaacccggcaacctcctagccaggggttagggtaccctaagtatcagaaaagccttccaccaagatttcagcggcaacagcaagagcagctactgaagcaacagcaacaacatcagtggcagcagcatcagcagggatcggctccacctacaccagtcccgcctagccccccacagcctgtgaccctgggcgctgtgccagcccctcaggcccctccccctccacctaaagctctgtatcccggtgccctggggaggcccccaccgatgcccccaatgaacttcgaccctcgctggatgatgattcccccttatgtcgacccgagactgctgcaaggcaggccgcctttggacttttaccctccaggcgtccacccttctggcctcgttcccagggaacgctctgatagcggtggaagttcctctgagccattcgaccgtcacgcgcctgccatgctcagggaacgcggaactcctccggtcgatcccaaattagcctgggtaggcgacgtattcaccgctacaccagccgaaccaaggcctctgactagccctctcaggcaagctgctgacgaagacgacaaaggcatgcggtccgaaacacccccagtgccacctcccccaccgtacttagcttcttacccaggctttcctgagaacggcgctcccggacctccaattagtagatttcccctcgaggaaccgggtccacggcctcttccctggccgcctggctcagatgaggtggccaagatccagacaccgcctccgaaaaaggaaccacctaaggaggagacagctcagctcaccggtccagaggccggtaggaaacccgctagaggggtgggttcaggcggtcagggtcctcctcccccacgcagagaaagtcgtacggagaccagatggggcccaaggcccggatcgtcacgtaggggaatccccccagaagagcctggcgctcctcctcggagggcaggccctatcaaaaaaccacctccccctaccaaggtggaagaattaccccctaaacctctggagcaaggtgacgaaaccccgaaacctcccaaacccgacccgctgaaaattacaaagggaaaactgggaggacctaaagagacccctccaaacggcaatctgtctcctgcccctcgtttacgacgggactattcatacgagcgcgtaggaccaacatcttgtaggggcagaggtcgaggtgagtacttcgcccgaggcaggggcttcaggggaacgtatggagggaggggaaggggcgcacgatctagagaattccgctcctatagagagtttcggggtgatgatggcaggggcggaggcactggtggacctaaccacccacccgctccacggggtcgaaccgcttccgagactcgcagcgaagggtcagaatacgaagaaatccccaagaggcgcagacagcgaggcagcgagactgggagcgagactcatgagtcggatcttgcaccttcagataaggaagcgcctacacctaaagaagggacactgacacaggtccccctggctccaccccctcccggagcgcctcctagccctgcccctgcccgttttaccgccaggggaggaagggtgttcacaccacggggtgtgcctagtcggaggggcagaggaggcggaagaccccctccacaggtctgccctgggtggtcacctcccgctaagagtctcgcacccaaaaaaccgcctacaggccctctgcctccatcaaaggagcccttaaaggagaagctaatccctggaccactctcccccgtggctagggggggaagcaacgggggttctaacgtagggatggaggacggagagagaccccgacgcagacggcacgggcgtgcccagcaacaagacaaaccacccaggtttcgtcggctcaagcaggaacgagagaatgcagctcgtggatctgagggcaagccatctctgaccctaccagcttctgcgcctggcccagaagaggccttaactacagtaacagtggcacctgcccctagaagggcagccgcaaaaagccctgatctttcgaaccagaactctgatcaggccaacgaggagtgggagacagcttcagagtcttcggattttacttcagaacgtcggggtgacaaagaggctccccctcccgtcttattaacgcctaaagcagttggaactccgggtggaggcggaggaggagctgtgcccggaatcagtgcgatgtcaagaggggacctgagccagagagctaaggacctgtctaaaaggagcttctcctcccaacgacctggcatggaacggcagaaccgaaggcccggtcccggtggcaaagcagggtcctccggatcctccagcggcggtgggggtggcggaccgggaggtcggacaggccctggtcgaggtgacaagcgtagctggcccagcccaaaaaataggagtcgtccacctgaagaaaggcctcccggtctgccactgccccctcctcccccatcatccagtgctgtttttcgcctggaccaagttatacattctaatcctgctggcatccagcaagccctggcccagttgtcttcccgacagggatccgttaccgctcccggaggacacccacgacacaagcctggacctccacaggctcctcaaggcccttctcctcggccacctactcggtatgaacctcagagagtgaactccggtttaagttcggaccctcactttgaggagcctggcccaatggtgagaggggtgggagggacccccagagactccgcaggcgttagcccctttccacccaagcggagagaaagaccacctcggaagcctgaactgttgcaagaggagagtctgccccctcctcatagtagcgggttcctgggctcaaaacctgagggcccaggcccacaggccgaaagccgtgataccggaacagaagctctgactccccacatctggaatcggctgcatacagccaccagcaggaaatcatatcgtccatcatcaatggaaccgtggatggagcccctctctccgtttgaagatgtggccggaaccgagatgtcccaatctgattcgggggtggatctgtcgggcgacagtcaggtatcctcgggaccctgctctcagaggtcttcgcctgacggaggactgaaaggggcagctgagggcccacctaagcggcctggtggttcctctcctttaaacgctgtcccttgtgagggcccacctggctctgaaccacctaggcgacctcctcccgctccacacgacggagaccgcaaggaactgcctagggaacagcccctgcctccgggacccattggcactgaacggtcccagcataccgatcgcggaacagagcctgggcctatccggccaagccaccgcccaggccctcccgtgcaatttggaacctcagataaggactctgacctgcggttggttgtcggagacagccttaaggccgagaaagaactgaccgcgagcgtcacagaggcaatcccggtgtccagggactgggagctgctaccctctgctgcagcatcggcggagcctcagtccaagaatctcgactccgggcattgtgtacccgagcctagcagctctggccaaaggctctatccggaagtcttttatggatccgccggaccgtcttccagccagatttccggaggggcaatggattctcagttgcaccctaactccgggggatttcgaccgggaactccttccctgcacccatacaggagccaaccgctgtatttaccccctggacctgcacctccaagcgccctgctatctggagtggccttaaaaggccaatttctggattttagcacaatgcaggccaccgaattgggcaagctcccagcgggaggggtgctgtatcctcccccatcctttctgtactctccagcgttctgcccatcccctctgcctgacacctctttgctacaggtgaggcaggatctccccagcccaagcgacttctactccaccccccttcagccaggcggacagtctggatttctgccaagtggggctcctgcccagcaaatgctgctaccaatggtcgattcacagctgcctgtggtgaactttggttccctgcctcccgctcctcctcctgcacctcccagtctctctctgctcccagttgggcctgccctccagccaccctctttagccgtccgtccgcctcctgctcccgctacaagggtcttgcccagcccagctagacccttccccgctagcttgggaagagccgagctgcacccagttgaactgaagccatttcaggattaccagaaactgtcctctaatctgggcggacctggaagcagcaggacccccccaacagggagatcttttagcgggctgaatagccgcctcaaggccacaccgtccacctactcaggagtctttcgcactcagcgagtcgacctttaccagcaggcttctccgcctgatgccttacgatggattcctaaaccgtgggagcgcacaggccctcctcctcgggaagggcctagcagacgagccgaggaacctggcagcagaggtgacaaggagcccggtcttcctccaccacgata

SEQ ID NO: 236233 - DNA, 6473 bp, synthetic construct
  misc_feature 1..6473: note = Description of Artificial Sequence: Synthetic coding sequence
  source 1..6473: mol_type = other DNA
atgagcgaccggagcgggcctacagcaaagggaaaggatggaaagaagtatagctccctcaaccttttcgacacatataaggggaaatccttagaaatacaaaaaccggcagtggcaccaaggcatggcctccagagcctcgggaaggtcgcgatcgccagacggatgccaccccctgcaaatctgccaagtttaaaggccgagaacaaagggaacgatcccaatgtctctctcgttcccaaggacggtacaggctgggctagtaagcaagagcagtccgacccaaagagtagtgatgcttctaccgcgcagcctccagagtcccagccactgcccgcttcgcagacccctgcaagcaaccagcccaagcgaccgcctgctgccccagaaaataccccacttgtgccgagcggggtgaaatcctgggcacaggcaagcgtaacacacggtgctcatggtgacgggggtagggcctcaagtctgctttcgcggttttctagggaggaatttcccaccttgcaggccgcaggagaccaggacaaggccgctaaggaaagggagtcggctgaacagagctcaggacctggtccttctctgcggccacagaattccacgacatggagggacgggggaggcagaggccctgacgagctcgaggggcctgattcaaaactgcaccacggacacgaccctagggggggtctccagccttctggccctcctcagtttcccccatatagggggatgatgcccccttttatgtacccgccttatctcccctttcctcccccatacgggccacagggaccataccgctacccaacacccgacggcccaagccgcttccccagggtggctggacccagagggagtggaccacctatgcgcttggtggagcccgttggccgaccaagcatcctcaaggaagacaatttgaaagagtttgatcagctggatcaagagaacgatgacggctgggctggtgcccacgaggaagtggattacaccgagaagcttaagttcagcgacgaagaggacggcagagactcagatgaggaaggagccgaaggacacagagactcccagagtgcaagcggggaggaaagacctcctgaagccgacggtaaaaagggaaactctccaaatagcgagcccccaaccccaaagacagcttgggctgagacctctaggcctccagagacagaacctggccctccagcccctaaacctccccttccgccaccacaccggggacctgccggaaactgggggcctcccggagactacccagacagaggaggccctccctgcaagcccccagccccagaggacgaagatgaagcctggagacaacgtcgcaagcaaagttcatccgaaattagtttggcagtagagagggccaggcggcgtagggaagaagaggaaagaagaatgcaggaggaaagacgggcagcttgtgctgagaaactcaaaagactcgatgagaaattcggcgctccggataaacgtctgaaagccgaaccggctgcaccgccagcggctccgtctacgcctgcccctccaccagccgtcccaaaggagcttcctgcccctccagcaccaccacccgcaagtgccccaacgcctgagaaggaacctgaggagcctgcccaagcccctcccgcacagagcacacccactccaggggtcgccgctgcacccactttggttagtgggggaggctccacgagctctacatcatccggctcgttcgaggcttcacccgtggagccccagctgccaagcaaggaggggcctgagccccctgaggaggtgccaccaccgactacacccccagtaccaaaagttgagcccaagggagatggcatcggccctacacgccaacccccatctcaaggtctcggctaccctaagtaccagaagtcgctgccgcctcggttccaacgtcaacagcaggagcagctcctcaagcagcagcagcagcaccagtggcagcaacaccagcaggggagcgcccctcctacaccagtgcctccaagcccaccccaaccagtgacccttggagctgtgccagcgccacaggcacctccgccacctcctaaggcactgtaccccggtgctcttgggagaccccctcccatgcctcctatgaacttcgacccccgttggatgatgatacctccttatgtcgatcctaggcttctccagggcaggccgcctctggatttctatcccccaggggtgcacccttccggactggtaccaagggaacgatccgactctggtggcagtagctctgagccttttgatcggcatgccccagccatgctgcgggaaagaggaacccctccagtggaccccaagcttgcttgggttggcgacgtgtttaccgccacaccagcagaaccgcgacccctgaccagcccactaaggcaagccgcagatgaggacgacaagggcatgagaagcgaaactcccccagtccccccaccccctccttatctggcatcataccccggatttcccgaaaatggggctcccggtcctccaatcagccggtttcctttggaggagcccggtccccgtccgctcccttggcctccaggctccgatgaggtcgcgaaaatccagacaccaccacctaagaaggaaccccctaaggaggagacagcacaattaactggtccagaggcgggacgcaagcccgcaaggggagtaggctccggtggacaaggtccaccccctccgagacgcgagtccagaacggaaacacgctgggggcctcggccaggatcaagcaggcggggaatccctccagaagagcctggcgctccgccaagacgggcaggacctatcaagaaacctcctccacccacaaaggtggaggagctgcccccaaagcctcttgagcagggcgatgagacccctaaacctcccaaaccggacccgctcaagattactaagggtaaactcgggggtccaaaggagaccccacccaacggcaacctctcccccgcacccaggctgaggcgtgactactcatacgagcgagtgggccctaccagctgcagaggcaggggtagaggggagtatttcgccagaggacgcggttttaggggcacatacggcggaagaggtcgtggggctcggtcaagggagttcaggagttaccgagaattccggggagatgacggcaggggcggagggaccgggggacccaatcatccccctgccccacgcggtaggaccgcctccgaaactcgctctgaaggaagcgagtatgaggaaatcccaaagaggagacgccaaagagggagtgagactggctctgaaacacacgagtctgacctggcgccatcagacaaggaggcccctacgccgaaggaggggacactgacccaggtgccattggccccacccccaccgggtgccccaccaagtcctgctcccgctcggttcacggcaaggggtggccgtgtctttactcccaggggcgtgccgagccggcgagggaggggaggaggtcggcctccccctcaggtttgcccaggctggtcccctccagccaaaagtctagcccctaagaaacccccaacaggcccactacccccaagcaaagagccgctaaaggagaaactaattccgggacctctctccccagtggcccgtggaggaagcaatgggggatccaacgtgggcatggaggacggagagcgcccacggcgaaggcgacacggccgagctcagcagcaagacaaaccccctcggtttcgcaggcttaaacaagagcgcgaaaacgccgcaaggggttcagagggtaagccatccttaaccctccctgcaagcgctcccggacctgaagaagcgctcactacggtaacagtcgccccagccccaagacgtgccgcagccaagagcccggatctcagcaaccagaacagtgatcaggctaacgaagagtgggagacagcgtccgagtccagcgatttcacatcagagaggcggggagataaagaggccccaccacctgttctgttaacacccaaggctgtcggaacacctggaggtggcggtggaggtgccgtccccggaatctcagctatgtcgcggggagatttatcccagcgggcaaaagacttatccaaaagaagtttcagttctcagcggccaggcatggaacgccagaaccggagaccaggcccagggggaaaggctggttcttcaggatcgagttccggaggcggaggcggtggtcctggcggacgaaccggtcctgggaggggagacaagcgaagctggccctcccctaagaacaggtctcgtccccctgaggagcgcccacccggactaccacttccccctccgcctcccagttctagtgcggtgtttcgcttggatcaggtgattcactctaacccggctggaatccagcaggccctggcccagctttcatccagacagggtagtgtcacagcccctggagggcatcccaggcataagcctgggcctccacaggctccacagggtccttctccacgcccacctactagatacgagccacagcgtgtcaacagcggtttgagcagcgacccccactttgaggaaccagggccaatggtccgcggagtcggtgggaccccgagggatagcgcgggtgtgtctccatttccacccaagagacgtgaacgaccacctaggaagccagaattacttcaagaggagagcctaccccctccacattcttccggttttctcggctccaagcccgaggggcctgggccacaggccgagagtagagacacaggaaccgaggctcttacgccccatatctggaataggctgcacacagccacgtcaagaaaatcctaccgaccttcaagtatggagccctggatggagcccctaagcccattcgaagacgttgccggtacagagatgtcccagtccgatagcggggtagacttgtctggcgacagtcaggtatcgagcggaccttgtagccagaggtctagtccagacggcggactgaaaggagccgctgagggacctcccaagcgccctggcggttcatctcccttgaatgccgtcccctgcgagggtcctcctgggagcgagccacctcgaagacctccacccgctccccacgacggcgatcggaaagagctacccagagagcaacccctcccacctgggccaattggcactgagcgatctcagcgcacggatcggggaaccgagcccggaccgattagaccctcccaccggccaggccctccggtgcaatttggaacatccgacaaggattcggatctcaggttggtagttggcgacagcctgaaggcagaaaaggagttaaccgcctccgttactgaggcaatcccagtgtcaagagactgggagttgctgccctcagctgccgctagcgccgagcctcagagcaaaaatctcgacagtgggcattgcgtgccagagcccagttcctccggccaacgtctttatccagaggtgttctacggttctgctggacccagtagctcccagattagtggaggcgctatggactcacagttgcaccccaactcgggagggttcagacccggaaccccatctctccacccatataggtcacagcccctgtacctccctccgggaccagcaccaccatctgcattgctcagcggggtcgcattgaagggacagttcctagacttctccactatgcaagcaacagagctgggtaagctgcccgcaggaggcgttctctacccaccccctagctttctgtattctcctgccttctgcccctcacccctgccagacaccagcctcttgcaggtacggcaggaccttccctcgccaagcgatttttacagcaccccgttgcaacctggtggacagagcggattcctgcctagtggagctcctgcacagcagatgcttctgcccatggttgactcccaactaccagtggttaatttcggttctctgcccccagctccccctcccgctcctccaccgctaagccttctccccgttggcccagccctccagcctccatccctcgccgtgcgccctccaccagctccagcaacccgtgtattaccctctcccgcacgcccattccccgcaagcctcgggcgagcagagctgcatcctgtcgagttgaaacctttccaagactaccagaagctcagtagtaatctgggcggacctgggagcagccgtacgcctcccactggaaggagcttcagtgggcttaatagtcgcctgaaagctacaccctctacttacagcggggtcttcagaacccagagggtcgatctgtatcagcaagcttccccccctgatgccctccgctggatccctaagccctgggagaggactgggccaccgcctcgagaagggcctagcaggagagctgaggagcctggctccagaggagataaagaacccggtctgccccctcctcgcta

SEQ ID NO: 236234 - DNA, 6416 bp, synthetic construct
  misc_feature 1..6416: note = Description of Artificial Sequence: Synthetic coding sequence
  source 1..6416: mol_type = other DNA
atgtcagatcggtccggccctaccgcaaagggaaaggatggaaaaaaatatagctccttaaatctattcgatacctacaaaggtaaatccctggagattcagaagccggcagttgccccaaggcacggattacagtccttgggaaaagtggctatcgcaaggcggatgccacccccagccaatttgccatcgctgaaagctgagaataaggggaatgatcccaatgtctctttagtgcccaaagacggtactggttgggcatcaaagcaggagcaatctgatccaaagtcttccgacgcaagcactgcccaacccccagagtcacagccccttcccgcttcccagacacccgcatccaaccagcccaagaggccgcctgccgctccagaaaataccccccttgtgccttccggggtgaagtcatgggcccaggcttccgtgacacatggcgcacatggtgatggcggtcgggcttcatctctcctgagccgatttagccgggaggagttcccaacacttcaggcggcaggtgatcaagataaagctgcgaaggagagagagagtgcagaacaaagctctggacccggtccctctctaagaccacaaaatagcactacttggagggacggcggtggacgcggacctgatgagctcgagggcccagactctaagttgcaccatggccacgatcccagggggggactacagccctccggacccccacagttcccaccctacaggggaatgatgccaccgtttatgtatccaccctacctcccctttcctcctccttatggccctcaaggcccatatcggtaccccacacctgacggtcccagccggtttccaagggtggctggccctagagggagcgggcctccgatgaggctggtggaaccagtaggccgtccatcaattctgaaagaagacaatctgaaggagtttgaccagcttgatcaggagaacgacgatgggtgggcaggcgcacatgaagaggtcgattacacagagaaactgaaatttagcgacgaggaagacgggagggattccgacgaggaaggggcagagggtcatcgagactcccagtcggcttccggtgaagagcggcctcccgaagccgatggcaagaagggcaattccccaaattctgagccgccaacccctaagacagcctgggccgagacctcgcgcccacctgaaactgagcccggtccacccgctccaaagcccccactgccccctcccggagactatcctgataggggagggccaccatgtaaaccacccgcacctgaggacgaggatgaagcctggcgccaaaggaggaagcagagttcctccgagattagtctggccgtcgagagggcccgtcgtcggagggaggaggaggagcgaagaatgcaggaggaaagaagggccgcatgtgcggagaagttgaagcggctggatgagaaattcggcgctcccgacaaaagactaaaggccgaaccagcagcgcctcccgcagctcccagtacgccggctccgccacccgctgtgcctaaagagctgccagcccctcccgcacctcccccagcgtctgcccctacgcctgaaaccgaacccgaggaacctgcacaagcacctccagcacagagcacccctactcccggtgttgctgccgcacctacactagtgtcaggaggagggagtactagtagcacctccagtggctcattcgaagcatcccccgtcgagcctcagctgcctagcaaggaaggacctgagccaccagaagaagtgcccccacccaccaccccgcctgttccaaaggtggagcctaaaggcgacggaatagggcctaccaggcagccaccatctcagggcctgggatacccgaagtaccagaagagcctcccgccacgctttcaaaggcagcagcaggaacagctcctgaagcaacagcaacagcatcagtggcagcagcaccaacaaggcagcgcccctccaacccccgtcccaccgtcacctccacagccagttaccttgggggcagttcccgctcctcaggcacctccacctcctcctaaggccctctacccgggagcccttggacgccctccccctatgcccccaatgaattttgatcctaggtggatgatgatcccaccctatgttgacccgcgactcttgcagggacgccctcctcttgacttctatcctccaggcgtccaccctagcggcctggtgccccgagagaggagtgatagcggcggaagctcatcggaacctttcgacaggcatgcccctgccatgttacgagagcggggtacaccaccagtcgatccaaaactggcatgggttggcgacgtcttcaccgctacacccgcagagccaagaccactaaccagtcctttgaggcaggcagccgacgaggatgataaagggatgagatcggagacacctcctgtgcctcctcctccaccttatctggcctcttatccagggttccctgaaaatggggctccaggacctcctatcagccgcttccccctggaggagccagggcctcgtccactcccatggccacctggaagcgacgaggtagccaagatccaaacaccacctcctaagaaagaacccccaaaggaggaaacagcccagttgacagggcctgaggcaggaagaaagcctgccagaggagtaggtagcggtggacagggcccacctccaccaaggcgcgaatcgagaactgagaccagatgggggccaagacccggttccagtagacggggtatccctccagaagagcccggagcaccacctcgtagagccggtcccataaaaaagccacctccacctaccaaagtggaggagctgccacctaaaccgttggagcagggagatgagactcccaaacctccgaaacctgacccactgaaaatcaccaagggaaagttaggaggacccaaagagacgcccccaaatggcaacctgtctcccgcaccccgtctccgtagagattactcttacgaacgcgtgggcccaacttcctgtcgcggacggggacggggagagtacttcgccagggggagggggtttcgcggtacctatggcggtaggggacgaggagctgcaggtaactcagccgtaaccgagtctttcgaagagatgatgggcgtggaagtcgggcagggagaccagacgactctcctactgcctgaggctgcccttcctgccaggcacggggctcgggtgcaatcgatgcggaaaagtccgtccggcgcaggcagtggcgctcagaaacaggccgcacggcctatgagagtgatatggctgcttcagacgagacggctcccacacccgagaagagagcacagcccgagatctaggtcccctacgacaagatctccaacgtttccggcaccggcacgattcacccctggggtgggggaatctagccttcctgagggaatatctccaggtccacggcgtcgggaaccacctcaggtttgtccaggatggtcgccgcctgccaagtcactggcccctaagaagcctcccactggacccctgcccccttcgaaggaaccgttgaaggaaaaactcatcccgggaccgctgtctcccgtcgcccgagggggtagcaacggtgggtcaaacgtggggatggaggacggggaaagaccccgtagacggagacatggcagggctcagcaacaggacaagccacccagattccgtcggcttaagcaggagcgagaaaacgctgcgagaggtagtgaagggaaaccctccctgacactccccgcttccgccccaggacccgaagaggctttgaccacagtgacagtggcgccagcacctcgtagggctgcggctaaatctccagacctaagtaaccagaatagcgaccaagcgaatgaggagtgggagacagccagtgagagttctgattttaccagcgagcgccgtggggataaggaggctccaccaccagtcttactcacacctaaggcggttggaacgccaggaggcggaggcggaggcgcagtgccagggattagcgcaatgtctcgcggagacctgagccagagggcgaaagacctcagcaaaaggagcttttccagtcaacgccctgggatggaacgtcagaaccgcagacctggacctgggggtaaagccggttcatcaggttcaagtagtggaggcggaggtgggggacccggaggcaggacggggccagggcgtggagataagcggtcttggccttccccaaaaaacaggagcagaccccctgaggagaggcctcccggactccccctgcccccaccacctccaagcagtagtgcagtgtttcgacttgaccaggtcattcacagtaatccagcgggtattcagcaagcattggcccagttgagctccaggcagggcagcgtgaccgcccctgggggacaccccagacacaagcccggacttcctcaagctcctcagggcccatctcccaggcctcccacgaggtatgaaccccaacgggtgaatagcggtctttcatctgatccccacttcgaggagcccggaccgatggtgagaggtgtcggcggaacgcctcgagactccgccggagtctcaccctttcctcctaagcgacgggagaggccgcctcgtaagcctgaattgctgcaggaagagtcactgcctccaccccattcctccggcttcctgggctcgaaacctgaggggcctggcccacaggcggaaagccgcgatactggaacggaggccttgactccacatatttggaaccgactccatacagctacttcgcgtaagagctatcggccatcatccatggagccctggatggagcctctctccccgttcgaggacgtggccggaactgagatgtctcaatcagattctggggtggatttatcgggtgactctcaagtgtccagcggtccgtgctctcaacgatcatcccctgatggcggattgaagggtgctgcagaaggacctcctaaaaggccaggtgggtccagtcccttgaacgccgttccttgtgaaggcccacctggcagcgaaccccctcgcagacctcctcccgcaccacatgacggcgatagaaaagagcttcctagagagcagcctctgcccccagggccaataggtactgaaaggagccagagaacagaccggggaaccgaacccggtcccatcaggcccagccaccggcctggcccaccagtccaattcggaacatccgacaaggatagtgatcttaggttagtggtgggggattctttgaaggccgagaaggagctcaccgcaagcgttacagaggcaatccccgtcagccgggattgggagttgcttccctcagccgcagcctccgccgagccacaatcaaagaacctggactccggacactgtgtgccagaacccagcagctccggacagagattataccctgaagtattttacggaagcgctggaccgagtagttctcagatttcaggcggacatggcctgagcatcacttccaagcagtggcggaggccgggaactccgtcattgcacccatacagaagccagccactatacttaccgcctggccctgcacctcccagcgctctgttatccgggctggcactgaaggggcagttcctcgacttctcaacgatgcaggccaccgagctgggaaagctacccgctggaggcgtcctctacccaccgccatctttcctttacagccctgccttttgcccctcacctctgcccgacacatctctgctccaggttcgtcaagatctcccatccccttccgacttctattctactccactgcagcctggcggacagtcaggctttctgccctcgggagctccagcccagcagatgcttctccctatggtcgactcccaactgcctgtggttaactttggcagtctccctcctgcccctccccctgcccctcccccactgagtctgcttccagttggaccagctctccagccaccaagcctggcagtccggccaccccctgccccagccacgcgggttcttccctctccagccaggccattccctgcctctctgggacgggcagaattacaccccgttgagctaaaacctttccaggactaccagaagttgtcgagcaaccttggaggtcccggatctagtcggactcccccaactggaagatctttcagtggacttaatagcagactgaaggccactccctccacctactcgggagtgtttaggactcagcgggtcgacttgtaccagcaggcgtctcccccagacgcgcttagatggattcccaagccctgggagaggacaggcccaccaccgcgtgaaggacctagtcgtagggctgaggagcctggatcccgaggggataaagagcccggactgcctccccctcgtta

SEQ ID NO: 236235 - DNA, 6473 bp, synthetic construct
  misc_feature 1..6473: note = Description of Artificial Sequence: Synthetic coding sequence
  source 1..6473: mol_type = other DNA
atgtctgaccgaagtggcccaacagccaagggcaaggacggcaaaaaatactcctcattgaatctattcgacacttacaaaggaaagagcctcgaaattcaaaaacctgcagtggcccctcggcacggactccagagcctaggcaaggttgccatcgctcggagaatgcctccaccggctaatttgccttccctgaaagcagagaacaaggggaatgacccaaacgttagtctggtgcccaaagacggaaccggatgggcgagcaagcaggagcagtcagacccaaagagctctgatgcctctacggcacagccccctgagtctcagccgctgccagcctctcaaacacctgcctccaatcagccgaagcgaccaccagctgctccagaaaacacacccctcgttccatcaggggtgaaaagttgggctcaggcctccgtcacacatggggcacatggcgacggaggtagggcaagctccctgctctctagatttagtagggaggaatttccaactctacaagctgctggcgatcaggataaagccgcaaaggaaagggagtcagccgagcagagctctggtcccggtccttcccttcgcccacaaaactctaccacctggcgagacgggggtgggcgtgggccagacgagctggaggggccagattctaaactgcatcatggtcatgaccccagaggcggacttcagccttccggcccaccccaatttccaccttaccggggtatgatgccacccttcatgtatccaccttacttgcctttcccacccccttatggtccacaaggcccttaccggtaccctaccccagacggaccctctcggttcccacgggtagctggccctcgcggaagcggtccacccatgaggctggtggaaccggtcggacgcccatcgatcctcaaagaggacaacctgaaggagttcgaccagctggaccaggagaacgacgacgggtgggcaggggcacacgaggaagtagattacacagagaaactgaagttctcggatgaggaggacggccgagattcagatgaagaaggagccgagggacacagagattctcaatccgcgtcgggcgaggaacggccacctgaggcagatggaaaaaaaggcaattctccaaactctgagcccccaactcctaagacagcctgggccgagaccagcagaccaccagagactgaacccggtccccctgcacccaagccccctctgcccccaccccatagggggccagctggcaactggggaccccctggcgattacccagacaggggtgggcctccctgtaagccccctgcacctgaagacgaagatgaggcctggcgccagagacgcaaacagagttcaagcgagataagcttggccgtcgaaagggctcgcaggcgaagagaggaggaagagcgcaggatgcaggaagaacgcagggcagcctgtgctgagaagctcaaacgcctcgatgaaaagttcggggctccagacaaaagactcaaggccgagcccgctgccccaccggcagcaccttctacgccagctccccctcctgccgtgccaaaagagctccccgcacctccagctccccctccagcttccgcacccaccccagaaaaagaacctgaggaacctgcccaggcccctccagctcagtccaccccaacacccggtgtggcagctgcaccaactctggtttctggcggaggatccactagtagcacatcatcgggaagtttcgaggcaagccccgtggagccgcagttaccctcaaaggaaggcccagaacccccagaagaggtccctccccctactaccccccctgttcccaaggtggaacctaagggggacggaattggtccaaccagacagcctccgtctcaagggctgggctatccaaagtatcagaagtcactcccccctcgattccaaagacagcagcaggagcagctgctgaaacaacagcaacaacatcaatggcaacaacaccaacagggatctgcacccccaacccccgtacccccatctccgcctcagccggtgacccttggagctgtgcctgccccacaggcccctccaccgcctcccaaggcattgtacccaggagcgctggggagacccccacctatgcccccaatgaacttcgacccgaggtggatgatgattcccccttacgtggacccccgtctcctgcagggccgtccccctttagatttctaccctcctggcgttcacccttccggtctggtaccccgtgaacgctccgactcgggcggatcgagctctgagcctttcgaccgccacgccccagccatgcttcgggagagagggacaccccctgtggacccgaagctggcgtgggtcggggatgtcttcaccgccacacctgccgagcctcggcctttgactagtcccctgaggcaagcagccgatgaagatgataagggaatgcgttcggagacaccacccgtgcctccccctcctccatatctagcatcataccccggattcccagagaatggggcacccggaccccctatttcaagatttccgctggaggagccaggtccacgaccattaccctggccaccaggatccgacgaggtggccaagattcagactccaccacccaaaaaagaacctcccaaagaagaaacagcgcaattaacgggccctgaagcgggaagaaaacccgcaaggggcgtagggagtggcggtcaggggccaccaccacccaggcgcgagtctagaactgagactagatggggccctcggccaggctcatcgcgcagagggattccccctgaagaaccgggagctccccctaggcgcgcaggaccaataaagaagcctcctccgccaacgaaagtcgaggaattgccacctaagccactggagcagggtgacgagaccccaaaacctcccaaaccagatcccctcaagatcaccaaggggaagctgggcggaccgaaggaaacgcctcctaatggaaacttatctccggcaccaaggctgcgtagggactacagctatgagcgcgtaggtcccacgagctgccgtgggagagggagaggtgagtacttcgccaggggtcggggatttcggggtacttacgggggacgcggtcggggagccaggagccgggaattcaggtcctatcgggaattcaggggagacgatggccgagggggaggaactggtggtcccaaccacccacccgctcctagagggcgtaccgcatctgaaaccagatcggaggggtccgagtatgaagagattccaaaacgccgtaggcagaggggctctgagacaggctccgagacccacgagagtgatctggcgccttccgataaggaagctcctacacccaaagagggtactctgacgcaggttcctctcgcccctccccctccaggcgctcctcccagtccggctcccgctcgttttacagctcgcggaggtagggttttcacccctaggggcgtaccgagtcggcgtgggcgtggagggggaagacccccaccgcaagtgtgccccggttggtcaccacctgccaagtcccttgcacccaaaaagcctcccaccggtccactaccaccttccaaggagccattgaaagaaaagcttattcctggacccctgagcccagtcgccaggggagggtcaaacggcggatccaatgtgggcatggaagatggcgaaagacctaggcgcagacggcacggtcgcgcacagcagcaagataaaccccctagattcagaagattaaaacaggaacgtgaaaacgctgcccgtggaagcgaagggaagccttctcttacgttgcctgcttcagctcctggccctgaagaagcgctaaccaccgtaaccgtggccccagcccctcggagagccgcagctaaaagtcccgatttgtcaaaccagaactccgaccaggcaaacgaggagtgggagactgcatccgagagttcagacttcacctccgagcggaggggcgacaaagaggccccaccgcctgtattgcttactcctaaggcagtcggaacgcctggtgggggaggaggaggtgcggtgcccggtatatctgccatgtctaggggtgacctatcccagcgggctaaagatctctccaaaaggtcctttagctcacaacggccagggatggagagacagaatagaaggcccggaccgggtggtaaggcgggtagttcgggaagctcatctggagggggaggcggaggacccggaggtaggacgggacccggacgaggagacaaaaggagctggccatccccaaagaatcgatctagacctcccgaagagagacctcctgggctgcccctgcctccaccgcctccaagcagcagcgccgtgtttcgcctggaccaggtgatccactctaatccggctggcatacagcaggctctagctcaactgtcatctagacaaggctccgtcaccgcgcctggaggccatccgaggcataaaccaggccctccacaggcacctcaggggccatctcctcgtccacctacacggtacgagccacagagggttaatagtggcctgtcctccgatcctcacttcgaggagccaggaccgatggtgagaggagttggcggtaccccgagagactccgccggagtttcaccttttcccccaaaacgacgcgaacgtcctccacgcaagcccgaactgctgcaggaggagagtctcccacctccccactcgagcggtttcttagggagcaagccggaaggtcctggaccccaggctgagtctagagacaccgggacagaggcactgacgccccacatttggaaccgcctccacaccgctacctcccggaaatcctacagaccctcaagcatggagccatggatggagccactaagtcccttcgaggacgtagcgggtacagagatgagccagagtgacagcggcgtcgatctctccggggatagccaagtgtcttctggcccatgtagtcagcgctcctctcccgacggcggactgaagggcgctgctgagggcccacctaagcggccaggcggatccagcccactaaatgcagttccatgtgagggcccacctgggagcgagcccccacgcagacctccaccagctccacatgacggggataggaaagaactgcctcgagaacagccacttcccccagggcctattgggacagaacgctcacagcatacggacagggggacagaacccggtcccatcagaccttcacatcggccaggccctccagtacaatttggaacatcagataaagactcagatctgcgactagttgtaggagacagcctaaaagccgagaaggagctgactgcaagtgtaacagaggctatccctgtttctcgcgattgggaactgctgccgagcgccgcagcctcggctgaacctcagagcaagaatttagattcggggcattgtgtccccgagccctccagctccgggcagcggctgtaccctgaggtgttttatggctctgccggaccttcatcatctcagattagcgggggagccatggattcgcagctccacccgaactccgggggatttaggcctggtactccatctcttcatccttaccgaagccagccactttatttgccaccagggcctgcgcctccaagtgccctcctgagtggggtggctctgaagggacagtttctcgatttctctaccatgcaggctacagaactgggaaagctgcctgctgggggtgtcctgtacccacccccttcatttttatacagcccggctttttgtccatcaccactgcctgacacgagcctgctccaggtgcgtcaggacctgccatctccgagtgatttttactccacccccctgcagccaggaggacagtcgggttttttacccagtggagcccctgcacagcagatgctgctgccgatggtagacagtcagctgcctgtggtgaatttcggaagcctgcctcctgccccaccccctgcccctcccagcctgtcattgcttccggtggggcctgcgcttcagcccccttcacttgcggttcgtcctcccccagccccagcaacaagggtactgccaagtcccgctcgacctttccctgcctcactgggaagagctgagcttcatccggtggaactgaaacctttccaggattatcaaaaactctcatctaacctgggcggaccaggcagctcccgcacacctcctaccggcaggagcttcagcggcttaaattcacgactgaaggctacccctagcacctatagcggcgtcttcaggacacaacgggtggacctgtaccagcaagccagcccccctgatgccctccgctggataccgaaaccatgggaacgcactggtccaccccctagagagggaccatcccggagggccgaggagcccggtagccgcggagacaaggaaccagggctgcctccacctcgata

SEQ ID NO: 236236 - DNA, 6473 bp, synthetic construct
  misc_feature 1..6473: note = Description of Artificial Sequence: Synthetic coding sequence
  source 1..6473: mol_type = other DNA
atgagcgatcggagtggcccaacagccaaggggaaagacggtaagaaatactcatctctgaacttattcgatacctataagggaaagagcttggaaatccagaagcctgcagtggcaccacggcacggcttgcagtctctggggaaagtggccatcgctagaagaatgccaccgccagctaacctaccttcactgaaggccgaaaacaagggcaatgatcccaacgtttcccttgttcccaaggacgggacaggatgggccagcaagcaagaacaaagcgatccaaagtctagcgacgcttccaccgcccagcccttggagtctcagcccctgcccgctagccagaccccggcatctaaccagcctaaaagacccccagctgccccagagaataccccactcgttccctccggagttaaaagctgggcccaggcctctgtgacccacggggcacacggggatggaggccgtgccagtagtctcctttcgaggttctctcgggaagagttcccgaccttacaggccgcaggagaccaggataaagcggctaaagaacgagagtctgccgaacagtctagcggccctggaccctcacttcggccacagaattccaccacatggcgcgatggaggtggaaggggccctgacgaacttgagggacctgacagcaagctccaccatggacacgatcctcggggtggactgcaaccttcaggccctcctcagtttcctccctaccggggaatgatgcctcccttcatgtacccaccgtacctgccattcccccctccttatgggccacagggcccttacagatacccaacccccgacggtccgagcaggttcccaagagtagcaggaccgcgaggttcaggtccacccatgcggttggtggaacctgtcgggcgaccatctattttaaaagaagacaacttgaaagaattcgaccagttggaccaggagaatgatgatgggtgggcgggagcacacgaggaggttgactacaccgaaaaacttaaattcagcgacgaagaggatggtagagacagcgacgaagagggtgctgagggccaccgcgactcacaatctgccagcggtgaggagaggccacctgaagcagacggtaaaaaaggtaactcaccaaacagcgagccgcctaccccaaagacagcttgggcggagactagccgtcctccagagactgagccagggcctcccgcacccaagcctcccctgccgccacctcaccgcggtcccgcaggcaactgggggcctcctggcgattaccccgaccgaggcggaccgccatgtaagcctcccgctcccgaggacgaagacgaagcctggcggcaacgaagaaagcaatcctcatcagaaatctccctggcagtagaacgcgctcggagaagacgcgaagaggaggagcgacgaatgcaggaggagcggagagctgcttgtgctgaaaagctgaagaggctcgacgagaaatttggggcacctgacaagcgactgaaagcagaacccgctgcgccaccggctgcgccaagtaccccggcaccccctcctgcggtacccaaagaactccctgctccacccgctccacctcccgcttcagcacccactcctgagaaggaacctgaggagccagcccaggcgccaccagcccagagcactcctaccccaggtgtggcggcagcaccaaccctggtgtccggcggaggttctactagttccaccagtagcgggtctttcgaggctagccccgttgagccccaactgccatccaaagaggggccagagcctccggaggaagtaccaccccctacaactccacctgtcccgaaggtggaaccaaaaggggacggcattgggcctacccggcagccgccttcacaaggcctggggtaccctaagtaccagaagagccttccgccacgcttccagagacagcagcaggaacagcttctgaaacagcagcagcaacaccagtggcagcaacaccagcagggcagtgcaccacccactcctgtgcctccgagtcctcctcagcccgtgaccctcggcgcagtacccgctcctcaagcccctccccctccgccaaaagccctatatccaggggctctgggtcgcccaccccctatgcctccaatgaatttcgacccacgctggatgatgatacccccatatgttgacccacgactgctccagggccgtccacctttggacttctacccgccaggcgtgcatccatccgggttagttccacgggaaaggagcgattcaggaggctccagcagcgaaccgtttgaccgccatgctcctgcaatgctccgggagagaggtacacctcccgtggacccaaagctcgcgtgggttggagacgtcttcactgccactcccgcagaaccccgtccgttgacatcccccttaagacaggctgccgatgaggacgataaggggatgcggtccgagacccccccagtgccgccaccaccgccttacctagccagctaccctggattccccgaaaacggtgcccctggccctcctatctcaaggttcccactcgaagagcctggtcccaggccactgccttggccacccggatccgacgaggtcgcaaagattcagaccccccctcctaaaaaggagccccctaaagaagagaccgcccagctcacaggacccgaggccggacgaaagcctgcaagaggagttggcagcggaggccagggtccccctccacccagacgagagagccgcacagagacacggtggggaccacgacccggtagttccaggaggggaattcccccagaggagcccggagccccaccgagacgcgctggcccaattaagaagcccccacccccaacaaaagtggaagagctcccaccaaagcctctggaacagggagatgagacgcccaaacctccaaaacccgaccccctcaaaatcacaaagggcaaattgggtggccctaaagagacccccccaaatgggaacctcagccctgcccctaggctgagaagagattattcttacgagagagtgggcccaacatcttgccgcggaaggggtcggggagagtacttcgccagggggagggggtttagggggacatacggcggaagggggaggggcgctcgctcaagagaattccgatcttatagggaatttaggggcgacgatggcaggggagggggaacaggcggtcccaaccatccacccgctcctcggggacgtaccgcctcagagacacgcagtgagggctcagagtacgaggaaatcccgaaaaggcggagacagaggggctctgaaacaggctccgaaacacacgaaagcgatctggcaccgagcgacaaagaggccccaaccccaaaggaaggaaccctcacacaggtgcctttagccccaccgcctcccggagcccctccgtctcctgccccagcacgctttacggccagaggcggtcgggtgttcactccgagaggagtgcccagtcgccgtggcaggggcggtggcaggccacccccacaggtgtgtcctggctggtctccccctgcaaaatctctggctcctaaaaagcctcccaccggacctcttccaccaagcaaggagcctttgaaggagaagcttattcctggccctctttcccccgtggccagggggggtagcaacgggggaagcaacgtgggaatggaggatggcgagaggccacggaggaggcggcatggacgggctcagcagcaggacaaaccccctcgcttccgacgactgaagcaagaacgggagaacgctgccagaggatccgagggtaagccaagcctcaccctgccagcttccgcccctgggccagaggaagcgctgactacagtgaccgtggctccggctccacgcagagccgctgcgaaaagtccagatctgtccaaccagaactcggaccaggcaaatgaggagtgggagaccgcctccgaaagctccgacttcacttctgaaagaaggggagacaaggaagccccaccaccggtgcttttgacccctaaggcggttggcactcccggtgggggagggggaggagccgtccccggaatttccgctatgagccgtggcgacctgagccagcgggctaaagacctctccaaaagatccttcagctctcagcggccaggtatggagcggcagaatagacgacctggcccaggaggtaaagctggatcctccgggtcgagctcaggtggaggaggagggggaccaggtggtcgaacaggaccgggacggggtgacaagaggtcttggccgagccccaaaaatcgatctcggccacctgaagagcgtccgcctgggctccctctgcctccccctcccccaagttccagtgccgtcttcagattagatcaggttattcactctaacccggctggcatacaacaggccctggcccagctgagttctcgccaggggagtgtgactgcccctggcggacacccacggcacaagcctggacccccacaggcccctcaggggccttctcctcgcccacccacccggtacgagcctcagcgtgtgaacagcgggctaagtagcgatccacattttgaggaaccaggacctatggttaggggtgtggggggaaccccccgtgattctgcaggggtatccccatttccaccaaagcgcagagaacgtcccccacggaaacccgaattactgcaggaggaaagtcttcccccaccccacagctctgggttcttgggatccaaacctgaaggacctggaccacaggctgagtccagagataccggcaccgaggctctcacaccccatatttggaatcgcctccacactgcgacttcccgtaagtcctatcggcctagttccatggagccctggatggagcctctgagtcctttcgaggacgtggccggaactgagatgagccaatctgacagtggcgtcgatttaagcggggatagccaggtaagtagtggaccatgttcacagagaagcagccccgatggcggtctgaaaggtgctgctgagggacctcccaaacggccagggggtagttcgccactcaatgcggttccttgcgaaggccctccaggaagcgagcctccgagaaggcctccgcctgcccctcacgatggggatcggaaagaactccctcgcgaacagccgttaccgccaggcccaatcggtacagagaggtctcagaggacagacaggggtaccgagccgggaccgatccggccatcccacaggcccggtcccccagtccagttcgggacctctgacaaggattctgatctccgcctggtagtaggcgactctctcaaggctgagaaggagttgacggcctcggtgacggaagcgatacccgtgagcagggactgggaactgctacctagtgccgctgctagcgccgagcctcagtctaagaaccttgatagtggccattgcgttcccgagccaagctccagtgggcaacggctttatccagaggtattttacggctcagcgggacccagctcctcccagatcagcggcggagcaatggattcacagcttcaccctaactctggtggattccggccaggcactccaagtctgcatccttacagatcacagcctctgtaccttccgccaggacctgcaccgccatcagcgttattgtctggcgtcgcactcaagggccagttcctcgacttcagtaccatgcaggcaaccgaactcggcaagctgccagccggtggagtgctctacccaccgccaagctttctatattcaccagctttttgtccctcacctcttccagacacatcactgcttcaggtcaggcaggacctccccagcccgagcgatttttacagtactccgctccagcctggcggacagtccggattcctccccagtggcgcacctgcacagcagatgcttctgccgatggtggattcacagctgccagtcgttaacttcgggtcgctcccccctgcgccacctccagcacccccaccactttcactcctcccagtgggtcctgcacttcagccccctagtctcgctgttcgaccacctcccgctccagctacccgcgtcctgcctagccccgcacggcctttcccagcctccctgggaagggctgagctgcatcccgtggaactaaagcccttccaagattatcaaaagttgagcagcaatctgggaggcccaggttcgtcacgcacccctcctaccggtagatcattcagcgggttgaatagtcggctaaaggcaaccccctcgacctattctggggtctttcgcacccaacgggtcgacttgtaccagcaagcctccccgccagatgccttgcgctggatccctaagccatgggagaggacaggaccaccacccagggagggaccgtccaggcgggcagaagagcccggtagtcgtggggataaagaaccaggtctgcctcctccacggta

SEQ ID NO: 236237 - DNA, 6473 bp, synthetic construct
  misc_feature 1..6473: note = Description of Artificial Sequence: Synthetic coding sequence
  source 1..6473: mol_type = other DNA
atgagcgaccggtccggacccaccgcaaagggaaaggacgggaaaaaatactcttcgctgaatttattcgatacctacaagggcaagagtctggaaattcagaagcctgctgttgcccctcgccacgggctgcagtctctgggcaaggtggcaattgctcggaggatgcccccacccgcaaatcttcctagtctgaaggcagagaacaagggtaatgacccgaatgtttccctggtccctaaggatggaactgggtgggcatcaaaacaggaacaatctgaccccaaaagtagtgatgcctcaaccgcccaacccccagagagtcagcctctgcccgcatcgcagacacctgccagtaatcaaccaaagagacctccagctgcccctgaaaatacgccacttgtcccgtccggtgtgaaaagctgggcacaggcttctgtgacccatggggcacacggcgacgggggaagagcgtctagccttctttctaggttctcacgtgaagagttcccaacgctgcaggccgctggggatcaggacaaagccgctaaggaacgcgaatccgccgagcaatccagtggccctggacctagccttcgcccacagaatagcacaacttggcgagacgggggaggcagagggccagatgaactggagggacccgactccaagctccaccacggacatgatcctcgtggcggtttgcaaccttctggtccgccacaatttcctccgtaccggggaatgatgccgccttttatgtaccccccatacctgcccttccccccaccatatggtccacagggtccctaccgctacccaactccggatggcccttcacggtttcctagagttgctggtcctcgagggtctggccctcccatgaggctggtggaacccgtgggaaggccttcaattctcaaagaggataacctgaaggaattcgaccaacttgatcaggagaatgacgacggatgggcaggagctcatgaggaggtagactacaccgagaagctaaagttctcggacgaagaagatgggagggatagcgatgaagagggagcagaggggcatagggactctcagtctgcttccggggaggaaaggccacccgaagccgacgggaaaaaggggaatagtccaaactccgaaccacccacgcctaagactgcctgggcagagaccagccggcctcccgaaaccgaacccggacccccagcgcctaaacctccactgccaccaccacaccggggtcccgcaggaaactggggtcccccaggtgactatcctgacagaggcggtcccccttgcaaaccacccgctcccgaagatgaagacgaagcctggcggcaacgtcgcaagcagtctagcagcgagatctcgttggccgtggaacgcgcacgtcgcagaagagaagaagaagagagaagaatgcaagaggagagaagagcagcctgcgctgaaaaactcaagcggctggatgagaaattcggcgcacccgataaaagactcaaagctgagcctgcagctcctccagccgctccctctacccctgcacccccacccgctgtgcccaaggagctccctgcgcctcctgcaccgcctcccgctagtgctcctacacctgagaaggagcccgaggaacctgcccaggctccaccagcgcaatcgacccccacccccggagtggcagcagcccctacgttggtatcaggcggaggttcaacttcctctacttcttccgggagttttgaggcaagccccgtggaaccacagttgcctagcaaggagggtccggagccccctgaagaggtcccccctcctacaacacctccagtgcctaaagtcgaacctaagggggacggaatcggccctactcgccagcctccttcacagggtttgggttaccctaaataccagaagagcctcccacccagatttcaacggcagcaacaggagcagctgttaaaacagcaacagcagcatcaatggcagcaacatcagcagggtagtgcccctccaacacccgtgcccccttctccccctcagcccgtaactcttggtgctgtcccagcccctcaggctccaccacccccacctaaggctctgtatcctggtgcactcggcaggcctccgccaatgccacccatgaactttgaccccaggtggatgatgattcctccctatgttgatcctcggctgttgcagggacggccacccctggatttctatccacctggggtccatccctccgggctcgttccgagggagagaagcgacagcggaggttcctcgtcagagccattcgatcgccatgccccagcaatgctccgcgaacgcggtacgccacctgttgatccaaagctcgcttgggtgggagacgtgtttaccgcaacccccgctgaacccaggcccctgacctctcccctgcggcaggcggctgacgaagacgacaagggtatgcgcagtgaaactccccctgtccctccaccacccccttacctggcttcttatccgggattcccagagaatggagcaccaggtcctcctatttcccggtttccactggaggagcccggtcctagacctctgccctggccgccaggatccgatgaagtggctaaaatccaaactcctcccccaaagaaagagcccccaaaggaggaaacggcacagctcactggccctgaggccggaaggaagcccgctcgcggagtgggttctggtggccaagggcctcccccacctcgtagggagagcagaaccgagacccggtgggggccacgtccgggatcgagtcggagagggattcctcccgaggagccaggagcaccacccagaagggccggtcctattaagaaacctcctcccccaactaaggttgaggagttgccccctaaaccgctggagcaaggcgacgaaacccccaaacctcccaagcctgacccacttaagattacaaaaggaaaactgggcggacccaaggaaacaccgcctaatgggaatttaagtcctgcacctagactgcgccgtgattactcgtatgaacgcgtgggaccgacatcatgccgcggacgcggaagaggcgagtattttgccagagggaggggcttcagagggacttatgggggacggggacgcggagcacgcagccgggaattcagaagttacagggaatttaggggggatgatggacggggtggtggcaccggcggacccaaccaccctcccgctccacgcggtcgaactgcttcggaaacccgaagcgagggatcagaatacgaagaaatacccaagagacgcaggcagaggggatctgaaaccggatccgagacccatgagtccgatctcgctccttcagacaaagaagccccaacacccaaggaggggaccctcacacaggtgccccttgcccctcctccaccgggagctcctccaagtccagcacccgctaggtttaccgccaggggcggaagggtgtttacaccaagaggagttccctctcggagaggcagaggcggtgggcgaccaccaccgcaggtgtgtcccggatggtcaccgcctgccaagtctctggctcccaaaaaaccaccaaccgggcctttaccgccatctaaggagccactgaaggagaaactaattccgggacccctctcgccagtggcgcgaggaggttctaacggaggcagtaacgtggggatggaagatggtgagcgccctcgacggcgaaggcacggacgggcacagcagcaggataaaccaccccgtttccgacgcctgaaacaggagcgtgagaatgcagcaaggggcagtgagggaaagcctagcttaaccctccctgcgtcagcacctggccctgaagaggccctgactacagtgaccgtggcacccgctcctagaagagctgctgccaagtcgccagatctcagtaatcagaattccgatcaggccaatgaggaatgggagacagcttccgagagctcggatttcaccagcgagcggaggggtgacaaagaagcacctcctccagtactgcttacaccaaaagctgtgggtacgccgggaggcggagggggaggggctgtgcccggaatcagcgccatgtcgcgtggggatctcagtcaacgcgcaaaggatctgagtaagaggagcttcagtagccagagacctggcatggagcggcagaaccgtagacctgggccaggcggaaaggctggatcttccggctcgtcatccggaggtggcggaggcggtcccggtggcaggaccggaccgggaagaggagataagaggagttggccgagcccaaagaatcggagccggccaccagaggaaaggccccctgggctgccactgcccccacctccgccttcctcgtccgcagtcttccgcctcgatcaagtgatccattccaatccagccggaatacaacaggccctggcccagctgtcctcgcgccagggaagcgtgaccgctcccggaggacatcctcggcacaagcctggcccaccacaggcaccccaagggccatctccaagaccccctacccgatatgaaccacagagggttaactccgggttatcaagtgaccctcatttcgaggaacctgggcctatggtcaggggggtgggcggtactcctagggactccgcaggagtctctccattcccacctaagagaagagaaaggccaccccgaaaacccgaattgctgcaagaagagtctcttccccctccccattcaagcggctttttgggtagcaaacccgagggtccgggaccccaagctgagagtcgggacacggggacggaggccttaaccccccacatctggaaccggctgcacacagccacctccaggaagtcttaccggccttcatccatggaaccatggatggagccgctttccccattcgaggatgtagcgggaactgaaatgagccagtctgactctggagtggacctcagcggtgacagccaggtctcatctggaccctgctctcagcgcagctcgcccgacggcggtctcaagggggcagccgaaggaccgccaaaacgccctgggggaagctcaccactgaacgccgtgccctgtgaagggccacctgggagcgaacctccacgcaggccacctccagcaccacacgacggggaccggaaggaactgccgagggagcagccactgcctcctgggccaatcggcactgaacggagtcagcgcacagacaggggaaccgagcccggaccaatcagaccttcacacagaccaggccctccagtgcagttcggtacctcagataaggacagcgatctgcgtctcgttgtaggcgacagtctcaaagccgagaaagaacttaccgcaagcgtgaccgaggctatccctgtctctagagattgggagctattgccaagcgccgcagccagcgctgagccccaatccaagaatctggattctggacactgtgtccccgagccatcctctagcggacagagactctacccagaggtgttctacggctcagcagggccttcttccagtcagatctccggaggcgcaatggactcacagctgcatcccaacagcgggggattccgtcctggaactccatcactccacccctaccgatcacagcccctctatttgccaccaggacctgcaccccctagtgctctgctgagcggcgtagcgctcaaaggtcagtttcttgacttttcaacaatgcaggccactgagttggggaaactgccagcaggcggagtgctgtacccacctccgtcttttctgtactcccccgctttctgtccctcgcctcttccggacacgtcacttttgcaggttaggcaggatttaccaagcccgtccgacttttactctacaccactgcagccaggaggacagtccggattcctgcctagcggcgcaccagcccaacagatgctgctgccgatggtcgacagccagctgcctgttgttaatttcggttctctacctccagctccccctcccgcacccccacccctttccttactgcccgtcggccctgctctgcagccacctagcctggctgtcaggccacccccagcgcctgccacaagggtgcttccatccccagcccgaccttttcctgcctctctggggcgagctgaactgcaccccgtggaactgaaaccattccaagattatcagaaactgtctagtaaccttggtggacctggatcaagtaggacaccacccactggccgatcgttcagcggcctgaatagccgactaaaggctacccccagcacttattcgggcgtattcaggacgcaacgagtcgatctgtaccagcaggctagcccacccgacgctcttcggtggatccctaaaccatgggaacgaactggccctcccccacgtgaaggtccttcccgcagagcagaagaacccggtagtcgaggcgataaagaaccgggactccctcccccacggta

SEQ ID NO: 236238 - DNA, 6473 bp, synthetic construct
  misc_feature 1..6473: note = Description of Artificial Sequence: Synthetic coding sequence
  source 1..6473: mol_type = other DNA
atgtcagatcgctctggaccgactgccaagggcaaggatggtaagaaatattcatcgttgaatctctttgatacatacaagggcaagagtcttgaaatccagaaacccgctgtagccccacgacatgggttacagtcgttagggaaggtcgctatcgccaggcgaatgcctccacctgctaatctgcctagcctgaaggccgaaaacaaaggcaacgatccaaatgtgagcttggttcctaaagatggaactggctgggctagcaaacaggaacagagtgatccaaagtcctccgacgcctccaccgctcaaccccctgaatctcagcctctcccggctagccagacgcccgcatcaaaccagcccaagcgccctccagccgctcccgagaataccccactggttccgtccggcgtcaaaagctgggcacaggcttccgtgacgcatggcgcacacggcgatggtggtagagcaagttccctcctatcccgcttctctcgagaggaattcccaactctgcaggccgcaggggatcaggataaggcagccaaagagcgggaatcagccgagcagtccagcgggcctggccctagcctgagaccgcagaattccacaacctggcgggatgggggtggccgagggcctgacgaactggagggccctgattcaaaacttcaccacgggcatgaccccaggggcggactgcagcccagtggtccccctcagttcccaccatatcgaggcatgatgccgccatttatgtaccctccatacttgccttttccccctccatacggaccccaggggccttataggtacccaactcctgacggaccttcgaggtttccgagagtggctggtccaagaggaagtgggcctccgatgcggctggtggagcctgtgggcagaccttctatcctgaaagaggataacctgaaagaattcgaccagcttgatcaggagaatgatgacgggtgggctggggcacatgaggaagtagattatactgagaaactcaagttctctgacgaagaggatgggagggatagcgatgaagagggtgctgaagggcaccgggatagtcaatctgccagcggcgaagagcgtcccccagaggccgacggcaaaaagggtaattcgccaaacagcgagccccctaccccaaagactgcatgggctgagaccagtcgccctcccgagacagaacctggacccccagctccgaaacctcctcttccgcctccccaccgcggtcccgctggcaactggggtcctccgggagattacccagatcgaggcggtcctccatgtaaacccccagcacccgaggatgaggatgaagcctggcggcagaggcggaaacagtctagctccgagatatccttggccgtggaaagagcgaggcgccgacgcgaagaggaggaacggaggatgcaggaagagcgtagagccgcatgcgccgagaaactgaaaaggttagatgagaagttcggcgcaccggacaagaggttaaaagcggaaccagcagcaccccctgcagcccctagcaccccagcgcctcccccagccgtccctaaagagcttccagctcccccagcccctcctccagcctcagcccctacaccagagaccgaacctgaagaaccagcccaggctccacctgcacaaagcactcccacacctggtgtggcagctgcccctacgctggtgagtggaggcggaagcacctctagtacctccagtggaagcttcgaagcatctcccgtggagccacagctcccaagtaaggaaggcccagaaccgccagaagaggtcccaccccctaccactccccctgttccaaaggtagagcccaagggcgatggcattggcccaacccggcaacccccaagccagggactgggatatccaaagtaccagaaatccctcccaccaagatttcaacgccagcaacaggagcagcttcttaagcaacaacagcagcatcagtggcagcagcaccagcagggaagtgcaccacccacccccgtgcccccttctcctccacagcccgtgacactcggtgccgtgcctgctcctcaagcccctcctcctccgcctaaggccctgtacccaggtgctctgggcaggcctccccctatgcctccaatgaattttgacccgaggtggatgatgattcctccttacgttgatcccaggttgcttcaaggcaggccaccactggacttctaccctcctggcgtacatccttctggactggtgccacgagaacggagcgattcagggggttcgtcatctgaaccctttgaccgacatgccccagctatgctgcgagagcggggaacccccccagtcgatcctaagttagcctgggtcggcgatgtttttactgccacacctgccgagccacgtccactgactagtccccttaggcaggccgctgatgaagacgacaaaggaatgagatccgagactccacctgtgcctcccccaccaccatatctcgcgagttatcccggttttccagagaatggcgctcccggaccacctatcagccgatttccattggaggaaccgggacctagaccactcccctggccgccagggtccgacgaggtagccaagatccaaacgccccctcctaaaaaggaaccccctaaggaggagaccgcccagttgacaggcccagaggccggtaggaaacccgcacggggagtcggatcgggaggccagggcccacctcctcccagacgggagagccggacagagacaaggtggggcccacgcccaggcagctcgcgccgtggcatacccccagaagagcccggagctcctccgagaagagccggaccaataaagaaaccaccccctcctaccaaggttgaggagctaccgccaaaaccacttgagcaaggggacgagacccctaaacctcccaagccagacccactgaagataactaaaggaaaactcgggggtcctaaggaaactcctcctaacggcaatctgagccctgccccaagacttaggagagattactcttacgagcgcgtggggccaacaagctgccgtggtcggggtcggggtgagtacttcgccagagggcgtggatttcggggaacttacgggggtcgtggacggggagccaggagccgggagttcaggagctatcgggaatttcgaggagacgacggcagggggggagggactgggggaccgaaccacccaccagcccctcgtgggcgaaccgctagtgaaactaggagcgaaggatcagaatacgaagagatcccgaagaggcgccgacagcgtggcagcgaaacaggatcagaaacccacgaaagcgatctcgcccctagcgacaaagaggctccaacacccaaagagggtaccctgacccaggttccactcgccccacccccacctggcgcacctccgagtccggcaccggctaggttcacagcgagagggggaagagtttttacccccagaggagtgccttctagacgcggtagaggcggtggacggcctcctccccaagtgtgtccaggctggtccccacctgccaaaagccttgctccaaagaagcctccaaccggaccccttccgcctagcaaagaacctttgaaagagaaactcatccccggtccactgagccccgttgcgaggggcggttcaaacggaggatccaatgtggggatggaagacggcgagagaccccgacgcaggcgccatggcagagcgcagcagcaagataaacccccacgcttcagacgcttgaaacaagaacgggagaacgctgcacgaggaagcgagggaaagccttctctcaccctgcccgcaagcgctcctggtcccgaggaggccctcactaccgtgacagtggccccagcaccccgacgggctgctgctaagagccccgatctcagcaaccaaaactccgaccaggccaatgaggaatgggagaccgccagtgagagtagcgatttcacctctgaaagacggggtgacaaggaagctcccccacctgtcctgcttactcctaaggctgttggaacccctggcggaggcggaggcggtgccgtcccgggaatatccgcaatgagcaggggagatcttagccagagagccaaggatctgtctaaacgcagttttagttcgcaacgcccaggcatggagcggcagaacagacggcctggcccagggggtaaagcaggatcatcaggttccagctctgggggtggcggaggcggtcctgggggaagaactgggccaggtagaggagacaagagaagctggccaagccccaagaacaggtcacgccctcctgaagagcgccctcctggtctccctttaccaccaccaccaccttctagtagtgccgtgttccgccttgaccaagtgatccactctaaccctgctggcatccaacaggcacttgctcaactctcgagtagacaaggatcagtgactgctccaggtggccaccctaggcacaagcccggtctccctcaagctcctcaggggccatcccccagaccacccacccgctatgaacctcagcgcgtgaatagtggattgtccagtgacccccacttcgaagaacctggtcctatggttcgcggtgtgggagggactccaagggactccgctggagtgtctcccttccctcctaaacgcagagagagaccccctaggaagcctgagctcctccaagaggagtcattaccaccccctcactctagcggcttcctgggcagcaaaccagagggtcccggaccgcaagctgaatctagggacacagggacagaggccctgacccctcacatctggaaccgtctgcatacagccactagtaggaaatcatatcggccttcatccatggagccctggatggagcccctttctccttttgaagacgtggcagggaccgagatgtcccagtcggattccggtgtggaccttagcggagacagccaggtctcctcgggcccttgtagccagcgctcaagcccagatggcggtctaaaaggtgcggcagagggacctccaaagcggcctggtgggagcagtcctctgaacgcagtaccttgtgagggcccacctggctctgaaccaccacggcgaccccctcctgcccctcatgacggggacaggaaggagttacctcgcgaacagcctctccctcctggcccaatcggtactgagaggagtcagcgtaccgaccggggtacggagcccggtcctattcgaccatcacatcggccaggccctcctgtccaatttggcacatccgataaagactcagatctccgcctggttgtgggcgacagtctcaaagccgaaaaagagctgacggcgagtgtgaccgaagcaataccagtgagccgtgactgggagctccttcccagtgctgcagctagtgccgaaccacagtctaaaaacctcgacagcgggcactgtgtgcctgaaccgagctcgagtggccagaggttgtaccccgaggtgttttatgggtcggctggaccctcttcatctcagatctctggaggtgccatggattcgcagctccaccccaacagtggcggttttcgccctggcaccccttcacttcacccttaccgctcgcagcccctgtatttgcccccaggaccggcaccacccagcgccttgctgtcaggggtggctctaaaggggcagtttctcgatttttccactatgcaggccacagaacttgggaagctgcctgcaggaggtgtcttatacccgccaccaagctttttgtacagccccgctttttgtcctagccctcttcctgatacatctctgctccaagtccggcaggatcttccctccccaagcgatttctacagtacccccctgcagcctgggggtcagtccggctttctgccatctggagcacccgcacagcagatgctcctgcccatggtggacagccagttacccgttgttaactttggaagccttccgccagcccctccaccagctccccctcctctaagtctgcttccagtcggtccggcactccaacccccatccctggcagttcgtccacctcccgctcccgcaacccgtgttctccctagccccgcaagaccctttccagcctccttgggcagagccgagctgcaccctgttgaactgaaaccgtttcaggactaccagaaactctcatctaatctcggcggaccgggttcctcccgaacgccacccaccggtcgcagtttctcaggactgaattcccgactgaaagctaccccttcaacctacagcggagttttcagaacccaacgtgtcgatctataccagcaggcctcacctcctgatgccctacggtggattcctaagccatgggagcgcaccggacctccaccgcgagaagggcctagccgcagagccgaggagcccggaagtagaggggataaggaaccaggcttgccccctcccaggta

SEQ ID NO: 236239 - DNA, 6449 bp, synthetic construct
  misc_feature 1..6449: note = Description of Artificial Sequence: Synthetic coding sequence
  source 1..6449: mol_type = other DNA
atgtcggaccgctccgggccaactgcaaaaggcaaggacgggaagaaatacagctccctcaatctctttgacacctacaagggaaaatctttggaaatccagaaaccagcagtcgctccccgacatggtctccaaagcttagggaaggtggcgatcgcaagaaggatgccacctcccgctaaccttccttcccttaaggccgaaaataaggggaacgatccaaatgtatcgttggtgcctaaagatggaactggatgggccagcaagcaagaacagagcgacccaaaaagtagcgatgcatccaccgcacagcctccagaatctcagcctctccctgccagtcaaacgcccgcatccaatcagcctaaacgccctccggctgccccagagaacacacctttggtgccctccggcgtaaagtcctgggcccaggcctcagtaacccacggggctcacggcgacgggggtagagcctctagtctcctgtcgcgcttttcgcgcgaggagttcccaactctgcaggcagcaggagatcaagacaaggcagcaaaggagcgggagtctgccgaacaatctagtggccctggaccaagtcttaggccccaaaattccaccacctggcgcgacggaggcggtagggggccagatgaactggagggaccagattccaaactccaccacggccacgatccacggggtgggctgcagccttctggcccaccgcagttcccaccctatcggggtatgatgccaccatttatgtacccaccctacctgccgtttcccccaccgtacgggccacaaggcccttaccggtatcccacacctgacgggcctagccgctttcccagggtagcgggacccaggggcagcggccctcctatgagacttgtagaacccgtgggacgcccttctatcctgaaggaggataatttgaaggagtttgaccagttggatcaagaaaatgacgatgggtgggctggcgcacatgaggaagtagactatactgaaaagctcaagttctctgatgaggaagacggacgcgacagcgacgaagaaggtgccgaggggcatcgagattcccagagcgcctccggagaggagcgccctcccgaagccgatggcaagaagggcaactcccctaactctgagcccccaacgccgaaaacagcatgggcagagacgtccagacctccagagaccgagccaggaccgcctgccccaaagccaccattaccccctccccatcggggtccagcagggaactggggcccacctggggactatcctgatcgcggagggcctccatgtaagccacccgcacccgaggatgaggatgaagcttggcggcaacggagaaaacaaagttccagtgagatttccctagccgtcgagcgggctagacgcaggagagaggaggaggagcgcaggatgcaggaagagcgccgagctgcatgcgcggaaaaactgaagcggctggatgagaagtttggagcccctgacaagaggctgaaagctgagcctgcagccccaccggcagccccatcaacccccgcacctccacccgctgtgcccaaggagcttccggctccccctgccccaccccctgcatctgcacccaccccagaaactgagcccgaagagccagctcaagccccaccggctcagagtactccaacaccaggcgttgcagccgctcctacccttgtgtctgggggtggcagcactagtagcacttccagcggaagctttgaagcgagccctgtggaaccccagctgccatcaaaggaaggcccagagcccccagaagaagttcccccacctacgactccaccagtgccaaaagttgaaccaaaaggggacggcattggtccgaccaggcagccaccatcacagggacttggctaccccaaataccagaaatctttaccccctagattccagcgacaacagcaagaacagctgctaaagcaacagcagcagcatcagtggcaacagcatcagcagggttctgccccaccaactccagtcccaccgtctccaccccagcccgttacacttggcgctgtgcccgctcctcaagctcctcctcctcccccaaaagcattatacccaggagccctgggtcgcccacccccaatgcctccaatgaacttcgaccccagatggatgatgattcccccttacgttgatccgagactcctgcagggacggcctcctctcgatttttatcctcctggcgtgcatccctccggcctggtcccacgcgaacggtccgattccggtggctcatcgagcgagcctttcgaccggcacgcacccgctatgctacgtgagcggggaactcctcccgtggacccaaaactggcctgggttggcgacgttttcacagccaccccggctgagccaaggccccttaccagccccctgaggcaagccgctgatgaagacgacaaggggatgagatcagaaacacccccagtgcctccaccccctccctacttggcttcttaccccggttttcctgagaatggagcaccgggacctccaatatcccggttccccctcgaggagccaggccctcggccacttccatggccgccaggatccgatgaagtcgcaaagatacagactccgcctcccaagaaggaaccaccaaaggaggaaaccgcacaattgaccgggcctgaggcaggcagaaaacctgctcggggtgtggggtctggtggccaggggcctccccctccccgtagggagtccagaaccgaaacccgctggggacctcgccctggatcttcacgtcgaggcatcccgcctgaggagcctggtgcacctcccaggcgagcaggaccaattaaaaaacctcccccacctaccaaggtcgaagaactgccgcctaagcctctggagcagggagacgaaacccccaagcctccaaagcctgatccactcaagattacaaagggaaagctcggaggcccaaaggagacaccccctaacggcaatctgagccccgcaccaaggctcagacgcgattactcatacgaacgggttgggcctacctcttgcaggggcagggggaggggagagtattttgccagaggtcggggatttcgtggtacatatggcggacgcggaagaggcgcagcgggaaattccgctgtaacagaatcatttgaggagatgatgggtgtggaggtgggtcagggcgatcagactacccttctattgcccgaggctgctctgcctgctcgccacggggcacgagttcagagtatgcgtaaaagccctagtggcgctggcagcggggctcagaaacaggctgctagaccaatgagggtgatctggttgctacagacccgcagactgccacatcccagacgtgagcatagtccgagatctagatcaccaaccactcggtctccaacatttcccgcaccagccaggtttacccccggagtgggggagtcgagtcttcctgaaggaatctcacccggacccaggcgaagagaaccaccacaggtttgtcccggttggtcccctcctgctaagagtctggccccaaaaaagcctccaacaggaccactgcccccatctaaggagcccctgaaggagaagctgatccctggaccgctgtctcctgttgccaggggcggatcaaatggcggtagcaacgtgggcatggaggatggagaacgccctaggcgacggaggcacggcagagcccaacaacaggataagccaccaagatttcggagactcaagcaggagcgggagaatgctgcacgtgggtctgagggcaagccgagtctgacattacctgcctctgcacctggccctgaggaggcattaaccaccgtgaccgtcgctccagcaccacgcagggccgctgcaaagtcaccggatctctccaaccagaactcggatcaggccaacgaggaatgggaaaccgctagcgaaagcagtgattttacttctgagcgaaggggggacaaggaagcaccgcctcctgtactcctgacacccaaggcggtgggaacaccgggtggcggagggggaggagccgtacctggaatttccgccatgtccagaggagatctttcccagagggcaaaggatttgtctaagcgttcttttagctcccagcgccctggcatggagagacagaacagaagacccggacccggtggtaaagccggaagttctggtagcagctctggtggaggcggaggcggtcccggtggacggacgggtcccggtcgcggagataaacggtcctggcctagtcctaagaatcggtcaaggcctcccgaggagcgtcctcccggtctgcctctgcccccaccccctccatcctccagtgccgtgttcagacttgaccaggtgattcacagcaatcccgcaggaattcaacaggcgctcgcccagttaagctctagacaggggtctgtcaccgcaccagggggacatcctagacacaaaccaggcctaccgcaggcacctcagggcccttcaccaaggcctcccacaaggtatgaaccacaacgcgtcaacagcggattaagctccgatcctcatttcgaggagccaggccctatggtacgtggcgtaggcggtacacctagagactctgcaggcgtgtcaccttttcctcccaagagacgggagaggccaccccgaaagccggagctacttcaagaagaatcactgccccctccccattcatctggatttttgggcagcaaaccagaggggcctggcccacaggctgagtcaagagacacggggacagaggctctgaccccacacatttggaaccggctgcacacagccacttcgcgcaagtcctatagaccttcttctatggaaccatggatggaaccgctctcccctttcgaagacgtagctggcactgaaatgtctcaaagcgacagcggcgtggatttaagcggcgattctcaagtaagctctggaccttgctcccaaagaagcagtccagacggcggactcaaaggtgcagctgaggggccacctaagcgccctggcggatctagcccccttaatgctgtcccgtgtgagggtccgcctggctccgaaccgcctcgcagaccacctcctgctccacatgacggggataggaaagagctgccgagagagcagcctctaccgccaggccctatcggcaccgaacggagccaaaggacagaccgaggaaccgagccgggtcccatcagaccaagccaccgaccaggtcccccagtgcagtttggcacttccgataaggatagtgacctgcgtctcgttgtcggcgatagcctgaaggctgagaaggagcttaccgcctctgtaacggaagccatccctgtgtcccgcgactgggagctgctccctagcgccgcagcctctgctgaacctcagtccaaaaacctggacagtgggcactgcgtacctgagccgagtagttcaggccagcgactgtatcccgaggttttttatggaagtgccggaccctccagctcgcaaatttcaggtggccatggcttaagcataacatcaaagcagtggaggcggccaggcactccatctttacacccctaccgctctcagcctctgtacctcccacccggtcccgcaccgccatccgcgctgctgtccggcgtggccctcaagggccagttcctagattttagcacaatgcaagctaccgaactcgggaaactgccagccggtggtgttctgtatcccccaccgagttttctgtactcccccgctttctgcccatcccccctgccggatacatccctgctgcaggtgcggcaagatcttcccagcccctccgacttctattctactccactgcagccgggagggcagtcaggattcctgccgtccggcgcacccgctcagcagatgcttctacccatggtcgattctcagctgcccgtggttaacttcggctcactgccacctgcacctcccccagctccccctcccctcagcctgctccctgtcggcccagcacttcaaccgccaagcctggctgtgagaccaccgccagcccctgccactagggtgttgccaagcccagcgaggccatttccggctagcctgggtcgcgctgagctgcatcctgtagagcttaaaccatttcaagattaccagaaactcagcagcaatctcggaggaccagggtcatctcgaacaccgcctacggggaggtcattttcgggcttgaattctcgactgaaagctacaccttctacctacagtggcgtttttcggactcaaagagtggacctgtaccagcaggccagccctccagacgctctccgctggattccaaaaccttgggagcgtacaggacctcccccaagagaagggccttctcggcgagccgaggagcccggaagtcggggtgacaaggagcccggactccccccacctcgcta

SEQ ID NO: 236240 - DNA, 1650 bp, synthetic construct
  misc_feature 1..1650: note = Description of Artificial Sequence: Synthetic coding sequence
  source 1..1650: mol_type = other DNA
atgagcgatcggtctgggcctactgcgaaaggaaaagatggaaagaagtactcatcattgaatctcttcgatacatataaaggaaagtcattagagatccagaagcctgcggtggcacctagacatggcctccagtcactgggaaaggtggccatagccagacgaatgccaccaccggctaatctcccctcattaaaagcagagaataaaggaaacgacccaaatgtgtcactggttcctaaagacgggactgggtgggcaagtaagcaagaacagagtgatccgaagtcaagcgacgcctccaccgcccaacctccggagtctcaaccactcccagctagtcagactccagcctcgaatcagcccaagcgacctccggctgcacccgagaatacaccactcgttccttctggagttaagagttgggctcaagctagcgttacacatggggctcacggtgacggtggcagggcctcttctctcctgtcccgcttttctcgagaagaattccccaccctgcaggccgcaggggaccaggacaaagcggctaaggaacgagaaagtgctgaacagtcttccgggccagggcctagtttaagaccgcaaaatagcacaacttggagggacggtgggggacggggacctgacgaactggaaggtccagattctaaactgcatcatgggcatgacccgagaggtggtctccaaccctctggccctccacaattcccaccatataggggcatgatgccacctttcatgtacccaccatacttgcccttccccccaccatacggccctcaagggccataccgctacccgaccccagatggaccctccagattccctcgggtggcaggcccaaggggaagcgggcctcccatgcgtctggtagaaccggtcgggcgtccgtccatccttaaagaggataaccttaaagagttcgatcagctggaccaggaaaatgatgacggctgggccggagctcacgaagaagttgattataccgagaaactgaaatttagtgacgaggaggatgggagggactccgatgaagaaggcgcagagggacaccgcgacagccagtccgccagcggggaggagcgccctcctgaagccgatggtaagaagggcaactctcccaatagtgaaccccctacacccaagactgcttgggctgagaccagcagaccacccgagaccgaacctggaccacccgctcccaaaccccctctccccccaccccacaggggacccgctggcaactggggcccaccaggcgattacccggatagaggtggaccgccatgtaaacccccagcgccagaagatgaggacgaagcctggagacagaggcggaaacagagcagttctgagatttctctcgccgtagaacgggctcgaagacggagggaggaagaggaacgccgtatgcaggaagagcgacgggctgcttgcgcagaaaagcttaaacgcttggacgagaaattcggggctcctgataagcggctaaaggcggagcccgctgctccaccggcagcccctagtacccccgctccccctcccgctgctagcgaggtacctctgatggaagatagtagggggcagcagagggaccctccaagagggttggaggcccctcatccgtag

SEQ ID NO: 236241 - DNA, 6416 bp, synthetic construct
  misc_feature 1..6416: note = Description of Artificial Sequence: Synthetic coding sequence
  source 1..6416: mol_type = other DNA
atgagcgacagatctgggcctactgcaaagggcaaagatggtaagaaatacagttctttaaatctgttcgacacttacaaggggaaatcgctggagattcagaagcccgctgtcgctccacggcatggactccagtctctcggcaaagttgcaatagccagacggatgcctcccccagcaaacctgcccagcctgaaggcagaaaataagggcaacgaccccaacgtcagtcttgtgcccaaagacggaactgggtgggcctctaaacaggagcagagcgatcccaaaagtagtgacgcgagtacggcccaaccgccagagtcccagccattgccagccagccagacacccgcttctaaccagccaaagagacccccagccgctccggagaataccccgttggtgcccagcggtgttaaaagttgggcccaagcatcggttacacacggagctcacggagatggcggacgcgcatcttctttgttgagccggttttcccgagaggagtttcctacactgcaagccgcaggtgatcaagataaggctgcaaaagaaagagagtctgccgaacaaagttcaggcccaggaccatcactgcgaccacagaacagtactacctggcgcgatggcggagggcgaggtcctgacgagctggagggccctgatagcaaattgcatcatggccacgacccccgagggggattgcagccttcaggtccacctcagttcccgccttaccgaggcatgatgcccccatttatgtatcccccttacctgccattcccccctccctacggaccccaagggccatacagatatccgactcccgacggtccctctagattcccacgggtggcaggtcctcggggatccggcccacccatgagactggtggagcctgtcgggcgtccaagtattctgaaagaagataacctgaaagagtttgatcagctggatcaggagaacgatgatggatgggccggtgctcatgaggaagtggactatactgaaaagctgaagttctctgacgaagaagacggccgtgatagcgacgaagagggcgcagaagggcatagagattcccaatcagcttccggtgaagagagacctcccgaagcagacggaaaaaagggcaattctcctaattcggagcctcccacaccgaaaacagcatgggcagaaaccagtcgccctcctgagacggagcctgggcctcccgctcccaaacctccgcttcctcctcctggcgattatcctgacagagggggtccaccatgcaagccacctgctccagaggacgaggacgaagcttggcggcagcggaggaaacagtcctcttctgagatttcactcgcagtggagcgggcacgcaggagaagagaggaagaggagagacgtatgcaagaggagcgacgggctgcttgcgctgagaaactgaaaaggcttgacgagaaattcggcgcacccgataagagactgaaggccgagccagctgcgcctccggcagctccttccaccccggctcctccaccggctgtgccgaaagagctgcctgcacccccagcccctccccctgcttcggcccctacccctgaaaaagagcctgaagaaccagcccaagctccccctgcccaaagcacacccacccctggcgttgctgctgcccctacactcgtgtccggcggtggaagcacaagttccacttcgtccgggtcctttgaagcctcacctgttgaaccccagttgccctctaaggagggccctgagcctcctgaggaggtccctccgccaactacaccccctgtaccaaaggttgaacctaagggtgatggaataggtcccacccgtcagcccccaagccagggtctggggtatcccaagtaccagaaaagtttgccccctagattccaacgccagcagcaggagcagctcctaaaacaacagcaacaacaccagtggcaacagcaccaacaggggtctgcccctcccacccccgtccctccttcaccccctcaaccagtgaccttgggcgctgtccccgcacctcaagcaccccctccgccacccaaagccctgtatcccggtgcactagggcgtccccctccgatgccacctatgaacttcgacccccgttggatgatgataccaccatacgtggatcctcgactgcttcaggggcgtcctccactggatttctacccacctggcgtccacccttctggactggtgcctcgagagcgctccgattctgggggatccagcagcgaaccattcgaccggcacgcccctgcgatgctgcgcgagcgcggtacccctccagtcgaccctaaattagcttgggtcggagatgttttcacagccacccctgctgagcccagacccttaacatcacctctacgtcaggcagctgacgaggacgataagggtatgagaagcgaaactcccccagtccctccccctcccccatacttagcctcgtatcccggattccccgagaatggggcacccggaccacctatatctaggttcccattagaggaaccagggccaaggccactgccttggcctcccggttccgacgaggtagctaaaattcaaacccccccacccaagaaggaacctccgaaagaagagacagcccagctcacaggcccagaagccggtaggaaacctgccagaggtgtgggctccggtggccaaggcccacccccacccaggagagaatcccggaccgagactcgatggggacctaggcctggatcttcccgccgaggcatcccacctgaagaacctggggcaccccctagacgcgctggcccaataaagaaacctcctcccccaacgaaggtcgaggagctgcctcccaagcccctggagcagggcgacgaaaccccaaagccacctaagccagatcctctcaaaatcactaaggggaaactggggggacccaaggagacacccccaaatggaaatctttcaccagccccaaggctaagaagagactattcttatgagcgtgttggcccaacctcttgtcggggtagaggaagaggggagtattttgccaggggtagggggttcagaggcacctatggtggcagaggcagaggggcagctggaaatagtgctgtgacagagtctttcgaagaaatgatgggcgtggaggtaggtcagggtgatcaaaccaccctcttgttacctgaagccgcactccccgctagacacggcgcaagagtgcagagtatgaggaaatcaccatccggggctgggtctggcgctcagaaacaggctgccaggcccatgcgggttatctggctgctgcagaccagacgcctcccacaccccaggagagaacacagccctagaagccgcagccctacgacaagatcccctacctttccagcacccgcaagattcacgccgggtgtcggcgaatcttctttacccgagggaatcagtcccggacccagacggagagaaccacctcaagtgtgtcctgggtggtcgcctccagctaaatccctggctcctaagaagccacctactggaccgctgcccccttcaaaagaacccctgaaagaaaagttgattcccggaccacttagccctgtcgcgcgtggcggatcaaatggcggttcaaacgttggtatggaagatggggagcgaccacgaagacgtcgccatggccgagcacagcagcaggataagcccccacgcttccgcaggctcaaacaagagcgggaaaatgctgccagaggctctgagggcaaaccttctctgaccctgccggcatcagctcctggacccgaagaagctctaaccaccgtcaccgtcgcccctgctccacggagggccgcagctaagagccccgacctgtctaatcagaattccgaccaggcaaatgaggagtgggagaccgcttccgaaagttctgatttcacaagcgagcgacggggagacaaggaagccccacctccagttctactgacccccaaggccgtcggcacccccggaggcggaggaggtggagccgtgcccggaatatccgcaatgtccaggggagacctgtcccagagggccaaagacctgtccaaaaggagtttctctagccaaaggcctggaatggaacgccaaaatcgccgaccgggaccaggcggaaaggccggaagttctgggagctcatccgggggagggggaggtggccctggaggaagaacaggtcccggtagaggtgataaacgcagctggccaagccctaaaaaccggagcaggcctcccgaggaaaggccgccaggacttccactcccccctccccctccatccagttcagccgtatttcgtcttgaccaggtgatccactccaacccagctggaatccaacaggccctggcccagttgtcgagccgtcagggaagcgtcacagcacccggtgggcatcctagacacaaacctggccctcctcaggcgccacaggggcctagcccacgaccccctacacggtacgagcctcagagagtgaactccggattgtcatccgacccacattttgaggagcctggcccaatggtgcgaggtgtgggaggaacccctcgcgattccgctggggtatctccatttccccctaaacggagagaaagaccgccacgtaagcctgaattgctccaggaggaaagtctgccaccaccgcactcatccggcttcctcgggtctaaacccgaggggccaggtccgcaggcagagtccagagacacaggaacagaggccctcacaccccatatttggaaccgcttgcacacagctacgtccaggaagtcatataggccctcatcaatggaaccctggatggagccgctgtctccattcgaagacgtggcaggcacagaaatgagccaatctgacagcggggtagatctgagtggagattctcaagtctcctctggcccttgttcacaacgctcaagcccggatggcggtcttaagggggcagccgagggaccccctaagcgcccagggggttcttcacccctcaatgctgttccatgtgagggtcctccgggatccgaacccccaagacgccctccgccagctcctcatgatggcgacagaaaggagcttcctcgggagcagcctctgcctcccggaccaatcggcaccgagcggagtcagcacactgatcgcggaaccgaacctggccctatccgcccatctcatcggcctggacctcccgtccaatttggtacctcagataaggacagcgacctccggctggtagtgggcgactccctgaaggcagagaaggagttgactgcaagtgtcactgaggcgatccctgttagcagggactgggaactgctgccctccgccgctgcctctgcagaaccccaaagcaagaacctggatagtgggcattgcgtcccagagcccagctccagtggccagagactttaccctgaagtgttttatggatctgctggtcccagtagctcccagatatcggggggacacggcctgtccgtgacatcgaaacagtggcgaagacccggaacaccctcactgcacccataccggtcacagccactctatctccctcccggacccgctccacctagcgcgctgctgagtggcgtcgcgcttaaaggacagttcctggatttctcaactatgcaagcaaccgagctgggcaagctgccggctggtggggttctgtaccctcctccatcttttctgtattcccccgcattctgcccaagtcctctgcctgacaccagcctgctgcaggtgcggcaagatctccctagcccatccgatttttactctacccctctccagcccggaggccaatccggctttctcccttcaggcgcacccgcacagcagatgctgcttcctatggtggactcccagctcccagtggttaatttcggaagtctgccgcctgctccacctcctgcacccccttcgctgagcctgctgcctgtcggcccagcattacaacctccttcattggccgtgaggccccctcccgcacccgcaactagggtgctgccctctccggctcgtccgtttcccgcttcgctaggaagagccgagttacatcccgtcgaactaaaacccttccaggattaccaaaagctgagctccaatctagggggacccggatcgtctagaacgccgcctacaggacgatcattcagtgggttaaactcacgactgaaggcaacccctagtacctactccggggtctttcgtacacagagagttgatctgtatcagcaggcgtcacctccagacgctctccgctggatcccaaagccatgggagcggactggacccccacctagagagggtccaagccggagggccgaagagccaggttctcgaggtgataaagagcctggcctgccccctcccaggta

SEQ ID NO: 236242 - DNA, 6449 bp, synthetic construct
  misc_feature 1..6449: note = Description of Artificial Sequence: Synthetic coding sequence
  source 1..6449: mol_type = other DNA
atgtcagacagaagcgggccaacagccaaaggcaaagacggcaaaaagtacagctcattaaatctgttcgatacatacaaaggcaaaagcctggaaatccagaaacccgctgtcgctccgcgacacgggctgcagtcattagggaaggtggcaattgccagacgcatgcctcccccagccaacctcccttcactgaaggcagaaaataaaggaaacgaccccaatgtttctctggtacctaaagacggcacagggtgggcatctaaacaagagcaatcagacccgaaaagctccgacgccagcactgcacagccccctgaatctcaacctctgcccgcatcacagacccccgcatcaaaccaacccaagcgccctcctgctgcgcctgagaatacacccctggtcccatcaggcgtcaaaagctgggcccaggccagcgtgactcatggcgcacacggtgatggaggcagagcttcaagcctgctgtctcgttttagccgggaagagtttccgacactccaggctgctggcgaccaagacaaggctgccaaagagagggaatcggccgaacagtcttctggcccagggccatccctgagaccgcagaactctaccacctggcgtgatggcggaggacgtggccctgacgagttggaaggacccgattcaaagctgcatcacggacatgacccccgaggaggcttgcaaccatccggcccaccacaatttcccccttatcgtggcatgatgccgcctttcatgtatcccccttacctgccttttccccctccatacggaccgcagggaccataccgctatccaacccccgatggaccctctcgattcccaagggtggcagggcctcgcggaagtggccctcctatgcgactcgtggagcccgttggacggcctagcattctgaaagaagacaacctcaaggagtttgatcaactggatcaagaaaatgacgacggatgggcgggtgcacacgaggaagtcgactacactgagaagctgaaattttcagatgaggaagacgggagagactccgacgaggagggggcagagggccaccgcgatagccaatctgctagtggcgaagagaggcctcccgaggctgatggcaagaagggtaatagcccaaacagtgaaccccctacacctaagactgcatgggcagaaacatcaagaccacccgaaactgaaccgggacccccagctcccaaaccgcctttaccacctccacaccggggtccagcaggcaattgggggccacctggtgactacccggatcggggtggacctccatgtaagccacccgcacccgaggatgaagacgaggcatggcggcagaggagaaaacagagcagctcagagatcagcctggctgtggaacgcgctaggaggagacgtgaggaggaggaacgcagaatgcaggaggaacgacgtgctgcttgcgctgaaaagcttaaaaggctggatgaaaagttcggcgctccggacaagcgtctgaaggccgaaccggcagctcctcctgctgctccgtctacaccagcccctccacccgcagtgcccaaggagctgcctgcgccacccgcacctccccctgcttccgctccaaccccagaaaaggagcccgaagagccagcccaggctcccccagctcagagcacaccaacaccaggggtggccgctgcaccaaccctggtctctgggggaggctcgacatcgtctacttcctcaggctctttcgaggcctccccagtagagccgcagctcccttctaaggagggccctgagcccccagaggaggtgcccccacccacaactcccccagtccctaaggtcgaacccaagggcgatggaatcggccctacccggcagcccccttcccagggactcggttatcctaagtaccagaaatcattgcctcctagatttcagcggcagcagcaagagcagctccttaaacagcagcagcagcatcagtggcagcaacaccaacagggatctgcacctcccaccccagttcctccatctccaccccagcccgtaaccctgggtgccgtgccggctcctcaggcccctcctccccctccgaaagctctgtatcctggggcattgggcagaccacctcccatgcccccaatgaattttgaccctaggtggatgatgatcccgccatatgtggatcctcgtttacttcagggacgacctccgcttgacttttatcctccgggagtgcacccttcaggactcgtacccagagaaaggagtgattctggcggttcttcatcagagccgttcgataggcacgctcctgccatgttgagagagagaggaaccccccctgtcgacccaaagctggcatgggtgggagacgtcttcaccgcgactcccgcagagcctaggcctctcacctctcccctgaggcaagccgcagacgaggatgacaaggggatgcgatctgagacaccacccgtgccaccacccccaccttatttagcttcatatccaggcttcccagagaatggagctcctgggccaccgatctcccgctttccactggaagagcccggacccaggcccctgccttggccccctggttccgatgaggttgctaaaatacagacccctccaccgaaaaaagagcctcccaaagaagagactgcacagctgactgggccagaggctggtaggaagcctgcacgaggtgtggggtctggtggccagggcccaccccctcctagaagggagagtaggaccgaaactcggtgggggccaagacctgggtcgtcacggagggggatcccacccgaagaacccggagcacccccaagacgagcgggaccaattaagaaaccccctccccctacaaaggttgaagagctgcccccaaaacccctggaacagggagacgagacgcccaaacccccaaaacctgatcccctgaaaatcacaaagggcaagcttgggggacccaaagagacgccaccaaatggaaacttgagccccgctccgagactgcgcagagattattcctacgaacgggtcggccctacctcatgtagggggagaggtagaggcgagtatttcgcacggggaaggggtttccgcggaacctatggcggacggggtcggggtgctgccggtaattccgcagtgaccgagagctttgaagagatgatgggggtcgaagtcggtcagggcgaccagactacactgctcctgccagaagccgcactgccagcaaggcatggggctcgcgttcagagtatgagaaagagcccctcaggtgccggaagtggagctcagaagcaggccgctaggcctatgagagttatctggctgctgcagacccgcaggctcccccacccgcgacgcgaacattctccgaggtcaaggagtccaaccacccgttcgcccacttttcccgcaccagccagatttactcccggtgtcggtgaaagctccctgccagaaggcatcagtcctggtccaagaaggagagagccgcctcaggtgtgccccggatggtcccccccagcgaagagcctggccccaaagaaaccacccacaggcccacttcctccctcaaaggaacctctgaaggaaaagctgattcctggccctctcagtccagtcgctagaggagggtctaacggtgggagtaacgtggggatggaggatggagagagacctcgtaggcggaggcatggtagggcgcaacagcaggacaaaccccctaggttcagacggctgaaacaggagcgggaaaatgccgctcggggatctgagggcaagccttcattgaccctgccggcttcggcccctggaccagaagaggctcttaccaccgtcactgtggctccagcacccagaagggccgctgctaaatccccagacttgtctaatcagaactctgaccaagccaacgaagaatgggagactgctagcgagagcagcgactttacatctgagcggaggggcgataaagaggccccacctccagtcctgctgaccccaaaagcagtgggcacccctggaggcggaggcggtggagctgtccccggaatatccgcaatgtccaggggagacttgtcacagcgcgctaaggacctctccaaacgttccttctccagccagcggccaggaatggaacgccagaaccgcaggcctggcccaggtggcaaggccggtagctccggctcctcatcaggcggaggagggggaggacccggagggcgtactggccctggcaggggcgacaagcgcagctggccaagccctaagaacagaagccggccacccgaggaacggcctccaggcctgccactgcctccaccccctccttccagttccgccgtgtttcgcttagatcaggtgatccatagcaatccagcgggaattcagcaagcacttgcccagctctcatcacgccaaggatcagttaccgccccaggaggccacccacggcataagcccggaccacctcaagccccacagggtcccagccccaggcctccaactaggtacgaacctcaacgcgtgaattcaggccttagtagcgacccccatttcgaagagccaggacccatggttagaggcgtgggagggacccctcgggacagtgcaggcgtctccccttttccaccaaagcggagggaaaggccgcctcgcaagcccgagctcctgcaagaagaatctctgcctcctccccatagctccggattcctcggctctaagcccgaaggccctgggcctcaagcagaaagtcgggacaccggcacagaagcgcttacccctcacatctggaatagattacatactgctaccagtcgaaaaagttatcggccttcgtcgatggaaccctggatggagcctctctcccccttcgaggacgtggcaggcaccgaaatgtcacagtcagattcgggagtggatctgtcgggggatagtcaggtcagttcaggaccctgctcccagcggagctccccagacggcggactcaagggcgcagcagaggggccaccaaagcgccctggcggaagctctccccttaatgctgttccttgtgaggggcctcccggatccgagccacctcgccgacctcctcccgcaccccacgacggcgacagaaaggagttgccgagggaacagcctttaccccctggcccaataggaaccgagcgttcacaacacaccgaccgcggaaccgaaccaggccctatcagaccttcgcatcgtccaggacctccagttcagttcggcacgagcgacaaggacagcgatttacgcctggttgtgggcgacagtttgaaagctgaaaaggaactgacagcgagcgtcacggaagcaatccccgtcagccgcgactgggagttacttcctagcgccgcagcctctgccgagccccagagcaaaaacctcgactcgggccactgtgtgcctgaaccaagtagcagcggacagaggttgtatcccgaagtcttctatggaagtgccggtcctagctcatcccagatctcggggggacacgggctctcggttacctctaagcagtggcgcagaccaggaacaccctccctgcacccctacaggtctcagccactctatcttcccccaggccctgcaccacctagtgccctgctttccggagtcgcgcttaaggggcagttcctagactttagtaccatgcaggcgaccgagctcggaaaactacctgctgggggtgtattgtatcctcccccaagctttctctacagccccgcattctgcccatccccgctgcccgacacctctctgttgcaggtgcgtcaggatcttccgtcccccagtgacttttattctacacccctccagcccggaggccagagtggtttcttaccttccggagcccctgctcagcagatgctgcttcctatggtcgactctcagctgccagtagtaaattttgggtccctgccccctgcccctccaccagctccacccagtctgagcttactgcccgtcggccctgccctccaaccgcctagtctcgcagttagaccccctcccgcaccagctacaagggtactccccagccctgcccgtccattccccgcttcgctcggaagagccgagctgcaccccgtggaactcaaacccttccaagactatcagaaattgtcctccaacttggggggaccgggaagcagtcgaacgccgccaacagggaggtccttttctggactcaactcaaggctaaaagcaaccccatcaacgtactctggggtgttcaggacacaaagggtcgatttataccagcaggcgtcccccccagatgcactccgctggattcctaagccctgggagcggaccggccctcccccacgcgaagggccatcacggagagccgaggaacctggcagccgaggggataaggagcctggactgccacctcccaggta

SEQ ID NO: 236243 - DNA, 1650 bp, synthetic construct
  misc_feature 1..1650: note = Description of Artificial Sequence: Synthetic coding sequence
  source 1..1650: mol_type = other DNA
atgagtgacagatccgggccaaccgctaaggggaaggacgggaagaagtatagctccttaaatttatttgacacatacaagggaaaatccctggaaattcaaaaaccggcagttgcgccaagacacgggttgcaatcattgggcaaggtggcgatcgccagaaggatgccgcctccagcaaatctgccctcactgaaagccgaaaacaagggcaatgatcccaacgtgtctctggtgcccaaggacggtacaggctgggcttctaagcaggagcaaagcgatcctaagtcctcagacgcatccacggctcagcctcccgaatcacaacccctgcctgccagccagactccagcttctaatcagcctaaacgaccgcctgccgcacccgagaatactcccctggtcccttcgggggtgaaatcctgggcccaagctagcgtgacgcacggtgcccatggagacggcggacgggcttcttctctgttgagccggttcagccgcgaggaattccctacactgcaggctgccggagaccaggataaggctgccaaggagagggagtctgcagaacagagcagcggaccgggaccgagcttgcggcctcaaaattctacaacctggagggatgggggaggacgcggtccggatgaactagaaggcccagacagcaagcttcatcacgggcatgatcctagggggggacttcagccgtccgggcctccccagtttcctccttaccgcggaatgatgccccctttcatgtatcccccttacctgccatttccgcctccatacggccctcaggggccatatcggtaccccacacccgacgggccttcccgcttccctcgagttgccggacctcgaggcagcggccctcccatgcgtctggtggagcctgttggtcggcctagcatcctcaaggaggacaacctgaaggagttcgatcagctggaccaagaaaacgacgacgggtgggcaggcgcacacgaagaagtggactacaccgagaagctaaagttcagtgacgaagaggatgggagggattccgatgaggaaggggcagaaggacaccgtgatagccaaagtgcctctggggaagaaaggccacctgaggcggatggtaagaaaggcaattcccctaattcagaaccccctacacccaaaactgcttgggctgagacctcaagacccccagaaaccgaacctggccctccagcgccaaaaccacccctgcccccacctcaccgcggaccggcaggtaactgggggccacccggagattatccagaccggggagggcctccctgcaaacctcctgctccggaggatgaggacgaggcatggcggcagcggcgtaagcaatcttcctcagagatctctctggcagtggagagggcacggaggagacgtgaggaggaggagcgacgtatgcaagaagaaagacgcgctgcatgcgctgaaaaactcaaaagactggatgagaaatttggtgctccagacaagcgtcttaaggcagaacccgcagctcccccagctgctccctctacccccgcacctcctcctgccgctagcgaagtgccccttatggaggatagtcgtggacagcaacgggaccctccacgcggtcttgaggcccctcacccctag

SEQ ID NO: 236244 - DNA, 1650 bp, synthetic construct
  misc_feature 1..1650: note = Description of Artificial Sequence: Synthetic coding sequence
  source 1..1650: mol_type = other DNA
atgtcagataggtcaggccctacagcaaaaggaaaagacggcaaaaagtactctagcctaaatctgtttgacacctacaagggaaaaagtcttgaaattcagaaaccggcagttgcccctcgccatggactgcaaagtcttggaaaagttgcgattgctcgcagaatgccaccccctgccaatctgccttctctcaaagcagagaacaagggaaacgacccaaatgtcagcttagtccctaaagacggcactggctgggcttcaaagcaggagcaatctgacccaaaatctagcgacgcctctactgcccaacctccagagagccaacctctgcctgcgagtcagacccccgcatccaaccaacctaagcggccacccgctgcccctgaaaacacccctcttgtgcccagtggcgtcaagtcttgggcccaagcctcagttacccacggggctcacggagatggaggccgtgcttcctccctgctgtctcgtttcagccgcgaagagttccctactctgcaagccgctggcgatcaagacaaggcagccaaggaaagagagagcgctgaacaatcctctggaccaggcccttctcttcgcccacagaattctactacctggcgagatggcggaggcagaggcccagatgagctcgaagggccagactcaaagcttcaccacggccatgaccctcggggtggtcttcaaccctccggaccaccacagtttcctccctataggggaatgatgcccccatttatgtaccctccttatttacctttcccacccccttacggaccccaaggcccttacagatacccgaccccagatgggcctagtcgctttccccgagtagcaggacctcgaggatctggcccacccatgagacttgtcgaacccgtgggcagaccttcaattctcaaagaggataacctgaaggagttcgaccagctggaccaagaaaacgacgacggttgggcgggtgcgcatgaagaggtggattataccgagaagctgaagttttccgatgaagaagacggccgagactcagacgaggagggcgcagaaggacacagggactcccagtcagcttcaggggaggagcgcccacctgaggccgatggaaagaaggggaattcacctaatagtgagcccccaactcctaagaccgcctgggctgaaacatcccggccaccagaaactgagccagggcctccagcacccaagccacccctccctccccctcatcggggacccgcagggaattggggaccccctggagattaccctgatcgaggtggaccgccatgcaagccccctgctccagaggacgaggacgaggcctggaggcagcgaagaaaacagtcttcttccgagatttcactggccgttgagcgcgctcgccgacgtagggaggaggaagagagacgcatgcaggaagagaggagagctgcatgcgctgaaaaactgaaaagacttgacgaaaagtttggagcccctgacaaacgattaaaagcagagcccgcagctcccccagccgcacctagcacaccagctcccccacccgctgcctccgaagttccgctgatggaagatagtagaggccagcaacgtgaccccccaagggggctggaagcacctcacccctag

SEQ ID NO: 236245 - DNA, 4149 bp, synthetic construct
  misc_feature 1..4149: note = Description of Artificial Sequence: Synthetic coding sequence
  source 1..4149: mol_type = other DNA
atgctgcgggaaaggggcactccacccgtggatcctaagctcgcttgggttggcgatgtgttcaccgctactccggcagaacccagacctctgactagccctctgaggcaggccgctgacgaggacgacaaaggtatgcggagcgagaccccaccggtcccgcctccacccccttatcttgcgtcataccccggttttccagagaatggcgctccaggtcccccaattagcaggttcccccttgaagagcctggacctcgccctctgccttggcctcccggtagcgatgaagtggctaaaatccagacaccgcctcctaaaaaggaaccacctaaggaagaaaccgcacaactgacaggacctgaggctgggaggaaacccgcacgtggtgtcggttctgggggacagggaccccctccccctagacgcgagagccgtacagaaacccgctggggcccaagaccagggtcaagcaggcgtggcattccaccggaggaacccggtgcacccccacgtcgcgctggtcccatcaagaaaccgcctccccctacgaaggtggaagagctgccgccaaaacccttagagcagggtgatgaaacgccaaagccgcctaagcccgaccctctaaagattacaaaaggcaaattgggaggaccaaaagaaacccccccaaatggcaacttgtcgcccgctccgaggctacgcagggattattcgtatgagcgcgtgggacccacctcctgcaggggcaggggaagaggcgagtacttcgcacgtggtcgcggattccgtggaacctacggcggtcggggtcggggagcgagatctcgcgagttccggtcctacagagagtttcgcggtgacgacgggagagggggaggcactggagggcctaaccatcccccagctccaagaggcagaacagcttccgagacacgcagcgaagggtccgagtatgaggaaatacccaagcggagacggcagagaggcagtgaaactgggagtgagactcacgaatcagatctggcgccttccgataaggaagccccaaccccaaaggaaggcacacttacacaggttcctctggcaccgcctccgcctggggcaccacccagcccagccccagcgcgtttcacagctcggggaggcagggtcttcacgcccagaggggtgccatccaggcgcggtcgaggcggagggaggccgccaccccaggtttgccccggttggagccccccagctaaaagcctggctccaaagaagcccccaactggccctctcccaccgagcaaggaacccctgaaggaaaagctgattccaggaccactgtcccctgtggctcggggtggcagtaatggaggcagcaacgttgggatggaggatggcgaacggccaagacgtcggagacacgggagagcgcagcaacaggacaaaccacctaggtttaggagacttaagcaggagcgggagaacgccgcaagggggtccgaaggtaagccttcgctcactctgcctgcatccgcgcctggcccagaggaggctctgacaacggtcaccgtcgcgcctgccccacggagagccgctgcaaagtcccccgacctgagcaaccagaactctgaccaggctaacgaggaatgggaaaccgcttccgagtcaagcgactttacatccgaacggagaggagacaaggaggcccctcccccagtactcctgacacctaaggctgtcggtacacctggaggcggtggcggaggagccgtcccaggcatttcggcaatgtctaggggggacctcagccaacgcgctaaggatctgtcaaaaagatctttttcctcacagagacctggcatggaaagacagaaccggcgacccggaccagggggtaaagcgggttccagtggctcatctagcggaggcggtggaggcggacccggtgggagaaccggaccaggcagaggcgataagcggagttggcccagtcctaagaatagatcacgacctcctgaagagcggcctcctggccttccgttaccacccccacctccatctagctcagccgtgtttcgactggaccaggtgattcacagtaatccagcgggaatccagcaggcactagcccagttaagctcaagacaagggtcagtcactgcccctggagggcatcctcggcacaaaccgggaccgccacaagcccctcagggcccttcaccgagaccccctaccaggtatgagccacaaagagtcaatagcggcctgagctccgatccacattttgaagaaccaggccctatggtccgcggagtcggcggaacgcctcgcgacagcgctggagtctctccctttcctccaaagcggagagagagaccccctcggaaacctgagcttctccaagaggagtctctgccacctccccattcctctggctttctcggctcaaagccagaaggtccaggcccacaggctgagtcacgcgataccggaactgaggcgttgactccccacatttggaatcggctgcacactgccacatccagaaagtcataccgcccatcaagtatggaaccctggatggaacctctgtccccctttgaagatgtcgcaggcaccgagatgtcacaaagcgactccggggtggacctgagcggggactcccaggtgtcctctgggccttgctcccagcggtctagcccggatggcggattgaaaggagcagccgagggacctccaaaaaggcccggaggctcgagtcctctgaacgcagttccatgcgagggtcctcctggttcagagccacctcgccgaccaccccctgcacctcatgacggcgatagaaaggaattgccgagagagcagcccctgccacctggcccaataggcactgagagaagccagcacaccgatcgcggtacggaaccaggtcccattaggccatctcaccgccctggcccacctgtgcagttcgggacatccgacaaagactcagacctccggctggtcgtaggagatagtttgaaggccgagaaggagctgacagcatccgtaaccgaagccatcccggtgagcagggattgggaactgctcccaagtgccgcagcatctgccgagccccagtcgaagaatctggatagtggacattgcgtgcccgagccctctagcagcggccagcggctatatcctgaagtattctatggctccgccggaccaagcagctcacagattagtggcggagcaatggacagccagctccatcctaactcaggcggattccgacccggaacccccagcttgcatccataccgatctcaacccttatatctgcctcctggaccggcaccgccaagcgcacttctaagcggcgtggctctaaagggtcagttccttgactttagcacaatgcaggccacagaactgggcaagcttcctgcaggaggcgtgttgtatccaccgccatcctttttgtattcaccggctttctgtccttctccactaccagacacgtccctgctacaggtcaggcaagacttgccatctccgtcagatttttattcaacccccctacagcctgggggacagtctggatttctgccatctggtgcacccgcacaacaaatgctgctgccaatggtggatagccaactgcccgtcgtgaactttggctctttgccgcctgcccctcctcccgcaccaccctctctgtccctcctgcccgtggggccagctcttcagccaccttcactggcagtgaggcctccacctgccccagctacccgagtgctacccagtcccgctcgcccttttcccgcttcactgggccgagccgaacttcacccagtggagctgaagcctttccaggactatcaaaagctgtccagcaacctcggaggacccggatcctcacggacccccccaacgggtagaagcttttctggcctgaactcccggctcaaggccactccctctacatactctggcgtgtttcggacccagagagtcgatctataccagcaggccagcccccctgacgccctacgatggatcccaaaaccttgggagaggacaggtcctcccccacgggaaggcccttctcgccgagcagaagagcccggatcccgaggcgacaaagagcccggactgccgccaccaaggtag

SEQ ID NO: 236246 - DNA, 6416 bp, synthetic construct
  misc_feature 1..6416: note = Description of Artificial Sequence: Synthetic coding sequence
  source 1..6416: mol_type = other DNA
atgagtgaccgcagtggcccaactgctaaagggaaagatggtaaaaagtactcctcgctcaacttgttcgacacatacaagggtaagtccctggagatacaaaagccagcggtggcccctagacacggcctgcaatcactggggaaggttgccattgctaggcgaatgccacctcctgcgaacctgccttctctgaaagcagaaaacaagggaaacgatcccaacgtctctctggtgccaaaggacgggaccggatgggcgagtaaacaggaacagagcgaccccaaatcatctgatgctagtaccgcacagccccttgagagtcagccgctaccggctagccagacacctgcttccaaccaaccaaaacgccctcccgctgcgccagagaacacgccacttgtcccatccggtgtgaagtcatgggctcaggcctctgtgacccacggcgctcacggtgacggcggaagggccagttcgttgttaagcagatttagccgggaagagtttccgacgctgcaagctgctggggaccaagataaagcggctaaggaacgcgaatccgctgagcagagtagtgggcctgggccaagcctgagacctcagaatagcacaacgtggcgtgacggcggaggccgtgggccagacgagctagagggcccagactccaagctgcatcacggccatgacccacgcggtggactgcagcccagcggaccccctcagttccccccttaccgcggtatgatgccaccgttcatgtacccaccatacctgcccttcccacccccatacggaccgcaggggccttatagataccctacaccggacggcccatcccggttccccagagtcgctgggcctcggggaagcggccctccaatgcggttggtggagccagtggggcgaccgagcatcctaaaggaggacaatctcaaagaatttgatcagttggaccaggaaaatgacgatggttgggccggtgcccacgaggaggtcgattataccgagaagttgaaatttagtgacgaggaggacgggcgtgactctgatgaagagggcgcagagggacaccgcgattcccagtccgctagcggcgaggagcgacctccagaagctgatggaaaaaagggtaactccccgaacagtgaaccccctacaccaaaaaccgcttgggcagaaacttctcgcccacccgaaactgagccagggccacctgcacctaagccccctttgccccctcccggtgattatcctgacaggggaggcccaccctgcaagcccccagcccctgaagatgaagatgaagcttggcggcagagacgtaaacagagcagttccgaaatcagcttagccgtcgagcgcgcacgcaggcggagagaagaggaagagcgcagaatgcaggaggaacggcgagccgcttgcgccgagaaactgaagaggctggatgaaaagtttggcgcaccggataaacggctcaaagcagagccagctgcccctcctgctgccccttccactcctgctccgcctcccgctgtccctaaagaattaccagcccctccagcaccgcctcccgcatccgctccaacacctgaaaaagaacccgaagaaccagcgcaggccccaccagcacagagtacaccgacgccaggggtggccgctgcaccgacattggtgagcggcggtggatctaccagtagtacaagtagcgggagtttcgaggcgagccccgtcgaacctcagctcccctcaaaggagggccctgaaccgccagaggaggttccgccacctacgactcctcccgtgcccaaggtcgagcccaaaggggatggaattggccctacgcgacagcccccaagccagggcctaggctatcccaagtatcagaagtcactcccgcctaggttccagagacagcagcaggaacaactcctgaagcagcagcaacaacatcagtggcaacagcaccaacagggctctgccccacccacccctgtccctcccagcccaccacagcctgtgactctgggcgcagtgcctgcaccccaggcaccacctccaccccctaaggccctgtatcctggcgcactgggacgtccaccaccgatgcccccaatgaacttcgaccccaggtggatgatgatcccaccctatgtcgatccgcgactgctgcaaggtcgccctccgctcgacttctacccacccggagttcatccttcaggactggttccgagggagcgctcagattcagggggaagttcctcagagccattcgaccggcacgccccagctatgctgagagagcggggaactcccccagtcgacccgaaactcgcctgggtgggggatgttttcacggccacacccgctgagcctcgacccttgaccagtcccttgcgacaagccgctgacgaggatgacaaaggcatgagatccgagacgccacctgtgccacccccacctccatacctggcgagctatcccggatttccagaaaatggagcccctgggcctcccatttcgcgcttcccactcgaggaacccggacctcgccctctaccatggcccccagggtctgatgaggtggccaaaatacaaacacccccaccgaagaaagagccaccaaaagaggaaacagctcagttgactggccctgaagcaggtaggaaaccagcgcgtggcgtcgggtcgggaggacagggcccaccaccccctcggcgagagagtagaactgagacacgatggggcccacggccaggctcttcccgtagagggattcctccagaagagccaggagcaccaccccgaagagccggacccattaaaaagccacccccaccaactaaagtggaagagctgccccctaagccattggaacagggcgatgagactcccaagccgcctaagcctgacccactgaaaataacaaagggcaaattgggtggacctaaggagactcccccaaacgggaacctttccccagccccacggcttaggcgcgactattcatacgaaagggtggggccaacaagctgcagaggcaggggtcgaggggagtatttcgccaggggacggggattccggggaacgtatggtgggaggggcaggggcgcagccggtaattccgccgtgacagagagttttgaggaaatgatgggcgttgaggtgggccagggggaccagaccactctgctgctcccggaagctgctctacctgcacggcatggagcccgagtgcagtcaatgcgcaagagcccctcaggagcgggaagcggggctcagaaacaggccgctcggcctatgagggtgatttggcttctccagaccagaagactcccacatccgagacgcgagcactcaccacgaagtcgctccccaacaacacggtcccctacttttcccgctcctgctcgtttcactcccggagtgggggaaagtagtcttcccgaaggcatttcccccggaccaaggaggagggagcctccacaggtgtgtcccggttggtccccccctgctaagtcactcgctcctaagaaaccgccaacaggacctttgcccccttccaaagaacccttgaaagaaaagctcatccccggtcccctgtcccccgtggctcggggtggctccaatgggggaagcaacgtcggcatggaagatggcgaaaggccccgacgcagacggcatggcagagcccaacagcaggacaaacctcctaggttccggaggctcaaacaggagagagaaaatgccgctagaggctcggaaggcaagccttccctgactctgcccgcttccgcccctggtccggaggaggctcttaccaccgtgaccgtcgcgcctgcaccccgtagggctgcagcgaagagcccagatctctccaaccagaactcagaccaggccaatgaggagtgggagactgctagtgagagcagtgacttcacaagcgaaagacgcggagataaggaagcaccccctcctgtgctgcttactcccaaggccgtgggaacaccaggaggcggaggcggaggggcagtccccggaatctccgctatgtctagaggtgacctgtctcagagagctaaagatttgtctaagaggtcgttttctagtcaacgccctggcatggagagacagaaccggcgtccgggaccagggggtaaagctggcagctctggctctagtagtggcggaggtggaggaggaccaggcggtcgtacaggacctggccgaggcgacaagcggtcctggccttcgccaaaaaatagatcaaggccgccagaggagaggccacctggcttgccgctgccacctcctcctccgtcctcctccgcggtttttaggctggaccaggtgatccacagtaatccggctggaatccaacaggccctcgctcagctgagcagcaggcaagggtccgtgacagccccaggcggacacccaaggcacaaacctgggcctccgcaggccccacaggggcctagtcccaggcctcccactcgttacgagccacagagggtgaactctgggctctcatcagatccgcacttcgaagaacccggtcccatggtgagaggcgttggcggaacaccaagggattccgcaggagtctctccttttcctcccaagcgtcgggagaggcccccacgtaagcctgaactgctgcaggaggaaagcctccccccaccacattcttcggggtttttaggctccaaacctgaagggccaggccctcaggccgaatctcgggacaccgggacagaagcactgaccccacatatttggaacaggctgcatactgctacaagtaggaaatcataccggccttcttctatggaaccttggatggaacctctgtcccccttcgaagacgttgcgggtacagagatgtcccagagcgattctggagtggacctctccggtgatagtcaagtgtcttcaggaccatgttcacagcggtccagccctgatggaggtctgaagggcgctgccgagggccctccgaagaggccaggaggatccagtcccttaaacgcggtcccttgtgaggggccaccaggatctgaacccccacggagaccacccccagcccctcacgacggcgaccgcaaagaactccccagggagcagcctcttccccctggtcccatcggaaccgaaaggtcccagagaaccgatagaggcacagagccaggacccatcagaccctctcatcgtccaggtccaccagtgcagtttggcacttctgataaggactctgacctgcgtctcgtcgttggagacagcttgaaggcagaaaaagaacttacggccagtgttactgaggctatccccgtgagtagggactgggagttacttcccagcgccgctgcttccgctgaaccacagtccaagaatttagatagtggtcattgtgtaccggagccctctagctccggacagagactctaccccgaggttttttacggctccgccggtccttcgtcttcgcagatcagcggcggacatgggctctccatcacaagtaagcaatggcgcaggcccggaacacccagcttgcatccttataggagccagccactgtatcttcctccagggccagcgccaccgtctgccctgctgtctggagtagccctgaaggggcagttcttggatttcagtacaatgcaggccaccgaactaggcaagctgcctgcgggtggcgtgctgtatcctccaccgagctttctgtatagcccagcgttctgtccgtcaccgcttccagacacctccttgttgcaggtgcggcaggacttgccaagtccctcagacttctactccacgccgcttcagcccggtggccagagtgggtttctgccctccggagctccagcccagcaaatgttacttcccatggttgacagccaactccccgtggtgaacttcggctccctgccgcctgcgcctcccccagccccaccacctctcagcttgctgccggtggggccagctttgcagcccccatctctggctgtgaggcccccacccgctccggcaacacgtgttctcccaagccctgcaaggccattcccagcttctctgggccgtgcagagctgcacccagtagaactaaagcctttccaggactatcagaagttgagttctaacctcggcggtcctggatccagccgcacccccccaaccggaagaagctttagcgggctgaactctcgccttaaggccactccaagcacatactccggtgtcttcagaacccaacgcgttgatttataccaacaggcctcaccccctgatgccttgagatggattcctaagccgtgggagaggaccggccctccaccaagggaggggccatcacgacgggctgaggagccagggtctaggggggataaggagcccggactcccacctcctcgcta

SEQ ID NO: 236247 - DNA, 6416 bp, synthetic construct
  misc_feature 1..6416: note = Description of Artificial Sequence: Synthetic coding sequence
  source 1..6416: mol_type = other DNA
atgagcgatagatccggcccaaccgccaagggcaaagacggtaaaaagtattcctcactgaatctgttcgatacttacaagggtaagagcttggaaatccagaagccagccgtcgctcccaggcacggactgcagagcctgggcaaagtggctatcgctcgaaggatgccacctccggctaatctgccttctttaaaggccgaaaataaggggaatgatccaaatgtctctctcgttcctaaggacggcaccgggtgggcctcgaaacaggagcaaagtgatccaaaatctagcgacgccagcaccgctcagccccctgaatcacagcccttaccggcttcacagacccccgctagtaaccagcccaagaggccccctgctgctcccgagaacactccacttgtgccctccggcgtcaagtcctgggcccaggccagcgtgacacacggagctcacggagatggtgggagagcatcttcactgctgtcacgtttcagcagggaggagttccctaccctgcaggccgcaggggatcaggataaagcagccaaggagcgggagtcagcggaacagtcatccggccctggacctagtcttagaccacaaaatagcactacttggagagacgggggaggaagaggacctgacgagcttgagggacccgacagcaaactgcaccacggccacgatcccagggggggactgcagccctcagggccaccacagtttcctccatatagggggatgatgccaccgtttatgtaccctccctatctgcccttcccacccccatacgggcctcagggtccatatagatacccgacacctgacggtccttctcgctttccaagggtggcagggcctagaggcagcggaccccctatgaggttggtcgaacctgtcggaagaccctcgattctgaaagaagataatcttaaggagtttgaccaactcgaccaagagaacgacgacgggtgggccggagcccacgaggaggtagattacactgaaaaattaaaattcagtgatgaggaagatggacgcgattcggatgaggaaggggcagaagggcaccgcgattcccagtccgcttcaggggaggaacgtccgccagaggcagatggcaaaaagggcaattcaccaaacagtgaacctccaacaccaaagactgcttgggctgaaacaagccggcctcctgagaccgagccgggaccgcctgctcccaaaccgccactccccccaccgggtgattatccagaccgcggtggaccaccctgcaaaccccctgctccagaagatgaggatgaagcctggaggcagcggaggaaacagtcttcttccgagattagtctcgccgttgagcgtgcacgcaggcggagggaagaggaagagcgacgtatgcaggaggaaagaagggcggcttgcgcagagaaactcaagcgattagacgaaaaatttggtgccccagataaaagattaaaagcggagcccgctgcaccaccagccgctcctagcactcctgccccaccacctgcagttccaaaggagctccccgcaccccctgcccctcccccagccagcgcaccaacaccagagaaggagcctgaagaaccagcacaggcccctcctgcccagtctacccctactcctggcgtcgcggctgcacccacgctggtctctggcggtgggagcactagcagtacttcctccggctcctttgaggccagcccggtcgagcctcaattgccatcaaaggagggaccagagccaccggaagaggtgccccctcctacgacaccacctgtacccaaggtcgagccaaaaggtgatggtattggaccaactaggcagcctccatctcaggggctgggctatcccaaataccagaagtcactgcccccaagatttcagagacagcagcaggaacaactccttaaacagcagcaacagcaccagtggcaacagcatcagcagggctctgctccccctacccccgtgccccctagtccccctcagcccgtgacgctgggagccgtgcccgcaccacaggcacccccacctcccccaaaggctctttaccccggagccttaggacggcctcccccaatgccacctatgaacttcgatcctcggtggatgatgattccgccttatgtggatcccagactcctgcaaggcaggccacccctagacttctaccctcccggagtccacccatccggtctcgtccctagggagcgaagtgacagtggagggagctcttccgaaccttttgataggcacgctcccgctatgttgagggagagaggtacaccgccagtggatcccaaactcgcatgggtgggtgacgtatttactgcaaccccagccgaacctcgtcctctgacctccccccttaggcaggccgctgatgaggacgacaaaggaatgagaagtgagacaccacccgtgccacccccacccccatatcttgcttcatatcccggatttcccgagaacggcgcaccaggaccgccaattagccggttccccctggaggaaccaggccctaggccgctgccctggccacctgggtccgatgaggtggccaagatccagaccccaccacccaaaaaggaacctcctaaggaggagacagcacagctgaccggcccagaagccggtcggaagccagccagaggcgtggggtcaggaggtcaaggtcctcccccaccccgtcgtgaatcccggacagaaactaggtgggggcctcggccaggttcctctaggcgcggaatcccacctgaggagccgggagccccacccaggagagctggacccattaaaaagcccccacccccaacaaaggtagaggagctgcctcccaagcccctggagcagggcgatgagacgcctaaaccccctaagccggacccattaaaaattacaaaagggaagctgggaggcccaaaggaaacaccacccaatggcaacctcagccccgctccccgtttgcgtagagattacagctacgagagggtcggacccaccagctgtagagggcgtgggcgaggtgaatatttcgctcgaggacggggattcagggggacatacgggggaaggggcaggggcgctgcaggcaatagtgcagtgacagaaagctttgaggaaatgatgggcgtcgaggtcggccagggagatcagacaacactgttgctgcctgaggctgcgctgcccgctcgacatggagccagggtgcagagcatgagaaaatcaccttcaggtgcagggtccggagcacaaaaacaagcggctcgcccaatgcgcgttatatggctcctgcaaacccgaagactacctcatccacgccgtgagcattccccaagatcacggagtcctacaacccgaagtccgaccttccccgcaccagccaggtttaccccaggggtgggagagtctagcttgccggaaggcatttccccaggcccaaggaggcgcgaaccccctcaagtctgtcctggctggagcccaccggctaagagcttagccccaaaaaagccacccacggggccactaccgcctagtaaagagcccctgaaagagaaactgattcctggccctctaagcccagtcgcacgcggaggctccaacggcggatcaaacgtggggatggaggatggagagcgaccaagacgacggcgacatgggcgagctcaacagcaggacaaacctcctcgatttcgccgtctaaagcaggaaagggaaaacgcagcacgcggttctgaagggaagccctcccttaccctgcccgcttcagcccctggccctgaggaggccttgaccacggtgaccgtggcccctgccccacgacgagcagcagcgaaatcccctgatctcagcaaccagaattcggaccaggctaacgaagaatgggagacagcgtctgagtcctcagattttacgagtgagcgacggggtgacaaggaggcaccaccccctgtccttctcaccccaaaagccgtggggacacctggaggaggcggaggtggcgctgtcccaggcatcagcgctatgagtcggggtgacctgtcccagcgcgcaaaggacctgagcaaaaggagttttagctcacagcggcctgggatggagcggcagaatcggagacccggacctggagggaaagcaggctcgtctgggtcttcttctggcggaggcggagggggacctgggggacggaccgggccaggacgtggagataagagaagctggccatccccaaagaataggtcacggcctcccgaagagagaccccctgggctccctctgccaccgcctcccccatcctcctctgctgttttccgattagaccaagtcattcacagcaatccggctggaatccagcaggccctggcccagttgagcagccgtcagggttctgtcaccgccccaggcggacaccccaggcacaaacccggtcccccacaggctccacaggggccatcaccccgacccccaaccaggtacgagccacagagagtgaacagcggactctcgtccgacccacactttgaggaaccagggcctatggtgcgcggagtgggtggcacacctcgggattcagccggagttagcccatttccacccaagaggagggaacgcccaccaagaaaacctgagctgcttcaggaggagtccttgccccctcctcattcctcgggtttcctggggtccaaaccagaggggccaggtccacaagcagagtcccgggataccggcactgaagctttgacacctcatatttggaataggctacatactgctacgtcgcgcaaaagttataggccaagcagcatggagccctggatggaacccctgtccccctttgaggatgtcgctgggactgagatgtctcagtctgacagtggagttgacctgagcggggacagccaggttagtagcggcccttgcagccaacgcagttcgcctgacggcggactgaaaggggcagctgaaggacctcctaagcgcccagggggttctagccccttgaatgcagttccatgcgaaggaccacctggtagtgagccacctagacgcccacccccagctccacatgacggggatcgaaaagagctgcccagagagcaacctctgccacccggacctatcgggacagaacgaagtcaacacactgatcgcggtactgaaccgggtccgattcgtccaagtcaccgacctggcccaccagtgcagttcggaacatcagacaaagacagtgaccttagactcgtcgttggtgactccttgaaagcagaaaaggaattaactgcatcagtgacggaggccataccagtgtctagggattgggaattgttaccttcagccgcagcctctgcagaaccgcagtctaagaacctggattctggccactgtgtcccggagccgagtagctccgggcaacggctctaccctgaggtcttttacgggagcgccggaccttctagcagtcagatatcagggggacacggcctgtctgtgacatcaaagcagtggagaaggcctgggaccccttccctccatccatatcgaagccaacccctttacctgccacccggaccagctccaccatcagccctgctttccggagtggcattgaaaggacagttcctcgatttctcaacaatgcaggccacggaactcggcaaacttccggcagggggagtcctgtatccccctccatcgtttctgtactcgcccgcattctgccctagccccctgccggacaccagcctgttacaagtgagacaagacctgccctctccatctgacttttatagcaccccgctccagcctgggggtcagtcaggatttttgccaagcggtgctccagcgcagcagatgctccttccaatggtagatagccaactccctgtggtgaacttcgggtcacttcctcctgcacctcccccagcacccccttcgctctcgcttctgcccgtggggccagctctccagccaccttccctagccgtgcggccaccacccgctcccgctactcgtgttctaccctctccagcacggccttttcccgcttctctgggcagagcagaactccaccctgttgagctcaaacccttccaggattatcagaaattgagctcaaaccttgggggtcccggatccagcaggactcctcccacagggagatcattttcaggtttgaactctcggctcaaggcaaccccatccacctactctggcgtgtttcgcacacagcgtgtggatctttaccaacaggcctccccgcctgacgccctgaggtggattcccaagccatgggagagaactggtccaccacccagagagggcccaagtcgtcgcgctgaggaacctggatccaggggtgataaagaacctggcctgcctccccctcggta

SEQ ID NO: 236248 - DNA, 6416 bp, synthetic construct
  misc_feature 1..6416: note = Description of Artificial Sequence: Synthetic coding sequence
  source 1..6416: mol_type = other DNA
atgtcagaccggtcaggcccaaccgcaaagggaaaagacggtaaaaagtattcatccttgaacttgtttgacacatacaagggcaagtccctcgaaattcagaaaccagccgttgcccctagacacggccttcagagtctcgggaaagtagcgatagctagaagaatgcccccacctgcaaatcttcccagcctgaaagctgagaacaagggcaatgaccctaatgtatcgctggtgcctaaagatggtactggctgggcaagtaaacaagagcagtccgaccctaagtcgtctgacgccagcaccgcgcaacctccggagagccaacccttgcctgcatctcagacacctgccagtaaccagccgaagagacctcccgctgctccggagaatacacccttggtgccctccggcgtgaaatcctgggctcaggcaagcgtaacccacggggctcatggcgatggaggaagagcaagtagcttactgtcacgattctcgcgtgaagagttcccaactctccaagcagccggagaccaagacaaagccgcaaaggagagagagtctgctgaacagtcttcaggtcctggccctagtttaagaccccagaacagcacaacgtggcgcgacggcggtggtcgaggcccagacgagctggaaggccctgacagtaagctgcatcacgggcatgatcctaggggaggcctccagcctagcggccctccgcaattccctccctatcggggaatgatgcccccattcatgtatccaccctacctgccgttcccccctccgtatggaccccagggcccatatcgctaccctaccccagatgggccttcccggtttcctagggtggctggtccgcgaggctccggaccccctatgaggctggttgagcccgtgggaagaccgagcattttaaaggaggacaaccttaaagaattcgatcagctggaccaggaaaatgacgacggatgggctggcgcacacgaagaggttgattacacggagaaactcaaattctccgacgaggaggatggtcgcgattcggatgaggagggagctgagggtcaccgagattcccagtccgcctctggcgaagaacgccctcccgaggctgacggcaagaagggaaatagtcccaatagtgagcccccaacgccaaaaactgcttgggcggagacgtctaggccacctgagaccgagcctggcccaccagccccaaaacctcccctgccccctccaggcgactacccggatcggggaggccctccatgcaagccacccgctcccgaggacgaggacgaggcatggaggcagcggagaaagcaatccagctccgagatttcgctggctgtggagagggccagaaggagacgcgaagaggaagaacgacggatgcaggaggagcgtcgagccgcatgtgctgagaagctcaagcggctggatgagaaattcggagctcctgataaaagactcaaagccgagccggcagcaccacccgctgcaccctcgacacccgctcctccacccgcagtcccaaaggaactacccgcaccacccgcacctccaccggctagtgcccctactccagagacagagccggaggaacccgcacaggcccctcccgctcagtcaacaccaaccccgggtgtggcagccgcacctacactcgtgagcgggggagggagcacgagctccacttcaagcggttcttttgaggccagtcctgtggagccgcaactgccatctaaagagggccctgagccccctgaagaggtgccgccaccgactacccctcctgtgcctaaagtcgagcctaaaggggatgggataggaccaacaaggcaaccaccatcccaggggctgggataccctaagtaccagaagagcctgcctccgaggttccagcggcagcagcaggagcagctgctcaaacagcagcagcagcaccaatggcagcagcaccagcaggggtcagcccctcctacgccagtgccacccagccctccgcagcccgtcacgctcggagcagtgcccgctccacaggctccccctcctcccccaaaggcgctgtacccaggcgctctgggacgtcctcctcctatgcccccaatgaatttcgacccgcgttggatgatgatcccgccatatgtagaccccaggctgcttcaaggtcgacctcccctcgatttctaccctccaggagttcatccttcgggtctggtccctagggagcgcagcgacagtggaggatcgagcagcgaaccatttgaccggcacgcacccgcaatgcttagagaaagagggactccccctgttgaccctaagctggcctgggtgggcgacgtgtttactgctacacctgctgagcctcgcccattaactagcccgctgcggcaggcagccgacgaagacgacaaaggcatgcgttctgagacccccccagtgccaccgcctcccccttacttagcctcgtatccagggtttcctgaaaatggggcacccggacccccaattagccgttttcctctggaggagcccggaccgcgacccctaccctggccccctggttctgacgaggtggcaaagatccagactccgccacctaaaaaagagccgccaaaagaagagacagctcagctgacagggccagaagccggacgcaaaccggcacgaggggtcggttccggaggccagggcccaccccctcccagaagagagagtaggaccgagactagatggggccctcgccctggaagttctcggcgaggcatcccaccggaggagccaggcgcacccccaaggcgagcagggccaatcaaaaagccaccaccacccacgaaggttgaggagctcccccctaagccactcgagcagggtgatgagactccaaaacctcctaagcccgatccactgaagattactaaaggtaaattggggggacctaaagagacacccccaaacggtaatctgtctcctgcccctcgcctccgacgtgactattcctacgagcgggtaggtcccaccagctgtagaggcagaggcagaggcgagtactttgcacgcggacgaggctttaggggcacgtatggcggacggggaaggggggcagccggtaattctgccgtgactgagtcctttgaggaaatgatgggggtagaggttggacagggagatcagaccactcttcttttgcccgaggctgccctgcccgctaggcatggtgcgagggttcagtccatgcgcaagtccccttcaggagcgggttctggagcacagaagcaggccgctaggcctatgagggtgatttggctgctacagacccgaagattgccacacccacggagggagcacagcccaaggtcgcgcagtcctactacacggagtcccacttttcctgcgcctgccagatttacccccggtgtgggagagtcaagcttgcctgaaggcatcagccctggacctcgccgacgcgagcctcctcaagtctgcccgggatggagcccccctgccaagtctctcgccccaaaaaaaccccctactggtccactgcctccctccaaagaacctctgaaggaaaagcttatcccgggtccactgagtcccgtagccaggggcggttccaatggcggatccaacgtgggaatggaggacggggagagacccagacgaagacgtcacggcagagcccagcagcaggacaagccacctaggttccgaaggttgaagcaggagcgggaaaatgcagctcggggtagcgagggtaaaccttccttgacattgcctgcaagcgcgcctggcccagaggaagctctgaccacagtaaccgtcgcgcctgcccctaggagagctgccgctaagtcacccgacctcagtaaccaaaattctgaccaggctaacgaggagtgggaaaccgccagcgaaagttcagacttcactagtgagagacgaggggacaaagaggctccaccaccagtgctgttgactcccaaggccgtgggcaccccaggcggtggagggggaggagcagtgcccggaatttcagccatgtctagaggggacctgtcgcagcgagctaaggatctaagcaagcgttccttctcttcgcagaggccgggaatggaacgccagaataggcggccagggcctggcggtaaagcgggaagttccggaagtagttcaggtgggggaggcggaggcccaggaggaagaaccggcccaggacgaggggacaaacgatcgtggcccagcccaaaaaacaggagccgcccacccgaggagcgtcctcccggtttgcctctgcccccacctcctccgtctagcagtgccgtgtttcggctcgatcaggtcatacactccaaccctgctggtattcagcaagccttggcacagctgtcctcccggcaagggagcgtgaccgctcccggaggccacccaagacataaacctgggcttccacaggcaccgcagggcccttcgcccagaccaccgactagatatgagccccagagggtgaatagtggcctctcaagtgacccccattttgaggagccaggccctatggtgcgcggtgtgggtggtaccccacgtgactctgccggtgtctccccattccctccgaagcgccgagagcgcccacctcggaagcccgagctgttacaagaggagtcactcccgcctccccacagctccgggtttctgggaagcaaacccgagggacctgggcctcaagcggagtcaagagacacaggtaccgaggctctcactccacatatctggaacaggttacacactgccacctcacgaaagtcttacagaccttcttccatggaaccctggatggagccactctctcccttcgaagacgtcgcaggcacggaaatgagccaatctgatagcggggtcgatctatccggcgacagccaggtatctagtggcccatgttcacagaggagcagccctgatggtgggctgaagggtgctgcagaaggacctcctaagcggccaggtggaagctcccctttgaacgccgtaccctgtgaaggcccaccagggtccgaacctcctagaaggcctccacccgctcctcacgacggggatcgtaaagagctccccagggaacagcctctgcctccgggaccaatcggtaccgaacgatctcagcgaacggacagaggcacagaacctggtcccatcaggcccagccatcggcctggccctccagtgcagtttggcacgagcgataaggatagcgacctgcgcctggtggtaggtgacagtctcaaagccgaaaaagagctgacagcctcagtcaccgaggcaatccccgtatccagggactgggaactgctgccctctgcagccgcaagcgccgagcctcagagcaagaatttggactccggacactgtgtccccgagccctccagcagcggccagcgcctgtaccccgaggtattttatggttctgccggtcctagcagctctcagatctcaggagggcatggactctcaatcaccagcaaacagtggcgaaggccaggtacccctagccttcatccatatagatcacaacctttatacctgcctcccggaccagcgccaccctcagcactcttatctggagttgcccttaagggccagtttctggatttttctaccatgcaggccaccgaactgggcaagttacccgcaggcggtgtcctatacccgccaccctcattcctctactcacctgccttttgtccctcccctctgcccgacaccagtcttcttcaagtacgacaagatctccctagcccttccgatttctatagcactccactgcagcctggcggacagagtgggttcctcccatccggagcaccagcccaacagatgctactgccaatggtggattcccagctgcccgtggtcaattttgggtctctgccccctgcaccaccgccagcccctccacccctatctctgctgcctgtaggtccagcacttcagccaccttcactcgccgtcagacccccacctgcaccagcaactcgcgtacttccatctcctgccaggccctttcccgcttctctaggcagggccgagcttcaccctgtggagctcaagccctttcaggattaccaaaagttatccagtaatcttggaggccctggaagcagtcgcacaccacccactggacggtctttctccggactcaactctaggttgaaagcaactccttcgacatatagcggagtgtttaggactcagcgcgttgatctgtatcaacaagcgtctccacccgatgctctccggtggatccctaagccttgggagagaacaggcccaccccctcgggaaggcccttcacgacgagccgaggaaccaggatcaaggggagataaggaaccagggctgccgccaccgagata

SEQ ID NO: 236249 - DNA, 6416 bp, synthetic construct
  misc_feature 1..6416: note = Description of Artificial Sequence: Synthetic coding sequence
  source 1..6416: mol_type = other DNA
atgtcagacagaagcggccctacagccaaaggcaaagatggcaaaaaatatagctcgctcaatctctttgatacctataagggtaagagcttggaaatccaaaaaccagcagttgcccctcgtcacggactgcagtctctcggaaaggtggcgattgcccgacggatgcccccacccgctaaccttcccagcctgaaagctgagaacaaaggtaacgatccaaacgtgtcgctagttcctaaagacgggacagggtgggctagtaagcaagaacagtctgaccctaagagctcggatgcttccaccgcccagccaccagagagtcagcccctccctgcctctcaaacaccagcctctaaccaacctaaacgccctccagcagcgccagagaacactccactagtaccatccggggtcaaatcctgggctcaggcttcagtcacccatggggcacacggggacggtggaagggcttcctctctgctgtctagattcagccgcgaagaattcccaacgctccaggcagcaggcgaccaggataaggccgctaaagaaagggaatcagccgaacaatcttccggaccgggtccttctctaaggccccagaattccacgacttggagagatggcggagggagagggcctgatgaactggagggtcccgatagcaagctgcatcacgggcatgacccgaggggagggctccaaccatccggaccgcctcagtttccaccttaccggggtatgatgcctcccttcatgtatcctccatacttgcccttccccccaccatacggccctcagggcccttatcgttatcctactccagacggcccatcccggtttccacgtgtggctggacctagaggaagcggaccacctatgcgtctagtggaacccgttggtcgcccatccatcctgaaagaggataatctcaaagagttcgaccaactcgaccaggagaatgacgatggatgggccggtgcacacgaggaagttgattacacagagaaactgaagttttccgacgaagaggatggtcgggactccgatgaagaaggcgctgaaggccatcgggacagtcagagtgcctctggggaagagaggccgcctgaagcggacggcaaaaaagggaactctccgaactcggaacctcctacaccgaagacagcctgggcagagacttcaaggccccctgagaccgagccagggccaccagcacctaagcccccactgcctcctccaggcgattaccctgaccgcggagggcctccttgcaagccccctgcgccagaggatgaggacgaggcatggcgtcagaggcggaagcagtccagctcagaaatctccctggccgtggaaagagccagacgcaggagagaggaggaggaacgacgcatgcaggaggaaaggcgcgctgcgtgcgctgagaagttgaaacgactggatgagaagttcggtgccccagataaaagactgaaggccgaacccgctgctccgccagccgctccctcaacaccggcaccccctcccgctgtgcctaaggagttgcctgcccctcctgccccacccccagcttcggccccaaccccagagaaggagcctgaagaaccagctcaagccccaccagcacaatccacacctacccccggagtggccgcagcccctaccctggtctctggcggagggtccacctcatctacctcaagtggctcttttgaagcctctcccgttgaaccacagttaccttcaaaggaaggccctgaacctccagaggaggtacctcctcccacaacgccacccgtcccaaaagtcgagcctaaaggcgacgggataggaccgacacgacagccaccctcccaaggactcggttacccgaagtaccagaagtccttgcctcccagatttcaacggcagcagcaggagcagctcttgaaacagcagcaacagcaccagtggcagcagcaccagcaggggtcggcgccaccaaccccagtgccaccaagtccccctcaacctgtgaccttgggggctgtgcctgcacctcaagcccctcccccaccacccaaagccctctaccccggagcactgggcagacctccccctatgccccctatgaattttgatccacgatggatgatgatcccgccatacgtagaccctagactcttacagggaaggcctcctttggacttttaccctccaggcgtgcacccttcgggtctcgtgccacgggagaggagcgatagtgggggatccagcagcgaacccttcgacaggcacgcccctgcaatgctgagagaaagaggcactcccccagtggaccctaaactcgcttgggtgggtgatgttttcactgctacgcccgctgaacccagacctctgacaagcccactgcgccaggcagccgatgaggatgacaagggtatgaggtctgagacgccaccggtccccccaccccctccctatctcgcaagctatcccggtttccccgaaaatggcgctccaggacctccgatttctcgctttcccttggaggaaccaggacctaggcccctgccctggcctccaggatctgatgaggtcgcgaagatccagacacctccaccaaaaaaagaaccccctaaagaagaaacagcccagctgactgggcctgaagcaggacgcaaaccggctcgtggtgttgggagcgggggacaggggccaccaccgcctcggcgtgagagtaggacagaaacacggtgggggcctagacccggatcctcacgaagagggatccctcctgaagaacctggagcccctccaaggcgagccggaccaataaaaaagcctcctccacctaccaaagtggaagaattgccccctaaacccttggaacagggggatgagacgcccaagccacccaagcctgaccctctcaaaatcactaaggggaaactaggcggtcctaaagaaacacccccaaacgggaacctctcccctgctccacggctgagaagggattatagttacgagcgagtaggacctaccagctgccggggacgtgggagaggggaatacttcgcccgtggaagagggttccgcggtacctacggaggcagaggcaggggcgctgccggtaacagcgctgttaccgagagttttgaggagatgatgggtgttgaggtaggccagggggaccagaccacactgcttctgcctgaggcagcattaccagcgagacatggcgctagagtgcagagtatgcgcaaaagtccctccggggctggatcaggcgctcaaaaacaggcagcacggccaatgagggtgatatggttactacagactcgacgcctgccccatccgcgaagagaacacagccccaggagccgttctcctaccactcgctccccgaccttccctgcgcctgcacggttcacgccaggcgtaggcgaatcctccctgcctgagggcatctctcctggccctcgcagaagggaacctccccaggtgtgtcccggttggtcccccccagcgaagtctctggcaccaaagaaacctccgactgggccactgccaccaagcaaagaacctctgaaagaaaaactaattccgggacctctctctcccgtggctcgtgggggtagtaacggcggaagcaatgtgggtatggaagatggggagagaccgagaagacgcagacatggcagagcacagcaacaggataaacctcccaggtttcgacgactgaagcaggagagagagaatgccgctcgcggaagcgagggaaagccatcccttacgctcccagcatccgcacccggtcccgaggaggccttgaccacagtaactgtcgcccctgccccacgcagggccgctgctaagtcccccgatctttcaaaccagaacagcgatcaggctaacgaagaatgggagaccgcctccgaatcatctgacttcacatccgaacgcaggggtgataaggaggcacccccacccgtgctgctgacgcctaaagccgtcgggacgcccggaggaggaggcggaggcgcagttcccggaatcagcgctatgtccaggggggatctgtcacagcgagctaaggatctcagcaaaaggtctttctccagtcagagaccaggcatggaacggcagaaccggagacccggtccaggcggtaaagcaggatcgagcggatcctcttcaggcggaggaggcggaggcccagggggtcggaccggaccgggtaggggtgacaaacggagttggccctccccaaaaaataggtcccgcccacccgaagaacgcccaccaggactacctctcccccctccacctcctagcagtagcgcagtttttcgcctggatcaggtaatccactcgaatcctgccggtatccagcaagcactggctcagctttcaagccgccagggttcagtcaccgctccaggcggacaccccaggcacaaaccaggaccacctcaagccccacagggccctagccccagacccccaacaagatacgagccccagagagtgaatagtggcctgagctccgacccccatttcgaggaacccggtcctatggtccgaggcgtgggcggaacacccagggactcggctggagtgtctcccttccccccaaaaagacgggaaaggcccccaagaaagcctgaactcttgcaagaggaatccttgcccccacctcattcctcagggtttctaggttcaaaacccgagggcccaggaccgcaggcagaaagccgcgacacgggcaccgaagctctgacaccccacatctggaacaggcttcacacagccacaagcagaaagagttaccgtccgtcctccatggagccatggatggagcctttgtctccttttgaagatgtcgcgggtaccgagatgtctcagagcgatagtggagtggacctgagcggtgacagccaagtgtcttccggcccttgttcacagcgatcctcccccgacggtgggctcaagggagccgcagaagggccaccgaaacggcctggcggttccagccccttaaacgctgtgccctgcgaaggcccacctggctctgaacctcccaggcgaccgccacccgctccccacgatggtgaccggaaagagttgcctagagaacagccgctgcctccgggacctatcgggaccgagaggtcccagcatacagacaggggcacggagccaggaccaattcgacctagtcaccgcccaggcccaccggtccaatttggcacatcagacaaagactccgatcttcggctcgtagttggtgattcgctgaaggccgagaaggaactcacggccagcgtgacggaggctatcccggtgagccgcgactgggaattactcccctccgcagcagcgtccgctgagcctcaatccaagaacctagattccggccactgtgttccagagccgagtagctcaggccagcgcttgtacccagaggtgttttacggaagtgctggccctagcagcagccagatttcgggaggccacggcctcagtgttacaagcaagcagtggcggagaccgggaacccccagcctgcacccatatcggagccaacctctctatttgccaccgggacccgcacccccttcggccctcttgagcggagtagctctcaaggggcagtttctggatttcagcacaatgcaggccacggaactgggcaagctccctgccggtggtgtgctctatccaccaccaagtttcctatacagcccagcgttctgcccgtcgccactgccagacacctccctccttcaagtgagacaggatctgcctagtccctcggatttctattcgaccccgctgcagcctgggggacaatctggcttcttgccttctggtgcccctgcccagcagatgctcctcccaatggttgattcccagcttcctgtggtgaatttcggaagccttcctccagctccgcctcctgctccccctagccttagccttctgcccgtgggaccagcattgcagcccccttccctcgctgtccgtcccccaccggcacccgcaacccgcgtcctgcccagccctgctaggcctttccccgcttcactggggagggctgaactgcacccagtggaactcaaacctttccaggattatcaaaaactgtcaagcaatctagggggacctgggagttcaaggacaccccctaccggcaggtcattctccggcctgaattctcgcctaaaagcgactcccagcacgtactcaggagtattccggacccagcgcgtcgatctctaccagcaggccagtcctcccgacgcactccggtggatccccaagccttgggagcgcacaggacccccaccccgtgaggggccaagtcgcagagctgaggagcctggatctcggggagataaagagcccggactgccaccccctagata

SEQ ID NO: 236250 - DNA, 6416 bp, synthetic construct
  misc_feature 1..6416: note = Description of Artificial Sequence: Synthetic coding sequence
  source 1..6416: mol_type = other DNA
atgtcagaccgcagcggccctacagctaaaggcaaggacggcaagaagtactcatcattaaatttattcgatacttacaaaggcaaaagcctggagatccaaaaaccagctgtagccccaaggcatgggctgcagagcctcgggaaagtagccatcgctcggcgtatgccccctccagctaatctgccctccctgaaggcggagaacaaagggaatgaccctaacgtgtctcttgttcctaaggacggcactggatgggcctccaagcaggagcaatctgatccgaaatcatccgacgcctcgactgcccagcctcccgagagtcaacctctcccagcttcccaaacacctgctagcaaccagcccaagaggccacccgctgcaccagagaacactcccctcgtaccgagtggggtcaagtcttgggcccaagctagtgtgacccacggcgcacacggagatgggggtagagcatcctctctgctatcccgcttttctagggaggagttcccgacactacaggcggctggcgaccaggacaaagccgcaaaagagagggaatcagccgagcagtctagcgggcctggccctagtctccgtccacagaacagcacgacctggcgggatggcggaggtagaggacccgacgagcttgagggcccagactccaaactgcaccacggccacgacccaagaggaggcctccagccctcagggccacctcagtttcctccataccgcggtatgatgccacccttcatgtatcccccttacctgcccttcccacccccatatggaccacaaggcccatataggtacccaactcctgacggaccgtcaagattccccagagtggctgggcctcgcggtagcgggcctcctatgaggctcgtcgagcctgttgggcgtcccagcattctcaaagaagacaatctcaaggagtttgatcagctggatcaggagaacgatgacggctgggcaggtgctcatgaagaggtggattatacagagaagttaaagttctcagatgaggaagacggaagagatagtgacgaggagggcgctgagggccatagagatagccaatctgccagcggagaagagagaccaccggaggcagatggaaagaagggcaatagtcctaactcggaaccaccgacacccaaaactgcttgggctgaaacatctcgcccacctgagacagagcctggacctccagcccctaagccaccgctgccaccacccggagattacccagatcgaggtggtcctccctgcaagccgccagcgcctgaggatgaggacgaggcctggaggcagcgaagaaagcagtccagcagtgaaatctctttagccgtggaaagagcccgacggcgacgtgaggaggaagagaggaggatgcaggaagagcggagagcagcctgtgcagagaagctgaaacgccttgacgagaagtttggagcacctgataaacggttgaaagccgagcccgcagccccaccggcagcacccagcacacccgcaccccctccagctgtgcccaaggaactgcccgcaccgccagctcctccgccagcatccgctcccacgccagagaaagagcctgaagagcccgcacaggcccctccggctcagtcgacaccaacccccggtgtggcagctgcccctactttggtatctggcggaggcagcacgtcctccacgtccagcggaagcttcgaagctagccccgttgaaccccagctacccagtaaggaaggccctgagccccctgaagaggtccccccaccgactaccccgccagtgcccaaggtcgaacctaaaggcgacggcattggcccaacacggcagccgccttcccagggcctgggctacccaaagtatcaaaaatccctccctccacggttccagcgacaacagcaggaacaactcctaaaacaacagcagcaacatcagtggcagcagcatcagcaagggtctgcccctccaacaccggtccccccttctcccccacagcctgtgactctcggcgcagtgccagcgcctcaagcccctcctcctcccccaaaggctctgtacccaggcgctctaggacgtccgcctcctatgccccctatgaatttcgacccccgatggatgatgatccctccatatgtcgacccacgactcttacagggtaggccacctctagacttttaccctcccggtgtgcatccaagcggacttgtccctagagaacgcagcgattccgggggtagttcctcagagcctttcgacagacacgcgcctgcgatgctgcgggaacgtggaaccccaccggtagatcctaagctagcctgggtgggggatgtattcaccgcaactcccgctgagcctaggccactgacctcacccctgagacaagccgcagacgaagacgacaaggggatgcggtcagagactcctcctgtgcctcctcctccgccttatcttgcaagctacccaggattccctgaaaacggcgcacctggcccacccataagtcggttccccctagaagagcccggaccgcgacccctgccctggcccccaggcagtgacgaagtggctaagatacagacccccccacccaagaaagagccaccaaaagaggaaaccgcccagctgacaggccctgaagctgggaggaagcctgccaggggggttgggtccggagggcagggacccccaccccctcgacgcgagtccagaactgagacgaggtggggaccccgacctgggtcatccaggcgagggatcccaccagaagagcctggcgctccccctcgtagagcaggacctatcaagaaacccccaccaccgactaaagtggaagaactccctcccaagcctttggagcagggggacgaaaccccgaagccacccaaacctgacccgctgaagatcactaagggtaagctgggtgggccaaaagagaccccccctaacggcaacttaagcccagcacctagactgagacgagactattcctacgaaagggtgggccctacctcctgccggggaagaggtcgcggagaatatttcgccaggggtcgcggtttccgcggaacctacgggggaagagggcgaggcgcagccggtaactctgccgtaaccgaaagttttgaagagatgatgggtgtggaagttgggcagggagatcagaccaccctgcttctcccagaagcagctttgcctgcgagacacggggcacgtgtccagagcatgagaaaatcgcccagtggcgctggatctggcgctcagaagcaggccgctagacccatgcgggtaatatggctcctccagacaaggcgcctgccacatccacgtcgagagcactcaccacggagccggtctcccaccacgcgctccccgacctttcccgcacccgctcgtttcacccctggggttggcgagtcctctctccctgaaggcattagcccgggtccgcgaaggcgggaaccccctcaggtgtgtccaggctggtcaccacccgctaagagcctggccccaaagaagccccctacaggcccactgcctccttctaaagaacctctgaaagagaagctgatacctggccctctgagccctgtggcaagagggggtagtaatggtggtagtaacgtcgggatggaggatggtgagaggcctagaaggaggaggcatgggagagcacaacaacaggacaaaccgccaagattccggcgtctgaagcaggaacgcgagaatgcagctcggggatctgaggggaaacctagcctgaccctcccagcttcagcgccaggcccagaagaggctctcacaactgtcaccgtggcccctgcccctcgcagggccgctgcaaagtctcctgatctgtcgaatcaaaactcagatcaggccaatgaggagtgggaaacagcttctgagtcttccgactttacctcggagagaaggggagataaagaagcgccaccgcctgtgcttctaactccgaaagccgtcggcacgcccggtggtggaggagggggagcagtgccgggtatttccgcaatgtcaaggggagacctgtcccaacgggcaaaggacctctccaagagatcatttagtagtcagagaccgggaatggagcgacagaacaggcgtcccggtcctggtgggaaagcgggatcaagcggctcctcttccggaggtgggggtgggggtcctgggggtcgcacaggccctggaaggggtgacaaaaggagttggcccagccccaaaaatcgttcccggccacctgaggaacggccacctggtctcccgcttccccctccccctcctagttccagcgctgtatttcgcttagatcaggtgattcatagtaatccggcaggaattcagcaggctctggctcaactgagcagccgtcaaggcagtgtgacagcgccaggaggacaccctagacacaagccgggtcctccccaggctccccaagggccaagcccccgtccccctactcggtatgagccacagagagtaaatagcgggctcagttctgatccacacttcgaagagcctggcccaatggtgcgcggagtaggcggaacacccagagactcagccggagtcagtccctttcctccaaagcgccgagagcgtccaccaaggaaaccggagcttctgcaagaggaatctctcccacctccacactcttctgggttcctgggttccaaaccagaaggtcccggaccgcaggcagaatctcgtgacacaggcaccgaagctctgactccccacatttggaatcgtctccacactgccaccagccggaagtcgtatcgcccttcgagcatggaaccatggatggagccactgtcacccttcgaagatgtggccggaaccgaaatgtctcagagtgacagcggtgtggacctgagtggtgattctcaggtgagctcgggaccttgcagtcagcgctcaagccctgacggcggtctgaagggggcagctgaaggccctcccaagaggccaggagggagctctccattaaatgccgtgccctgcgaaggtccacccggttccgagccccctcggagaccccctccagcccctcatgatggggatcgcaaggaactgcctcgcgagcaacccttgccacctggccctatcggaactgagcggagtcagaggacagaccggggtactgaacctggtcctatccggccttcacatcggcctggccctcccgtccaattcggaacatctgataaagactctgacctgcgcctggtggtgggggattccctaaaggcggagaaagagcttacagcttcagtgaccgaggccatccctgtgtcccgggactgggagctgctgccaagcgccgcagcctcggctgagccacaatctaaaaatctcgattctggacactgtgtccccgagccatccagctccggccagagattatacccggaagtgttctatggctctgctggtccttcaagctctcagatctccggcggacacggcctgagcataacatcgaaacagtggcgacgcccaggaacccccagccttcatccgtaccggtcacagccactctacttgcccccaggtcctgcaccaccttccgctctgctatcaggcgtggctctgaaagggcaatttctggacttctctaccatgcaggccactgagctgggcaaacttccagctgggggagtgctatacccccctcccagcttcctctattctccagcgttctgtcctagtcctctgccagataccagtctgctgcaagtccgccaggatctgcctagtccctcagatttctactcaactcctttacagcctgggggacagtcaggattcctgccaagcggcgcacccgcacaacaaatgctgctccctatggtggatagccagcttcctgtggttaacttcggcagcttgcctcccgcaccccctcctgccccaccccctctgtctctgctgcctgtggggccagcactgcagcccccatcactcgccgtgagaccgcctcctgccccagctactcgtgtcctgccttcgccagccagacctttcccagcctcactggggcgagccgaactgcacccggttgagcttaagcctttccaggactatcagaagctgagctccaatcttggcggtccgggatcttctcgcacaccacccacagggaggagtttttcagggttgaactcccgactgaaagccactccttccacttattccggcgtttttcgcacgcagcgcgtggatctgtatcagcaggctagccccccagatgcacttcgatggatacccaaaccatgggagcgcaccgggcctccccctagagagggaccatctaggcgggctgaggagcccggttccaggggagataaagaacccggattaccccctcccaggta

SEQ ID NO: 236251 - DNA, 4149 bp, synthetic construct
  misc_feature 1..4149: note = Description of Artificial Sequence: Synthetic coding sequence
  source 1..4149: mol_type = other DNA
atgctgagggaacggggtacccctcccgtggacccaaaattggcttgggttggagacgttttcactgccaccccagctgagccaaggcctctgacctctccgctgcgacaagccgctgatgaagacgacaaaggtatgcggagcgagacccccccagtgcctccaccaccgccttatctggcctcttacccgggattcccggagaatggcgctcccggaccgcctatcagcagatttcctcttgaggagccaggcccacgaccactcccgtggccccctggttctgatgaagtagccaaaatacaaacgccgcctccaaagaaagagcctcctaaggaagaaaccgcccagttaaccggcccagaggcaggtaggaagcctgccaggggtgtaggctctgggggacaaggtccccctcccccacgcagggagagcaggaccgaaactagatggggccctaggccaggctcttcacgacgcggtatccctccagaagaaccaggggctcccccacgacgcgctgggcctataaagaaaccccctccacccactaaggtcgaggagcttccccctaaaccactggaacagggagacgaaaccccaaagccgcctaaaccggatcccctgaaaatcacgaaaggtaaactgggtggacctaaagaaacaccacctaatggtaacctgtcccctgctcctcgtctcaggcgcgactacagctatgagcgcgtgggcccaactagttgtaggggcagaggcaggggggaatatttcgcgaggggcaggggcttccgaggcacatatggaggaagaggaaggggtgctaggagccgagaatttagatcctatagagaattccgcggagacgacggacgtggcggaggtacagggggacccaatcacccacctgctccacgcggacgaacagcttccgaaacacggagcgagggttcggaatatgaggagatcccaaagagacgtcggcagagaggaagtgagactggatcagaaacccacgaatccgaccttgctccgtcagataaggaggcccctacccccaaagaggggaccctgactcaggtgcccctggcacccccaccacccggtgctcccccaagccccgcaccagcccgatttactgcaagggggggtcgtgtgtttacccctcgtggggtgccttctagacggggacggggtggcggaagaccaccgccacaagtgtgccccggttggtcgccgccagccaagagcttagcacccaagaagccgcctactggccctcttccaccctcaaaagaaccactgaaggagaaactgatccctgggcctctgtctccagtggcacggggtggctctaacgggggaagcaacgtcggcatggaagacggagagcgcccacggaggcgacgtcacggacgcgctcaacagcaagacaaacccccaagattcagaaggctgaagcaagagagagaaaatgccgctcgcggaagtgaaggtaaaccaagtctaactcttccagcctctgcccctggtccagaagaggcactgactaccgtgacagtggctcctgctcccaggcgtgctgccgctaaaagccctgatctgagcaaccagaactccgaccaggccaatgaggagtgggagaccgcttctgagtcatctgacttcaccagcgagcgcaggggcgacaaagaggcccctcctccagtccttttgacccccaaggccgtaggcactcccggtggagggggaggtggagctgtccctggcatcagcgctatgagcaggggcgacctttcccagcgtgctaaggatctgtctaaacgctccttttcaagccagcggccaggaatggagcgacaaaatcgcagacccggacccggaggcaaagcgggatcatcaggaagctccagcggaggcggagggggtggtcccggaggcaggacgggtccaggtaggggtgacaagcggtcctggccatcacctaaaaatcggtcacgacccccagaggaacgcccaccgggtctacctctccccccaccaccaccctctagttccgccgttttccggctcgaccaggtgatccactccaaccctgccggaattcagcaggccctggcccagttgtccagccgccaggggtctgtcactgcacccggaggccaccccaggcataaacccggactgccccaggcaccacagggaccctcaccaaggcctccgactcgttatgagccccagagagtcaattctggactgtctagtgatccccacttcgaagaacctggccctatggtgcgtggggtcgggggaactccaagggattccgctggagtgagcccattcccccctaaacgacgtgagcgccctccccgtaagcccgagctgcttcaggaggagtccctcccgccacctcactcaagtggcttcctaggatcaaagccagagggcccagggccacaagccgagtccagagacacgggcaccgaagcccttactccgcatatttggaatcgtttgcacacagcaacttcccggaagagctaccgtccaagctcaatggagccctggatggagccattaagcccattcgaagacgtcgcaggaaccgagatgagccagtccgactccggggttgatctgagcggggattcgcaggtatcaagcggtccttgttctcagcggtcctcaccagacgggggactcaaaggcgcagccgagggacctcctaaacggccagggggatcctcgccacttaatgcagtgccatgcgaaggtccgcctgggtcagagcctcctcgaaggcctccgcctgcacctcacgatggcgacaggaaagaactccctagggagcagcctctgcctcccggacctatagggaccgagcgctctcaacgaacagatagaggtacagagcctggcccaattcgtccatcacacagaccagggccacccgtccaattcgggacttccgataaggacagcgacctacgcttagtggtaggggactctctgaaggccgaaaaggaactcactgcaagcgtcactgaggccattccggtctcacgcgattgggagctccttcctagtgccgctgcgagcgcagagccacagtcaaaaaacctggacagtggacactgcgttcctgagccttcatcgagcgggcaaaggctctacccagaggttttttatggaagcgccggacctagtagttcacaaatttccggtggggctatggattcccaacttcaccccaattccggcggatttagacctggaaccccttctcttcacccataccgctcccagccactgtatctgccccctgggcctgctcctcccagtgccctgctgtccggtgtcgctctgaagggtcagttcttagatttttcaaccatgcaggcaaccgaattgggtaagctccccgctggcggagtcctatatccgccaccttcatttctctattccccagctttctgtccctccccccttcctgatacaagtttactgcaggtacgccaagacctaccgtcaccaagcgacttttacagtaccccgctgcagccagggggacagtctggattcctcccttctggcgctcccgcacagcaaatgctgctccctatggtcgactcgcagttgcctgtagtgaacttcgggtcattacctcctgcccctcctccagcaccacctccacttagtctgctgccggtgggaccagctttacagcccccatccttagccgtaagaccccctcctgctcctgccactcgggtattaccctcacctgcccgaccttttcccgcttcgttgggcagggccgagttacatccggtggagctcaaacctttccaggattatcagaagctatcttcaaacctcggtggcccaggcagctcccggaccccacccacaggacgctcattctctgggctaaactcccgacttaaagcgacacctagcacttatagtggcgtcttccgaacacagcgcgttgatctataccagcaggcctcaccaccagacgccttgcgctggatccctaaaccgtgggagaggactggaccccctccacgggagggtccttcaaggagggcagaagaaccaggatctcgcggagacaaggagcctggactgccgccacccagatag

SEQ ID NO: 236252 - DNA, 6449 bp, synthetic construct
  misc_feature 1..6449: note = Description of Artificial Sequence: Synthetic coding sequence
  source 1..6449: mol_type = other DNA
atgtccgataggagtgggccaaccgccaaaggcaaagacggaaagaaatattcaagtctgaatcttttcgacacatacaaaggaaagagcttggagatccagaagccagctgtggccccacgacatggattgcagtccctcggcaaggttgctatcgcacgcaggatgcctcctccggctaatcttccatccctgaaggctgagaataagggtaatgatccgaatgtcagccttgtgcccaaggatgggactgggtgggcttctaagcaggagcagtcagatccaaagtccagcgacgcttcaactgcacagcctccagaatcgcaaccgctgcctgcatctcagacccccgctagcaaccagcccaagaggccaccagccgcaccggagaacacaccactggtaccaagtggggttaaaagctgggcccaggcgtcagtcacacacggcgctcatggtgacgggggtagggcgtctagcctgttgtcaaggttcagcagggaagagttccccacactgcaagcggctggtgatcaggacaaagctgccaaagagagagagagtgcagagcagagttcaggccctggcccttcactgagaccccagaacagcaccacctggcgcgatggcggtggacgcggacctgacgaattggaaggcccagattctaaactgcaccacggacatgatccaagaggaggacttcagccatcagggccaccccaatttcctccgtacagggggatgatgccaccattcatgtaccccccttacctgcccttcccccctccgtacggcccacaggggccttatagatatcccacacctgatggcccttccaggtttcctcgggtggctggccctcggggaagtggcccaccgatgcgccttgtggagcccgtcggtcgaccttccatcctcaaggaggataacctgaaagaattcgatcagctcgatcaggagaacgacgacggatgggccggtgcacacgaggaagtggattataccgaaaaacttaagttcagtgacgaagaagacgggcgtgattccgacgaagagggcgcagaagggcaccgcgattctcagtccgctagtggcgaagagcggccaccagaggccgatgggaagaagggcaattctccgaattcagagcctcctacccccaagacagcttgggccgagacttccagaccccctgaaacggagcccggacccccagcccctaagcctccattacctccacctcatagaggcccagccggaaactggggccctccgggtgactacccagaccgcggtggccctccatgcaagccccctgcaccagaggatgaggatgaggcctggcgacagagaaggaagcagtcctccagcgaaatctccctggcggtagagagagcgagaaggagacgcgaggaggaggagagacggatgcaggaggaacggagggctgcgtgcgcagaaaagttaaagaggcttgacgaaaaatttggtgctcccgataaacgattgaaggctgagcctgccgctccaccggctgctcccagcacccctgctccacctcccgcagtgcccaaggaactaccggcaccccctgcaccacctcctgccagcgcacctactccagaaaaagagccagaagagccagcgcaggctcccccagctcaaagtaccccgactcccggagtggcagcagccccaactctggtgtcagggggtggcagcacttctagtacgtcatccgggtccttcgaagcgtctccagttgagccccaattgccttccaaggagggcccagagccaccggaggaggtgcctccaccaaccactccccctgtgcctaaagtggagcctaaaggggatggtatcggtcccactaggcagccacctagccagggcctgggctacccgaagtatcagaaatccctgcccccaagattccagcgtcagcaacaggagcaactgctgaaacagcagcaacagcatcagtggcagcaacaccagcagggtagtgctccccctacacccgttcctccaagcccccctcaaccagtgaccctcggcgcagttcctgctccccaagccccacctccacccccaaaggccctgtatcctggcgctttaggcaggccaccccctatgccacctatgaacttcgaccctcgctggatgatgataccaccgtatgtggatcctaggttgctccaaggtaggcctcccctggatttctaccctcctggggtgcaccctagtgggcttgtcccaagagaaagaagcgactccggaggctccagttccgagccgtttgatagacacgcccctgctatgttacgggagagaggcaccccacctgtggaccctaaacttgcgtgggtcggggacgtgtttacggcaaccccagcagagcccaggcctctgacaagtccgttacgacaggctgccgatgaggacgacaaaggtatgcgctctgagacacctcccgtgcctccccctcctccatacctagcgtcatacccaggatttcctgagaacggggcacctggtccacccatcagccggttccccctggaagagccgggaccaaggccattgccgtggcccccaggcagtgacgaagtggcgaaaatccagacaccaccacccaagaaggaacctcctaaagaagagactgcacagctgacaggccctgaagcaggccgaaagcctgcgcgtggagtggggagtggcggacagggccctccccctcctaggcgggaatcccgtacagagacccgctgggggcctagacccggtagctccagacgcggtataccaccggaggagcccggagcaccccctcggagagcaggccctatcaaaaagcctccgcctcctactaaagtcgaagagctgccgcctaagccattagagcagggcgatgagacccccaaaccccctaagcccgatcctctcaagataactaaaggaaagctgggaggacccaaggagacacctcctaatgggaatctgagccctgccccacggctgagaagggattactcttacgaaagagtcggccctactagttgccgagggagaggaagaggcgagtattttgccaggggtagggggtttcggggaacgtacgggggaagaggaagaggtgcagccggtaactctgctgtgaccgagtctttcgaagaaatgatgggcgtagaggtggggcagggagatcagaccaccctgctactcccggaggccgctctgcccgcacgtcatggcgcaagagtccaaagtatgcgtaaaagtccttccggtgccggttctggcgctcaaaaacaggccgctcggccaatgcgggtgatctggctgcttcagaccaggcggctgcctcacccgaggcgcgaacatagtccccgatcccgaagccctacaactcgatcacctacgttccctgctccagcacgctttacccccggagtaggagaaagctcactccctgagggtatttctccgggacccaggcggagggaaccccctcaggtgtgtcccggttggagtccccctgccaaatccctcgcacctaagaagccacctacaggaccactacccccaagtaaggagccactgaaggaaaagttgatcccgggtccactgtctcctgtggctcgaggagggagtaatggaggttcgaacgttggaatggaggacggcgagcgcccacgacggcgacgccacggacgggctcagcagcaagacaagcctcctcgctttcgtcggctaaagcaggaacgcgagaacgccgctcgtggctccgagggaaaaccatctctgaccctgcctgcatccgctccagggccagaagaggcgctgactactgtgacagtggccccagctccacgtcgagctgcagctaaatcaccagacctgtccaaccaaaactcagatcaagcaaacgaggaatgggaaaccgcctcagagagctccgacttcaccagcgaacgcaggggagataaggaagcccctccacccgtgttgctgaccccgaaagcagtgggcacaccagggggaggaggcggaggagccgtgccaggaattagcgcaatgagcagaggggacctatctcaaagggctaaggacctgtccaagagatcattttctagccaacggccagggatggagcgacaaaaccggaggcctgggccaggagggaaagctggaagctcagggtcatcctcaggtgggggagggggtggtcctggaggcagaaccgggcctggcagaggagataagcgctcttggccgtcaccgaaaaatagatcacgcccaccagaagaaagacctccaggcctcccactaccacctccaccaccttcatcttccgccgtcttccgcctggaccaggtcatccattcgaatcccgctggtattcagcaggccttggctcagctgtcgagtaggcaaggatctgtgactgcccctggcggacaccctcggcacaagcccggacctccccaggctccccagggcccatcacccagaccaccaactaggtacgagccccagcgggtgaattcagggctgtcttctgacccccacttcgaggagccaggccctatggtcagaggagtgggtgggactccgcgagattcagctggtgttagccctttcccaccgaagcggcgagagcgccctcccaggaaaccagaactgctccaggaggagagcttgcctccccctcattccagtggtttcctgggctctaaaccagaaggaccagggccacaggctgagagccgcgatactgggaccgaggccttaacaccacatatttggaatcgactgcataccgccacctccaggaagagctacaggcccagttccatggaaccttggatggagccactgtcaccattcgaggacgttgctggcaccgagatgtcccagagtgattctggcgtggatcttagcggcgatagtcaggtcagcagcggaccctgcagccagagatcctcccccgatggcggactcaaaggtgccgctgagggtcctcccaagcgtccgggtggcagcagccccttgaatgccgttccctgcgaaggcccacctggtagtgagccgccaaggaggccccctcccgcaccccacgatggcgacagaaaggaacttcccagggagcaacctctcccccctggacccattggcaccgaacgctctcaacgtaccgatagagggaccgaaccaggcccaatccgaccaagccaccgcccagggccacctgtgcagttcggcacttctgataaggacagtgaccttaggctcgtcgtgggagatagtcttaaggctgaaaaggaactcacagccagcgtgaccgaggctattccggtcagccgggactgggagctgctaccatccgccgctgccagtgccgaacctcagtcaaaaaacctcgatagcggccactgtgtacccgagcccagtagctctggccagcgcttgtaccctgaagtgttttatggcagcgctgggccaagcagctctcagatctccgggggtcacggactctctatcacttccaaacagtggcgccgacctggcacacctagtctgcacccataccggtctcaacccctttatctgccgcctggccctgctcccccatcagcccttttgtcaggggtcgccctcaagggccaattcctcgatttttcaacaatgcaggcaactgagctcgggaagcttcccgctggtggagtgctgtatccgccaccttcctttctctacagcccagcgttttgcccctcaccacttcctgacacttcactgctccaggtacggcaggacctgccaagcccatccgatttctatagcacgcccctgcagcctggagggcagtccggctttctgcctagcggcgctccggctcagcagatgctgctcccaatggttgacagtcaactcccggtcgtgaattttggttctctcccgccagcccctccccctgctcccccacccttatccttactgcccgtcgggccagccctgcagccgccatcactggctgtgaggccccctccggcacctgccactcgggtactgcctagcccggcaagacctttccccgcatcgctgggcagggctgaactccatcccgtggagttgaagcccttccaggattatcagaagctgtcatctaacctggggggtccaggcagctctaggactcctcccactggcagaagttttagtggtctcaacagccggctgaaagctacaccaagtacgtacagcggggtgtttaggacgcagcgcgtggatctgtaccagcaagcaagtccacccgatgctttgcgttggatccccaagccttgggaacgcacagggccacctccccgagagggcccttcccgcagggctgaagagcccggttcccgcggtgacaaggagccgggactgcctccaccccgtta

SEQ ID NO: 236253 - DNA, 6449 bp, synthetic construct
  misc_feature 1..6449: note = Description of Artificial Sequence: Synthetic coding sequence
  source 1..6449: mol_type = other DNA
atgagcgaccgtagcgggcctactgccaaaggcaaggacggtaaaaaatactccagtcttaatctgtttgatacttacaaaggaaagtcactggaaatacagaaaccagcagtggccccacgccatggactgcagtcactgggcaaagtggccatagcgaggcgcatgcctccaccggcaaatcttccatcgctgaaagcagaaaacaaaggcaacgaccctaacgttagtctggtacccaaggacggtacaggatgggcaagcaaacaagagcagtcggatccaaagagctccgacgcctcaacagcacaacccctggagagccagccactgcctgcttcacaaacccccgcttctaatcagcctaaacgcccaccagccgcacctgagaacacacctctggtgccctctggagtcaagtcctgggcccaagcttcagtcacccacggggctcacggcgacgggggacgagctagcagcttgctcagccgcttctccagggaggagttccccacactccaggccgcaggagaccaggataaggcagctaaagagagagagtccgcagagcagagcagcggacccggaccttcactccgcccacagaactccaccacatggagagatgggggtggaagaggcccagacgagttagagggccctgactccaagctgcaccatggccatgaccctagggggggactgcaaccatccggcccaccccagttccccccatacagaggaatgatgccacccttcatgtatcctccatacctgcctttcccgccaccgtatggaccccaagggccttacaggtaccccacacctgatggaccctccaggtttccaagagtggcaggccctcggggatctggtccaccgatgcggctggtggaaccggtgggcagaccatcaatattaaaagaggataatctgaaagaatttgaccagcttgatcaggaaaacgacgacgggtgggctggcgctcacgaggaggtagattacactgagaaactgaagttctctgatgaagaggacggtagagatagtgatgaggaaggagctgaggggcaccgagattctcaatccgccagcggtgaggagcggccacctgaggccgacgggaaaaagggcaattcccctaattcagaacctccaactcccaaaacggcttgggccgaaacaagccggcctcccgagaccgagcccggaccaccagctccgaagccccctctgccccctccccaccgtgggcctgccggtaactggggccctcctggagactatccagacagaggcggtcccccatgcaagccgcctgcccctgaggacgaagacgaggcatggcgccagcggaggaagcaatctagctccgagatcagtctggccgtggaacgagccagacgccgacgggaggaggaagaaaggcgaatgcaggaagaacgcagggccgcttgcgctgagaagctcaagcggctcgatgaaaaatttggggctccagataagcggttgaaagccgagcccgcagcaccccctgctgcgcctagtactcctgcgccaccacccgcagtgccaaaggagctgcctgctccaccggcaccaccacctgcctccgctccaactcccgagaaggagccagaggagccagcacaggcccctcctgcccagagcactcctactcccggagtcgcagccgctcccaccctggtctcgggtggcggatctacgtctagtacatcttcaggctccttcgaagctagtcccgtggagcctcagttaccttctaaggaagggcctgagccacccgaagaagtgcctccccctactacccccccagtccccaaggtggagcctaagggagacggaatcggtccgacgcgccagccaccaagccagggattaggctacccaaaataccagaagtccctgccaccacgcttccagcgtcagcaacaggagcagctgttgaagcaacagcagcaacatcagtggcaacagcaccagcaggggagtgcacccccaacacctgtcccacccagcccaccacaacctgtaaccctcggagccgtgcccgctccgcaggcgcctcccccacctccgaaagccctataccctggagcccttggacggcctccaccaatgcccccaatgaatttcgatcccagatggatgatgattcccccatacgtggatccacgcttgttgcagggacggccaccccttgacttttatccgcctggagtgcatccttctggactcgtccccagggaacgttctgactccgggggaagcagcagtgagccctttgaccggcacgctccagctatgttgcgggagagaggcactccacccgtggaccctaagctggcctgggttggggacgtgttcacagccaccccagctgagcccagaccacttacgtcccctcttcgccaggctgccgacgaagacgataaaggcatgagatccgaaacgccaccagtcccgccaccgccaccatatctagcctcttaccccggtttccccgagaatggcgcacccggtccgcctatttcaagattccccctagaggagcctgggccacgccctctgccctggccccctgggagcgatgaggttgccaagatacagactccacctcccaagaaggagccacctaaggaagagaccgcacaactcactggtccagaggctggccgaaaacccgctcggggtgtcggctccggcggtcagggtccgccacccccaaggcgagaatctcgcacagaaacgagatggggacccaggccaggcagttcacgccgtggcatcccccctgaagaacccggagccccaccaaggagggccggacctatcaagaagcccccaccgccaacaaaggtcgaggaactgccccctaaaccccttgagcagggcgatgagacccctaagccccctaaacccgatcccctgaaaattacaaaaggaaagttgggcggacccaaggagacacccccaaacggcaatctgagccctgcaccacgcctgagaagggactattcttatgaaagagtaggccctacctcctgtagagggaggggtcgcggagaatattttgccaggggacggggatttcgcggaacttacgggggacggggtaggggagctgctggcaactcagctgtgactgagtccttcgaagagatgatgggtgttgaggtgggccagggcgaccaaacaacattgctcttgcccgaagctgctctgcctgcaaggcatggcgcaagggtccagtccatgagaaagagtccgtctggagctggttctggagctcagaagcaggcagcccgtcctatgcgtgtgatctggcttctgcagactaggcgcctcccacacccacgtcgcgaacactccccacggtctcggtctccaaccacacggtcacctacctttcctgctccagccaggttcaccccaggcgttggcgaaagctccctgccagaggggatcagccccggtcccagacgtagagagccaccccaagtctgccccggttggtcaccaccagccaagtcgttggctccaaagaaaccgcctaccggaccattgccgccaagcaaggagcccctcaaggagaagcttattcccggaccgttgtctccagttgctcgcggtggatccaatggcggaagcaatgtggggatggaggacggagaaagaccaaggcgcagaaggcacggcagggcacagcaacaggataaacctcctagatttagacggctgaaacaggaacgggagaacgcagcgcgtggttccgagggtaagccatccctaaccctccctgcaagcgcccctggacctgaagaggcactgactactgttacagttgctccagctccacgaagagcggcagccaagtctccagatcttagcaatcagaacagcgatcaggccaacgaggaatgggagaccgcttctgaatcctccgatttcaccagtgagcgcagaggggataaagaggcgccaccacccgttcttcttaccccaaaggcagtgggaactccagggggaggagggggaggcgctgtgccaggaatttcggccatgtctcgcggagatctgtcccagcgggctaaagacttatctaaaagaagcttttcctcccaacgccctgggatggagagacaaaaccgcaggcctggtcccggaggtaaggcagggagctcagggagctcttctggaggcggaggaggcggaccaggaggtcgcactggccctggaagaggggacaagagaagttggccatctcccaagaatcgctctcgtcctcctgaggagaggcccccaggcctgcctctcccaccaccccctccttcatcatcagccgtattccggctggatcaggtcatccatagcaaccctgcagggatccagcaagctctcgcgcagctctccagcaggcagggatcagtgactgccccagggggacatccaaggcataaacctgggcctccacaagctcctcagggaccttcccctcgccctccaacgaggtacgagccccagcgcgttaactcaggcttgtcctcagacccccacttcgaagagccaggccctatggttcggggtgtgggaggaacccccagggacagcgctggggtttccccttttcctccgaaacggagagaacgcccacccagaaagcccgagctattacaggaagagagtctgcccccaccacattcatccggattcttggggtccaagccagaaggacctggacctcaagcggagtcccgcgacaccgggaccgaggcacttacccctcatatttggaaccggttacacaccgcgacaagcaggaagagttataggccttccagtatggaaccttggatggagcctctgtccccttttgaagatgtcgctggaaccgaaatgtcacagtcagatagtggggttgacctgagtggagattcgcaagtgtcaagcgggccatgttctcagcgcagctctcccgatggcggactcaagggcgctgccgaggggccacccaagcgtcctgggggatcttcccctctcaacgctgtgccatgcgaaggtccgccaggctctgaaccgccaaggcgcccaccccctgcccctcacgacggagaccgaaaggagctaccacgcgagcagcctcttcctcccggtcccattggcacagaaaggtcccagcgcactgatcgaggtaccgaacctggaccaattaggccctcacaccgaccgggtccaccagtccagttcggtacctcagataaagacagcgacctccgacttgttgttggtgatagcttgaaagccgagaaagaactaaccgcaagtgtgacagaagccatccctgtctctcgcgactgggagctcctccccagtgccgctgcatcagccgagccacagagcaagaacctggattcagggcattgcgttcctgaaccatcaagtagtgggcagcgtctctatcctgaagtcttctacggcagcgcaggcccttcaagtagccagatatctggaggacacggactgtccatcaccagcaagcagtggagacggccagggactcctagtttacatccttacagatctcagcctctgtatctcccacctggcccagcacctcctagcgctctcctcagtggcgtagcgctgaaaggacaatttctggacttctccaccatgcaggcaacggagctgggcaagctcccagccggaggagtgctgtaccctcctccgagtttcttgtactctcctgctttttgccccagtcctctgcctgacacctctctcttgcaggttaggcaggatcttccgagtcccagcgatttctacagcacccccctgcagcctgggggtcagtcgggctttttaccaagtggagctccagctcagcagatgttacttcccatggtcgactcgcagctgcctgtagtgaatttcggatcgctacctcctgcaccaccccctgctcccccacctctttctctcctcccggtcggccctgctctacagcccccaagcctggccgttcgcccacctccagctccagctacacgtgtcctgccttctcccgctaggccgttccccgctagtcttggcagagccgagcttcatcctgtcgagctgaaaccattccaggactaccaaaaactttcctctaacctgggaggccctgggagctctcgcacccctcccaccgggagatctttttccgggttgaatagcaggctgaaggctacccccagcacctactctggggtctttcggacacagagagtggacttgtaccagcaggcttctccacccgatgcgctgaggtggatccccaagccctgggaacgaacagggccaccaccccgtgagggtcctagccgccgtgccgaagagcctgggtctcgaggggacaaggagcctgggctacctccacctcggta

SEQ ID NO: 236254 - DNA, 4149 bp, synthetic construct
  misc_feature 1..4149: note = Description of Artificial Sequence: Synthetic coding sequence
  source 1..4149: mol_type = other DNA
atgctccgcgagaggggaacacctcctgttgatcccaaattggcctgggttggagatgtgttcaccgccacgccagccgagccgcgtcccttgactagccccctgcggcaggctgcagatgaggacgacaaaggaatgagatctgagacccccccagtgccacctccacctccttatctagctagctaccccggattcccagaaaacggggcaccgggaccgcctatatcccgtttcccattggaagagcccggtcccaggcctctgccatggcccccagggtctgatgaagtggccaaaatccagacaccgccaccgaagaaagagcctcctaaagaggaaaccgctcagctcaccggccctgaagccggacgaaagcctgctagaggtgttggcagcggagggcaaggtccccctcctccgcgaagagaatcccgcacggaaacaagatgggggcctaggcccggatcgagtcggagaggcatacccccagaggaaccgggtgctcccccacgcagagccggtccgatcaaaaagccaccccctcccacaaaggtcgaggaactgcccccaaagccactcgagcagggagacgagactccgaaacctccgaagccggaccctttgaagattacaaaaggaaagctcggtggccctaaggagacccctcctaatggcaatctttcccctgcccctcgcctgcggagagattattcctatgagcgcgtcgggccaacttcttgccggggtcgtggccgaggtgaatacttcgctcgaggcaggggcttccgcggaacctacggcggaagaggcagaggggcacgttctagagagtttaggtcctaccgtgagtttagaggcgatgacggtcggggaggtggcacgggaggccctaatcatccccctgctccgagggggcgtacggccagcgagactcgaagtgagggcagcgagtatgaggaaataccaaagcgaagacggcagcgaggctctgaaaccggaagtgagacccatgagagcgatctggccccatccgataaagaggccccaaccccgaaggagggcaccttgacacaggtgcccctggcaccaccccctcccggagctccccctagtccagcccctgcacgattcaccgccaggggcggaagggtgtttactcctaggggagtcccttcccggagggggcgtggcggaggcagaccaccaccacaagtgtgccccggttggtcaccgcctgcaaaatcacttgcgccaaagaagcctcccacaggccctcttccccctagtaaagagcccttgaaggaaaagctaataccgggacctctctctcccgtggctagaggagggtccaacggcggatctaacgtgggcatggaggatggggaacgcccacgcaggagacggcatggccgagcgcaacagcaagacaagcctccaaggtttcggaggctgaaacaggaacgcgagaatgctgctcgcggaagtgaaggtaagccaagcctgaccctgccggctagtgcccctggccctgaagaggccctgaccacggtgacagtcgcccctgctccacggcgagctgcagccaagtcccctgacctgtctaaccaaaattccgaccaagccaatgaagagtgggagaccgcctctgaatcttcagatttcacaagtgagcggcgaggcgacaaggaggctccccctccagtgctcctgacccccaaggctgtcgggaccccagggggtggaggcggaggcgctgtgccaggaatctccgctatgtctcgtggtgacctttcccaaagggcgaaagatctgagcaagcgttcgttctcctctcagcgccctgggatggaaaggcaaaatcggaggccaggacccggtggaaaagcgggatccagtggatctagctctggcggagggggaggtggcccaggcggacggacaggaccaggcagaggagacaagcggagctggccaagcccaaaaaatagaagccggcctcccgaggagagaccccctggtctgcccttgccccctcctccaccctctagcagcgcggtctttaggctggatcaggttattcacagtaaccctgcgggtattcagcaagctctggctcagctgtcatccaggcagggctcggtaaccgccccagggggtcatcctcgccacaagccaggcccacctcaggccccacagggtcccagtcccaggccacctactcgctatgaaccccaacgggtgaactccggactgagcagcgatccacattttgaagagccgggacctatggtcaggggcgtgggcggaacacccagggattctgccggtgtcagcccgttccctccaaagaggagagagagacctccgagaaagccagagcttctgcaggaggagagccttccccctccacactccagcggtttcctcggttctaagccagaaggcccagggcctcaggctgaatctagggataccgggaccgaagcacttactccgcacatctggaatcggcttcataccgcaaccagtcggaagagttacagaccatctagcatggagccatggatggaacctctatctccctttgaagatgtcgcaggcactgaaatgagtcagagcgacagcggggtcgacctgtctggtgactcacaggtgtcgtccggcccttgctcacagaggagtagtcccgacggagggctcaagggcgcagctgagggccctccaaaaaggccaggcggtagctcccccctcaatgctgtgccttgtgaaggccctccaggctcagaaccgccacggcgtcctcctccagcccctcatgatggggaccgtaaagagctcccaagggaacaacccctgccacccggtcccatcggcactgagcggtcccaacgcacagaccgagggaccgagcctggccctatcagaccttcccacagacccggacccccagtgcaattcggtactagtgataaagacagcgacttgcggttagtggttggcgactctcttaaagcagagaaagagctgaccgccagcgtcacggaagctattcctgtgagtcgagactgggagttacttcccagtgcagctgcctctgccgagccacagtctaagaatctagattctggtcattgtgtgcccgagccgtcttcttctggccaacgcttgtaccctgaagtgttttatggcagcgccggtcccagttcgagtcagatcagcggaggggctatggattcccagctccatcccaactccggcggattccggccaggcaccccatctctgcacccctaccgatcccagccactctacctgcccccaggccctgcaccccctagcgctctgttgtctggtgtcgctttaaagggccagttcctcgacttctccaccatgcaggccacagagctcggaaaactcccagccggaggcgtgctctaccctccgccatcctttctctactctcctgctttttgcccttcacctctccccgacacaagtctactgcaggtgaggcaggacttgcctagtccatccgatttctacagtactcctctacaaccagggggtcagagcggattcctgcctagcggcgcacctgcccagcagatgctcctgcctatggtggactcgcagctcccggtagtcaactttggctccctgccccctgcgcctccccctgcccctcctcctctgagtctgctcccagttgggcctgcactgcaaccaccaagccttgccgtcagaccgcctccggcaccagctactcgcgttctgccttccccagctcgcccatttcccgcttcgttggggcgtgcagaacttcaccctgtggagttaaaacccttccaggattatcagaagctttccagtaacttgggagggcctgggagcagccggacccccccaaccggcagaagtttttcaggcctgaactcaagactgaaggccacgccaagtacttactccggtgtcttccgtacccagcgtgtcgatctctatcagcaagcttccccgcctgacgccctgaggtggattccgaaaccttgggaaaggacaggcccacctcccagggagggccctagccggagagccgaagaaccaggaagccgaggagacaaagaaccagggctgcccccacccagatag

SEQ ID NO: 236255 - DNA, 4149 bp, synthetic construct
  misc_feature 1..4149: note = Description of Artificial Sequence: Synthetic coding sequence
  source 1..4149: mol_type = other DNA
atgctgagggaacgcggaacgcctcctgtcgatccaaaattggcatgggtgggagatgtgttcactgctaccccagcggagcccagaccattaacttctcccttacgccaagcagctgacgaggatgataaggggatgcgatctgagactccacccgtgccgccaccaccaccttacttagcttcctatccaggattccccgaaaacggcgcaccgggtcccccaatcagccggtttcctctcgaagagcctggcccacggccacttccatggccacccggtagtgacgaagttgcaaaaattcagacgcctccccctaagaaggaaccgccaaaggaggagactgcccaattgacaggaccagaggctgggcgaaaaccggcacgaggggtcggatctggtggccaggggcctccgcctccccgtagggagtctagaaccgagacccgatggggcccacggcctgggagctcaaggagagggattccaccagaagaaccgggagcccctcccagaagagccggacctataaaaaagccaccaccccctaccaaagtggaggagctcccgcctaaaccattagagcaaggtgatgagacacccaagccacccaaaccggatcctctaaaaatcactaagggtaagctggggggacccaaggagactccaccaaatggcaacctgtccccagcacccaggctgagaagggattactcctatgaaagagtgggaccaacttcctgtaggggtcgaggccgaggtgaatactttgcacgtggtaggggattcagaggtacctatggcggtcgagggagaggcgctaggtccagagaatttagatcttacagagaattccgtggagacgacggcagagggggaggaaccggcggtcctaaccaccccccagccccacgcggacgcacagcctccgagaccagatcagaaggttcagagtatgaggagattccaaagagaaggagacagagaggtagcgaaacgggatcagagacccacgagtccgaccttgccccatctgataaggaggcaccaaccccaaaggaaggaaccctgacccaggtgcccctagctccccctcctcccggagcaccacccagtcccgctccagcacggttcacagctagaggaggtcgagtgttcacacccaggggagtgcctagcaggcgcggtaggggaggcggaagacctccaccccaggtttgtcctggatggagcccacctgcgaagagtcttgcccctaaaaagcccccaactggcccactcccgccaagcaaggagccgctaaaggagaaactcatccccggacccctgtcccccgttgccagaggcggatctaatggaggcagcaacgtgggtatggaagacggcgagcggcctaggaggagacggcacggccgagcgcaacaacaggataagccaccaagatttcggaggttaaagcaggagagggagaacgccgcacggggatctgaaggaaaacctagccttaccctcccagctagcgcacccggacctgaagaggctttgaccactgtgaccgtcgcaccagcccctcgcagggctgctgccaagagcccagatctgagcaatcagaattcagaccaggccaacgaggaatgggagaccgcatccgagtcaagtgacttcaccagcgaacgcaggggcgacaaagaagctcctccacctgtcctgctaacccccaaggcggttggcacaccagggggaggcggtggcggagctgtccctgggatatcagccatgagcagaggggatttgagtcagagggctaaagatctatcaaagaggagtttttcgtcccaacggcctgggatggaacggcaaaataggcgccctggaccagggggtaaagcaggctctagcggatctagttccggcggagggggaggaggccctggtggcaggaccggcccagggaggggagacaagcgatcatggcctagcccgaaaaatcgatcgcgccctcccgaagaaagaccacccggactgcccctcccaccccctccaccctcgagcagcgctgttttcaggcttgaccaagtaattcattcgaatccagccggaatacagcaggcgctcgcacagttgtcgtcacggcagggatcagtgaccgcaccagggggtcatcctagacataagccgggtcctcctcaggctcctcagggcccttcaccaaggccacctacacggtatgaaccacagcgcgtcaacagcggcctctctagcgatcctcacttcgaggagccagggcctatggttcgtggggtaggcggaacccccagagatagcgccggtgtgagcccctttccaccaaaacgtagggagaggcctccgaggaagcctgagttgctccaggaggagtcgttgcccccaccacactcttctggcttcctggggtcgaaacctgaagggcctggccctcaggctgagagccgagacacgggcaccgaggctctgaccccccatatttggaataggctccatactgcaacctcgagaaagtcatataggccaagttccatggagccatggatggagccactgagtcccttcgaagatgttgccggaactgagatgtcccaaagcgatagcggcgtagacttgagtggcgactcccaggtgtcatccgggccatgctcacaacggtcatcacctgatggcggacttaaaggtgcagcagaaggccctcccaaaagaccaggtggttctagtccattgaatgctgtcccctgtgagggccctccgggtagtgaacccccaaggaggcccccacctgcccctcacgacggcgatcgcaaggaacttccccgtgagcaacccttgccacctggcccaatcggcacggaacgcagccagcgcaccgatagggggaccgagccaggtcctatccgtccatcacaccgacccggacccccagtacaatttggtaccagtgataaggactcagacttgcgactggtcgtgggtgatagtctcaaggcagagaaggagctcaccgcatctgttaccgaggcgatacccgtgagtcgagactgggaactgctgccaagtgccgcagcctctgccgaaccacaatccaaaaatctggactccggccattgcgtgccagaaccttcatcatccgggcagagactttaccccgaagtgttctacgggtccgcaggccctagcagctcacagataagcggcggtgccatggattcccagctccatcccaacagtgggggttttcgccctggaacaccaagtctccacccttaccgctcccagccgctatatcttccaccgggaccagctccaccttcagcactgctctctggtgtcgcactgaagggacagttcctggactttagtaccatgcaggcgacagagcttggcaagttgccagcaggcggtgtgctgtatcctcccccaagttttctgtactcacctgccttttgtccatctcccttgccagacacatcactcttgcaggtgcggcaggatctgccatccccatccgatttttacagtacccctcttcagcccggaggccagtcaggattcctgccttctggagcccctgcacagcaaatgcttctccctatggtggatagtcagcttccggtggttaatttcgggtctttaccccctgcgccaccccctgcccctcctcccctgtcgcttctgcccgtggggccagcattgcaaccaccttctctggccgtgcgaccaccccctgctccagctacaagggtgcttccttcccccgcaagaccttttcctgctagcctcggccgagcagagctccatcctgtggaactcaagccctttcaggattatcagaaactttcaagcaacctgggagggccaggaagcagcagaaccccccctacgggcaggtcctttagcggtctgaatagtcgcctgaaagcgactccatctacctacagcggtgtcttccgcacacagagggtggatttgtatcagcaggcaagccctcccgacgccctgaggtggattcctaagccttgggaacggactggcccaccacctcgggagggacctagccgacgggctgaagagcctggtagtaggggagataaagaaccagggctccccccaccaagatag

SEQ ID NO: 236256 - DNA, 6449 bp, synthetic construct
  misc_feature 1..6449: note = Description of Artificial Sequence: Synthetic coding sequence
  source 1..6449: mol_type = other DNA
atgagcgataggtccgggccaaccgcaaaaggtaaggacgggaagaagtattcctctttgaatctttttgatacctacaagggtaagtccctggagatccagaagccagcagtggctccccgtcacggccttcagtccttgggtaaagtggccatagcacgtcggatgcccccacccgctaacctgccctcactaaaagccgagaataaaggaaacgatcccaatgtttccctcgtacctaaagacgggacggggtgggctagcaaacaggaacaatctgatcctaaaagcagcgacgccagcacggcacagccacctgagtcccagcccttgcccgcttcacagacacccgcaagcaaccaaccaaaaaggccccctgcagccccagaaaataccccactcgtgccttcaggtgtgaaatcatgggcccaggcctcggtcacccacggagcccatggagacggagggagggccagcagcctgctttccagattcagccgcgaagaatttccgactttacaggcagccggtgaccaggacaaggccgcaaaggagagggaatctgccgaacaatcctccggtcccggacctagtctgcgccctcagaacagtaccacatggagggacggcggaggacggggtcctgacgaactcgagggccctgactcgaaactgcaccatggccacgacccccgagggggactgcagccaagtggcccacctcaatttcccccttatagaggaatgatgccaccattcatgtatcccccttacctaccttttccccctccgtacggaccacagggaccatatcgctatcctactcccgacggcccttcaagattccccagggtcgccggacccagggggagcggccctcctatgcgcctggtggagccagtgggacgtcctagcattctaaaagaggataacctaaaagagtttgatcagctggaccaagagaacgacgacggctgggcaggcgctcacgaggaagtggattatacagagaaacttaaattttctgacgaagaggatggcagagattccgacgaagagggagccgaagggcatcgggacagccagtccgcaagtggtgaagagcggccaccagaagccgacgggaagaaaggtaactctcctaattcagaaccacccacaccaaagaccgcgtgggcagagacttctaggcccccagaaacagagcctggtcctcccgctcccaaacccccactgcctccgccacaccgcggacccgcaggtaattggggccctcctggcgattacccagaccgaggcggtcccccatgcaagcccccagcacccgaggacgaagacgaggcatggcggcagcgtcgaaaacaatcctcgtcagaaatctcactcgccgtggaacgtgccaggagacgcagagaagaggaggagcgccgtatgcaggaggagcggcgagctgcatgcgcagaaaaactgaagaggctggacgagaagttcggcgctcccgataagagactcaaggccgagcctgccgctcccccagctgcaccatccactcccgctccacccccagccgtgcccaaagaactgcccgctcctccagcaccaccgcctgcgtcagcacccaccccagaaaaagagcccgaagaacccgcacaagcccctccagcgcagagtactcctactccaggcgtggctgccgcacctactcttgtaagtggcggtggttcgacgagctctaccagcagcggctcttttgaggcatctcctgtggagccacagctgccatcaaaggaagggccagaaccacccgaggaggtccctcctccaacaacacccccagtgccaaaagtggagccaaaaggagatggtatcggtccaacacgacagcctccatcccagggtctaggctacccaaaataccagaagtcgttacctccgagattccagagacagcagcaggagcagctacttaaacaacagcaacagcaccaatggcagcaacatcaacagggaagcgcccctcctactccagtccctccaagtccaccccagcctgtcacgctgggcgcagtgccagccccacaggctcccccaccacctccaaaggctctgtacccgggagccctgggtaggcctcccccaatgccccctatgaactttgatccccgatggatgatgatacccccttatgtcgaccctcggctgttgcaggggagaccacctctggacttttacccgccaggggtgcacccaagtggccttgttccccgagagcgctccgactcggggggatccagctccgagcctttcgatcgtcacgcccctgctatgctaagggagcgcggtacacccccagtggaccccaaacttgcttgggttggagacgtgttcaccgctacgccagccgagcccagacctctgacaagtcccctccgccaggcagccgatgaggacgacaagggtatgcgctctgagacacctccggtccctcctccccctccctacctggcttcttatcccggattccctgagaacggggctcctggtcctcctatttcaaggttcccactggaagaacctggcccacgaccattaccgtggccacctggcagcgatgaagtggctaagatccaaactcctccaccaaaaaaggagccccctaaagaggaaaccgcccagttaactggtccagaagctggacgaaagccagccagaggggtgggatccggaggtcaaggaccgccacctcctcgaagggaaagtcgcaccgagactcggtggggtcctagaccgggttcctcccgtcggggtattccgccagaagagcccggtgcacccccaagaagggcagggccaattaaaaagcctcctcctcctacgaaagttgaagagctgcccccaaagcccctggagcaaggggacgaaacccctaaaccccctaaacctgaccctctaaaaatcaccaagggaaagctggggggaccaaaagaaaccccacctaacggcaacctgtccccggctccccgtttgagacgagactacagttatgagagagtggggcctacctcatgccgcggaaggggccgtggagagtatttcgcgagaggcagagggtttcggggtacttacggtggcagagggcgtggtgcagcaggtaactcagccgtcacagagagtttcgaggaaatgatgggggtcgaagtgggccagggtgaccagacaaccctccttctcccggaagctgctttgccagccaggcatggcgctagagttcagtcaatgaggaagagcccaagcggtgctggctcaggtgctcagaaacaagcagctcgacccatgcgcgtgatctggctcctgcagactcggagactacctcatcctcgccgtgaacactcccctaggtctagatcccccaccacccggagtcccacttttcccgctcccgctcggttcactccgggagtgggggaaagcagtttgcctgagggaatctctccgggtcctcgtcggcgtgagcctccgcaggtttgccctggttggagtcctcctgcgaaatcacttgccccaaaaaaaccacctacagggccactcccccctagcaaagagcctctaaaagagaagcttattccaggccctctatctccagtagctcggggtggcagcaatgggggtagcaacgtcgggatggaagacggggaacggcctcgtagacggagacatggacgagcacagcaacaggacaaacccccaaggtttagaaggcttaaacaggagagggagaatgcggctcgcggaagtgagggtaaaccaagtcttactctgcccgctagcgctcccggacccgaagaggctctaacgacggtgaccgtagctcccgcaccaagacgggcagctgcaaaaagcccggatctgtcaaaccagaatagcgaccaggctaacgaagaatgggagaccgccagtgaatcctcagactttacatctgaaagacggggtgacaaagaagccccacccccagtgctattaacccctaaagcagtcggcactcccggaggaggtggtggcggagccgtccccggtatatctgccatgtcccgcggtgatctttcccagcgcgcaaaggatctctccaagcggtcattcagcagccaacgacccggtatggagcgacagaacagacgcccaggtcctggtgggaaggcgggtagctcagggagctcatcgggcggtggtggcggaggtcccggaggaagaaccgggcctgggagaggcgataagagaagttggccgagcccgaaaaaccgctccaggccaccggaggaaagaccgcctggcctgcctctgcctccgcctccaccctcatcaagcgccgtgtttcggctggaccaagttatccacagcaaccctgctggcattcagcaagctctggcccagttgtcatctaggcagggaagcgtgaccgcccctgggggtcaccccagacacaaacctggtccccctcaggcaccccagggccctagtccacgaccacccaccaggtacgagccacagcgtgtcaactcgggtctaagctccgatccacactttgaggaacccggaccgatggtgcgaggcgtcggcggtactccgagggactcagcaggcgtaagtccgtttccccctaagagacgagagcgcccacctaggaagcccgaactgcttcaagaagagtcactgccaccaccccacagcagcgggttcctcggctctaagccggagggtcctggcccacaagcagaatccagggatacaggaacggaggcacttacaccccacatctggaaccgactgcacactgccacaagccgtaagtcttataggccttccagcatggaaccatggatggagcctttatccccgtttgaggacgttgcaggcacagaaatgtcacagtccgacagtggcgttgatctctctggcgacagtcaggtgagcagcggtccttgttcccagcgtagctcccctgacgggggactaaagggcgcagccgagggaccccctaaaaggccaggaggctcatctccactgaatgcagtgccctgtgaaggtcctcccggatcagagccgccacggaggccaccacctgctccccacgacggagacagaaaggaattgcctagggaacagccattgccacctggccctatcgggactgagagatctcagcacacagacagggggacggagcctggacccatacggccaagtcatagaccgggtcccccagtacagttcggaacatcagacaaggattctgacctgcggctggtcgttggtgattccctgaaggccgagaaggaactcaccgcaagcgttacagaggctatccctgtgtcaagagactgggagctactgccctctgctgcagcgtcagctgaaccccagagcaagaatctcgatagtggacactgtgtgcctgaaccatcgtcttcaggccagcgcctttaccccgaggtgttctatggatctgctggacccagcagcagccagatttccggcggacacggactgtctgtgacctctaagcagtggcgcaggccgggtactccatccctccacccctatcgatcgcaacccctgtacctgccaccaggcccagctccaccatccgctctactctctggcgtggccttgaaaggccaattcctcgacttcagtaccatgcaggctaccgagctgggtaaactgcccgcaggtggcgtgctttatccaccaccatcctttttgtactctccagcattctgcccttcccccctccctgataccagcctgcttcaagtgaggcaggacctgccttcgccatctgatttctatagcactccactgcagccagggggtcagtcaggctttttgccttccggggctcctgcccagcaaatgcttttaccaatggttgactctcagctccccgttgtaaactttggttccctgcccccagcccctccacctgctcctcctagcctctcgctactaccagttgggcctgccttgcagcctcccagtctggcggtcagacccccacctgccccagctacccgggtgttgccttccccggctcgcccttttcctgcaagccttggtcgagccgagctgcaccctgtggagctgaagccttttcaggactatcaaaaactcagctcgaacctgggcggacctggatccagccgaacccctcctactgggcgatctttcagcggccttaacagcagactcaaggctaccccatcgacatattctggcgtcttcaggacacagagagttgacctctaccagcaggcctccccccctgacgcgctgcggtggattcctaagccatgggaacgcaccgggcctcccccacgagaagggccaagccgtagggctgaggaaccgggttcaagaggcgataaagagcccggactgccaccccctaggta

SEQ ID NO: 236257 - DNA, 4149 bp, synthetic construct
  misc_feature 1..4149: note = Description of Artificial Sequence: Synthetic coding sequence
  source 1..4149: mol_type = other DNA
atgctccgagagaggggaacacctcccgtggacccaaaattagcatgggtgggcgatgtctttaccgccacaccagccgagcccagaccattgactagccctctgagacaggcagccgatgaggacgataaagggatgaggtctgaaacccccccagttcctccccctcctccgtacctcgcgagttatcccggatttcccgaaaatggcgctccgggtccgcctatttcccggttccctctggaagaacccggtccaaggccccttccatggccccctggaagtgatgaagttgccaaaatacagactccccctcctaagaaggaaccaccaaaggaggagaccgcccaattgacaggtcctgaggctggaagaaagcctgctcgaggggtgggcagcgggggacaaggacctccgcctccacggagggagagcagaacagagacccggtggggacctcggcctgggtctagcagacgaggaatcccccctgaggagcccggagcaccccctaggagagcgggacctatcaaaaaaccccctccaccgaccaaggtggaagaattgcctcctaaaccgcttgaacagggcgacgagacaccgaaaccaccaaagccagatccactgaagattaccaagggaaaacttggtggacccaaagagacccctccgaacgggaatttaagtcccgcacctcgcctccgccgtgattactcatacgagcgcgtgggacctacgtcctgccggggtcgtggaagaggcgagtacttcgcacggggtcgcggatttcggggaacgtatgggggtagaggcaggggagccagatctcgggagttccgctcataccgagaattcagaggtgacgatggcagaggaggtggcactggcggtccaaaccatccccctgcacccagggggagaactgcttccgagaccagaagtgagggcagcgagtacgaagagatccctaagagaaggcgacaacgcggtagtgagacagggtccgaaactcacgaatccgatctggctccctctgacaaagaggcacctacccccaaagaaggcaccttgacacaagtgccattggctccgccaccacctggggctcctccctcgcccgcaccggcaaggttcacagccagaggcggaagagtgttcacgcctcggggtgtgccttccaggcggggacggggtggcggaagacccccaccgcaggtgtgccctggttggtcaccaccagccaagagcctcgccccaaagaagccccctacaggccctctcccgcctagcaaggagcctctaaaggaaaaactgatacctggaccgctcagtcctgtcgccagggggggttccaacggagggagcaacgttggcatggaggacggggaaaggcctaggagacggaggcatggcagggctcagcagcaggacaagcctccccgattcagacgcctaaagcaggaacgcgagaacgccgctcggggatctgaaggcaagcccagccttactctgccggcaagtgcacctggcccagaagaggcacttaccacagtcactgtggcacccgctcctagacgcgctgcagccaagtcacccgacctgtctaaccagaattcggaccaggcgaatgaggaatgggaaacggcttcagaatcctcagattttacaagcgaacgcagaggagacaaagaggctcctccaccagtactgttaactcccaaggctgtgggcactcctggcggtggcggaggtggcgcagtccctgggatttccgctatgagtcggggagacctctcacagcgcgcaaaagatctcagcaaaagatcttttagttcccagcggcctggcatggagcggcagaacagacgccctggccctgggggaaaggctgggtcgtccggttcatcgtccggaggagggggtggaggacctggtgggaggacagggccaggaaggggagataaacggagctggccgtccccaaaaaaccggtctcgcccaccagaggagaggcccccaggtctcccgctgcctcccccaccgccaagcagcagcgcagtattccgacttgaccaggtgattcactctaaccccgctggaatccaacaagccctggcccagctcagtagtcgccaggggagcgtaactgctcctggaggtcatccccgacataagcccggacctccacaggctccacagggacctagcccgaggcccccaacgcgctacgagccgcaaagagtgaactccggcctcagtagcgatccccactttgaagagccgggtcctatggtccgaggggtgggcggaacccctagggactcagccggagtttctccattcccccctaaaagaagagaacgtccacctcgtaagccagagcttctgcaggaagaatcactcccacctccccacagttccggcttcctgggctccaaacctgaaggccctgggccacaggctgagagccgcgacactggtaccgaagctctgactccacatatctggaaccgccttcataccgcaacctcacgtaaatcctaccgtcccagtagcatggagccctggatggagccgctaagcccctttgaagatgtggccggtacagaaatgtctcagtctgacagcggggtggacctgtcaggagactcccaggtgtcttcaggcccatgttctcagaggagtagtccagatgggggactgaaaggagcggcagaaggtcctcccaagagaccagggggaagcagtccgctgaatgccgttccttgtgaagggcctccaggcagcgaacctcccagacgccctcctccagcccctcatgatggcgatcgaaaggaactgccacgggagcagcctctgcctcctggccctatcggcaccgaacgcagccagcacactgaccgtgggaccgagcctggcccaatacggccatcgcatcgcccagggcctccagtgcagttcggtacgagcgataaagattctgacctcagacttgtcgtgggcgacagtctgaaagccgagaaggaactcacggcctccgtgacggaagccattccggtaagccgcgactgggagctgctgccctcagcggcagcatccgcggagcctcagtcaaagaatttagatagtggacactgtgtgcctgaaccctcttccagcggccaaaggctgtaccccgaagtgttttacgggtctgctggcccttcatcctcacagattagtggtggagccatggacagccagctacaccccaacagtggtggtttcagaccaggtaccccctcccttcacccctatcggtcccaacctctgtatctacctccgggtccagctcccccttcagctctcttatccggggtggctctgaaggggcaattcctcgatttttcaactatgcaggctaccgaattaggaaaattaccagctggtggagtactgtatcccccaccaagttttctctattcccctgctttttgcccatccccgttaccagatacgtcattactgcaagtccgccaagacctaccatccccgtccgatttctacagcacgccactgcagccgggagggcaaagtggcttcctgccgagcggcgcacccgctcagcagatgctgctgccaatggtcgattcacaactgccagtcgttaactttggttccctcccgccagccccacctcccgcacccccttcactcagcttgctccccgtgggcccagccctccagcccccttcactggcagtgcgcccaccaccagcaccagccacccgcgtgctgccttcacctgcgcgaccctttcctgccagtcttggcagggcagagttgcaccccgttgaattgaagcctttccaggactaccaaaaactgtcctcaaaccttggagggccaggttcgagcagaacacctcccacggggagaagtttctcaggacttaattcgaggcttaaggccactccctcaacctactccggcgtattcaggactcagcgggtggatctgtatcagcaggccagcccgcctgatgcactgcggtggatccccaagccctgggagagaacaggccctcctcccagagaggggccatcccgtcgggctgaagaacccggtagcaggggtgacaaagaacccggtctaccacctccaagatag

SEQ ID NO: 236258 - DNA, 6449 bp, synthetic construct
  misc_feature 1..6449: note = Description of Artificial Sequence: Synthetic coding sequence
  source 1..6449: mol_type = other DNA
atgagtgacaggtctggcccaaccgctaagggaaaggacggaaagaagtactcctccctgaacttatttgatacatacaagggaaagtccctagagatccagaaaccagcagtggctccacgccatggcctccagtcgctgggaaaagtcgccatcgcacgtcggatgccccctcctgccaaccttccctcactgaaggcagagaacaaaggtaatgatccaaacgtgtccttggtgcctaaggacggaaccggatgggcaagcaagcaggagcagagcgacccaaaaagtagcgacgcttcaactgcgcagccacccgagtcgcagccactccctgctagccagacaccagcctccaatcagccgaagcggcctccagccgctcccgagaacacgccccttgtacctagcggcgttaagtcgtgggcccaggcatcagtgacacacggcgctcatggagatggcggtcgagcatccagtcttctttctaggttctctcgagaagagttccctacccttcaggcagcaggtgatcaggacaaggctgctaaggagagagaatccgccgagcaaagctccggtccaggtcccagcttacggccacaaaatagcaccacctggagggatggcggaggtagaggaccagatgaactcgagggaccagacagtaaattacatcacggccacgacccaagaggcggactgcagccgtccgggcctcctcagttcccgccttaccgcggaatgatgcccccttttatgtatcccccttacttgcccttcccaccaccatacgggcctcagggcccataccgctaccctacgcccgatgggccaagccgttttccaagagtggctggaccaagagggtctgggcctccaatgcggctggtagaacctgtcggtcgcccaagcatactgaaagaggataacctcaaagaatttgatcagcttgaccaagagaacgatgacggatgggccggagctcatgaggaggtcgattacaccgaaaaactgaagttttccgacgaagaggatggccgagattctgacgaggagggcgctgaagggcatagagacagccagtctgcttccggcgaagagcggccacctgaagcagacggaaagaaggggaatagccctaactcagaacccccaacccccaagacagcttgggccgagacttcaaggccacccgaaacagaacctgggcctccagcaccaaagcctcctctccctcctccacatagaggcccagctggcaattggggtcccccaggcgattatccggatcgaggcggtcccccttgtaagcccccagctccggaagatgaggatgaagcctggcgccagaggaggaaacagtcctcttcagaaatctccctggcagtggagagggcaaggagacgacgggaggaagaggagcggagaatgcaggaggagagacgagccgcatgcgcggagaagttaaaaaggctggacgagaagttcggagcccctgacaaaaggcttaaggcggaacccgcagctcccccagctgcgccaagcaccccggcaccccctcctgctgttccgaaagagttgcctgcgcctccggcaccccctcccgctagcgctccgacacctgagaaggaacccgaagagccagcacaggctcccccagcgcagtcaacgcctacacccggtgtggctgcagcaccgacccttgtaagcggcggtgggtctacgagttcgacctcctctggatcgtttgaggcatcaccggtcgagccccaactgccatctaaagaaggtccggagcctcctgaggaggttccccctccaacgactcccccagtgccgaaggtggagccgaaaggcgatgggatcgggccaacaagacagcccccatctcagggcctcggataccccaagtaccagaaatcactgcctcccaggttccagcgccaacaacaagagcaactactcaaacagcaacaacaacatcagtggcaacagcaccagcagggctcagccccaccaacccctgtaccaccgtcaccaccccagccagtaaccctgggcgcagtccctgccccacaggcacccccacctccccctaaagccctatatcccggagcccttggtcgcccaccacctatgcctcctatgaattttgatccccgttggatgatgatccctccatacgtggaccccagactgttacagggccgtccccctcttgatttttatcctcctggcgtgcatccttcaggcctcgtacccagggaaaggtcggactctggaggatcctcttcagagccgtttgaccgtcatgcccctgccatgctgcgcgagagagggactccgccagtggatccaaaattggcctgggtgggtgacgtgtttactgctacaccggctgaaccacgacccttaacaagtccactgaggcaggcggcagacgaagacgataagggcatgagatcagaaacaccgcctgtgccgcctccccctccctacctcgcaagttacccgggttttcccgagaatggggcacctggccctccgataagccgtttccccctggaagagccagggccaagacccctcccttggccacccggtagcgatgaggtggccaagatccaaacccctccacctaagaaagaaccgcctaaagaggagacagcacagctcaccggccctgaagccggtaggaagccggcaagaggggtcggaagtggaggtcagggccctccgcctcctcgcagggagagtcggaccgaaaccagatgggggcctaggcccggatccagcagacggggtattccaccggaagagcccggagcaccccctagacgtgctgggccaattaagaaaccaccacccccaacaaaagtggaggagcttccccctaaacctctggaacagggggatgagacacccaaaccccctaaaccagaccccctgaagatcacaaaaggaaagttgggaggccctaaagagacacctcctaacggcaatttgtcccccgctcccagactgcggagagattattcctacgaacgcgtgggccctactagctgccgcggtcgcggaagaggcgagtattttgctcggggtcggggtttccgaggaacgtatggcggacgcggacggggagcagctggcaatagtgccgtgacagagtcttttgaagaaatgatgggcgtggaggtgggccagggcgatcagaccaccctgctcctgcctgaggccgctcttcctgccagacacggcgcacgggtgcaatccatgcgcaaatcaccgtctggcgctggaagtggggcacaaaagcaggctgctagacccatgagagttatctggctgcttcaaacacggaggttaccacatcccagacgcgaacattccccacgcagcagaagtccaaccactcggtctcccactttcccagcgccagccaggtttacccccggagtgggcgagagcagcctgccagaaggcatctctcctggccctaggcggagagagccccctcaggtgtgtccaggctggtcccccccagccaaatccctggctcccaagaaacccccaacgggtccactgcccccttccaaagaacccctcaaagagaagcttatccccggtcccctttccccagtggcccgtggaggaagtaatggaggatcaaacgtggggatggaggacggggagcgcccaagacgcaggcggcacgggcgtgctcagcagcaagataagccacctagattcaggaggctgaagcaggagagggagaacgccgcacgaggctcagaggggaagccaagcctgaccctgcccgcatccgcccctggacctgaggaagccctgaccactgtaaccgtggcgccagctcctcgaagggcagctgcaaaatcacccgatttgagcaaccagaactcagaccaggccaacgaagagtgggagaccgcttctgagagctcagactttacaagcgagcggaggggggacaaggaggcccctcctccagtgttgctcacacctaaggccgtgggcactccaggcggaggagggggtggcgcagttcctggcatctccgcaatgtctaggggagatctgtctcagcgggcaaaggatctgtctaaaaggtccttctcgtcacaacgaccagggatggagcggcagaatagacggccaggcccagggggaaaggctggcagctcaggtagcagctccggcggtggtggaggcggacccggtggcagaaccggtcccggacgaggagataagcgcagctggccttccccaaaaaacagaagccgaccaccagaagaacggccacctggtcttcccttgcctccacctcccccttctagctctgctgtgtttaggctggatcaggtgatccactccaaccccgcaggcatccagcaggctctggctcagctcagttcgagacagggtagcgtgaccgcccctggcggacatcccagacataaacctggaccgcctcaggccccacagggccctagcccaagacctccgacaaggtatgaaccgcaacgggtgaattctggtctgtcttctgacccacatttcgaagagcctggccctatggtccgtggcgtcggcggaactcccagagatagcgctggcgtgagtccattccctcctaagaggcgcgaaaggccgcctcgcaagccagaacttttgcaggaagagagcctgccccctccgcactcctccgggtttttgggaagcaagccagagggacctggcccacaggccgagagccgggatacaggcaccgaggcattaaccccccatatttggaatcgactgcatactgccacgagccggaagtcgtatcgcccaagcagtatggaaccttggatggaaccgttaagcccctttgaagatgttgccggaacagagatgagccagtcggattcgggcgttgacctttccggagattcccaagtaagctcaggtccttgctcccagcggtcttctcccgacggcggtcttaaaggcgctgccgagggcccaccaaaaaggcctggcggatcttccccactgaacgccgtaccttgtgagggccctcctggttcagagccccctcgcaggcccccacccgctccccatgacggggaccgcaaggaactgcctagagaacaaccattgccccctgggccaattggtactgaacggagccagcatacggaccggggaacagaacccggtcccatccggccttctcaccggcctggaccccctgtacaattcggcacttctgataaagacagcgacctccgtctcgtggtaggcgactcccttaaggccgaaaaggaattgactgcctcggtgaccgaggccattcccgtgagtcgggactgggaactgttaccgtccgccgctgcttccgcagagcctcaatctaaaaacttagattcagggcattgtgtgccagaaccaagctctagtgggcaacgtttgtatccagaagttttctatggcagtgctggcccttcaagcagtcagattagcgggggacacgggctgagtgtgacgagtaaacaatggcgccgtcccggaacaccttctctacatccctacagatcacaaccgctgtacctgccccctggccctgctcctccttccgcactcctttctggcgtggccttaaagggacaattcctagatttttctactatgcaagctactgaacttgggaagctgcctgccggaggtgtgttataccctccaccctcatttctctactctcccgctttttgtccttcgcctttgccagacactagtctgcttcaagtcagacaggacctgccttctccaagcgacttctactctactccactgcagccgggtggccagtcagggttcttaccaagcggggctcccgcacagcagatgcttctcccaatggtggactcccagctgcctgttgtgaatttcggcagcttgccgcctgcccctcctcccgcaccccctagcttgagtttactccccgttgggccagccctccaacccccttcactcgcggtcaggccaccacccgcaccagcaacaagagtcctgccttcccccgcaaggccattcccagcctccctaggacgggcagagctacaccccgttgagctcaaaccttttcaggattaccaaaaactatctagcaacctcgggggaccgggttcatcccgaactccgcctacgggcaggtccttttcaggcctgaatagtcgtctgaaggctaccccatcaacatatagtggcgtatttcgaacacagagagtagacctgtaccagcaggccagtccacctgacgctctgagatggatccctaaaccctgggagcggactggacctcccccaagagaaggcccttcaagacgggctgaagagcccggtagtcggggtgataaagaacctggactaccgccaccgcgtta

SEQ ID NO: 236259 - DNA, 1650 bp, synthetic construct
  misc_feature 1..1650: note = Description of Artificial Sequence: Synthetic coding sequence
  source 1..1650: mol_type = other DNA
atgtcagacagaagcgggcctactgcaaagggaaaggacggtaagaaatattcctcactcaatctattcgacacatacaagggcaaaagcctggagattcagaagcccgcagtcgccccaagacatggcctgcagagcttggggaaagtcgccattgctcgacggatgccaccccctgccaaccttccctccctgaaagctgagaataaggggaatgacccaaacgtgtcccttgtgcctaaggacgggaccggatgggcctccaagcaagaacagtccgatcctaaatcatcagacgcctccacggcgcagcctcctgagtctcagcccctccccgctagccagactcctgcgtccaatcaacccaagaggccccctgccgctccagaaaacactcctctggtaccctctggggtcaagtcctgggcccaggcctccgttacccacggtgcgcacggagatggtggtcgcgcttcatccttgctgtcaaggttcagcagagaagaattccctacactccaggctgccggtgatcaggacaaagcagccaaggaaagagagtctgcagagcagagctcaggccctggcccaagcctccgtccccagaacagcaccacctggcgggacggagggggtaggggcccagatgaactggagggtccagattccaagctacatcacggacatgatccgaggggagggctacagcccagtggccctccacagtttccgccatataggggtatgatgcctccattcatgtaccccccttatcttcccttcccgccaccttatggtccacagggaccttataggtaccctacacccgatggacccagcagatttccaagggtggccggaccaaggggtagcggtccccctatgaggcttgtggaacccgttgggagaccctcaatcctgaaggaggacaatctaaaagaattcgaccaactggaccaggaaaacgacgatggatgggcaggcgctcacgaggaagttgactacactgagaagcttaagttttccgacgaggaggatgggagagactccgatgaggagggtgcggaggggcaccgcgacagtcagtctgcctccggcgaggagcgccctcctgaagccgacggcaagaaaggtaatagcccgaactccgaacctccgactcctaagacggcttgggccgagacttctcggcctccagaaaccgaaccagggccaccggctccgaaaccacccctcccgcctccccatcggggacctgcaggtaactgggggccaccaggggactaccctgaccgagggggtcctccgtgtaagcctcctgctcctgaagacgaggatgaagcctggcggcagcgacgaaagcagtcttcctctgaaatctctcttgctgtggagcgggcacggagacgtagggaggaagaagaaaggcgcatgcaggaggaaaggcgggctgcctgtgcagaaaagttaaaaaggctggacgagaagtttggcgctcctgacaaacgactcaaggcagagcccgcagcaccacctgctgcaccatccactccagccccaccaccagccgctagcgaggtgccattgatggaagactcccggggacaacaacgagatcctccgcgagggctcgaagcgccacacccatag

SEQ ID NO: 236260 - DNA, 1650 bp, synthetic construct
  misc_feature 1..1650: note = Description of Artificial Sequence: Synthetic coding sequence
  source 1..1650: mol_type = other DNA
atgtccgaccgctccggccctacagcaaaaggcaaggacggaaagaagtattctagcctgaacctgtttgatacatacaaggggaaatccctggagatccagaagccagctgtagctccacgtcacgggctgcagtcactcggtaaagtcgcaatagcgcgacgaatgcccccacctgctaacctgcctagtctcaaggctgagaacaagggcaacgatcccaatgtgtccctggtccccaaggacgggaccggctgggcaagtaagcaagaacagtcggacccaaagtccagtgatgccagcacagctcagcctcccgagtcccagcctctccctgcaagtcaaaccccagcctcaaaccagcccaagaggcctccagccgcaccagaaaataccccattggtgccatctggcgtcaaatcatgggctcaggcctcggtgacccacggcgcacatggtgatggtggcagagcatctagcctcctctctcgattctccagagaagagttccctaccctccaggcggctggcgatcaggacaaagccgctaaagagcgggaatcagctgagcagtcaagcggacctggcccatccttgcggccacagaacagtactacttggcgtgacggaggcggacgcggaccagacgagctggaaggacctgactccaagttacaccatggccatgatcctcgcggaggcctccagccctcagggcctccacagtttccaccctacagagggatgatgcctccatttatgtatcctccttacctgccattcccccctccatacggccctcagggtccctaccgctatcccaccccagatggtccatcacgctttcctcgcgttgcgggaccgaggggaagcggccctcccatgcgacttgttgagccagtgggtaggccttccatcttaaaggaggacaacctgaaggagttcgatcagttagaccaagagaacgacgacggatgggccggagcccatgaggaggtagactataccgagaagctgaagttttccgatgaggaagacggaagggacagcgatgaagagggtgctgaggggcaccgcgactctcagtccgcaagtggagaggagcggcctcctgaagctgacggtaaaaagggcaatagtccaaactcagagcctccaactcccaagactgcatgggctgagacctctaggcctcccgaaactgagccgggtcccccagctcccaaacccccactgcccccaccacaccggggaccagcagggaattgggggcctccaggcgattacccagaccgcggaggccctccttgtaagcccccagcccctgaggacgaagacgaagcctggcgacaacggaggaaacagagttcctctgaaatatctcttgctgtggagcgagcacgaaggaggagggaggaagaggaaaggcggatgcaagaggaaagaagggctgcttgcgcagaaaagttgaaaagactggatgaaaagttcggcgctcctgataaaagactaaaagccgaaccagccgctccccctgccgcacccagcacccctgctcctccccctgctgccagcgaggtgcccctgatggaggacagcaggggtcagcagagagaccctcccagaggactggaggccccacacccctag

SEQ ID NO: 236261 - DNA, 4149 bp, synthetic construct
  misc_feature 1..4149: note = Description of Artificial Sequence: Synthetic coding sequence
  source 1..4149: mol_type = other DNA
atgctgagggagcgcggaaccccaccagtggatcccaagctagcttgggttggggatgtttttaccgctacgcccgctgaacctcgcccactgaccagcccgctgagacaagcggcagatgaggatgacaaggggatgcggtcagaaacaccaccggtcccaccccctcctccttacttggcctcttatcctggtttccccgaaaatggggcacctgggccacccatatcgagattccccctagaagaaccaggccctcgcccactaccctggccacctggaagcgatgaagtggcaaagatccagacgccacccccaaagaaggaaccgccaaaagaggaaactgcacaactgactgggccagaggctggcagaaagccggctcggggtgtcggatcaggaggacagggtccacctcctccaagacgggagtcaaggactgagacacggtggggtccaaggccaggcagtagcagacggggtatccctcctgaggaacccggagcgcctccccgtcgggcagggcctatcaagaagcctccgcctccaactaaagtcgaggagctgcctccaaagcctctggagcagggcgatgagacaccgaagccaccaaagccagatcccctcaagattaccaaaggcaagctgggagggcctaaggagactcccccaaatggaaatctgagccccgcacctcgcttgaggagagactacagctatgaacgagtgggccctacaagctgtaggggcaggggcaggggggagtactttgcacgcggaaggggatttagaggaacttacggaggcagaggcaggggggcaaggtcccgagagtttcgctcctaccgggaatttagaggcgacgacggacgcggaggtggcacaggcggaccgaaccacccacctgccccaaggggtcgtacagcctctgaaacccgatctgaggggtctgagtacgaagagatccccaagcggagaaggcagagaggctcagagactggctcagaaactcacgagtcagacttggcacctagtgacaaggaagctcccactccgaaggaaggtaccctgacccaggttcctctggctcccccacccccaggggctccaccatctcccgcaccagcacgctttaccgctcgcggagggagagtgtttacccctaggggggtgccttcacgaaggggcagaggaggaggaagacctcctcctcaagtgtgtccagggtggtcgcctcctgccaaatcactggcccctaagaagcccccaacaggtcctctgcccccaagcaaggagccactcaaagaaaaactgatccccggacctctttcccctgtggcgcgaggtgggtcaaacggtggtagtaacgttggaatggaggacggcgaacggcctcgacgcaggagacacgggcgtgctcagcagcaggataagccacccagatttagaagattgaagcaagagcgtgagaatgcagcccgagggtctgagggcaagccatcactgacactccctgcatcagctccaggacccgaagaggcactgaccacggtgacagttgcccctgcacctagacgggcagccgctaaaagcccagatttgtcaaaccagaattcagaccaggcaaacgaagaatgggaaacagcctccgaaagttccgactttacctctgagaggcggggtgataaggaagcacctccccctgtgttactgacgcctaaggcagtcggtacccctggagggggaggcggtggagcggtgccgggaattagcgcaatgtcccgtggagacttgagtcagcgcgctaaagacctttccaagaggtcattcagctcacagcggccaggtatggagcggcagaacagacgaccaggccctgggggtaaagcaggtagctcaggaagctcctccggcggagggggaggcggtccaggaggtcgcaccggcccaggcagaggcgataagaggtcttggccctctcctaaaaatcgtagtcgtcccccagaagaacgccctccagggctgccgctgcccccaccacctccgtcttcaagtgccgttttccgcttagaccaagttatccattcaaaccctgcaggaattcagcaggcactggcgcagttgtcttccagacagggatccgtgacggccccagggggacatccacgtcacaaaccaggaccaccgcaagcaccgcagggcccatcaccacgaccccctacacgctatgaacctcagagagttaattctggtctgagctccgatcctcatttcgaggaacccggacctatggtgcgcggagtgggaggtactccaagagactcggccggagtttcccctttccctcccaaacgcagggagcgccctccccgaaagccggaacttttacaagaagagagcctacctccgcctcactccagcggattcttgggatctaagccggagggccctgggcctcaagctgaatcacgcgacacaggcaccgaggctctgacaccccacatttggaatcggctccatactgccacttctcggaagagctacagaccaagctctatggagccctggatggagcctctgtcccctttcgaggatgtggccggaacggaaatgtctcagtcagactcaggcgtagaccttagtggtgacagccaggtttcctctggaccatgtagtcagaggtcttccccagatggagggttgaaaggggctgctgagggaccaccaaagagaccgggaggctcctcaccattgaacgcagtgccatgcgagggaccccctggctctgaaccacctcgcaggcctcccccagcacctcacgatggcgacaggaaggaactgccacgagagcaacctttaccacctgggcctattggaacagagaggagccagcacacagatcgcggaacagagcctggccctattcggccttctcaccggccaggccctccagtacaatttgggacttcggacaaggactccgatctgagactcgtcgtgggcgacagtctcaaggccgagaaggaactcaccgcgtcagtgacagaagcgataccagtctctagggactgggagctgctcccatcagccgcagctagtgcggaaccgcagtctaaaaatctggactcagggcattgtgttccggaaccttcgtcctccggacagcgactgtacccagaagtcttctacgggtctgccggtccatcctcaagccagataagcgggggagcaatggatagccagctgcaccccaattccggcggtttcaggcctgggacaccttccttgcacccatatagatcacagcccctctacttgccgccaggacctgccccacccagtgccctgctgagcggtgtagcacttaagggccagttcttggatttttccacaatgcaggccacggaactgggaaagctgccggctggaggtgtcctgtacccgcctccgtccttcctgtactcacctgcattttgcccaagtcccctgccggacacttcgctgcttcaagtgcgacaggatcttccctccccttctgacttttattctaccccactgcagcccggtggacagagcggctttcttccgtcaggcgcacctgcccagcagatgctgctgcccatggtggattcccagctccccgttgtgaattttggctccttgcctcctgcacctccacctgcaccccctagccttagtctcctgcccgtgggccctgctctgcagccacccagcctggcagttaggccccctccagcccctgctaccagagtcctgccatctccggctcgcccattccccgcttctcttggccgagccgaactacatccagtcgaattaaagccttttcaggattaccaaaaacttagtagcaatttaggcggaccaggatcctccaggaccccccctactggcaggagcttcagtggcctgaactccagacttaaagctactccctccacctactcaggtgtgttccggactcagcgtgttgatttatatcagcaggcctctccacccgatgccctgcggtggatccccaaaccgtgggaaaggaccggtccaccccctcgggagggacccagcagacgggctgaggaacccggatcccgaggggataaggagcccggattgccaccaccgcgttag

SEQ ID NO: 236262 - DNA, 984 bp, synthetic construct
  misc_feature 1..984: note = Description of Artificial Sequence: Synthetic coding sequence
  source 1..984: mol_type = other DNA
atgaccgtcgtttccgtgccacagcgtgagcccttagtcctgggagggagactcgcgccactgggtttttccagcaggggatacttcggggcactgcctatggtcactacagcacctccaccattgccacgcatccccgatcctcgagcactaccccctactttatttttgccacacttccttggcggagacgggccatgtttgactccccaaccgagagcacctgctgccttgccaaacagatcactggctgtcgcagggggtacccccagggccgctcccaaaaaaagacgaaaaaaaaaagtgcgcgcttcgccagccggacaactcccttctcggttccatcagtatcaacagcacagaccatcactcgaaggcggacgttccccagctacaggcccatccggtgctcaggaagtccccggtcccgcagctgctctggcacctagtcctgctgcggcagccggaactgaaggagcctccccagaccttgcacctctgaggcctgctgcccctgggcagacccctctcagaaaggaagtgctgaaaagtaagatggggaagtcagaaaagatagctttaccccatggacagctagtgcatggaatccacctttatgagcagcctaaaattaacagacagaagagcaagtataatctgcctttgacgaagatcactagtgccaaacgtaacgaaaacaatttttggcaggacagtgttagcagcgaccgaattcagaagcaagagaaaaagcccttcaagaacactgaaaacattaaaaattctcatctcaaaaaatcagcattcctgactgaagttagtcaaaaggagaactacgccggtgctaagttctccgatccaccatccccgagcgttctgcctaaaccaccttctcactggatggggtcaaccgtggaaaattctaatcagaatcgcgagttaatggctgtccacttaaaaactctgctcaaggtacagacttag

SEQ ID NO: 236263 - DNA, 429 bp, synthetic construct
  misc_feature 1..429: note = Description of Artificial Sequence: Synthetic coding sequence
  source 1..429: mol_type = other DNA
atgggtaaaagtgaaaagatcgcactgccacacggacagcttgtccatggcattcatctctatgagcagcctaagatcaacaggcagaaaagtaagtataatctccctctaactaagataaccagtgctaagagaaatgagaataacttttggcaggatagcgtgtcatccgacagaattcagaaacaggaaaaaaagccctttaaaaataccgagaacataaagaactctcatcttaaaaagagcgcttttttgaccgaggtcagtcaaaaggaaaactatgccggagccaagttctccgatcctccaagccccagcgtgcttccaaaacctccgtctcattggatgggctccactgtcgagaattcaaatcagaaccgcgaattgatggccgttcatttgaagacactcctcaaggtgcagacttag

SEQ ID NO: 236264 - DNA, 429 bp, synthetic construct
  misc_feature 1..429: note = Description of Artificial Sequence: Synthetic coding sequence
  source 1..429: mol_type = other DNA
atgggcaagtccgagaagatcgccctcccgcacggccagctggttcacggaatccacctttacgaacagcccaagataaatagacagaagtctaaatataacctgccacttactaagattacttcggccaagcgaaatgagaacaacttctggcaggactctgtctcgtccgaccgaatacagaagcaggagaaaaagccctttaagaatacagagaatattaagaatagtcatcttaaaaagtcagcgttcctgacagaggtgagccagaaggaaaattatgctggcgcaaagtttagtgaccctccttcaccctctgtcctgccgaagccgccatctcactggatgggatctacggtggaaaacagcaatcagaaccgggagcttatggcagtgcacctaaagacactgttgaaggtgcagacatag

SEQ ID NO: 236265 - DNA, 420 bp, synthetic construct
  misc_feature 1..420: note = Description of Artificial Sequence: Synthetic coding sequence
  source 1..420: mol_type = other DNA
atgggcggtggcgagcggtacaatatacccgctccccagagcagaaacgtctcaaagaaccaacagcaattgaaccggcagaagaccaaggagcagaactctcagatgaaaattgtgcacaagaaaaaggaacggggacacggttataattcgtctgcggcagcttggcaggctatgcagaacggcggtaaaaacaaaaacttccctaataatcagtcttggaattcaagcctcagtgggcctagactgctgtttaaaagtcaggcaaatcaaaactacgctggggctaagtttagcgaaccaccctctccttcagtgctcccaaagcctccgagtcattgggtgccggtctcctttaaccccagtgataaggagattatgaccttccagctgaaaactctcttaaaggtgcaggtctag

SEQ ID NO: 236266 - DNA, 420 bp, synthetic construct
  misc_feature 1..420: note = Description of Artificial Sequence: Synthetic coding sequence
  source 1..420: mol_type = other DNA
atgggtggcggagaacgctacaacattccggcaccccaatctcggaatgtcagcaagaaccagcagcagttaaaccgccagaaaacgaaagagcagaactcacagatgaagatcgtacacaaaaagaaggaaagagggcatggctataattcgtcagcggcagcatggcaagccatgcagaatggaggcaaaaacaagaactttcccaacaatcagagctggaacagctccctgtcaggccctcgattactcttcaagtctcaagctaatcagaactatgctggcgcaaaattctcagaacctcccagccctagtgtgctccctaaaccaccaagtcattgggtacccgttagcttcaatccctccgataaagaaattatgacatttcagcttaagaccttgctcaaggttcaggtctag

SEQ ID NO: 236267 - DNA, 597 bp, synthetic construct
  misc_feature 1..597: note = Description of Artificial Sequence: Synthetic coding sequence
  source 1..597: mol_type = other DNA
atgcttctgatcctcctcagtgtggctctgctcgccctgtcttctgcccagaatttgaatgaggacgtgagccaggaagagagcccctccctgatcgctggtaaccctcagggacctagcccacagggcggaaacaaaccacagggaccccctcctcctcctgggaagccacagggaccaccccctcaggggggaaataagcctcagggaccacccccaccaggcaaaccacagggccctccacctcagggagataaatcccgttcaccacggagtccccctgggaaacctcagggccctccacctcagggcggtaagccacaggggccacccccacagggtggtaacaaaccccagggccctcctcctcccggtaaacctcaggggcctccagcgcagggcggaagcaagagtcagtcggctcggagtcccccaggcaaaccacagggaccacctcagcaagagggtaacaacccccaaggcccaccccctcccgctggtgggaatccccagcaaccacaggcaccgccagctggacagccacaaggtccgccaagaccccctcagggtggacgcccatctcgaccgcctcaatag

SEQ ID NO: 236268 - DNA, 537 bp, synthetic construct
  misc_feature 1..537: note = Description of Artificial Sequence: Synthetic coding sequence
  source 1..537: mol_type = other DNA
atgctgctgatcttattgtctgtagccctgttggcgctgagctccgctcagaaccttaatgaggacgtgtctcaagaagagtcaccctcacttattgcgggaaacccccagggcccatccccccagggaggcaataaacctcagggtcccccaccccctccaggcaagccgcagggccctcccccacagggtggaaataagcctcagggcccaccccctccgggaaaaccccagggccctccccctcagggcgacaagtctcgatcacccaggtccccccctggaaagccgcaggggccacctcctcagggcggtaagccacagggtcctcccgcacaaggagggagcaagagtcagagtgcaagaagccctccaggtaagccccagggaccgccacaacaggagggcaacaatcctcagggtccacctccaccagctggagggaatccacagcagcctcaagctccccctgccggacaaccacaggggcctcctcgccctccccagggcggaaggccaagccgccctcctcagtag

SEQ ID NO: 236269 - DNA, 597 bp, synthetic construct
  misc_feature 1..597: note = Description of Artificial Sequence: Synthetic coding sequence
  source 1..597: mol_type = other DNA
atgctgttgatcctgctgagcgtcgcgttactggcactgtcttccgcacaaaatcttaacgaagacgtctcacaagaggaatctcccagtctcattgccggaaatccccaaggtccatctccccaggggggtaacaaaccgcagggcccacccccaccacctggcaaaccacagggaccgccaccacaaggaggcaataagccccagggtccgccacctcctggtaaacctcaggggccacctcctcagggagacaagtcaagatccccgcgttccccacctgggaagccacaaggaccgccacctcagggcggtaagccacaaggaccccctccacagggtggtaataagcctcagggacctccacctcccggaaagccccaagggccaccagcgcaaggaggctccaaaagccagtcagccaggtccccaccaggaaagccacagggcccacctcagcaggaaggtaacaatccgcaagggccacctcctcccgcaggtggtaacccgcagcagccacaggcccctcccgcaggtcagccacaaggcccacctcgcccacctcagggtggccgtcccagcaggccaccccagtag

SEQ ID NO: 236270 - DNA, 1251 bp, synthetic construct
  misc_feature 1..1251: note = Description of Artificial Sequence: Synthetic coding sequence
  source 1..1251: mol_type = other DNA
atgttacttattcttctttctgtagcactgcttgcactgagcagtgctcaaaatctgaacgaagacgtgtcccaggaagagagtccttctctcatcgctgggaatccccagggggcacctccccagggtgggaacaagcctcaaggccctcccagtccccctgggaaaccccagggtccacctccccagggcggtaaccagccgcagggccctcctcccccacccggtaagccccaaggaccccctcctcagggcggaaacaagccccaggggcctccacctcccggaaaaccacagggcccaccccctcagggcgataagtctaggagcccccgaagcccaccagggaagccacaggggccaccccctcaaggtggcaaccagccacagggacccccacctcctcccggaaaaccccagggccctccccctcagggaggaaataaaccgcagggcccaccacctcctggcaagccacagggacctccaccacaaggcgataataaatcaagatcttcacgcagtcctccagggaaaccccagggacctccccctcaggggggtaatcagccccaggggccaccgcctccacctggaaagccacagggacctccgccacaaggaggcaacaagccccagggcccaccaccgcctgggaagccacagggcccacctccacagggcgataacaagagtcaatccgcgcgttctccccctggaaagccccagggccctccccctcaaggaggaaaccaaccacagggtcctccccctccgcctggcaagccccaggggcctccccctcagggcggaaataaaccccaaggcccaccacccccaggcaagcctcaaggcccaccccctcaggggggaagcaaatcccgctcttctcggtccccccctggcaagccgcaggggccaccgccacagggcggaaatcagcctcaaggaccaccacctcccccaggaaaaccccagggtcctcctccccaggggggaaataagccgcagggcccaccacccccagggaagccacaaggacctcctccccagggcggttctaagagtcgaagcgctaggtctcctcctgggaaacctcagggcccacctcagcaggaggggaataacccacagggcccaccacctccagccggtggaaacccacagcagccacaggccccaccggctgggcaaccacagggccctccgaggccaccccaagggggaaggccttcgagaccaccacaatag

SEQ ID NO: 236271 - DNA, 744 bp, synthetic construct
  misc_feature 1..744: note = Description of Artificial Sequence: Synthetic coding sequence
  source 1..744: mol_type = other DNA
atgctgctgattctcctctccgtcgccctgctcgctctgtcctcagcggagagtagtagcgaggacgtaagccaagaggagtccctgttcctaatttctggaaagcctgagggcaggcggccacagggaggaaaccagccacagagacctcctccgccaccaggcaagccacagggacctcctccccagggcggaaatcaaagtcaggggcctcccccacctccaggcaaacccgagggtaggcccccacagggaggcaaccagagccaaggccctccaccacacccaggcaaacccgaacgtccaccgcctcaggggggtaaccaaagtcagggcaccccgcctcctccaggcaagcccgaacgccctccaccacaggggggaaaccagagccaccgcccaccgccaccaccaggaaaacccgagagaccccctccccaagggggaaatcagtcacagggacccccaccccacccaggaaaacctgagggcccaccacctcaggaggggaacaaatccagatcagcgagatctccccctggaaagccacagggccctccacagcaggagggaaacaaacctcagggccctcccccaccagggaagccacaaggaccccctccagctgggggaaacccccagcagcctcaggctcccccagctgggaaaccacagggtccccctccgccaccacagggaggcaggcctcctagaccggctcagggtcagcagccaccacagtag

SEQ ID NO: 236272 - DNA, 744 bp, synthetic construct
  misc_feature 1..744: note = Description of Artificial Sequence: Synthetic coding sequence
  source 1..744: mol_type = other DNA
atgctgttgattctcctgagcgtggccctgctggccttgagctccgccgagtccagcagcgaagacgtgtctcaggaggagtccttatttttgatctcaggaaagccagaaggtcgcagaccccaaggcggaaaccagcctcagagaccccctcctcctccgggaaagcctcaaggcccacccccacagggcggaaaccagtcgcagggccctccaccaccacctggcaaacccgagggcaggccaccacaggggggaaaccaaagccagggtccacctccacaccctggtaagccagaacgcccaccaccccaggggggaaaccaatcccaggggacacccccaccccctggaaaacctgagcgccctccccctcaaggcggtaatcaatctcacaggccacctcctcccccagggaaacccgaacgccctcccccacagggaggcaatcaaagccagggtccccctccacatccgggaaaaccagaaggccctccccctcaggagggaaataagagtcgctctgctaggtcacctcccggtaagccacaaggccctcctcagcaggagggcaacaaaccccagggtcctccacctccgggaaagcctcaggggccacctccagccggaggcaatcctcagcagccacaggctcccccagcaggaaaacctcaaggcccaccaccacccccacagggtgggagacctcctcgacccgcacaaggccagcagccacctcagtag

SEQ ID NO: 236273 - DNA, 537 bp, synthetic construct
  misc_feature 1..537: note = Description of Artificial Sequence: Synthetic coding sequence
  source 1..537: mol_type = other DNA
atgctcctgatcctactgtccgtagcacttctggccctgagctcagcagaatcctcgtccgaggatgtgtcccaggaagaatcactgttcctgatcagcgggaagcctgagggaaggcggcctcagggtggcaaccaaccccagaggcctccacctcctcctgggaagcctcagggaccgccaccccagggaggaaatcagagccaggggccaccccctcctcctggtaagcctgaggggcgacctccccagggaggcaaccagagccagggacccccaccacaccccggaaaacccgagagacctccacctcagggaggtaaccagtctcagggtaagccccaaggcccaccgcagcaagagggcaataagccccaagggccaccgccaccaggcaaaccgcagggtccaccacctgcgggagggaatccacagcagccacaagcccctccggcagggaagccccagggacctcctcccccacctcaagggggaaggccacccaggcctgctcaggggcagcagccaccgcagtag

SEQ ID NO: 236274 - DNA, 501 bp, synthetic construct
  misc_feature 1..501: note = Description of Artificial Sequence: Synthetic coding sequence
  source 1..501: mol_type = other DNA
atgttactgattctgctctcggtggccctgctggcgttttccagtgcccaggatctaaacgaggatgtcagccaagaggatgttccgctagtgatttcagacggcggtgacagtgagcagttcctagatgaagagcggcagggccctccgcttggtgggcagcagagtcagccctccgcgggtgacgggaaccaggacgacggcccacagcaggggccaccccaacaggggggacagcagcaacaggggccacctcccccacaaggcaagcctcagggacccccacaacaggggggacatccaccccctccccaaggtagaccgcagggaccgccacagcagggtggtcacccacgaccccctagagggcgtccccaggggccaccgcagcaaggcggtcatcaacagggcccaccaccgcctccacctggaaagccgcagggccctcctcctcagggaggtcgtcctcaggggccacctcaagggcagagccctcaatag

SEQ ID NO: 236275 - DNA, 291 bp, synthetic construct
  misc_feature 1..291: note = Description of Artificial Sequence: Synthetic coding sequence
  source 1..291: mol_type = other DNA
atgctgttgatcctactatccgttgcactactggccttctcctctgctcaggacttggatgaggacgtatcccaggaggacgtccccctggtgatatcggatggcggagacagcgagcagttcatagacgaggaggggcacaaggaccacccaaatagagaggccattagtaaagtgcttcctcacctcctcctggagtcccctcgagaccatttgccgaaaggggctgcccacaaagaccttcaccgaggctccctgctgtctaatctcggcttcaatgaccggaagtag

SEQ ID NO: 236276 - DNA, 501 bp, synthetic construct
  misc_feature 1..501: note = Description of Artificial Sequence: Synthetic coding sequence
  source 1..501: mol_type = other DNA
atgctccttattctattatcagtcgcccttctcgcgttctcaagcgcccaggaccttgacgaagatgtatcacaggaggatgtccccctggtcattagcgacggcggtgactccgaacagtttattgacgaagaacgacagggaccgcctcttggcggacagcagagccagcccagcgcgggtgacgggaaccaaaacgacggccctcaacaggggcctcctcaacagggcggacagcagcagcaaggtcctccccctcctcagggcaaacctcaggggcctccacagcagggcggtcaccccccacctcctcagggcagaccccaagggccacctcagcagggcggacatcctaggccacctcgcggtcgacctcagggtcctccacaacaggggggacaccagcaggggccaccacctccacctccgggaaagccacagggacctcctccccagggcggtagaccacaggggcctccccaggggcagagccctcagtag

SEQ ID NO: 236277 - DNA, 501 bp, synthetic construct
  misc_feature 1..501: note = Description of Artificial Sequence: Synthetic coding sequence
  source 1..501: mol_type = other DNA
atgctgctgatcctcctgtctgttgcactgttggcattttcttccgcccaggacctggatgaggatgtttctcaagaagatgtgccccttgtgatttctgacgggggtgacagcgagcaattcattgatgaggaacggcagggacctccgctggggggacagcagtctcagccttccgcaggcgacggtaaccagaacgacggtccacagcagggaccacctcagcagggaggacagcagcagcaggggcctcctcctccacaaggtaagccgcagggaccaccccaacagggcggacacccacctccccctcaaggacgcccacagggaccccctcagcagggcggacaccccagaccacctagaggaaggccccagggaccccctcaacaaggaggtcatcagcagggccctccaccacctccaccaggaaagccgcaggggccacctccgcaggggggacgccctcagggaccccctcaagggcagagtccacagtag

SEQ ID NO: 236278 - DNA, 900 bp, synthetic construct
  misc_feature 1..900: note = Description of Artificial Sequence: Synthetic coding sequence
  source 1..900: mol_type = other DNA
atggctgccagtagctccgagatctcagaaatgaaaggagtcgaggagagtccgaaagtgcctggggaaggccctggacatagtgaagctgaaacagggcctccgcaggtgctggcaggcgtcccagaccagccggaggctccgcagcctgggccaaacacgacggccgcacctgtcgattctggcccaaaggcaggcctggccccagagacaaccgagacgcccgctggcgcttccgagaccgcacaggccaccgacctatctctctcacctggcggagagtccaaagcgaactgtagcccagaagacccctgccaggagacagtaagcaaacctgaagtctcgaaggaggccactgccgatcaaggtagccggctggaaagtgctgcccctccagagccagcaccagagcctgctccacagcccgaccccaggccagactctcagcccaccccgaagccagcgctgcagcccgaactgcctacccaggaagaccccaccccagagatacttagcgaaagtgtgggagaaaagcaggaaaatggagccgttgttccactgcaggctggggatggggaggaaggccctgcccctgagccccatagtcctccatcaaaaaagagtccacccgcaaacggcgcaccacctcgggtactacagcagttggttgaggaggaccggatgcgtcgggctcatagcggtcaccctggttcgcctcgcggatcattgagcagacatccctccagccagctagccggtcctggggttgagggcggagagggcacacagaagccacgcgactacattattcttgctatcctgtcttgcttttgtcctatgtggcctgtgaacattgttgcgtttgcttacgcggtgatggtttcacccatggggccttag

SEQ ID NO: 236279 - DNA, 1023 bp, synthetic construct
  misc_feature 1..1023: note = Description of Artificial Sequence: Synthetic coding sequence
  source 1..1023: mol_type = other DNA
atggccgctagttcaagcgagatcagtgagatgaaaggggttgaggaatcaccaaaggtgccgggagaaggaccagggcatagcgaggccgaaactgggcctcctcaggttctcgctggggtcccggaccaaccagaagcacctcaaccaggccctaacactacggccgctcctgtcgattcaggccctaaagcaggcctggctcccgagactacagagacacctgccggagcatctgaaaccgcacaggcaaccgatctctctctgagtccaggtggcgaatccaaggcaaactgctcccccgaggacccttgccaggaaaccgtttctaagccagaagtatccaaggaggctactgccgaccagggatcacggctcgagtctgccgctccccctgaaccggcacctgaacctgctccccagcctgatccccgacctgattcccaaccaaccccaaaaccagccctccagcctgagcttcccacgcaggaggaccccacccctgagatactgtctgagagcgtgggtgagaagcaagaaaacggcgcagtggtgccgctgcaagccggagacggtgaggagggtccagcacctgaacctcactccccaccatctaaaaaaagccccccagcaaatggtgcccctccgcgtgtcctgcagcagctagtggaggaagaccggatgcgacgagcacactctggccaccccggaagtccacgaggaagtctgtcgcggcacccaagctcccagctggccggacccggagtggagggcggtgagggtacacagaagcccagagactatatcatcttggccatactctcttgtttctgtcccatgtggccagtcaacatcgtggcttttgcttacgccgtaatgagcaggaattcgcttcagcagggcgatgtcgacggggcacagcgactggggcgagtggcaaagctgctgtccattgttgccctcgtgggcggagtcttgatcattattgctagctgtgttattaacctaggagtgtacaaatag

SEQ ID NO: 236280 - DNA, 1191 bp, synthetic construct
  misc_feature 1..1191: note = Description of Artificial Sequence: Synthetic coding sequence
  source 1..1191: mol_type = other DNA
atgcctcagctgcagttcaaggatgcgttctggtgccgcgattttactgcccatactggttatgaagtcctgctgcaacgcctgctagacggcagaaaaatgtgtaaagatatggaggagctcctgcggcagcgagcgcaggctgaagaacgctatgggaaggaacttgtccagatcgcacgtaaggccggtgggcagacagagatcaactccctgcgagccagctttgattcgctgaagcagcagatggagaacgtaggtagcagccacatccagctggctctgacattacgggaggaactccgtagtttagaagagtttcgtgaaaggcaaaaggaacagcggaaaaagtatgaagctgttatggatagagtacagaaatccaaactgtccttgtataaaaaggcgatggagtcaaagaagacgtatgaacagaagtgccgggatgcagacgacgctgagcaggcatttgaacgaatttccgccaatgggcatcagaagcaggtggagaagagccagaacaaggctcggcagtgcaaggattcagctacagaggctgagcgcgtgtatcgccagtccatagcccagctagagaaagtccgagctgaatgggagcaagaacataggacgacctgtgaggccttccagctccaggagtttgaccgactcactatcctacgcaatgcgctttgggtgcattctaaccaactgtctatgcagtgcgtcaaggatgacgagctgtacgaggaagtgcggttaacgctggaaggatgcagtatcgatgctgacatcgactccttcatccaggctaaatcaaccggtaccgagccacctggcgaggtgagactggcagactctgcagcgtcacggttttccgggctccttcacggcagcccaaaaacaacatctcttgcagccagcgctgctagcaccgaaactctaactcccactcctgagcgcaatgagggtgtctataccgccatcgctgtgcaggagatacaggggaaccccgctagtcctgcgcaagaatacagagccctttacgactatacggcccagaaccccgatgagttagacctctcagccggagatatcctggaggtcatcctggaaggagaggacggctggtggacagttgagcgtaacggccagcgtggcttcgtcccaggttcttacctggaaaaattatag

SEQ ID NO: 236281 - DNA, 1251 bp, synthetic construct
  misc_feature 1..1251: note = Description of Artificial Sequence: Synthetic coding sequence
  source 1..1251: mol_type = other DNA
atgatgcctcaattacagtttaaggatgctttttggtgtcgcgacttcacagcccacactggttatgaggttctgctacagagacttctcgacggtaggaagatgtgcaaagatatggaagaactgctgagacagagggcacaggcagaagaacgctacggtaaggagttggttcagatagccagaaaggcaggagggcagaccgagattaattcacttcgcgcatccttcgatagcctgaagcaacagatggaaaacgtgggatcctctcatatccagctggcactgacccttagggaggagctgaggagcctggaagagttcagagaaagacagaaggagcagaggaaaaaatacgaggcagtcatggatagggtccagaaatccaagttgagcctgtataaaaaagctatggagagtaaaaagacatacgagcagaagtgtcgagacgccgacgacgctgagcaagctttcgagcgtatttctgccaacggacaccagaagcaagtcgaaaaatcacagaataaggctcgtcagtgtaaagatagtgccactgaggctgaaagggtttaccgccagagcatagcacagctggagaaagtgcgagccgagtgggaacaggagcatcggactacctgcgaggcctttcagctccaggagttcgaccgcctaacaatcttgaggaatgctttgtgggttcacagcaatcagttgtccatgcagtgcgtgaaggacgacgagttgtacgaagaagtgcgcctgaccttggaagggtgttccattgacgccgatatcgactcattcatccaggcgaaatccaccggcacagagcctcctgcacccgtgccataccagaactattatgaccgagaagtgacgcctctcacgtcttctcctggcatccagcccagttgtggaatgataaagcgcttctcgggtcttcttcacggcagcccaaaaactacgagcctcgctgcctctgcggcatcaacagagacactgacccctactccggagcgcaacgagggagtgtacactgctattgctgtgcaggagatccagggcaatcctgcttcaccggctcaagagtatagagcactgtatgactacactgcacaaaatccagatgagctggatctgtccgcgggtgatatcctcgaggtgatcctggagggtgaggatgggtggtggaccgtggagcgtaacggccaacgcggttttgtgcccggatcgtatttagagaaattgtag

SEQ ID NO: 236282 - DNA, 1605 bp, synthetic construct
  misc_feature 1..1605: note = Description of Artificial Sequence: Synthetic coding sequence
  source 1..1605: mol_type = other DNA
atgatctggtatatccttataatcggcatactcctgccgcaatcacttgcccaccctggcttcttcacatctatcggccagatgaccgacctgatacatactgaaaaagacctagtgacatctctgaaagattacattaaagccgaagaagataaattggagcagatcaagaagtgggctgagaaactcgatcgtcttacatcgaccgcaacgaaggatcccgagggttttgtgggacatcctgtcaacgcattcaagctgatgaaaaggctcaatactgaatggtcggagctagaaaacttggtcctgaaggacatgagtgatggtttcatatccaatctgactattcagcggcagtacttccctaatgacgaggaccaggtaggagccgcaaaggccctgctgaggcttcaggacacgtacaaccttgacactgataccatcagtaaaggcaatctgcctggggtgaagcacaaatcctttctaaccgctgaagattgttttgagcttggcaaagtggcatacaccgaggcagactattaccacaccgagctgtggatggagcaggccctcagacagctcgatgaaggggagatctccacaatcgataaggtttcggtcctagattatctgagctacgccgtttatcagcaaggcgacctcgataaagcactgctgctcacgaagaagctccttgagctcgaccccgagcaccagcgcgcaaatggcaaccttaaatacttcgagtacattatggctaaggaaaaggatgtgaataagagtgcatcagacgatcagagcgatcaaaagaccacacccaaaaagaagggggttgcagtggactacttgccagagaggcagaaatacgaaatgctgtgtaggggtgagggcataaaaatgacaccaagacgccagaaaaagctgttctgcaggtaccatgacggcaatcgaaaccctaaatttatattagctcccgcaaagcaggaggacgaatgggacaaaccgaggatcatccggtttcatgacatcatctctgatgcagagattgaaatagtcaaggacttagctaagcccagactgtctagggctacagtccacgatcccgagactggcaagttgactaccgcgcagtaccgagtgagtaagtctgcctggttgtctggctacgagaatccagtggtttctcgcatcaatatgcgcatccaggacctcaccgggttggacgtgagtaccgccgaggaactgcaggtggctaattatggcgtgggcggacagtatgagccacactttgattttgctagaaaggatgagcccgatgccttcaaggaactgggcacaggcaaccgaatcgccacctggttgttctatatgtcggatgtgagtgcaggcggtgccacagttttcccagaggtgggcgcatctgtttggccgaagaaaggtaccgctgtgttctggtacaatcttttcgcttcgggagaaggagactatagcacacggcacgctgcatgcccggtgctggtggggaataaatgggtgtctaacaagtggctccacgaaaggggccaggaattcagacgcccttgcaccctgtcggaactagaatag

SEQ ID NO: 236283 - DNA, 1605 bp, synthetic construct
  misc_feature 1..1605: note = Description of Artificial Sequence: Synthetic coding sequence
  source 1..1605: mol_type = other DNA
atgatctggtatatactgattataggcattttgctgccacagtcactcgctcacccaggcttcttcacctccatcggccagatgacagatcttattcataccgagaaggatcttgtaacatccttaaaagattacattaaagcggaagaggacaaactggagcaaattaaaaaatgggctgagaaattagatcggttaacttctacagcaacgaaagacccagagggcttcgtgggacaccccgtcaatgctttcaagttaatgaagcgactgaacactgagtggtctgagcttgagaatctggtcttaaaggatatgagtgatggcttcatctccaacctcaccatacaacgacagtattttcctaacgacgaagaccaggtgggggctgccaaagccctgctaagacttcaggatacctataaccttgacacggacactatctctaaaggcaacttaccaggtgtgaaacataaatccttcctcactgccgaggactgctttgaattaggaaaagtggcctataccgaggcggattattatcacaccgagttgtggatggagcaggctctgagacaactggacgaaggcgagatctctacaattgacaaggtgtctgtgttggattatttgtcatatgccgtgtatcaacagggcgacctagacaaggctctgctgcttaccaaaaagcttctggaacttgaccctgagcatcagagggcgaatggaaatctcaagtatttcgagtacatcatggccaaagagaaggatgtgaataagtctgcatctgatgatcagtctgatcagaagacgactcccaagaaaaagggcgtcgccgtcgactacctcccagaacgccagaaatatgaaatgctttgcagaggagagggaattaaaatgacgcctcggaggcaaaaaaagctcttttgccgataccacgatggcaacagaaatcccaagttcatcctggcccctgccaagcaggaggatgaatgggataagccaagaatcatacgctttcacgatattatcagcgacgccgagatcgaaatcgtgaaggacttggccaagccccgtctccgcagggccacaattagtaaccctatcaccggcgacctagagactgtgcactatagaatttccaaatccgcctggttatcaggctacgagaatccagttgtttcccgaatcaatatgcgaattcaggatctaactggtctggacgtgagcactgccgaagaattgcaagttgcaaattacggggtggggggacagtacgaaccacatttcgactttgcccgaaaagacgaacctgacgccttcaaagagctgggcaccggaaaccgaatagctacttggctgttctatatgtcagatgtgtccgcagggggagcaacagtctttcctgaagtcggcgctagtgtgtggccaaagaagggcacagctgttttttggtacaacctgtttgcatctggagagggtgattattctacacggcacgccgcttgtccagtgctcgtgggcaacaagtgggtaagtaacaaatggctccacgaaagaggccaggagtttcgcaggccttgcacgctgtcagagcttgagtag

SEQ ID NO: 236284 - DNA, 1605 bp, synthetic construct
  misc_feature 1..1605: note = Description of Artificial Sequence: Synthetic coding sequence
  source 1..1605: mol_type = other DNA
atgatttggtacatcctgattatcggcattctactcccacagagtcttgctcatcccggattttttacttccattgggcagatgaccgacctgatccacacagaaaaggatttagtaacctcgctgaaggactacataaaggctgaggaagataagctggagcagataaaaaaatgggccgagaagctagatcgcctgacaagcacggcaacgaaggacccggaggggttcgtgggccatcctgttaacgcttttaagctcatgaagaggttaaacactgaatggtccgagctggagaatcttgtgctgaaggacatgtctgatggcttcattagcaacctcaccatacagagacagtatttccccaacgacgaggatcaagtgggcgcagctaaggccctgctgagactgcaggacacatacaacctggacacagatactatttccaagggtaatctgcccggagtgaaacacaagtcatttttgaccgcagaagattgtttcgaactggggaaagtcgcatacactgaggctgattattaccacacagaactgtggatggagcaggcgctgcgacagctggacgagggagaaatcagtacgatcgataaggtgagcgtgctcgactacctgtcttatgcagtttatcaacagggtgatctggataaagctctattgcttaccaagaagttactcgagctggatcccgagcatcagcgagccaatggaaacctgaaatatttcgagtatataatggctaaggagaaggatgttaataagagcgcgagtgacgatcagtccgatcagaagactacaccaaagaagaaaggggtggctgtggactacctcccggaacggcaaaagtacgaaatgctctgtcgcggagaaggtatcaaaatgacaccgcgacgccagaaaaagttattctgccgctaccacgacggaaataggaaccccaagtttattctcgcacctgcgaaacaggaggacgagtgggataaacccagaattatcaggttccacgatattatcagtgatgcggagattgagatcgtgaaagatctcgccaagcccagactgagccgggctacagtccacgatcctgagaccgggaaactcaccactgcacaatacagagtgtcaaaaagcgcatggctgtcagggtacgagaatccagtggtgagccgcatcaatatgcgtatccaggacttaacaggtctggatgtgagtaccgcggaggagctccaggtagcaaactatggcgtgggcggacagtacgagccccatttcgacttcgcacgcaaggatgagccagacgctttcaaggaactgggaactggcaatcgtatcgccacatggctcttttatatgtctgacgtgagcgctggtggagccaccgtttttccggaagttggggcaagtgtgtggccgaagaaaggtaccgctgtcttctggtacaacctgtttgcctcaggtgaaggagattattcaaccagacacgctgcatgtccagtgcttgtgggaaataaatgggtttctaacaaatggctgcacgaaaggggccaggaatttcgtcggccttgcaccttatctgagctggagtag

SEQ ID NO: 236285 - DNA, 1605 bp, synthetic construct
  misc_feature 1..1605: note = Description of Artificial Sequence: Synthetic coding sequence
  source 1..1605: mol_type = other DNA
atgatttggtatattttgattattggcattctactgccccagtccctggcgcacccaggatttttcaccagcatcggacagatgactgatctcattcatacagaaaaggacctggtcacctccctgaaggactatattaaagcagaggaggacaagttagagcagatcaagaagtgggccgagaagttggaccgtctgactagtacagctacaaaagaccccgaaggctttgtgggacaccctgtgaacgctttcaaactcatgaaaaggctgaacaccgaatggagtgagctggagaacctggtcttaaaagatatgtctgacggatttataagtaacctcacaatccagcgccaatacttccctaacgacgaagatcaggtgggtgccgctaaagcgctattgcggcttcaggacacctacaatctcgacaccgacaccatctcaaaagggaacctgccaggcgtgaagcataagtcctttctcaccgccgaggactgcttcgagctgggtaaggtggcctatacagaagccgattactaccataccgaactctggatggagcaagctctgaggcagctggacgagggagagatttctactatcgataaggtgagcgtgctggactatctgagctatgcggtctaccagcagggagatctggacaaagccctcctgctgaccaagaaacttctcgaactcgacccagaacaccagcgggctaacggcaatctgaaatatttcgaatacataatggcgaaggaaaaggacgttaataagtctgcaagcgacgaccagtccgaccaaaagacgacccccaagaagaagggggtggccgttgactatctgcccgagcgacagaagtatgagatgttatgcaggggcgaggggatcaaaatgacccccagaagacaaaagaaattgttctgtaggtaccatgatggcaataggaaccccaaatttattctcgctcccgctaagcaagaagacgagtgggacaaaccacggattattcgtttccatgacattattagtgatgcggagattgagatcgtgaaagacctcgccaagccaagacttaggcgagccacgatttccaatccgattactggggatttggaaaccgtgcattataggatttctaagagtgcttggctgagtggttacgagaatccagtggtgtcgcgcattaacatgcgtatccaggacctgaccggccttgatgttagcacagcagaagaacttcaggtggccaactacggggttggaggccagtacgagcctcattttgactttgcgagaaaagacgaacccgatgcatttaaggagttggggactggaaataggattgcaacttggctgttctatatgagcgatgtgtccgccggtggagccacagtattcccagaagtgggtgcaagtgtatggcctaagaaggggactgcagtgttttggtacaacctcttcgccagtggcgagggcgattacagcaccaggcatgccgcatgccccgtcctggtcggcaacaagtgggtgtcaaacaagtggctgcacgagagggggcaggagttccgaaggccctgcactctctctgaactggaatag

SEQ ID NO: 236286 - DNA, 1605 bp, synthetic construct
  misc_feature 1..1605: note = Description of Artificial Sequence: Synthetic coding sequence
  source 1..1605: mol_type = other DNA
atgatttggtacatactgattatcggcattcttttaccacaaagcttggctcatcccggattctttactagcattggccaaatgaccgacctcatacatacagagaaagacctcgtgactagcttgaaggactacatcaaggccgaagaggataagctggaacaaattaaaaagtgggccgaaaagctggacaggctcacaagcacagccacaaaggaccctgaggggtttgtgggacatccagtaaacgcctttaaactgatgaagaggctgaacaccgagtggtcagagctcgaaaatttagttcttaaggacatgagtgatggcttcattagcaatctcacaattcagcgccagtactttccgaatgatgaggaccaggtgggggctgctaaggcactgctccgcctgcaggatacctataacctcgataccgataccattagtaaaggcaacctgcccggtgttaagcataagtctttcctcactgccgaggattgtttcgagctcggaaaggtcgcctatacggaggcggattattaccatactgagttgtggatggagcaagccctccggcagctcgacgagggggagatttccactatcgacaaggtgtcagtcctggactacttgagttatgctgtctaccagcaaggcgacctggacaaggctctgctgttgactaagaagctccttgaactcgatccggagcatcagagagctaacggaaacctgaaatattttgaatacattatggctaaggagaaggacgtcaataaatccgctagtgatgaccagtctgaccagaagaccactcccaaaaaaaaaggggtggctgtggattatctgcctgagagacagaaatacgagatgctctgccgaggggaaggaatcaagatgactccaagaagacagaagaaactgttttgtcgataccatgatggtaacaggaaccccaagtttatcctggccccagctaaacaggaggatgagtgggataaacccaggatcattcggttccacgacatcatctcagacgcagagatcgagatcgtaaaagatcttgctaaacctcgcttacgacgtgccactatctccaatcccataacaggggatttggaaaccgttcattatcggatcagcaagtcagcttggttgagtggatatgagaatcccgtagtgagtaggattaatatgcgcatccaggacttaacagggctcgatgtgtctacagccgaggaactgcaggtggccaactatggagtgggcggacagtacgaaccccatttcgacttcgcaagaaaggatgagcccgacgccttcaaggagctgggaaccggaaaccgcatcgccacatggctcttttatatgagcgacgtgagcgccggaggagccacagttttccccgaagtgggggcatctgtgtggccaaaaaagggtactgctgtattctggtacaaccttttcgcttcaggcgagggagattactctacacggcacgcagcgtgtccagtgctggtagggaataagtgggtgagcaacaagtggttgcacgagcgagggcaagaatttcggagaccttgtacgctttctgagctggaatag

SEQ ID NO: 236287 - DNA, 1551 bp, synthetic construct
  misc_feature 1..1551: note = Description of Artificial Sequence: Synthetic coding sequence
  source 1..1551: mol_type = other DNA
atgatttggtacattctgattattggcattttactgcctcagagtctggcacatcctggtttctttaccagtattggtcaaatgacggacctgatccatacagaaaaggacctcgtcacttccttaaaggattatattaaagccgaagaagacaaactggaacagatcaagaaatgggcagaaaagctcgacagactgacaagcacagcaactaaagatccagagggcttcgtgggtcacccggtcaacgcctttaaattgatgaagaggcttaataccgagtggagcgagttggagaatctcgtgctgaaggacatgagcgatgggtttatctccaatctgaccatccaaaggcagtacttccccaacgatgaggaccaggtcggcgcagctaaggccctcctgagactacaggacacttacaacctggatacagacacaatttctaagggcaacctcccaggcgtaaagcataagagcttcctgacggccgaggactgtttcgagctggggaaggtcgcatataccgaggccgactattatcacacggagctttggatggagcaagctctcagacaactagatgagggggagatctcaaccatagataaagttagtgtgctagattacctaagctacgcggtttaccagcagggagatttggataaagccctgctccttacaaagaagctgttggagttggatcctgaacaccagcgggcaaacggtaacctgaaatattttgaatacatcatggccaaagagaaggacgtcaataaaagtgcaagcgacgaccagagtgatcagaaaacgactcccaagaaaaaaggcgtggctgtcgactatttacctgagcggcaaaagtatgagatgctgtgcaggggtgagggcattaagatgactcccagacgccagaagaagctgttttgcagataccatgacggaaaccgcaaccccaagttcatattagcccctgctaagcaggaggacgagtgggacaagccgagaattatccgtttccacgatatcatcagcgatgcagagattgaaatcgtgaaggaccttgccaagccacggctctcacgcgctaccgtgcatgatccagagaccggaaaattaactaccgctcagtatcgcgtgtccaaaagcgcatggttatctggctacgagaatcccgtggttagtcgaattaatatgagaatccaagacctgactgggctggatgtgagtaccgccgaggagctgcagaaggacgagccagacgccttcaaggaactgggaaccggtaatcgcatcgcaacctggctgttctacatgagcgatgtgagcgcaggcggtgccactgtctttccagaggtaggcgctagcgtgtggcctaagaagggcacagctgtgttttggtataacctgttcgcgagcggtgagggggactatagtactcgacatgctgcctgccccgttttggttggtaataaatgggtaagcaacaaatggctgcatgagcgtggacaggagttccgtcgaccctgtactctaagcgagctcgagtag

SEQ ID NO: 236288 - DNA, 1608 bp, synthetic construct
  misc_feature 1..1608: note = Description of Artificial Sequence: Synthetic coding sequence
  source 1..1608: mol_type = other DNA
atgaaactgtgggtcagtgccttactgatggcttggttcggagtgctatcatgcgtccaagcagaatttttcactagcatcgggcatatgaccgatcttatctatgcagagaaggaactggttcaaagtctgaaggagtacatcctggtcgaggaggccaagctgtctaagattaaatcttgggccaataaaatggaggctctgacatctaagtcagctgcagacgccgagggttacctcgcccacccagtgaacgcctacaagctggtcaaacgtttaaataccgattggccagccctggaagatctagttctgcaggactctgccgcaggtttcatcgccaacctgtcagttcagcgccagttttttcctacagacgaagacgaaatcggggcagcaaaggcacttatgcggctccaggacacctaccgactcgaccctggaacaatttcgcggggagaattgccgggaaccaagtaccaggccatgctgtccgttgatgactgctttggtatggggagatcagcgtacaacgagggtgattactatcacaccgtgctgtggatggaacaggtactcaagcagctagacgccggagaggaagcgaccaccacgaaatcccaggtcttagactatctgagctacgcggtctttcaactcggagatttgcatcgggcactggagctgacccggaggctacttagcctggaccccagccatgagcgtgccggagggaatctccggtatttcgagcagctgctagaggaggaacgggaaaagacactcactaaccagaccgaagctgagctggctacccctgaggggatctatgagaggccagtcgactatctgccggagcgcgatgtgtatgaatcgctgtgcagaggggagggagtgaaactgactcccagaaggcagaagaggctgttctgcagatatcaccacggaaaccgcgctcctcagttgctgatcgcgcctttcaaggaggaagacgagtgggatagtccacacatcgtgagatactacgacgtcatgtcagatgaagaaatagagagaatcaaagagatcgcgaaaccaaagctggccagggctacggtccgggaccccaagacgggcgtgctgacagtggcctcttatcgtgttagcaagtcaagctggcttgaagaagacgatgatcccgtcgttgctcgggtaaatcgtcgcatgcagcatatcaccggcttgacagtgaaaaccgccgagttgctgcaagttgcaaactatggtgtggggggtcaatacgagccccactttgacttctccaggaatgacgaacgtgatactttcaaacacctggggacaggaaacagggtggctacattcctgaactacatgagtgatgtggaggccggaggcgcaacggtgttcccagatctaggcgcagctatttggcctaagaaagggaccgctgtgttctggtataacctcttgagaagtggagagggggattatcgaacgagacacgccgcttgccccgttctcgttggttgtaaatgggtgagtaataaatggttccatgaaagggggcaggagtttcttcgcccttgtggctccacagaggttgattag

SEQ ID NO: 236289 - DNA, 1602 bp, synthetic construct
  misc_feature 1..1602: note = Description of Artificial Sequence: Synthetic coding sequence
  source 1..1602: mol_type = other DNA
atgaaattgtgggtgagcgcactcttgatggcttggtttggagtgctaagttgtgtccaagcggagttttttacatccattggacacatgaccgatctgatttacgcagaaaaggaattagtgcaaagcctaaaggagtatatccttgtagaggaagctaagttaagcaaaatcaaatcttgggccaataagatggaagctttgactagtaagagcgcagctgacgccgaggggtacttggcgcatcccgtcaatgcctataagctcgtgaaaagactgaatactgactggccggctttagaggatctggttcttcaggactcagccgctggcttcattgccaacctctctgtgcagcgtcagtttttcccaacggacgaagacgagatcggcgctgccaaagccttgatgagactccaggatacctaccggctggatccaggaacaattagcagaggggagcttccaggcacgaaatatcaagccatgctgtccgttgatgattgtttcggaatgggcaggagcgcctacaacgagggtgattattaccataccgtgttgtggatggaacaagttctaaaacaacttgatgctggggaggaggccaccacgacaaaaagccaagtccttgactatctaagctatgcggtgttccagttaggcgatctgcatagggctctggagctcaccagaagactgttgtcgttagatcccagtcatgaaagggcaggagggaaccttcgctacttcgaacagctgttggaagaagagagggagaagactttaaccaatcagaccgaagctgaactggctacacccgagggcatatacgaaaggcccgtggactacttgcccgagcgcgacgtgtatgagagcctgtgcagaggggaaggagtaaagcttacaccccgtcggcagaagaggcttttttgccgctaccatcacggaaaccgggctccacagcttttgatcgcaccgttcaaagaagaggatgaatgggactcgcctcatatcgttagatattatgatgtcatgtccgacgaagaaatcgaaaggatcaaggagatcgctaagcccaagctcgcacgagccaccgtcagagaccctaaaactggcgtccttacagtggcttcttacagagtgagcaagagtagctggctggaggaggatgatgatcctgtggttgcgcgagtgaaccgccgtatgcaacatattaccggacttaccgtaaagaccgcagaacttttgcaggtggcaaattatggggttggaggacagtacgagcctcactttgacttttcacgacgccctttcgatagcggcttgaagacagaagggaacagactcgccacgtttctgaactatatgtccgacgtggaagccggtggtgccacagtcttccctgatctaggagccgctatctggccaaaaaagggtactgctgtgttctggtataatcttctcaggagtggcgagggggattatcgcacccggcacgccgcttgtcctgtgcttgtaggatgcaaatgggtatcaaacaagtggtttcatgaacggggacaagagtttctgaggccttgcgggtccacagaggttgactag

SEQ ID NO: 236290 - DNA, 1602 bp, synthetic construct
  misc_feature 1..1602: note = Description of Artificial Sequence: Synthetic coding sequence
  source 1..1602: mol_type = other DNA
atgaaactgtgggtgagcgccctcctgatggcctggttcggggtattgtcctgcgtccaggcggaattttttacctccataggacatatgaccgatttgatatatgccgaaaaggaactcgttcagagcctgaaggagtacatcctggtggaggaggcgaaactgtccaagatcaagagttgggcgaacaaaatggaagccttgacatccaaaagtgccgcagacgctgaaggctacctcgctcaccccgtcaatgcttacaagcttgtcaagcggttgaataccgactggccagcgcttgaagacctggtcctgcaggactccgcagcgggatttattgccaacctgagcgtgcagcgccagttcttccccaccgatgaggatgagattggcgcagctaaagcgctgatgcgactacaggacacgtatcgactcgacccaggcacaatcagccggggtgagctccccggaacgaaatatcaagccatgttgagcgtcgacgattgttttgggatgggtcgatctgcctacaacgagggagactactaccacaccgtgctttggatggagcaggtcctgaagcagttagatgcgggtgaggaggccacaaccactaagagccaggtccttgactatctaagctacgccgtttttcaactgggagatctccatagagccctggagctgacacggagactgttaagtctggacccctcacacgagcgggcaggaggtaacctgcgttatttcgagcagcttttggaagaggaacgggagaagactctgaccaatcaaacagaggcagagctggccactccagaggggatctacgagcggccagtcgattacctcccagagcgcgacgtctacgagtctctgtgccggggagagggcgtgaaactgaccccccgaaggcagaaaaggctattttgtagatatcatcacggtaatagagcgccacagttacttattgcgccttttaaagaagaagacgaatgggatagtccccacatagtccggtactatgacgtcatgtctgacgaggaaattgaaaggataaaggaaatcgccaagccaaagctggcccgtgccaccgtgagggatcccaagactggtgtgctgaccgtcgcgtcatacagagtgtctaagtccagttggttagaagaagatgacgatcccgtggtggcgagggttaatcgacggatgcagcacatcacaggactgaccgtgaagacagcagagctgctgcaggtggcaaactatggtgtgggtggccagtacgagccccactttgatttcagccgcagacctttcgacagcgggttgaagacagaaggtaatcggctggccacattcctcaattatatgagcgacgtggaggccggaggtgctacggttttcccggacctcggagcggctatctggcctaagaaggggactgccgtcttttggtataacctgttgcggtccggagaaggtgactacaggacccggcatgcagcatgccccgtactggtggggtgcaagtgggtgtccaataaatggtttcatgaacgtggccaggagttcctgagaccatgcggaagcacagaggttgactag

SEQ ID NO: 236291 - DNA, 1602 bp, synthetic construct
  misc_feature 1..1602: note = Description of Artificial Sequence: Synthetic coding sequence
  source 1..1602: mol_type = other DNA
atgaagctgtgggtgtcagctctgcttatggcatggttcggagtgttatcatgcgtccaagccgagttttttaccagcatcggacacatgacagatctcatttacgcagaaaaggaattagtccagtccctgaaagaatacattttggtggaagaggccaaactttcaaagataaagtcctgggcaaacaagatggaggccctaacatcgaagtccgcggcagacgctgaagggtatctggcccatcctgtgaacgcttacaaacttgtgaagcgactgaatactgactggccggcactggaagacctcgtgcttcaggactcggccgcagggtttatcgccaaccttagcgtgcagcgacaattcttccccactgacgaggatgagatcggcgctgccaaagctttgatgaggctgcaagacacttatagactggatccaggcaccattagccgcggagaactgccgggaactaagtatcaggccatgctgagcgttgacgattgctttggcatgggaaggtcagcctataacgagggcgattattaccacacagttctatggatggaacaggtcttgaaacagctggatgcaggcgaagaggctacaaccaccaaatcccaggtgctcgactatctttcctacgccgtattccagctcggcgacctgcatcgggctctggaactcacacggaggctactgagcctcgatccaagtcatgagcgagccggtgggaacctgcgatattttgagcaactcctggaagaagaacgggagaagacccttactaatcagaccgaagcggaactggctacccccgaaggaatctacgagcggccagtggattacttacccgaaagagacgtatatgaaagcctgtgtaggggagaaggagttaaattgacccccaggaggcagaaacgcctgttttgcaggtaccaccatggaaacagagcaccacagctcctgatcgccccatttaaggaagaggacgaatgggactctccacacattgtgaggtactatgatgttatgagtgatgaggagattgaaaggatcaaggaaatagcaaaacctaagctagcacgggcaactgtgcgcgaccccaagactggcgtgctcaccgtcgcatcttaccgcgtgagcaagagctcttggctggaagaggacgacgatcccgtagtcgcaagggtaaacaggcgaatgcagcacatcaccggcctgacagtgaaaacagccgaactcttacaggtcgcaaactacggcgttgggggtcagtatgaaccacatttcgacttcagccgtcggccattcgattccgggctaaaaaccgagggcaatcggttggccacttttctgaactatatgagtgatgtggaagcaggcggtgccactgtatttcctgacctcggagccgcaatctggccaaagaaaggcaccgccgtcttctggtataacctactccgctccggtgaaggagattaccggacccgtcacgccgcttgccccgttctcgtggggtgcaaatgggtttctaataagtggttccacgaaagaggccaggagtttcttagaccctgcggatccacagaagtagattag

SEQ ID NO: 236292 - DNA, 1608 bp, synthetic construct
  misc_feature 1..1608: note = Description of Artificial Sequence: Synthetic coding sequence
  source 1..1608: mol_type = other DNA
atgaaactgtgggtgtctgccttgttgatggcttggtttggtgtgctgagttgcgtgcaggctgagtttttcacctctataggtcatatgaccgatctcatttatgccgagaaggaattagtgcagtccttgaaggaatacatccttgtggaggaggccaaactaagcaagattaaaagctgggcaaacaagatggaagcactaacatccaagtcagccgctgacgccgagggttaccttgctcaccctgtcaacgcatacaagttagtcaagcgccttaacacagactggccagccctggaggaccttgtgctccaagattccgccgctgggtttattgccaatttaagcgttcagcgccagttttttcctaccgacgaggacgaaattggcgctgcgaaggcacttatgagactgcaagatacctatcgtttagaccccggaaccattagcagaggggaactgcctggcacaaagtatcaggcaatgcttagcgtggatgattgcttcggtatggggaggagcgcttacaatgagggcgattactaccataccgtgttgtggatggaacaagtgctgaagcagctggatgccggagaagaggccacaaccactaagagccaagtacttgactacttaagttacgcggtgttccaactcggtgacctgcatagagccctcgagctgacaagaagattgctgtcactggatccgagtcatgagcgcgctggcggtaatcttagatactttgaacagctgctggaagaggaaagggagaaaacactcactaaccaaactgaggccgagctcgccaccccagaaggtatctatgagcggcctgttgactaccttccggagagagatgtctatgaatctttgtgccggggtgagggcgtgaagctgaccccacgccgtcagaaaagactcttttgcaggtaccatcatggaaacagagccccacagctgctgatcgcgcctttcaaggaggaagacgagtgggactcaccgcatatcgtgcgctactacgacgtgatgtctgatgaggagatcgaaaggatcaaggaaattgcaaagcccaaactcgccagagctaccgtgcgcgaccccaagacgggcgtgttgaccgtggcctcttatcgcgtgtccaaatcttcctggttggaggaggacgacgatccagtcgtagcacgcgtaaaccgccgaatgcagcatatcactgggttaactgtgaagacggctgagttactgcaggtcgccaattatggggtcggaggacagtacgagcctcacttcgatttctctagaaatgacgagagggatactttcaagcatttgggaaccgggaacagagtcgcaacctttctgaactatatgtcggatgtcgaagccggtggagccactgtgttccctgatctgggggctgctatttggccgaagaaaggtacagcggtattctggtataacttattaagatcgggagaaggagactacagaacaagacatgcagcctgccctgttctagttgggtgtaagtgggtttcgaataagtggttccacgagcgaggccaggagttcctacgcccatgtggcagcaccgaagtggactag

SEQ ID NO: 236293 - DNA, 504 bp, synthetic construct
  misc_feature 1..504: note = Description of Artificial Sequence: Synthetic coding sequence
  source 1..504: mol_type = other DNA
atgaagctgtgggtgtccgctctgctgatggcctggttcggcgtactcagctgcgttcaggccgaattctttaccagcattggacacatgacagatctgatctatgccgaaaaagagctagtgcaaagtctgaaggagtatatacttgtcgaagaggccaagctgagcaagatcaagtcgtgggccaacaagatggaggcactgacttcgaaatccgccgctgatgctgaaggatacctggctcaccctgtcaatgcttataagctagtgaagcggttgaataccgattggccagctctcgaggatttggtgctgcaggattcagctgcagggtttatcgccaacctaagtgtccagcgacagttctttcccacagacgaagacgaaataggcgcagctaaggccctgatgagactgcaggatacatatcggttggatcctggtaccatatcacgcggagaattgccgggaactaaataccaggccatgctgtctgttgactag

SEQ ID NO: 236294 - DNA, 1608 bp, synthetic construct
  misc_feature 1..1608: note = Description of Artificial Sequence: Synthetic coding sequence
  source 1..1608: mol_type = other DNA
atgaaactgtgggtgtctgccctacttatggcgtggtttggagtgctctcttgtgtccaggcagaattcttcacatccatcggacatatgaccgacctcatctacgctgaaaaggaactggtgcagagtctgaaggagtatatactggtggaagaagccaagctgtccaagataaagtcttgggccaacaagatggaggctctgaccagtaaaagcgctgcagatgcagagggatacttagctcatcctgtgaacgcctacaagcttgttaaacgtctgaataccgactggcccgcactggaggatttagtgctccaggacagcgctgccggattcatcgccaatctttctgttcaacggcagttcttccccaccgacgaagatgagatcggtgccgcaaaggcattgatgaggctgcaggatacatacaggctcgaccccggaaccatatcaagaggtgaactgcccggaaccaaataccaagccatgttgtccgtggatgactgctttggcatgggcaggtcagcttataacgagggggattactaccacacagtgctttggatggagcaagtgcttaagcaactggacgctggtgaagaagccacgactacaaagtctcaagtcctcgactatctctcctacgccgtgtttcagcttggggacctgcatcgggctttagagttgaccagacgtttgctctctctcgacccgagtcatgagcgagccggtggcaacctgcggtactttgagcaactgctggaagaggaacgcgagaaaaccctgactaaccagactgaggctgagctggccactcctgagggaatttacgagcgccctgtcgactatttgcccgaacgcgacgtgtacgagagtttgtgccgaggtgagggcgtaaaactcaccccgaggcgccagaaacggctgttctgtcgctaccaccacggcaacagagcgcctcaactgctcattgcaccctttaaagaggaggacgaatgggacagtcctcacatagtgcgttattatgatgtgatgtccgacgaggaaattgagcgcatcaaggagatcgccaagccaaaattggctagagctacagttcgtgatcctaagactggagtgttgacagtcgcctcatatagggtgagcaagtcaagttggctggaggaagacgacgaccctgtagttgcccgtgtgaatcgcagaatgcagcacattacaggactcactgttaaaactgctgagctgctacaggtggccaattacggggtgggaggccagtatgagcctcattttgattttagccgcaatgacgagagagacacgtttaaacatttaggtacaggcaaccgcgtggctacatttctgaattacatgtccgacgtagaagcaggaggagctacagtgtttcccgaccttggcgctgctatctggcccaagaaagggactgcggtgttctggtacaaccttttgcgctctggcgaaggcgattaccggacaaggcacgcggcttgcccggtgctcgtgggttgcaaatgggttagcaacaagtggttccacgagaggggccaggagtttcttcggccatgcgggtctaccgaggtggattag

SEQ ID NO: 236295 - DNA, 306 bp, synthetic construct
  misc_feature 1..306: note = Description of Artificial Sequence: Synthetic coding sequence
  source 1..306: mol_type = other DNA
atgaagttatgggtgtccgccttgctgatggcgtggttcggggtactttcatgcgtacaggccgagttttttacttccattgggcatatgaccgacctgatctatgcagaaaaagagctcgtccaaagcctgaaggaatacatccttgtcgaagaagctaagctaagtaaaataaagagttgggcgaacaaaatggaggcattgaccagcaaaagtgcagccgacgccgagggctatctggcacatcctgtgaacgcttataagctggtgaaacgactcaatacagactggcctgctttggaatag

SEQ ID NO: 236296 - DNA, 615 bp, synthetic construct
  misc_feature 1..615: note = Description of Artificial Sequence: Synthetic coding sequence
  source 1..615: mol_type = other DNA
atgaagctgtgggtctcagcccttctaatggcttggttcggggtcttgtcttgcgttcaggctgagttctttacctcaatcggacatatgaccgatttgatttatgccgaaaaagaacttgtccagtctctgaaggaatatatcctggtcgaggaagcaaagctgtccaaaataaagtcatgggctaacaagatggaggcgctcacctccaaatccgcagcagatgcagagggatacctggctcatccggtgaatgcctataagctcgtgaagaggctgaacacagactggcccgctctggaggatcttgtgctgcaggactcggccgcaggtttcatagccaacctgtccgtgcagcgccagttctttcccaccgatgaagacgagataggtgctgcaaaggctttgatgcggctccaagacacatatcgccttgaccccggaaccattagcagaggtgagttacccggtactaaataccaagctatgctgtcagtggacgattgcttcggcatgggtcgctcagcgtacaacgaaggagattactatcacactgtcctctggatggagcaagtgctaaaacagttagacgccggtgaagaggctactacctag

SEQ ID NO: 236297 - DNA, 345 bp, synthetic construct
  misc_feature 1..345: note = Description of Artificial Sequence: Synthetic coding sequence
  source 1..345: mol_type = other DNA
atgaagctgtgggtgtccgcgctgttaatggcatggtttggggttctgagttgtgtgcaagcggaattttttacgagcattggccacatgaccgacctcatatacgcagaaaaagagctggtccagagcttaaaagaatacatcttagtggaggaggcaaaactctctaaaattaaatcttgggcaaataaaatggaggccctgacctccaagtccgcagcagatgctgaaggctacctggcacaccctgtgaacgcctataaactggttaagagactaaacacagattggccagcccttgaggatttggttctccaagattccgctgccggattcatagcctag

SEQ ID NO: 236298 - DNA, 444 bp, synthetic construct
  misc_feature 1..444: note = Description of Artificial Sequence: Synthetic coding sequence
  source 1..444: mol_type = other DNA
atgaagctgtgggtcagtgccctactgatggcctggttcggggtattgagctgtgtccaggccgagttcttcaccagcatcggccatatgacagatctgatatacgccgaaaaggagcttgtccagtcactgaaggagtatattctggtggaagaagccaagctatcgaagatcaaaagctgggccaacaaaatggaggcgcttaccagcaagtcggccgcagatgccgagggctacttggctcaccctgttaacgcctacaagttagttaaaaggctaaacaccgattggccagcattagaggacctggtgctgcaggacagtgctgcaggattcattgccaacctatcagtgcagagacagtttttcccaactgatgaggatgagatcggcgcagccaaggcactgatgcgtcttcaggacacataccggctagacccctag

SEQ ID NO: 236299 - DNA, 153 bp, synthetic construct
  misc_feature 1..153: note = Description of Artificial Sequence: Synthetic coding sequence
  source 1..153: mol_type = other DNA
atgaaactgtgggtatcagccctactgatggcgtggttcggagtgctgagttgtgtgcaagctgagtttttcacaagcattggccacatgacagacctgatctacgcggaaaaggaactcgttcagtctctcaaagaatatatcttggtttag

SEQ ID NO: 236300 - DNA, 555 bp, synthetic construct
  misc_feature 1..555: note = Description of Artificial Sequence: Synthetic coding sequence
  source 1..555: mol_type = other DNA
atgaagctgtgggttagcgcactgctgatggcctggttcggagtactctcgtgtgtccaagcagagttcttcacctccataggacacatgacagatctgatttatgcggagaaggagctggtccaatccctcaaggaatacatcctggtagaagaagcgaagttgagtaagatcaagtcctgggcaaacaaaatggaggccttgacatctaagtctgcagccgacgccgaaggctacttggctcacccagtgaatgcatataaattggtgaagaggttgaatacagattggcccgctctcgaggacctggttctgcaggattctgctgccggatttatcgccaacttgtcagtccagcgacagttctttcccacagatgaagatgaaattggggcagctaaggctctgatgaggctgcaggatacctaccggctggatcccggtactatctccagaggagaactgcccggaacaaagtatcaggccatgctgtccgtggacgactgtttcggaatgggcagatccgcctataatgagggagactattaccattag

SEQ ID NO: 236301 - DNA, 462 bp, synthetic construct
  misc_feature 1..462: note = Description of Artificial Sequence: Synthetic coding sequence
  source 1..462: mol_type = other DNA
atgaaactgtgggttagcgcccttctcatggcatggtttggggtcctcagctgtgtgcaagcggaattctttacaagcataggacatatgacggatctaatctatgccgagaaagaattagtacagagcttgaaggaatatatcctcgtcgaagaagccaagctttcaaaaatcaagtcctgggctaataaaatggaggccctgacctccaagagtgccgctgacgctgagggataccttgctcatccagtcaacgcttacaaactggtgaaaaggctgaacaccgactggcctgcattagaggatctcgtgctacaagattccgccgcagggttcattgccaatctgagcgtgcagaggcagtttttcccaacagatgaggacgagataggcgcagccaaggccctaatgaggctgcaagacacgtacagactggacccaggcacaatttctcgcggttag

SEQ ID NO: 236302 - DNA, 1635 bp, synthetic construct
  misc_feature 1..1635: note = Description of Artificial Sequence: Synthetic coding sequence
  source 1..1635: mol_type = other DNA
atgggtcccggagctaggctagcggctttgctggctgtgctcgccctggggaccggcgaccctgaaagagccgctgccagaggtgacacttttagcgctttgacctcagtcgccagagccctggctcctgaacgcagactactcggtcttctgcgcaggtatctgcgcggtgaggaagccaggctgcgggacctcactcggttctatgataaggtgctgtctctgcacgaagactcaacaacgcctgttgctaatccactcctggctttcaccctaattaagagactgcagtcagattggaggaatgtggtgcactctctggaggccagtgaaaacattagggctttgaaggatgggtacgaaaaagtagaacaggacttacccgcttttgaagatcttgaaggggcagccagagccctgatgagattacaggacgtttatatgctcaacgttaaaggtctggcccgaggcgtctttcagagggtcacaggttccgcgatcactgacctctactcccctaagcgcctgttcagtctgactggagatgattgctttcaggtcggaaaagtcgcgtatgacatgggcgattactaccacgccatcccatggctggaggaggccgtatcactgtttcggggatcatatggtgaatggaaaacagaagacgaagctagccttgaagatgctttagaccacttggcatttgcatactttagggcaggtaacgtgagttgtgctctgagcttatctcgggaatttctcctgtattcacccgataacaagagaatggccaggaatgtgttaaagtacgagcgcctcctggccgaatctcctaatcacgtggttgcggaggccgtgatacagagacccaatatccctcacctgcaaactagagatacatacgagggactgtgccaaaccctggggagccagccaacactctatcagattccttctctgtattgttcatacgagaccaattctaatgcatatctgctcctccagcccatccgcaaggaagtcatacatctggagccctacatcgcgctgtaccacgactttgttagtgacagtgaagcacagaagatccgcgagttggctgaaccctggctccagcgaagtgtggtggcaagtggggaaaagcaactgcaggtcgagtaccgcataagtaagtctgcctggctgaaggataccgtggacccaaaactggttacactgaaccatagaatcgccgcactgacagggctggatgtaaggcctccttacgcggaataccttcaggtggtcaactacggcatcggaggacactatgaaccccacttcgatcatgccacctctccttcatctccactttaccgaatgaagagcggaaaccgggtggcgactttcatgatctatctctcctccgtagaggctggcggagcgactgcctttatttatgccaatttaagcgtgcccgttgtgcgaaacgctgcccttttctggtggaatcttcatcggagcggtgaaggagatagcgatacgctccatgcgggatgccccgttctggtcggtgacaaatgggtggcgaacaagtggatccacgaatacgggcaggagtttcggagaccttgcagcagctcacctgaggactag

SEQ ID NO: 236303 - DNA, 1815 bp, synthetic construct
  misc_feature 1..1815: note = Description of Artificial Sequence: Synthetic coding sequence
  source 1..1815: mol_type = other DNA
atgggacctggcgctcgcctagcagccctgctcgctgtcctcgcacttggtactggagacccggaaagggccgctgcaaggggcgacacatttagtgctcttactagcgtcgctcgtgcactagcgccagaaagaagattgttggggctgttaaggaggtatttgcgtggtgaggaagcccgtttaagagacttgacccgattctacgacaaagtcctcagcttgcacgaagactcgaccactccagtcgcaaaccccctgctggcgttcacacttatcaagcgtttgcagagcgactggcgcaatgttgtgcatagtctggaagcaagcgagaacatccgagccttaaaagatggatacgagaaagttgaacaagacctgccagccttcgaggacctggagggggctgctagagctttgatgcgattgcaggacgtctacatgttgaacgtgaaagggctcgcccgaggcgtgtttcagcgcgtcaccggatccgccatcactgatctgtacagccctaagagacttttcagcttgacaggcgacgactgttttcaggtgggtaaagtcgcctatgacatgggcgattactaccatgctattccctggctcgaggaggcggtatccctattccggggaagttacggggagtggaaaaccgaagacgaggccagtctggaggacgcacttgaccatctggctttcgcctattttcgagctgggaatgttagctgtgctctgagcttgtctcgagagttcctgctttattcaccggataacaagaggatggccaggaatgtgctcaagtatgagcgccttctggctgagagcccaaatcatgtggttgcggaggcggtgattcagaggcccaacattccgcacctgcagaccagagacacctatgagggactctgtcagaccttaggcagccagcccactctttaccagatcccgtctctctactgctcttatgaaactaactctaacgcatacctgttattgcagccaatccggaaagaggtgatacacctggagccgtatatcgcattgtatcatgattttgtgagtgattccgaagctcaaaagatccgggaactcgcagaaccttggctgcagcgttccgtcgtggcgtccggagaaaaacagcttcaggttgaatatagaatttctaagagtgcatggcttaaggacacagttgaccccaagctagtaactctgaatcaccggatcgcggcactaaccggattggatgtcaggccgccatacgcagaatatctgcaggtggtaaactacgggatcggcggacattatgaaccccactttgatcacgctactagcccatctagcccattgtaccggatgaaatcaggaaaccgcgtggctacattcatgatttacctgtctagtgtcgaagcgggaggcgcaaccgcatttatttatgccaacctcagcgtgcccgttgttcgccattgctttggcggtacatgtacaggggtggtaaaaggcaccgtcactcatttcatgctagccgtgttgtcatggtgggaaatatccggatggcccacatccgggtatatgagcatggatcgaaacagtgcagaccccgcagccccagctctgaagacggaactcctcgctgagagatcgtggtggtcaccagtggcctttcagagaagtcaagaacccaaagctggagtcggtgaagagaaggcagagcagccgcctggtcgtcgtccgtgccagttatgtttgtgcctggcaaaccagagacagggcaggggatgctaccagggtacactgcggatgtatatctag

SEQ ID NO: 236304 - DNA, 1527 bp, synthetic construct
  misc_feature 1..1527: note = Description of Artificial Sequence: Synthetic coding sequence
  source 1..1527: mol_type = other DNA
atgctgcgccgtgcactgttgtgtctcgccgtggctgctcttgtgcgcgcagatgctccagaggaggaagaccacgtgctggtgctgcgcaaaagcaacttcgcagaagcgttggccgctcataagtatcttctcgtcgaattttatgccccttggtgcggccactgcaaagctctggctccagagtacgcaaaggccgctggcaagctgaaggctgagggctccgagatccggctggcaaaggttgatgccacagaagagtctgatctggcacaacagtatggagtgagaggttacccgacgattaagtttttccgcaacggggacactgcctcacccaaagaatatacagccggtagagaagcagatgacattgtgaactggctaaagaaacggaccggtccagctgcaactacacttcctgacggggcagccgcagagagtctggtggagagttctgaggtggccgttattggattttttaaggacgtggaaagcgactccgctaagcagttcctgcaggcagcagaggcgatcgacgatattccatttggcattacttctaacagtgatgtattttctaagtaccaattagacaaagatggggtggtcctgttcaagaagttcgacgaaggacgcaacaactttgagggcgaggtgacaaaggagaatctactggattttatcaaacacaaccaactgcctctggtcattgaattcacagagcagaccgccccaaagatatttggcggtgagattaagacccacatactgctctttctgcccaaaagtgtttcagactatgacgggaagttgtcgaacttcaagacagccgcagaatcattcaaaggcaagatcctgtttatattcattgactcagatcataccgacaaccagcgtatcctcgagttttttggactcaaaaaagaagagtgccctgctgttaggctgattacattggaagaggagatgacaaagtacaaaccggagagcgaggagctgactgccgagcggattaccgaattctgccacagattcctcgaaggtaagatcaagccccaccttatgtcacaagagctaccagaggactgggacaaacagccggtgaaggtgctcgtcgggaagaacttcgaagatgtggcctttgatgagaagaagaacgtgtttgtggagttctacgctccatggtgtggacactgcaaacagttggcccctatttgggataaattgggcgaaacctataaggatcatgaaaatattgtgatagctaagatggacagcaccgcgaatgaagtagaggctgtaaaggtgcatagttttccaactctgaaattcttccccgcaagtgcagatcggacagtcattgattacaacggagagcggaccttggatggatttaagaaattccttgaaagcggtggtcaggatggcgcaggagacgacgacgatctggaggatctcgaagaagcagaggagcccgatatggaagaagatgatgaccagaaggcggtaaaggacgagctctag

SEQ ID NO: 236305 - DNA, 1479 bp, synthetic construct
  misc_feature 1..1479: note = Description of Artificial Sequence: Synthetic coding sequence
  source 1..1479: mol_type = other DNA
atgctgaggcgggcactcctctgcctggcggtggctgcactggttcgagccgatgccccagaggaagaggaccacaaatatctgcttgtcgagttctatgccccttggtgcggccattgcaaggcactggctcctgaatatgcaaaggccgctggaaagctgaaggctgaaggcagtgaaattagactagccaaagtcgacgccactgaggagtctgatttagcacaacagtatggcgtcaggggctaccccacaatcaaattctttcggaacggagacactgctagccctaaagagtatacagccggaagagaggctgatgacattgttaactggctcaaaaaacgaaccggccctgcggctacaacgctgcccgatggagcggcagctgagtccctggtcgagagttctgaagtagccgtgataggttttttcaaagacgttgaatctgactcagcaaaacagttccttcaggctgctgaggcgatcgatgatatcccatttggaataacttcaaactcggacgttttttccaaataccaactggacaaggatggagtcgtcctctttaagaagttcgacgagggcagaaataatttcgagggggaggtaaccaaggaaaatctcctcgacttcattaaacacaaccaactgcctctggtgattgaatttaccgaacagacagctccaaaaatctttggtggagagattaagacccacattctactgttcctgccgaagtcagtcagtgactatgatgggaagctgtcaaactttaagaccgctgccgagagcttcaagggaaaaatattgttcatcttcatcgattctgatcacacagataaccagcgaatcttggagttctttggcctgaaaaaggaggaatgccctgcagtgcggttgatcacgttggaggaagagatgactaaatataaacctgaaagcgaagagctgacagccgaacgcattactgagttttgccaccgctttcttgagggtaaaattaaacctcaccttatgtcgcaggagctgcccgaggattgggacaagcagcccgtgaaggtcctcgtcggcaagaacttcgaagatgtggcttttgacgagaagaaaaacgtgttcgtcgagttctacgctccgtggtgtggacactgcaaacaactggccccaatatgggacaagctgggagagacttataaggatcacgagaacatcgtgattgcaaaaatggattctaccgcaaatgaagtggaggcggtaaaagtgcacagtttccctaccctcaaattctttccagcctcagccgaccgtacggtcattgactacaatggggaacgaacgctcgacgggttcaagaagtttctagaaagcggcggacaagatggcgcaggggatgatgatgacctggaggatctggaagaagctgaggaacctgatatggaggaggacgacgaccagaaggctgtgaaagatgagctgtag

SEQ ID NO: 236306 - DNA, 1356 bp, synthetic construct
  misc_feature 1..1356: note = Description of Artificial Sequence: Synthetic coding sequence
  source 1..1356: mol_type = other DNA
atgttacgccgagccctgttgtgcctcgcagtggctgccctggtgcgcgcagatgctccggaagaagaggaccacgtgctggtgctccgcaaatcgaatttcgctgaggccctcgccgcacacaagtacctgcttgttgagttttatgccccatggtgtggtcattgtaaagcgctggctccagagtatgcgaaggccgctgggaagttgaaagcagagggctctgaaattcgcctggctaaagtcgacgccacagaagagtcagacctggctcagcaatacggggtaaggggctatcctacaatcaaattcttccgcaacggcgacacagcttcccccaaggaatataccgctggaagggaagccgacgatatcccatttggtatcaccagcaacagcgatgtcttctcaaagtaccaactggataaagatggtgtggtgctatttaagaagtttgacgagggcaggaacaactttgaaggcgaagtaactaaggaaaacctgctggatttcattaaacataatcagctacccctggtgatagaatttaccgagcagaccgccccaaagatcttcggtggggagatcaagacccatatacttctgttcctgcctaagtctgtctctgactacgacgggaaacttagtaactttaagactgccgctgagtcctttaagggcaagatcttgtttatattcatagacagcgatcacaccgataatcagcggatactggagttcttcgggttaaaaaaagaggaatgtcctgccgtcagattaattacgcttgaagaggagatgaccaaatacaagcctgagagtgaggaattaaccgctgaaaggatcacagagttctgtcatcggtttcttgaagggaaaatcaaaccacatctgatgagtcaggaacttcccgaggattgggacaagcaaccagtgaaggttctggtcggtaaaaatttcgaggacgtggctttcgatgagaaaaagaatgttttcgtagaattctacgccccatggtgcggacactgcaaacaacttgctcccatctgggacaagctgggggaaacttacaaggaccatgagaacattgtcattgcgaagatggactccaccgccaacgaggtggaagctgtcaaggttcacagttttcctactctgaagttcttcccagcctcagccgacaggactgttattgactacaatggcgaaagaaccctcgatgggttcaaaaagtttttagagtcaggagggcaggatggcgcaggggacgatgacgacttggaggatctcgaagaggctgaggagccagatatggaggaagatgatgatcagaaagccgtgaaggatgagctctag

SEQ ID NO: 236307 - DNA, 2133 bp, synthetic construct
  misc_feature 1..2133: note = Description of Artificial Sequence: Synthetic coding sequence
  source 1..2133: mol_type = other DNA
atgctttcactccagtatccagacgtctaccgggacgagacagctgtccaggactatcatggccacaagatctgcgacccatacgcttggttggaggacccagattcagagcagaccaaagcattcgtcgaagcccagaacaagatcaccgttccttttcttgagcagtgccctattagagggttgtataaggagcggatgacagagctgtacgactatcctaagtatagctgccatttcaagaaggggaagaggtatttctacttctacaacactgggttgcagaaccagcgcgtcttatatgtacaggactcacttgagggtgaagcccgtgtctttctggatccaaacattctgtctgatgacggcacagtcgccctcagagggtacgctttttcggaggatggcgagtattttgcctatggcctcagcgccagtggttcggattgggtgaccatcaagttcatgaaggtggatggagccaaggagctgcctgacgtcctagaacgagttaaattctcatgcatggcatggacccacgacggaaaaggcatgttctacaatagctaccctcagcaagatggcaaatcagatggaacagagacttctacaaatctgcatcagaagctgtactatcacgtcctcggaaccgatcaaagcgaagatatcctgtgtgctgagttcccagatgagccaaagtggatggggggagccgagttatctgacgacgggagatatgtccttctgtcgattcgcgaggggtgtgacccggtcaataggttgtggtactgcgatctgcagcaggagagctcgggaatcgcaggtatcctgaaatgggtgaaactgatcgataatttcgaaggcgaatatgattacgtcacaaatgaggggactgtgttcacgtttaagactaataggcagtcgcctaactaccgagtgatcaatattgacttcagagatcccgaggaatctaagtggaaggtgttggtccccgaacatgagaaagacgtgctcgaatggatcgcctgtgttaggtcaaatttcctagtcttgtgctatctgcacgatgtgaagaatatcctgcagcttcacgatttgaccaccggcgctctgttaaaaacatttcctctggacgtcggctctatcgtaggatacagcgggcagaagaaagacacagaaattttctatcaattcacctctttcctgtcccccggaattatctatcattgcgacctgacgaaagaggagctcgagccaagagtgtttcgcgaagtcacagttaaagggatcgacgcttctgactaccagaccgttcagatattttacccctctaaggatgggaccaaaatacctatgttcatcgtacacaaaaagggtatcaaactggatggatcccatcctgcctttctgtatggatatggaggctttaacatctctattacgcccaactactctgtcagcagactgatcttcgtcagacatatgggcggaatccttgcggtggccaatattaggggtggcggtgaatatggggagacctggcacaaaggtgggatcctggccaacaaacagaattgcttcgacgacttccagtgcgcggcagagtatttaattaaggaaggctacacaagccctaagcgtctgacaattaatggcggtagcaacggcggactgctagtggccgcttgtgcaaatcaaaggccagaccttttcggctgtgtgatcgcacaggtcggtgtgatggacatgctcaagtttcataaatacacaattgggcatgcatggaccaccgactatggatgctctgattccaaacagcactttgagtggctggtaaaatactccccactgcacaatgtcaaacttcctgaggcagacgacatccagtacccttctatgctgctgctcaccgccgatcacgacgatagggtggttcctctgcatagcctcaagttcattgccacactgcagtacattgtggggagatctcgtaagcagagtaatcctctcttaatccatgttgacaccaaagccggacatggcgcaggaaaaccaaccgcaaaagtgattgaagaggtttccgatatgtttgccttcatcgcacgctgcctgaatgtggactggatcccctag

SEQ ID NO: 236308 - DNA, 138 bp, synthetic construct
  misc_feature 1..138: note = Description of Artificial Sequence: Synthetic coding sequence
  source 1..138: mol_type = other DNA
taaatcatctaccactgcgacctcacaaaggaagagttggaacctagagtgtttagggaggttacagttaaggggattgatgcttctgactatcaaacggttcagctccccaaaggaaccgagtcatctcggaattag

SEQ ID NO: 236309 - DNA, 135 bp, synthetic construct
  misc_feature 1..135: note = Description of Artificial Sequence: Synthetic coding sequence
  source 1..135: mol_type = other DNA
atcatttaccattgtgacctgactaaggaggagctagaaccaagagtgttcagagaggtgacagtcaaagggattgacgcctccgactatcaaacggtgcagctgcccaaaggcaccgagagctccagaaactag

SEQ ID NO: 236310 - DNA, 2184 bp, synthetic construct
  misc_feature 1..2184: note = Description of Artificial Sequence: Synthetic coding sequence
  source 1..2184: mol_type = other DNA
atgcagcaaaaaacaaagcttttcctacaagccttgaagtattccatcccgcatctcggcaagtgcatgcagaaacagcatctgaaccactataacttcgccgaccactgctataatcggatcaaactgaagaagtaccatttaaccaaatgtctgcagaataaaccaaagattagcgagctggctagaaacattcccagtaggtcattctcgtgtaaggatttgcagcctgtaaagcaggaaaatgaaaaacccttgcctgagaacatggacgcctttgagaaggtccgcaccaagcttgagacacagccacaggaagaatacgaaatcattaacgtggaggtaaagcacggaggatttgtctattatcaggagggctgctgcctcgttcgttccaaggatgaggaggccgataatgacaactatgaagtgcttttcaatctggaagagctgaagctggaccaacccttcattgactgcatacgagtggccccagatgagaaatatgtggcagccaaaatcagaaccgaggacagcgaagcttccacttgcgtgataattaaacttagcgaccagcctgtgatggaggcctcattccccaacgtctcctcatttgaatgggtgaaggacgaggaggacgaagacgttttattctacacctttcagaggaacctcagatgtcacgatgtatatcgggctactttcggcgacaataagcgcaatgaacgcttttacaccgaaaaggatccttcctactttgtctttctgtatcttactaaagatagtcggtttctgaccattaacattatgaacaaaactacctcagaggtttggctcattgacggcttatccccctgggatccccctgtcctgattcaaaaacgaattcatggagtcttatattacgtggaacacagagatgatgagctgtacatcctgaccaacgttggtgagccaactgaatttaagttgatgcggaccgcggcagacacccctgctatcatgaattgggaccttttctttactatgaagcggaacactaaagttatagatttggacatgttcaaggatcattgtgtccttttcttgaagcacagtaacctcctgtatgtcaacgtcatcgggctcgctgatgactctgtgcgctcactgaaactgcccccttgggcctgtggctttatcatggataccaattccgacccaaaaaactgtccatttcagctgtgttcgccaatccgtcccccaaaatattatacgtataagttcgctgagggcaagctgtttgaagaaacagggcacgaagaccctattacaaaaacgtctagagtgctgagacttgaagccaaatccaaggacgggaaactcgtgcccatgaccgtcttccacaaaacggacagcgaagacttgcagaagaaacccctgctggtgcacgtgtacggagcctacggcatggatctcaagatgaattttcggcctgaacgacgcgtgcttgtggacgacggttggatccttgcctactgccacgttcgcggaggcggagaactgggccttcagtggcacgctgacggtcgtttaaccaagaagttgaatggtctagccgatctcgaagcctgcatcaaaaccctgcacggacagggattctctcagccctcgctaacaaccctgacagctttctcggccggaggggtgctggccggagccttgtgcaacagcaatcctgagcttgtccgcgcagtgactctggaggcccctttcctagatgttctgaatactatgatggatacaactctgccactcaccctggaagagctggaggagtggggaaacccctctagtgatgaaaagcataagaattacattaagagatactgtccatatcagaatattaaacctcagcactatccttccatccatattaccgcctacgagaacgacgaacgggtgccccttaagggcattgtgagctacactgaaaaactgaaggaggcgattgcggaacatgcaaaggatacaggagaggggtatcaaacgccaaatataatactcgacatccagcccggaggtaaccatgtaatcgaggactcgcacaaaaagataacagctcagatcaagtttctgtatgaagagttaggtctggattctacgtccgtgtttgaagatctgaaaaagtatctgaagttttag

SEQ ID NO: 236311 - DNA, 1998 bp, synthetic construct
  misc_feature 1..1998: note = Description of Artificial Sequence: Synthetic coding sequence
  source 1..1998: mol_type = other DNA
atgcagcagaagactaagctgtttctccaggctctgaagtattccatacctcacctcgggaagtgtatgcaaaagcaacacctcaaccattacaactttgccgaccattgctacaatagaatcaaactgaagaaatatcatctaaccaagtgtttacagaacaagcccaaaattagcgaactggcccgaaacattcctagtcggtctttctcttgtaaggacctacagcctgtcaagcaggaaaatgaaaagccactgccggagaacatggatgccttcgaaaaggtgcggacaaaactcgaaactcagccccaagaggaatatgagatcataaatgttgaagtaaaacacggcggatttgtatactaccaggagggatgctgcctggttcgaagtaaggatgaagaggcggacaacgacaactatgaggtactgtttaacctcgaggagctaaagctggaccaaccctttatagattgcattcgggtggctcccgacgaaaagtacgtggcggctaagatcagaacagaagattctgaggctagtacttgcgtgataataaaactgagcgaccagccagttatggaggcatcttttccgaacgtcagcagtttcgagtgggttaaggatgaggaggatgaggatgtcttgttctacaccttccagagaaacttgcgttgtcatgacgtttaccgcgcaacgtttggtgataacaagcggaacgaacgcttttatactgaaaaagacccttcatacttcgtgttcctctaccttaccaaggattcaaggttcctcacgatcaacataatgaacaagacaacatctgaggtctggttgattgacggcctcagcccctgggacccacccgtgctgatccagaagaggatacatggcgtcttgtactacgtcgaacatagggacgatgaactttatatcctgaccaacgtgggcgaacccaccgagtttaagctgccgccatgggcctgcggattcatcatggatactaatagtgatccgaaaaattgtccattccaactgtgcagtcccattaggcccccaaagtactatacttataagtttgctgaaggaaaacttttcgaggagactgggcacgaggatccgattaccaagacctctagggtgctgcggctagaagcgaagagtaaagacggcaagcttgtgcctatgaccgtgtttcataagacagatagtgaggacctccaaaagaaacccctcttggtgcacgtgtacggtgcgtacggtatggacttgaaaatgaactttagacccgagcgacgggttctggtggacgacggatggattctagcttattgccatgtacgcggtggcggagagctggggctgcagtggcacgctgacggccgtttaacaaagaagctgaatgggctcgctgacttagaggcatgcatcaagacactgcacggacagggtttttctcaaccttccctgaccaccctcactgcattttccgcaggcggagttttggccggagcactttgtaacagcaaccccgagttggtgcgcgctgtgactctcgaggcacccttcttggacgtgctgaatacaatgatggacaccaccctccctctcacactcgaagagctggaggaatggggaaatccgtcctctgacgagaagcacaagaattacatcaaaagatactgtccttatcagaatatcaaacctcagcactacccttcgatccacattactgcatacgagaacgatgagcgggtgcctcttaagggaattgtctcctacacagagaagttgaaggaagcaatcgcggagcacgccaaggatacaggagaaggctatcagactcctaacatcattctcgatatccagcccggtggcaatcacgttattgaagactcccacaagaaaattaccgctcagatcaagttcctctatgaagagcttggactcgattccacgagtgtgtttgaggacctgaagaaatacctcaagttctag

SEQ ID NO: 236312 - DNA, 1986 bp, synthetic construct
  misc_feature 1..1986: note = Description of Artificial Sequence: Synthetic coding sequence
  source 1..1986: mol_type = other DNA
atgcagcagaaaacaaagctgtttctgcaagcccttaaatatagtatcccccatcttggaaagtgcatgcagaagcagcacctgaaccattataattttgcagatcactgttacaatcgcattaaactgaaaaagtaccacttaactaagtgtctgcaaaataagcccaaaatcagcgaactagctcgaaatatccctagtcgaagctttagttgtaaagacctacagcctgttaaacaagagaatgagaagcccttgcccgagaacatggatgcgttcgagaaggttcgaactaaactcgagacgcagccacaggaagagtatgagatcatcaatgtcgaggtgaagcatggaggtttcgtgtactatcaagaagggtgctgcctcgtgaggagcaaggatgaagaggcagacaatgataattacgaagtactctttaatttggaagagctcaagttggaccaaccttttatcgattgtattcgcgtggcccctgatgaaaaatacgtggccgctaagatcagaaccgaggatagcgaggcatctacctgtgtgatcattaagctgagcgatcagcctgtgatggaagcgtcttttcccaacgtgagctcattcgagtgggtcaaagatgaggaagatgaagatgtgctcttttacacctttcagaggaacctccggtgccatgatgtctatcgtgccacattcggagacaataagcggaacgaacgattttacactgaaaaagacccttcatacttcgtgtttctgtatcttacgaaagatagtagattcctgacgattaacatcatgaataagacaacaagcgaggtgtggctgatcgatgggctgtccccatgggatccccctgttctgatccagaagaggatccacggcgtgctttactatgttgaacatcgagatgatgagctgtacatactcacgaacgtgggagaaccaacagaatttaagctgatgcgtacggctgctgatactccagcgataatgaattgggatttgttttttacaatgaaacgaaacacaaaggtgatcgacctggacatgtttaaggaccactgtgtcctgtttttaaagcatagcaatctgttatacgtgaatgtgatcggtctcgcagatgactctgtcaggagtcttaaggatggaaaactcgtgccgatgactgtttttcacaagaccgacagcgaggatctccagaagaaacctttgctggtgcacgtctacggagcatacggaatggatttgaaaatgaacttccgccctgaacggagagtgctcgttgacgacggctggatcctggcctactgtcatgtccgtggagggggagaactgggcctgcagtggcacgcggacgggcgactgacaaaaaagctgaatggactggcagacctggaggcatgcattaagacacttcacggacaaggtttttcccagccgtccctaacaaccctcactgcattttctgccggaggcgtcctggccggagcactgtgcaacagtaacccagaattggtgcgtgctgtcacgttagaggcaccttttctcgacgtcctcaacactatgatggataccacgttgcccctcacactagaggaactggaggaatggggaaatccatccagcgacgagaagcataaaaattacattaagcgatattgcccctatcagaacataaaacctcagcactacccatcaatccatattacagcgtacgaaaacgacgaaagagtacctttgaaaggtatcgtttcatacaccgagaaactgaaggaggccattgcagagcacgcaaaagacactggtgagggttatcaaacgccaaatatcatcttggatatccagccaggagggaatcatgtgattgaagattcccacaagaaaattacagcccagatcaagttcctatatgaagagttaggactggatagcacgtcagtttttgaggatttaaaaaaatatctgaaattttag

SEQ ID NO: 236313 - DNA, 2184 bp, synthetic construct
  misc_feature 1..2184: note = Description of Artificial Sequence: Synthetic coding sequence
  source 1..2184: mol_type = other DNA
atgcagcagaaaactaaactgtttctccaagctctgaagtactccataccacatctaggcaaatgcatgcagaagcagcaccttaatcattacaatttcgcagaccactgctataaccgcattaaactgaaaaagtaccatctgactaaatgtttgcagaataagcccaagatctctgaattggcacggaacatcccctcaagaagtttctcctgcaaggaccttcaacccgtaaagcaggaaaacgagaaacccctgcccgagaatatggatgcctttgagaaagtaaggaccaagctggaaacgcaaccacaggaagagtacgagatcataaatgttgaagtaaaacatggaggattcgtttattaccaggaaggttgctgtctggtcaggtcaaaggatgaagaagcagacaacgacaactacgaggttctatttaatctggaggagctgaagctggatcagccctttattgactgtatcagagtggccccagatgagaagtacgtagctgctaaaatccgcacggaggactccgaagctagtacatgtgtgattatcaagctgagtgatcagccagttatggaggctagctttcctaacgtgtcttcttttgagtgggtgaaagacgaagaagacgaggacgttctcttctacacattccagaggaatctcagatgccatgacgtgtaccgcgctaccttcggcgacaacaagagaaacgagcgtttttacactgaaaaggatccgagctactttgtgttcttatatctgacgaaggattccagattccttactatcaacattatgaacaaaaccacgtctgaggtgtggctcattgacggcctgagcccctgggatccccctgtgctcatccaaaaaagaatacacggcgtgttatattacgtggagcaccgggacgacgagctgtatatactgactaacgtcggtgaaccgaccgaattcaagttgatgcgtaccgctgccgacacacccgcaataatgaactgggacctcttctttaccatgaagaggaacacaaaggtgatagacctggacatgttcaaagatcattgtgtcctcttcctaaaacactcgaatctcctgtacgtcaacgtgatcggtctcgcagatgatagcgttcgctcactcaagctccccccatgggcgtgcggatttatcatggatacaaattctgatccaaagaattgtcctttccagctgtgttccccaattcggccaccgaaatactatacttataagttcgccgagggcaagctctttgaggagacgggccacgaggatcccattaccaaaacgagccgcgtgctgcgtctggaagccaaaagcaaggatggtaagttggttcctatgacagtgtttcacaagaccgacagtgaagacctccagaagaagccactgttggtgcacgtgtatggagcgtatggcatggacttgaagatgaacttccgaccagagaggcgcgtactggtggacgacggctggatactggcatactgccatgtaagaggcggaggtgagcttggccttcagtggcacgctgatgggcgtttgaccaaaaagctgaatggtctggcagatctggaagcatgtattaaaactctgcacgggcaggggttctctcaaccatctctgaccaccttaaccgccttcagcgcgggaggggtccttgcaggagccttgtgcaactccaatccggagttagtgagagccgtaactcttgaagcaccttttctcgacgtgttgaacactatgatggataccacactgccgctaaccctcgaggaactcgaggagtggggcaaccccagcagtgacgaaaagcataaaaattacattaagcgatattgcccctaccaaaatataaaacctcaacactacccatctattcacattactgcctacgagaatgacgaacgtgtgcctcttaaggggattgtgagctacactgaaaagttaaaagaagcaatcgccgaacatgccaaggatacgggtgaggggtaccaaaccccaaatatcattctggatattcagcctggcggtaaccatgttattgaggattcccacaagaaaattaccgctcaaataaaattcctgtacgaagaactgggtttagattccacaagcgtgttcgaggatttaaagaagtatctcaaattctag

SEQ ID NO: 236314 - DNA, 2184 bp, synthetic construct
  misc_feature 1..2184: note = Description of Artificial Sequence: Synthetic coding sequence
  source 1..2184: mol_type = other DNA
atgcaacagaagacaaagctgttcctacaggctctgaaatacagcatcccgcacctgggcaaatgtatgcagaagcagcatctgaatcactataactttgccgaccactgctacaaccgtattaaactgaaaaaatatcacctgaccaagtgcttgcagaataaaccaaaaataagcgaactggcccgtaacattccttctcgctcattttcctgtaaggatctgcagccagtcaaacaggaaaatgagaagcctctgcctgagaatatggatgcctttgaaaaagtgcggacaaagctggagactcagcctcaggaagaatacgagattattaacgtcgaggtgaaacatggcggatttgtgtactaccaagagggttgctgccttgtaaggagtaaggacgaggaggcagataatgacaactacgaagtcttgttcaacctggaagagctgaagttggatcagccctttattgattgcatacgtgtggctcccgacgaaaagtatgtagctgctaaaatccggacagaggactccgaggcttcgacgtgcgtaattatcaaactgagtgaccagcctgtcatggaggcgtccttccccaacgtgtcttcctttgagtgggtaaaagatgaggaggacgaggatgtgctgttctacacctttcaacgtaatctccgatgtcacgatgtgtatagagctacttttggggacaataagcggaatgagaggttttacacagaaaaagacccctcttacttcgtctttttgtatttgacaaaggacagtcggttccttaccattaatatcatgaataaaactacaagcgaggtttggttgatcgacgggctcagcccgtgggacccacctgtcctgatccagaaacggatccatggtgtcctctactacgtcgagcatcgggatgatgagctctacattcttactaatgtcggcgagcctaccgagtttaagctaatgcgcacggcagccgatactcccgctataatgaactgggatctgttctttaccatgaagaggaatactaaggttatcgacctggacatgtttaaagatcattgtgtacttttcctgaaacactctaatctcctgtacgtcaacgtaatcggtctggctgatgactcagtccgaagcctgaaattgcctccctgggcttgcggtttcatcatggatactaacagcgaccctaaaaactgcccatttcagctctgttcaccaattaggcctccaaaatactacacctataaattcgccgagggcaagcttttcgaggaaacaggacatgaggacccaattacaaagacatctcgcgttctgcggctcgaagcaaagagcaaagacggtaagctcgttcctatgaccgtgttccacaaaaccgacagcgaggacttacagaaaaagcctctcttggttcatgtttacggcgcttacgggatggaccttaaaatgaactttcgaccagagaggcgagtcctcgttgacgacggttggattctcgcatattgccacgttcgcggaggaggcgagctgggcctccagtggcacgctgacgggagactcacgaagaagcttaacgggctggcagacttggaggcgtgtattaagaccttgcacgggcaggggtttagccaaccctctctgacgaccctgacagccttcagcgctggcggtgtgttggcaggcgcactctgtaactctaaccctgaactcgtgagggccgtcaccctggaggctccattcctggacgtactcaatactatgatggataccacattaccactaacgctggaagaacttgaagagtggggcaacccctcatccgacgagaagcacaagaattacattaagcgctactgcccataccaaaacatcaaaccccagcactatcccagcatccacataacagcctatgaaaacgatgaaagagtgcctcttaaaggtatcgtgagttacacagagaaactcaaagaagctattgcagagcacgcaaaggacacaggagaagggtaccagacccctaatataattcttgacatccaaccgggagggaaccatgtgatcgaagattcgcacaagaaaattaccgcccagatcaagtttctttatgaagaacttggtctggactccacttccgtttttgaggacttgaaaaaatatttgaagttttag

SEQ ID NO: 236315 - DNA, 2184 bp, synthetic construct
  misc_feature 1..2184: note = Description of Artificial Sequence: Synthetic coding sequence
  source 1..2184: mol_type = other DNA
atgcagcagaagaccaaactgttcctacaggctctgaagtacagcatcccacatctgggcaagtgtatgcagaaacagcacctcaatcactacaacttcgcagatcactgttacaaccgaattaagctaaagaagtaccacctcactaaatgcctgcagaacaagcctaaaataagcgagctcgcgcgaaacataccatctaggtccttctcctgtaaagacctgcagcccgtgaagcaggagaacgaaaaacctcttccagaaaatatggatgcttttgaaaaggtcaggactaagctggagacacagccacaagaagaatatgagataatcaatgtcgaggtgaagcacggcggattcgtgtattaccaggagggctgctgtctagtgcggtccaaggatgaggaggccgataacgataactacgaagttctttttaatctggaggagctaaagctcgaccaacccttcattgattgtatcagggtggcaccggatgaaaaatatgtggccgcaaagatccggaccgaggattcggaggcatcgacatgcgtgattatcaagttaagcgatcagcctgttatggaggcatccttccccaatgtgtccagcttcgaatgggtgaaagatgaagaggatgaggatgttctgttctacactttccagcggaatctccggtgccacgatgtctaccgagccacttttggggacaacaaacgtaatgaacggttttatacagaaaaggacccatcctatttcgtattcctgtacttgactaaggacagcagattcctgacaatcaatattatgaataagactacctctgaagtgtggctaattgacggactgtcaccctgggaccctccggtcctgatacaaaagcgtattcacggggtgctgtactacgtggaacaccgcgatgatgagctgtacattctgacaaacgtcggggagcccacagaatttaagttaatgcggacagccgctgacacacccgcaattatgaattgggatctgttcttcacgatgaagcgtaatacaaaggtgatagatctggatatgttcaaggatcattgtgtactcttcctcaagcactccaatttgctgtatgtaaatgtgatcggcctagctgacgacagtgtgcgatccctcaagcttcccccttgggcttgtggttttatcatggataccaatagtgatccaaaaaactgccccttccagctgtgctctcctatccggcctcctaaatactacacctacaagtttgccgagggcaagctgttcgaagagacaggtcacgaggatccaataactaaaacctccagagtgctccgtctcgaggcgaaaagtaaagatgggaaactagtgcctatgacggtatttcacaaaacagatagcgaggatctacagaaaaagcctcttctggtccatgtgtacggagcatatggcatggacttaaagatgaactttcggccagagcgtagggtgcttgtggatgatggctggatactcgcatattgtcatgttcgaggcggtggggaactagggcttcagtggcatgcagacggacgactcacgaagaagctgaacgggctggcggatcttgaggcctgtattaagacccttcatggccagggtttctctcagcctagtttaaccacactcacagcattctcagccggtggcgtactggccggagccctttgcaacagtaaccccgagctggtacgggctgtaacactggaggccccttttctggatgtgttgaatacaatgatggacactacactgccacttactcttgaggaattggaagagtggggaaacccaagttccgatgagaagcataagaattatatcaaacgctattgcccctatcaaaatataaaaccccagcactacccctccatacacatcactgcatacgagaacgatgagcgagtcccattgaagggcatagttagttatacagagaaactgaaagaggctatcgccgagcacgcaaaagataccggtgagggctatcagactccaaacataatccttgatatccagcctggcggaaaccacgtgattgaagacagccataagaagattaccgcccagatcaaatttctttacgaggagcttgggttggatagcacatccgtgtttgaggacctaaagaagtacctgaagttttag

SEQ ID NO: 236316 - DNA, 2184 bp, synthetic construct
  misc_feature 1..2184: note = Description of Artificial Sequence: Synthetic coding sequence
  source 1..2184: mol_type = other DNA
atgcagcagaaaaccaaactttttctgcaggccctgaaatactctatcccgcacctgggcaagtgtatgcaaaagcagcatctgaatcattacaacttcgctgatcactgctacaatagaatcaagctcaagaagtaccacctgactaaatgtctgcagaacaaacccaagatttccgagctcgcaagaaatattccgtcacggtcctttagctgcaaagatctgcagcctgtgaaacaagaaaacgaaaagcccttgcccgaaaacatggatgcctttgagaaggtccggaccaagttagaaacacagccgcaggaagaatatgagattatcaatgtggaagtgaagcacggcggattcgtgtattaccaagagggatgctgcctcgtgcgatctaaggacgaagaagctgataacgacaattacgaggtcctgtttaacctggaagaacttaagttggatcaaccttttatagactgcatcagagtagccccagatgagaagtacgtggccgcaaaaatccggactgaagactcagaggcctctacctgcgttattattaagctcagcgaccagccagtgatggaggcctcattcccgaatgtatctagttttgagtgggtgaaagacgaggaggacgaggacgttctgttttacaccttccagcggaacctgaggtgccacgacgtgtaccgagctacctttggcgataacaagagaaatgagcggttttataccgaaaaagacccttcctattttgtttttttatacctcaccaaggacagtcggtttttaaccattaacatcatgaataaaacaacatcggaggtctggctgattgacgggctgtccccttgggaccctcccgtgctcatacagaaacgaatccatggtgtcctgtattatgtggaacatcgggatgatgagctgtacatcttgacaaacgtcggcgagccaaccgagtttaaactgatgcgcacagcagcggacacaccagcaattatgaactgggatctcttcttcactatgaagagaaacactaaagtgatagacctcgacatgttcaaagaccattgcgtgctttttctcaagcattctaacctcttgtatgttaacgtcattgggctggctgacgacagcgttcgcagcctgaaactgcccccatgggcatgtggctttattatggacactaatagcgatcctaaaaattgcccgttccaattatgcagccctatacggcctccaaaatattacacttacaaatttgcggagggcaaactcttcgaagaaactggacatgaggacccaattacaaagacatcaagggtattgaggctcgaggctaaatctaaagatggcaaactcgtgccaatgacagtgtttcacaagaccgattctgaagatctgcagaagaagccactcctggtccatgtttatggcgcatacggcatggatcttaagatgaatttcaggcccgaaaggagggtgcttgtggatgatggctggattctcgcatattgccatgtgcgtggcggaggagagctgggcttgcaatggcatgctgacggcaggctcacaaaaaagcttaatggcttggccgatctggaggcgtgcattaaaaccttgcacggtcaagggttttcacaaccaagtctcacgacattaacagcctttagtgcaggcggagtgctagcaggggctctttgtaactcaaacccagaattagtccgcgctgttaccctcgaggccccatttctagacgtgttgaatacaatgatggacacgactctgcctctaaccttagaagaactcgaggagtggggcaacccatccagtgacgagaagcataaaaactatatcaagcgttactgcccatatcagaatatcaaaccccagcactatccttcaattcacatcaccgcatatgagaatgatgagcgggttccactgaaaggtattgtgtcctacactgagaaactgaaagaagcaattgctgagcacgctaaggatactggcgaggggtaccaaacacctaatatcatactggatatccaaccaggcggaaatcacgtgatcgaggatagccacaagaagatcaccgctcaaattaagttcctctacgaagaattgggcttggatagtacctccgtcttcgaagatctaaagaagtatctgaaattttag

SEQ ID NO: 236317 - DNA, 2184 bp, synthetic construct
  misc_feature 1..2184: note = Description of Artificial Sequence: Synthetic coding sequence
  source 1..2184: mol_type = other DNA
atgcagcaaaagaccaagctctttctgcaggcattgaaatatagtatcccacatcttggcaagtgcatgcagaagcagcacctgaatcactataacttcgcagaccattgttacaaccgaattaaactgaagaagtatcacttaaccaagtgcctgcagaataagccgaagatcagcgaactcgcgagaaatataccaagccgtagcttctcctgtaaagaccttcagcccgtgaagcaagaaaatgaaaagccactgcctgaaaacatggacgcctttgagaaggtgcggaccaaactagaaacgcagccccaagaggagtatgaaataattaacgtggaggtgaaacatggtggattcgtctactaccaggaaggatgttgcctggtgcgatcaaaggacgaagaggccgataacgataactacgaagtcctcttcaatctcgaagagctcaagctggaccagccctttatagactgcatccgcgtcgcccctgatgaaaagtacgtcgccgctaagattagaacggaggactctgaggctagcacatgcgtaattatcaaattgtccgatcagccagtgatggaagcttcttttccaaacgtatctagctttgagtgggttaaggacgaagaagatgaggacgtgctcttttacactttccagagaaatcttaggtgtcacgacgtttaccgtgcaacatttggtgataacaagagaaatgagcgcttctataccgagaaagatccttcatacttcgtttttttatacctgaccaaggacagtcgatttctaacaataaacatcatgaacaagaccacaagcgaagtctggttaatcgacggtctctcaccttgggaccccccagttctcattcaaaagagaatccatggcgtgctctattacgtggagcatagagacgatgagctgtacatcttgaccaacgtgggtgaacccactgagttcaaactgatgagaaccgcagccgacacacctgccattatgaattgggacttgttcttcacaatgaagagaaataccaaagtcattgacctcgacatgttcaaggaccattgcgtcttatttctgaaacacagcaacttactttatgttaacgtaattgggctggcagatgactccgttagatccttaaagctgccaccttgggcttgcgggtttatcatggataccaattccgatccgaaaaattgcccattccaactgtgttccccgatccgacctcccaaatattacacctacaagttcgccgaggggaaactgtttgaggaaactgggcatgaagaccctatcactaagacctcccgggtcctgcgtcttgaagcgaagtcaaaagatggaaaactggtccccatgacggtgttccataagactgactcggaggacttgcagaagaagcccctgctcgtccacgtctatggtgcctacggcatggaccttaaaatgaatttcagaccggaacgccgagttctcgtggacgacggctggatcctggcatactgtcacgtgcgcggaggcggagagctcggcctgcaatggcacgccgatggaaggttgaccaagaagttgaacggcctcgcagacctggaggcctgcatcaagactctgcatggtcagggcttttcccagcctagcttaacaactctcaccgcgttctctgccggaggggtgttggcaggcgctctttgcaactcgaatccagaacttgtcagagcggtaacgctggaggctcccttcctcgatgtcctgaacaccatgatggacaccacactcccattgacactggaggagctggaagagtggggaaacccttcatccgacgaaaaacacaaaaattacattaaaaggtactgtccttatcaaaatatcaaaccacagcactacccctctatccatattacagcctacgaaaacgatgagcgggtccctttaaagggcatagtgtcttatactgaaaaactgaaagaagctattgccgaacatgctaaggatactggcgaaggatatcagaccccaaacatcatcttggatattcagccaggtggaaaccacgtgattgaggactctcacaagaagattaccgcgcagatcaaatttctctatgaggagctgggactcgactccacttccgttttcgaggacctgaaaaagtatctgaaattttag

SEQ ID NO: 236318 - DNA, 456 bp, synthetic construct
  misc_feature 1..456: note = Description of Artificial Sequence: Synthetic coding sequence
  source 1..456: mol_type = other DNA
atgcaacagaagacaaagttgtttctgcaggcactgaagtattcgattccacatcttgggaaatgtatgcaaaaacagcatctcaaccactacaacttcgctgaccactgttataatcgaatcaaactgaaaaagtaccacttgacaaaatgtcttcagaataagccaaagatctccgaactagctcgaaatatcccctcgaggagtttctcctgcaaggacttgcagcctgttaaacaggaaaatgaaaaacccctgcccgagaacatggacgcattcgagaaggtacgtactaaactggaaacccagccacaggaagagtatgagattatcaacgtggaagttaaacacggcggattcgtatattaccaggaagggtgctgtctggtgcggtctaaagacgaggaagctgacaacgacaactacgaagtgctgtttaacctggaagaactgtag

SEQ ID NO: 236319 - DNA, 1917 bp, synthetic construct
  misc_feature 1..1917: note = Description of Artificial Sequence: Synthetic coding sequence
  source 1..1917: mol_type = other DNA
atggatgcctttgagaaggtgcgaactaagctcgaaacccagcctcaagaggaatatgaaataattaatgtggaagtgaagcacggagggtttgtatattaccaagaaggttgttgtctggtgcgaagtaaagacgaggaggccgataacgacaactatgaggtcctgtttaatcttgaggagcttaaactggatcaacctttcattgactgtatacgggtcgcccctgacgagaagtacgtggctgctaagataagaacagaagattctgaggcctcaacctgcgtcatcattaagctctcagaccagcccgtgatggaggcttctttcccgaatgtgtcctccttcgaatgggtgaaggatgaggaggacgaggatgtactgttctacacattccagcggaatttgcggtgtcacgatgtttacagggctaccttcggtgacaacaaaagaaacgagagattttacacagagaaagacccctcctacttcgtgttcctatacctgacaaaggattcccgcttcttgacaatcaacatcatgaacaaaacaacctctgaagtgtggctgattgacgggttatctccatgggacccgcctgtgctcatacagaagcgtattcatggcgtgctctactatgttgagcacagagacgatgagctgtacatcctcaccaacgtgggggaaccaaccgaatttaaattaatgaggacggccgctgacacacctgcaatcatgaattgggacctgttctttactatgaagagaaatacgaaggtcatcgacctcgacatgtttaaggatcactgcgtcttgttcttgaaacactcaaatttgctctatgttaacgtgattggcctggctgacgactccgttagatcccttaagttgccaccctgggcatgtggttttatcatggataccaacagcgaccccaaaaattgcccgtttcagctgtgttcacctattcgcccaccgaaatattatacgtataaattcgccgaaggaaaattgtttgaggagactggtcacgaggatcctattactaagacgagtagagtcctgcggcttgaggctaaatctaaggatggcaagctggtccccatgaccgtgttccacaagacagactctgaagacctccaaaagaagcccctcctcgtccatgtgtacggggcatacggaatggacttaaagatgaactttagaccagagcgcagagtgctggtcgacgacggttggatcctggcttattgtcatgtcaggggtgggggagagctgggtttgcagtggcatgcagatggacgcctcaccaaaaagttgaacggtctggctgatcttgaggcatgtatcaagactttgcacggccaaggtttctcccagccttcacttactaccctgacagctttctcagccggtggggttttggcaggagctttgtgtaatagcaaccctgagctggttcgcgctgttactctggaagcaccattcctcgatgttctcaatactatgatggacaccacactcccactgactctagaggaactcgaagagtggggcaacccctcttctgatgaaaagcacaaaaattacatcaagagatactgcccgtatcagaacatcaagccccagcattaccccagcatccacatcaccgcatacgaaaatgacgaaagggtgccgctgaagggcatcgtttcttacactgaaaagttgaaggaagccatagccgaacatgcgaaagatactggggagggctaccaaacaccgaacattatactggacattcagccagggggtaatcatgtgatcgaagattcccacaagaagattaccgcccagataaagttcctgtacgaggagcttggcctggattcaacctctgtgttcgaggatctaaaaaaatatctgaaattctag

SEQ ID NO: 236320 - DNA, 1491 bp, synthetic construct
  misc_feature 1..1491: note = Description of Artificial Sequence: Synthetic coding sequence
  source 1..1491: mol_type = other DNA
atgggcagaagggccctactgttactcctactgagttttctcgcaccctgggctactattgcacttcgcccagccctgcgcgctctcgggagtttgcacctaccgacgaaccctacctctctcccggctgttgccaaaaactatagcgtgctatacttccaacaaaaggtggatcactttgggtttaatacagtaaagaccttcaaccagcgctaccttgtagctgacaagtattggaagaagaacggcggatcaatactcttctacacagggaacgagggcgacatcatttggttctgcaacaacacaggcttcatgtgggatgttgcggaagagctaaaggcgatgctggtgtttgccgaacatcgatattacggagaatccttaccctttggcgacaactcgtttaaagattcacggcacctcaatttcttgacgtctgagcaggcattagcagatttcgccgaacttattaagcatcttaaacgcacaatccccggagcggaaaaccagcctgtcatcgcaataggagggtcgtatgggggtatgctcgccgcttggttcagaatgaagtacccccacatggtagttggggctctggcagcatccgcccctatctggcagtttgaggatctagtgccttgtggagttttcatgaagatagtgactacggacttccggaaaagcgggccacattgcagcgagtctattcacaggagctgggacgccataaacaggctcagcaacactggttctggcctacagtggctcactggggcattgcacctgtgtagccccctgacctctcaggacattcagcacctcaaggattggatatctgagacctgggtgaatctcgccatggttgattacccctacgctagtaattttctccagccactacctgcatggcccataaaggtggtctgtcagtatctgaagaacccaaatgtgagcgacagcctgttactgcagaacatttttcaggcactgaacgtttactacaactattcagggcaagttaaatgtctgaacatctctgaaacagctacttcttccctcggcacactaggctggtcctaccaggcttgcaccgaagtggtaatgcccttctgcaccaatggggttgacgatatgttcgaaccgcacagttggaacttaaaggaactgagtgacgattgcttccagcaatggggtgtgcgacctcgcccatcctggataaccacaatgtacggcggaaaaaacattagttcccatactaacatagtgttttccaatggcgagctagatccctggagtggcggtggcgtcacaaaggatatcacggacaccctggtggctgtcacaatcagcgaaggagcccaccaccttgatctgaggaccaagaatgctctagaccccatgagcgtgttactggctcgcagcttagaggtccgccacatgaaaaactggatccgcgatttctacgacagcgctggaaagcagcactag

SEQ ID NO: 236321 - DNA, 1554 bp, synthetic construct
  misc_feature 1..1554: note = Description of Artificial Sequence: Synthetic coding sequence
  source 1..1554: mol_type = other DNA
atgggtaggagagcactgcttttgctgctgctgagcttcctcgccccatgggctaccatcgccctaaggcccgctctcagagcgctgggctcgttgcacctgcctacaaacccaactagccttcctgctgttgcgaagaattatagcgtgctgtacttccagcagaaagccctagccgctggccagctgcatatctgtattatccaattgaaccattataaaactccccttgtagatcatttcggctttaacaccgtgaagaccttcaatcagcgttacctagtggctgacaagtattggaagaaaaatggtggatccattcttttctataccggtaatgagggggatattatttggttttgcaacaatacaggattcatgtgggacgtagcggaagagctgaaggcaatgctggtcttcgctgaacaccggtattacggagaaagtttaccatttggcgataactcttttaaggatagccgccacctgaacttcctaacatccgaacaggctctagctgatttcgctgagttgattaaacacctgaagcgaaccatcccaggcgcagagaatcagccagtaatcgctattggaggatcatacggcggtatgctggctgcctggttccgaatgaaatatcctcacatggtggtgggcgcactggcggctagtgcgccaatatggcagtttgaagacctcgtgccctgcggtgtgttcatgaaaatcgtaaccactgacttcaggaagagcggcccacactgtagcgagagcatccacagaagctgggatgccataaacagactctctaataccgggagtggcttgcagtggctcacaggggctttacacttatgttctccactcacttcacaggatattcagcatctgaaggattggatttctgagacttgggtcaacctagctatggtggactatccttacgctagtaacttcctccagccactaccagcctggccaatcaaagttgtgtgtcagtatctcaaaaaccccaacgtgagtgactccctcctgttacaaaacatatttcaggcattaaatgtgtactataactactcagggcaggtgaagtgcctgaatatctcggagacagctacaagttcactggggacactgggttggtcgtatcaggcttgtacagaagtggtcatgcccttctgtaccaacggggtcgacgatatgttcgagcctcacagctggaaccttaaggaactgtcagacgattgcttccagcagtggggggtgcgacctcgaccatcatggatcactaccatgtacggaggaaaaaacatctcttcgcacaccaacattgtgttttcaaatggcgagctggatccttggagtggaggaggcgtgactaaggacataaccgatacgctcgtggctgtgaccatcagcgaaggggctcaccaccttgacctccgaactaaaaacgctctggatccaatgtcggtgctactcgcacgcagcctggaggttcgccacatgaagaattggattcgggacttttatgactctgctggaaagcagcactag

SEQ ID NO: 236322 - DNA, 1176 bp, synthetic construct
  misc_feature 1..1176: note = Description of Artificial Sequence: Synthetic coding sequence
  source 1..1176: mol_type = other DNA
atgtgggacgtggccgaagaattaaaggcaatgcttgtcttcgctgaacacaggtactatggggagagtctcccttttggcgacaacagttttaaggactcccggcacctgaatttcttgactagcgaacaggcacttgcagattttgcagagttgataaagcatcttaaacggacgatccctggcgctgagaaccagccagtgattgcgattgggggtagctacgggggaatgctggccgcttggtttcggatgaagtacccccatatggttgttggcgcactggcagcttccgctcccatctggcaattcgaagacctcgtaccatgcggcgtgttcatgaagatcgttaccactgattttcggaaatctggaccccattgctccgagagcatacatcgcagttgggatgctatcaacaggttatctaataccggttccggactccagtggctaactggagcactccacctgtgcagtccactaacctcccaggatatacaacatctaaaggattggattagcgaaacgtgggtgaacctggcaatggtggattacccatacgctagtaacttcctacagcccctcccagcctggcccataaaagtagtttgtcagtaccttaaaaaccccaacgtaagcgattctctgctgttgcagaatattttccaggctcttaatgtctactacaactactccggccaagtaaagtgcttgaatatttccgaaacggcaacttcttcccttggcacattgggttggtcctaccaggcctgcacagaagtggtgatgcccttctgtaccaatggagtcgatgacatgttcgagcctcacagctggaacctaaaagagctgagcgatgactgtttccaacagtggggagtgcgaccaaggccttcctggattacaaccatgtacggcggaaaaaatattagctcgcacacaaacatagtgttcagtaacggcgagttagatccttggtctgggggtggggtgacaaaggatattaccgacactctggttgcagttacgatctctgaaggcgctcaccacctcgacctgcgaacaaaaaacgccctggatccaatgtccgtgcttctggcccgtagccttgaagtcagacacatgaaaaattggattagagacttttacgatagcgcaggaaagcaacattag

SEQ ID NO: 236323 - DNA, 1428 bp, synthetic construct
  misc_feature 1..1428: note = Description of Artificial Sequence: Synthetic coding sequence
  source 1..1428: mol_type = other DNA
atggaaggtttgctcacacgctgccgcgctttgccagccttagctacctgttccaggcagctcagcggttacgtgccgtgccggtttcatcactgcgcaccacgtcgcggtagaaggctactgctatcccgggtattccagccacaaaacctgcgagaagacagagtattgtcacttcaggacaagtctgatgatctgacttgcaaatcccagcgactgatgctgcaggtggggcttatataccctgcatctccaggttgttaccaccttctgccctacaccgtgagagcaatggaaaagcttgtaagggtgattgatcaagaaatgcaggccatcgggggacaaaaggttaacatgccctccctttctcccgctgagctgtggcaagctacaaaccgctgggacttgatgggaaaggaactccttagattgcgcgatagacacggaaaggaatactgtcttggacccacccatgaggaggcaattaccgcgctgatcgccagccaaaagaagctaagctacaagcagctaccatttctcctttaccaggttactcgcaagttccgcgatgaacctagacctaggttcggtctgctgcgcggaagggagttctacatgaaagatatgtacacctttgactcttccccagaggcagcccaacaaacatatagcttggtgtgcgatgcctactgttccctctttaacaaactcgggctgccatttgtgaaggttcaagccgatgtgggtacaataggcggaacggtgtcgcacgagtttcagctgccagtggacataggagaagatagactcgcgatatgtcccagatgcagttttagtgccaacatggagaccctggacctgagccaaatgaactgtcccgcttgtcagggacccttaacaaagacaaagggcattgaggttggccataccttttacctgggtacaaagtactctagcattttcaatgcccaatttaccaatgtgtgtggtaaacctaccttggcagaaatgggatgctatgggctgggcgtcacacgcattctcgcagccgctatagaggtgctttctaccgaggattgcgtgagatggcccagcctgctggccccataccaggcatgcctgatcccacctaagaagggctccaaagaacaagctgccagcgagctgataggtcaactgtatgaccatatcacggaggctgtgcctcagctccacggcgaggtcctattagatgacagaacccacttaacaattggaaaccgtctcaaggacgcaaacaaatttggctacccatttgttattatcgcaggcaaacgagctctggaggatccagctcattttgaggtatggtgccaaaataccggcgaagtggcatttctgactaaggatggtgtcatggacttactgaccccggtgcaaacagtctag

SEQ ID NO: 236324 - DNA, 498 bp, synthetic construct
  misc_feature 1..498: note = Description of Artificial Sequence: Synthetic coding sequence
  source 1..498: mol_type = other DNA
atggccaaaatgaacctgtctagctacatcctgattttgaccttttccctttttagccagggcatcctgctcagcgcttccaaatcaatcaggaacctggatgatgacatggtcttcaacaccttcaggttaggaaagggcttccagaaggaggataccgctgaaaagtccgtaatcgctccctcacttgagcaatacaagaatgatgagtcttcgttcatgaatgaggaggagaacaaggttagcaagaacacgggctccaagcacaacttcctcaatcatgggctacctctgaatttggctatcaagccttatctagccttgaaaggttcagtcgctttcccggctgagaatggagttcaaaataccgagtcaacccaggagaagagagagattggagatgaggagaacagtgccaagtttccaatcggacgcagggattttgatatgcttaggtgtatgctgggcagagtctaccggccatgctggcaggtgtag

SEQ ID NO: 236325 - DNA, 2598 bp, synthetic construct
  misc_feature 1..2598: note = Description of Artificial Sequence: Synthetic coding sequence
  source 1..2598: mol_type = other DNA
atggctctggtcctcggctctctcctgctccttggcctgtgtggcaacagttttagtggaggacaaccaagttccacagacgcaccaaaggcatggaattacgaactgccagcaaccaattatgaaacacaggactctcacaaggccggaccaatcgggattctcttcgaactggtgcacatttttctttacgtggtgcaaccaagagatttccccgaggatactctgagaaaattcttgcaaaaagcctacgaatccaagattgattacgacaagcctgaaacagtgatcctcgggctcaaaatcgtctattatgaggctggaataattctgtgttgtgtcctcgggctactattcataatattaatgccgctggttggatacttcttctgtatgtgtcggtgttgtaataaatgtggaggagaaatgcatcagaggcagaaagagaacggcccttttttgagaaagtgttttgccatctccctcttggtgatttgcataatcattagcatcggaattttctatggatttgtggcaaatcatcaggtgcggactcgcatcaaaagatcccgtaaactggccgactctaactttaaggacttacgaaccctcctcaatgaaacccctgaacagattaaatacattctagcacagtacaacaccactaaggataaggcattcaccgatttgaacagcataaactctgtgctggggggagggattctggaccgcctgaggccaaacattattccagtgctcgatgagatcaagtctatggccaccgccatcaaagaaaccaaagaggcgctggagaatatgaatagcacactgaagtcacttcaccaacagtccactcagcttagctcgtctctgacctcagttaagacctctctgagatcatctctcaacgacccactttgtctggtacatccttctagtgagacctgcaactccatccggctatccctgtctcaattaaattccaatcccgagctacggcagctgccccctgttgacgcggaactcgacaacgtgaacaacgtgctcagaacagatctcgacggcctggtccagcaggggtatcagagcctgaatgacatcccagacagagtccagcgccaaaccactaccgtggtggctggcatcaagagagtgcttaattccataggaagtgatattgacaatgtaacccagcggctgcctatccaagacatcctgtctgcctttagcgtctacgtcaataacacagaatcttacatacaccgcaatctgcctacgttagaagaatatgacagttactggtggttgggtgggctcgttatatgttctctcctgactctgatcgtgattttctactacctgggattattatgtggcgtttgtggttacgaccggcacgccaccccgaccactagaggctgtgtgagcaataccgggggtgtgttcctgatggtaggagtcggcctaagttttttattttgttggatcttgatgatcattgtagtcctgacattcgtgttcggggctaatgtagaaaaactgatctgcgaaccctacactagcaaagaactctttcgagtgctagacacaccttaccttctgaatgaagactgggagtattacctgtcaggtaagctcttcaataaatccaaaatgaagctcacattcgagcaggtctactcggattgcaaaaaaaataggggtacatatgggacactgcaccttcagaattcattcaacatatctgagcatctcaacataaacgagcacaccggcagtatatcgagcgaattggagagcttgaaggtcaacttgaacatcttcttgctgggcgcagccggacgaaaaaacctccaggacttcgcagcatgtgggattgatcggatgaactacgacagttatctcgcacagactggaaaaagtcccgctggtgtgaatctgctgagtttcgcgtacgatttggaggccaaagccaattcattacctccaggaaaccttcggaattcactcaagcgggatgcgcagaccataaagacaattcaccagcagagggtcttgcccatcgagcaatctctgtctaccctgtatcagtccgttaaaatcttacaaaggaccgggaatggtctgctagagcgtgtgaccagaattcttgcatcattggatttcgctcaaaattttatcactaacaatacgtcctctgtcattatcgaagagacgaaaaaatacgggcgaactatcattggatacttcgagcactacctacaatggatagagttcagtatctcagagaaggtcgccagctgtaagcccgtcgctacagctctcgacacagccgtcgatgtgtttctctgtagctacatcattgacccattgaatctgttttggttcgggattggaaaagccaccgttttcctcctcccagcactgatcttcgctgttaaattagcaaaatactaccgcaggatggattcagaggacgtgtatgacgatgttgagaccatccctatgaagaacatggaaaacgggaataatggctatcataaggatcacgtgtatgggattcacaaccccgtcatgacctcacctagccagcattag

SEQ ID NO: 236326 - DNA, 2571 bp, synthetic construct
  misc_feature 1..2571: note = Description of Artificial Sequence: Synthetic coding sequence
  source 1..2571: mol_type = other DNA
atggccttggtcctgggtagtctgctccttttgggactatgtgggaacagtttttccggcggacaaccatcatccactgatgcccctaaagcctggaattatgaacttcccgcaaccaactatgaaacacaggatagccacaaagctggaccgataggcatcctgtttgagctggtgcacatattcttgtacgtagtccaaccgagagattttcctgaagacactctccgaaaatttctccagaaagcctacgagtctaaaatcgactatgacaagattgtgtactatgaggccggaataattttatgctgcgtgctgggtctgcttttcatcatcctcatgcctctggtgggttactttttctgcatgtgtcgatgctgcaataaatgcgggggagagatgcatcagagacagaaagaaaatggaccatttttgcgcaagtgtttcgcgatcagcctgcttgtgatatgcataatcatttctataggtattttctatggatttgttgccaatcaccaagtccggacacgcatcaaacgctcacgtaaactggctgattcaaattttaaagacctgcgcacattgctcaacgagacccccgagcagattaagtatatcctggcccagtacaacaccacaaaagataaagcctttacagacctgaattctatcaattccgttctaggaggcggaatactggacaggcttcgtcccaacattattccagtcctcgacgaaatcaagtctatggccacggctataaaagagactaaggaggccctggaaaatatgaactcaaccctgaagagccttcatcagcaaagcacccagctttcaagtagcctgaccagcgtaaagacatccctgcggtcttccctgaatgatccactgtgtctcgtccacccctctagcgaaacctgtaactctatccgcctatcactgagccagttgaactctaatcctgagttgcgtcagctccctcccgtcgatgctgagctcgataatgttaataatgttctgcgcactgatctggatggcctggtgcagcaaggataccagagtctaaatgacatcccagatcgagttcagaggcagaccaccacggtggtggctgggatcaagcgcgtgcttaatagtataggcagcgacatcgacaacgtgacccagaggcttcctattcaagatatattgtccgctttttcggtgtacgttaacaataccgaatcctacatacacagaaacctgccaaccctcgaagagtacgactcttattggtggctcggcggactcgtgatctgctccctccttacgctaatcgtgattttctactatctagggcttctttgcggggtgtgtggttacgataggcatgctacccccaccacccgcggatgtgtgagcaacacgggcggagtgttcctgatggttggtgtgggcctgtcattcctgttctgctggatcctcatgataatcgtcgtactcacgtttgtgtttggtgcgaatgtggagaaacttatctgcgaaccctatactagtaaagagctattcagagtgctggacacaccttaccttctgaatgaggattgggagtattatctgtccggaaagctgttcaacaaaagcaaaatgaaattgactttcgaacaggtgtatagcgactgcaaaaaaaaccggggaacctacgggaccctgcatctgcagaattctttcaacataagtgaacacttgaatatcaacgagcatacgggttctattagcagcgagctcgagagcctgaaggtgaatttgaatatcttcttgctcggggctgctggtaggaaaaacttgcaggattttgctgcttgcggtatagatcgcatgaactacgatagctacttggcacagaccggcaaaagtccggctggtgtcaaccttttgagcttcgcttacgacctggaggccaaggctaactctctccctccaggaaacctgaggaactcgctcaagagagacgcccagacgataaagaccatccatcaacagcgggtcttgccaattgagcagagcctgagtactctctatcagtctgtgaaaattctgcaacggactggcaacggcctcctggagcgcgttactcgcattctggcctccttagacttcgcgcagaatttcattaccaacaacacttctagcgtcatcatcgaggaaacaaagaaatacggaaggactatcatcggctattttgaacattacctgcaatggatcgagttctcaatatcagagaaggtcgcttcctgtaaaccagtggccacggctctggataccgccgtggatgtctttctttgcagctatatcattgacccccttaacttgttttggtttggtattggcaaagctaccgtgttcctcctcccagctctgatattcgcagttaagctggcaaagtactatagacggatggatagtgaagacgtctacgacgacgttgagacgattcccatgaaaaatatggaaaatggtaacaatgggtatcacaaggaccacgtatacggcattcataacccggtgatgacaagcccaagtcagcattag

SEQ ID NO: 236327 - DNA, 2571 bp, synthetic construct
  misc_feature 1..2571: note = Description of Artificial Sequence: Synthetic coding sequence
  source 1..2571: mol_type = other DNA
atggccttggtcttgggctctctactgctcctgggactgtgcggaaatagtttctctggtggccaaccctcttccactgacgccccaaaagcatggaactatgagctgcctgctaccaactatgagacacaagattcacacaaggcaggcccaatagggatactgttcgaacttgtacacatattcctgtacgttgtgcaaccacgggactttcccgaggacactctccggaagttcctgcaaaaggcatacgagagtaagatagactatgataagattgtgtactatgaggccggaatcatcctatgttgtgtgcttgggcttctgttcattatcctgatgcccctcgtcggctacttcttttgcatgtgtcgttgctgtaataaatgcggaggagagatgcatcagcggcagaaagaaaacgggcctttcctcagaaagtgttttgccatttccctcctggttatctgcatcattatcagtatcggcatcttttatggcttcgtcgccaaccaccaagtgaggacccgcattaagcgatcccggaaactagcagatagtaactttaaggatttgagaacgctcctaaacgaaacacccgagcagatcaaatacatactcgcccagtataacacaactaaggacaaagctttcaccgacctcaattcgataaactccgtgctcggtgggggaatactcgatagactgaggcctaatattatccccgtgcttgacgagattaaatccatggccactgccatcaaggaaacaaaggaggcactcgaaaacatgaacagcaccctgaaatcattacatcagcagtctacgcagctctcaagctcccttacctctgttaagacctctttgagaagctctctcaatgacccactgtgcttggttcacccgagttccgagacctgtaatagtataagactgagcctctcccaattgaatagcaacccggaactgaggcagctgcctccggtcgatgcagaactcgacaacgttaacaatgtgctaaggaccgatttggacggcctggtacagcaggggtatcaaagcttaaacgatatccccgatagggtgcaacggcagactacaactgttgtggcaggtatcaagagggtgctcaatagtatcggctctgatatcgataacgtgacacaaaggctgcccatacaagacattctgagtgctttttctgtgtatgtgaacaacactgaatcatatatacatcgcaatctgccaacacttgaggagtatgattcatattggtggctgggcggactcgtaatctgttccctcctaaccctgatcgttatattttactatcttgggctactctgcggcgtttgtggatatgatcggcacgctacccccacaactcgcggttgtgtctctaatactgggggagtcttcctcatggtgggggtgggccttagcttcctgttctgttggatcttgatgattatcgttgttttgacctttgtgttcggcgcaaacgtggaaaagctgatctgcgaaccctacacaagtaaggagttatttcgggtactggacactccctacctcctgaacgaggactgggagtactatctgtctggaaagctgttcaacaagtctaagatgaagctgaccttcgagcaggtgtacagcgactgcaaaaagaacaggggcacatatggcactctccatttgcagaactcatttaatataagtgagcacttgaacataaatgaacataccggctccatcagtagcgagctagagagcctcaaggttaacctcaacattttcttgctgggagctgcaggcagaaagaatctgcaggatttcgcagcgtgtggcattgaccgaatgaattacgactcctatttagctcaaaccggaaaatcaccagccggtgtgaatctgctgagttttgcatatgatctggaagctaaagcaaatagtctcccccctggaaacttgcgaaattcgctgaagcgggacgcccagaccatcaagacaatccatcagcagcgtgtgctaccaatagagcagtcgttatctactttgtaccagtcagtcaagattctacagaggaccgggaatggcctgttagaacgggtcacccgcatcctggcaagtcttgacttcgcacagaactttatcacaaataacacaagctcagtgattatagaggaaaccaagaagtacggtcggacaataataggatatttcgagcattacttgcagtggattgagttctcgatctccgagaaggtggcgagttgtaagcctgtcgccacggccctggacactgctgttgacgtattcctgtgtagttacatcatagatccactcaacctcttttggttcggcattggcaaagcaacagtgttcttactgcccgcactgatcttcgccgtcaagctggccaaatattacagaagaatggactcggaggacgtgtatgatgatgtggagacaattcctatgaaaaatatggaaaatggaaacaacggttatcacaaggaccacgtatatggcatccataatcctgtcatgacaagccctagccagcactag

SEQ ID NO: 236328 - DNA, 177 bp, synthetic construct
  misc_feature 1..177: note = Description of Artificial Sequence: Synthetic coding sequence
  source 1..177: mol_type = other DNA
atggcgctggtcctgggttctctgctgctgttgggtctctgcggcaatagctttagcggtggtcagccctcgtctacagatgccccaaaggcgtggaactatgagttacctgctactaactatgagactcaggactctcataaggctggtcccattggcattctatttgaactgtag

SEQ ID NO: 236329 - DNA, 123 bp, synthetic construct
  misc_feature 1..123: note = Description of Artificial Sequence: Synthetic coding sequence
  source 1..123: mol_type = other DNA
atggccctcgtactgggtagcctgttactgctggggctctgcggtaatagtttttcaggcggacaaccatcttctaccgacgcccctaaagcctggaattatgaacttcctgcgacaaactag

SEQ ID NO: 236330 - DNA, 2598 bp, synthetic construct
  misc_feature 1..2598: note = Description of Artificial Sequence: Synthetic coding sequence
  source 1..2598: mol_type = other DNA
atggcccttgtgttgggctctctgttattgctaggattgtgcggtaacagctttagcgggggtcagccttcctcaactgatgcccctaaagcatggaactatgaactgcccgctaccaattacgagacccaggactcccataaagcgggaccgattggaatattattcgaactcgtgcatatttttctgtatgtggttcagccacgtgattttcctgaggacacgcttaggaaatttctgcagaaagcctatgaaagtaagattgactatgacaaaccagagacagtgattctgggtttgaagatcgtttactatgaagctggtattatcctctgttgcgttcttggactcctgtttataatattgatgcctctggtcgggtatttcttctgcatgtgcaggtgctgcaataagtgcgggggagagatgcatcagcgtcagaaggagaatggcccattcctgagaaaatgctttgccatcagtctactggttatatgtattatcatcagtattggaattttctacgggtttgtagccaatcatcaggtgagaactcgcattaaaagaagccggaagttggccgattccaatttcaaagatctgcgcacattattgaacgagactccagaacagatcaagtacattttggcccagtacaataccacgaaagacaaagcattcaccgatctaaactccattaatagtgttctgggagggggaattctggatagacttcgcccaaacattatccctgtgctggacgaaatcaagtcgatggccacagccatcaaggagactaaggaagcccttgaaaacatgaatagcactctgaaatccttgcaccagcagagcactcagctctctagctccctgactagtgtcaaaacttccttgaggtccagcctaaatgacccactctgcttggtacacccttcctccgagacatgtaattccattcgcctctctctgtcccaactcaactctaaccctgaactccgtcagctgcccccagtggatgcagaacttgacaatgtcaacaacgtgctcaggactgacctggatgggctggtgcagcagggctaccagtcactgaatgacatccctgacagagtgcaaaggcagaccactaccgtggttgctggcatcaagagagtgctaaattctataggctctgatatagataacgtgactcagcggctccctattcaagacatcctgagtgcgttctcagtctacgtgaataatacagagagttacatccacagaaacctccccaccctggaagagtacgactcctactggtggttaggcggactggttatatgtagcctgcttacccttattgttatattctattatcttggcctgctgtgcggggtgtgtggctatgatcgccatgctacacccaccacaagaggctgcgtatcaaacactggcggagtgttcctgatggtgggggtgggattaagctttctcttctgttggatcctaatgattattgttgtattgacattcgtatttggagccaacgtagagaagctgatctgcgaaccctacactagtaaagaactattcagagtccttgacacaccttatctccttaatgaggactgggaatattatctcagcggcaaactttttaataagtccaaaatgaaattgactttcgaacaggtttacagcgactgtaaaaaaaacagagggacttacggcaccctccacctgcagaattcattcaacatttccgaacacttaaatatcaacgagcacacgggctccatcagtagcgagctcgaatccctcaaggtgaatctgaatatcttcctgctgggggctgccggtcgcaaaaatttacaggacttcgctgcatgcggtatagacaggatgaactatgattcgtatctggcgcagacgggaaaaagcccagcaggggtgaatttacttagtttcgcctatgacctggaagccaaagccaacagcctgcctcccggaaatctcagaaacagcctgaaaagagatgcacagaccattaagacgattcatcagcagcgggtcctgccaatcgagcaatcattatccactctttaccagagcgtcaagattctgcagaggactggtaacggcctcctggagcgggtcacgaggatcctggcatcccttgactttgcacagaactttatcaccaataatacaagctccgtcatcattgaggaaaccaaaaaatatgggcgaacaatcattggctacttcgaacactacctgcagtggatcgagtttagcatatcagaaaaggtggccagttgcaaaccagtggcaaccgcactggacacagccgtagacgtcttcctgtgctcttacattatcgatcctctgaacctgttttggtttggaatcggcaaggcaaccgtgttcctactgcctgctctgatttttgctgttaagcttgctaaatactatcgccgtatggactcagaagacgtgtacgacgatgtagagaccattccaatgaaaaacatggagaatggcaataacggttatcataaggatcatgtctatgggattcacaaccctgtcatgacgagccccagccagcattag

SEQ ID NO: 236331 - DNA, 45 bp, synthetic construct
  misc_feature 1..45: note = Description of Artificial Sequence: Synthetic coding sequence
  source 1..45: mol_type = other DNA
atggctctggtacttggcagtctgttgttgttgggtctgtgctag

SEQ ID NO: 236332 - DNA, 2505 bp, synthetic construct
  misc_feature 1..2505: note = Description of Artificial Sequence: Synthetic coding sequence
  source 1..2505: mol_type = other DNA
atggccctggtcctcggatcgctcctcctgctgggcctatgtgggaattctttcagtgggggacagcctagctctactgacgctcccaaggcttggaactacgagctgcccgcaaccaactatgaaacacaggattcacacaaggctgggccaatcgggattctatttgagctggtgcatattttcctgtatgtggtgcagccacgggattttcccgaggacacgcttagaaagttcctgcagaaggcctacgaatcgaaaattgactatgataagcctgagaccgtcatcctaggattaaagatcgtgtactatgaggctggaatcatactgtgttgcgtccttggactgctgtttatcattctgatgccccttgtcggttattttttttgcatgtgccgatgctgtaataagtgtggcggagaaatgcatcagcgacagaaggagaacggacctttcttgcgcaagtgctttgccatcagcctgcttgttatttgtattatcatttccatcggaatattctacgggtttgtggccaatcaccaggttcgtacacgaattaagcgtagccgcaaattagctgattccaattttaaggatctgaggacactgctcaacgagacacctgaacagattaaatacatactggctcagtataacaccacgaaggacaaagctttcaccgatcttaatagcatcaattctgtgctaggaggcggtattttggataggctgcgcccaaatattatccccgtccttgacgaaatcaagagtatggccaccgcaattaaagagacaaaggaggcactcgagaacatgaactcaacccttaagtctctccaccagcagtccacacagctctcgagctctcttacatccgttaagacttctctcagatcatccttgaatgacccattatgtctggtgcatcctagctcggagacttgcaattccattaggctctcactgtcccagctcaactccaaccccgagctcagacagctgcccccagtcgatgctgagttggacaacgtgaacaacgtcttgcgcactgatctggatggcctggtccagcagggatatcagtcgctgaatgacattcctgatcgggtgcagaggcagacaactaccgtggtcgccggtatcaagagggtcctcaactcaatcggaagcgatatcgacaatgtgacacaaaggctgcccatccaggacattctgagtgcattctctgtctatgtcaacaacacagaaagctacatacacaggaatctgcccacactggaggagtatgacagttactggtggctcgggggtcttgtgatttgctccttgctcacactgatcgtgatattctattatttgggtctgctttgcggagtatgcggatacgacagacacgccaccccaaccacacggggatgcgtaagcaacaccggaggcgtttttctgatggttggcgtgggactttccttcctcttctgctggattctcatgataatagtggtccttacttttgtattcggagccaatgtcgagaagcttatctgtgagccctatacttcaaaagaactattccgcgtcttggacaccccatatcttctgaatgaagattgggagtattatttgtctggcaaactcttcaacaaatctaagatgaagctgaccttcgagcaggtgtactcagattgcaaaaagaatcggggaacctatggaacactgcatctacagaactcatttaatataagtgagcacctgaacattaatgagcacacaggttccatttcctctgagttagaaagcctcaaggtgaacttgaatatttttctgctgggggctgcgggtcgcaagaaccttcaggacttcgctgcttgcgggattgatagaatgaattacgattcctacttggcccagaccggaaaaagcccagctggcgtgaaccttctgagttttgcctacgaccttgaagcaaaagccaactcacttccccctggtaacctgcgcaatagtctgaaacgggacgcgcagacaatcaagacaattcatcagcaacgcgtgcttcccatcgagcagagcctttctaccctgtatcagtccgtgaagattctgcaaagaacaggcaacggactgcttgaacgcgtcacacggattctcgcgagtctggacttcgcccagaattttattacgaacaacacatcctctgtaataatcgaggaaaccaagaaatatggacggaccataatcggctacttcgagcactatctgcagtggatcgaatttagtatcagcgagaaagtggccagctgcaaacctgtcgccactgccctggacacagcggttgacgtgtttctgtgctcatatatcattgatcctctcaatctgttttggttcggcatcggtaaggccactgtattcttgctgcccgctctgatttttgccgtaaagctcgccaagtattaccgtcgcatggattcagaggatgtctatgatgatcctagtcaacactag

SEQ ID NO: 236333 - DNA, 2529 bp, synthetic construct
  misc_feature 1..2529: note = Description of Artificial Sequence: Synthetic coding sequence
  source 1..2529: mol_type = other DNA
atggccctggtgctcggctccttgctactgctaggactatgtggcaattccttcagcggcggacaaccctcctccacagacgcaccgaaggcctggaattatgagttgcctgcaacaaactacgagacccaggatagtcacaaggcaggacctattggcatattgttcgaactcgtgcacattttcctgtacgtggtccagccacgggatttccctgaagatacactgcgtaagttcctccagaaggcttacgaatcgaagattgattacgacaagccagagacggtaatcttgggcctaaagattgtttactatgaggctggaataattctctgctgtgtgcttggactgctattcatcatcctaatgccactggtcggatactttttctgtatgtgccgatgttgtaacaagtgcggcggagaaatgcatcagcgccagaaggagaatggtccgttcttgcggaaatgttttgccatctcgctcctggtgatatgcattattatctccatcggcatattctatggattcgtcgccaaccatcaggtgcgcactcgaatcaagagatctcgaaaattagcagattccaacttcaaggatctccggacgctcctcaatgaaacgccggagcaaataaaatatattctggcccagtataataccaccaaggacaaggcctttactgatcttaatagcataaatagcgttctaggcggtgggatcctggataggcttagaccgaatattattccggtcctcgacgagattaaaagcatggctactgccatcaaggagaccaaggaagctctggaaaatatgaatagcaccctgaaaagtttgcatcagcagagtacccagctttcatcttctctgacgagtgtcaagacatctttgaggagttcactcaatgaccctctctgtctggtccatcccagctcggagacctgtaactctattagactctcactgtcgcagctgaactcgaacccggaactgcgccagctacctcctgttgatgcagagcttgataacgtgaacaacgtgctgaggactgatttagacggcttggtccagcaaggataccagagtctgaacgacatccctgacagggtgcaaaggcagacgaccacggtcgtggctggcatcaaaagggtcttgaacagtattggcagcgacatcgataatgttacccagaggttacctatacaggatattttatcggccttttcagtgtacgtcaataataccgagagttacatccaccggaacctccctaccttagaggagtacgacagctattggtggttaggaggattggtgatctgctccctgttgacattgattgtgattttttactatttaggcttactatgtggggtttgtggatacgatcggcatgctacacctaccacgcgaggctgtgtcagtaacactggcggtgtcttccttatggttggcgtgggcctctctttcctgttttgttggatcctgatgattatcgttgtcctaaccttcgtgtttggcgcaaacgtggaaaaactgatatgcgagccctatacctccaaggagttattcagagtgctggataccccttacttgctgaatgaagactgggagtattatttgtctggtaagctctttaacaaatcgaagatgaagttgacatttgaacaagtatattctgattgtaagaagaaccggggaacctacggcaccctgcatcttcagaacagctttaacatcagcgagcacctgaacattaacgagcacaccggatcaatctcgagcgagctcgaaagtttaaaagtaaacctgaacattttcctgctgggagctgccggtagaaagaatcttcaggactttgcagcttgtggaatagaccgtatgaactacgattcatacctcgcccagacaggtaaaagtcccgctggagtgaatttgctgagttttgcttacgatctcgaagccaaagcaaactcactccccccaggcaacctgcgtaattcccttaagcgcgatgctcagactataaagactattcaccagcagcgggtgctgcctatagagcagagcctctctaccctttaccagtctgtgaagatattacagaggactggcaacggactgttggaaagagtcactagaatcctagctagtctggacttcgcccagaacttcatcacaaacaacacttcatcggtaattatcgaagaaaccaagaagtacggaagaactattatcgggtacttcgagcactatctccaatggatagagttcagcattagcgaaaaagtcgctagctgcaagcccgtcgcaacagccctcgacactgctgtggacgtttttctttgctcttatataattgatcctcttaatctgttctggttcgggatcggtaaagccactgtcttcttactgccagcactgatctttgcggtcaagctcgccaagtactacaggcgcatggatagcgaggatgtctacgacgatgtcgagactatacctatgaagaatccatcacagcactag

SEQ ID NO: 236334 - DNA, 2493 bp, synthetic construct
  misc_feature 1..2493: note = Description of Artificial Sequence: Synthetic coding sequence
  source 1..2493: mol_type = other DNA
atggccctcgttctaggctccttgctccttttggggctgtgtggcaattcctttagtggcggacagccctcctctaccgatgccccaaaggcatggaattacgagctgccagctactaactacgaaacccaggatagccataaagcgggacccatcggcatactatttgagttggtgcacatcttcctttacgtggtgcagccccgagacttccccgaggacacactacggaagttcctgcaaaaggcctatgagtccaagatcgactatgataaaatagtgtactacgaagcgggtattattctctgttgcgtcctaggtttactgtttatcattctgatgcctctggtgggctacttcttttgcatgtgtaggtgttgtaataaatgtgggggagagatgcaccaaaggcagaaagagaacggcccattcctgcgaaagtgcttcgccatctccctcttggtgatctgcatcattatcagtattggtatcttctacgggtttgtggctaatcatcaggttaggaccagaatcaaacgatcccgcaaacttgccgatagtaacttcaaagatctcaggacactcctcaacgagaccccagagcagatcaaatacattctggctcagtataatacgactaaggacaaggctttcactgatctgaattcgatcaactccgtgctcggtggcggaattctggatcggctcagaccaaatattatccctgtcctggacgagataaaatccatggctactgcaatcaaggagaccaaggaggccctggagaatatgaactccaccctcaagagtctgcaccagcagtctactcagctcagcagcagcctgacttctgtcaaaacaagtttgagaagctctctgaacgatcccttatgtctggtccacccaagttctgagacctgtaattctataaggctcagtttaagtcagctaaactctaaccctgaattgagacaactacctcctgtggacgccgaactggataacgtgaacaacgtcttgcgaacagatctcgacggcctcgttcaacaggggtaccagtcacttaatgacatacctgaccgcgtccaaagacagactaccaccgtcgtcgccggtattaagagggtgctcaactctatcggctccgacatcgataacgttacacagaggttacctattcaggacatcttaagcgccttcagcgtgtacgtgaataataccgagagctatatccaccggaatctgcctaccttagaagagtatgactcatattggtggttgggtggtcttgttatctgctctttgctgactctcatcgtgattttttattatctcgggctgctgtgtggagtttgcggctatgacaggcacgctacaccaactaccagagggtgcgtgagcaacacaggaggagtcttcttgatggttggcgtgggcctgtcgttcctattttgttggatcctgatgatcatagttgtgctcaccttcgtgtttggtgcgaatgttgagaagctaatctgcgaaccttataccagtaaggaactcttccgggtgctggataccccctacctgctgaacgaagactgggagtattacctgagtgggaagctgtttaataagagtaaaatgaagctgacatttgagcaggtttacagtgactgcaagaagaacagaggaacctacggcaccctgcacttgcagaactccttcaacattagcgaacatctgaatataaatgaacacaccgggagtatctcgtcagaactagaatccttgaaggtgaacctgaacatctttctcctgggggctgccggaagaaagaatctgcaagattttgctgcatgcggcatagacagaatgaattatgactcctacctggctcagacaggcaagagcccagcaggggtcaacctcctttcattcgcttacgatctggaggcaaaggcaaactctttaccaccgggaaaccttaggaactcactgaagcgtgacgctcaaaccatcaagaccatccaccagcagcgtgtgctcccaattgagcaaagcttaagcactctttaccaatcagtaaaaattctgcaacgcactggaaacggcctgcttgagcgggtaacgcggatcttggcgtccctggactttgcccagaactttatcacaaataatacatcttctgtaatcatagaagaaaccaaaaagtatggcagaaccataatcgggtacttcgagcactatctgcagtggattgaattcagcatctcggaaaaagttgccagttgtaaacctgtcgccactgctctcgacaccgccgtagatgtatttctatgtagctatataattgaccctttgaacctgttctggttcgggattggcaaggcaacagtcttcctgctccctgctttgatttttgccgtgaagctggctaagtactatcgtcgcatggacagtgaggatgtctacgacgactccagctgggtgacatccgtgcagtgctag

SEQ ID NO: 236335 - DNA, 681 bp, synthetic construct
  misc_feature 1..681: note = Description of Artificial Sequence: Synthetic coding sequence
  source 1..681: mol_type = other DNA
atggaagctgagaggcgccgtcaggccgagaaacccaaaaagggacgggtggggtccaatttgcttcctgagaggcaccctgccaccggaactccaacaacgactgtagactctagtgccccaccctgcaggcgtctgccaggtgccggtgggggtcggtcccgcttcagcccgcaggggggacagcggggacggccacacagtaggaggcgccaccgaactactttctcccccgtgcagctggaacagctggaatccgccttcgggcgtaaccaataccccgacatctgggccagggagtccctcgccagggacactggactgtccgaagccagaatacaagtatggttccaaaatagacgggctaagcagcgtaaacaggagcgttccttattgcagcccttagctcacctgagcccggctgcattcagttcgtttctgcccgaaagcactgcctgcccttatagttacgcggcaccaccaccccctgtgacttgtttcccacacccctattcacacgccctcccatctcaacccagcaccggcggagccttcgccttgtctcaccagtccgaggattggtatccaacactgcatccggctcccgctgggcacctcccatgcccacctcccccaccgatgctgccgctgtctctcgagccaagtaagagttggaattag

SEQ ID NO: 236336 - DNA, 417 bp, synthetic construct
  misc_feature 1..417: note = Description of Artificial Sequence: Synthetic coding sequence
  source 1..417: mol_type = other DNA
aacattagtctctgccctgaaatttgcttccagaaaattgaaagtcaggtgtactttgtgagagttgactccgggatccaacctggtagcgatatatcaatatactatgatcccatgataagcaaattaataacatatggcagcgatcgtaccgaagcgctgaagcgcatggccgacgccctcgacaattacgtcatccgtggagtgacacacaatatagccctcctgcgcgaggtcattatcaacagccgtttcgtcaagggcgacatatcaaccaagttcctgtccgatgtctatccggacgggttcaaaggacacatgctcacaaaatcagaaaaaaatcaattgctggccattgcttccagccttttcgtcgcattccagctgagagcacaacactttcaggaaaattcatag

SEQ ID NO: 236337 - DNA, 363 bp, synthetic construct
  misc_feature 1..363: note = Description of Artificial Sequence: Synthetic coding sequence
  source 1..363: mol_type = other DNA
atgagtatccaattcctcggcaccgtttataaagtcaacattctaacccgcctggcagcagaattaaacaagtttatgctcgagaaggtgacagaagatacttctagtgtgctgcggtctccgatgcccggtgtagttgtggccgtatcagtgaagcctggggatgccgcaacatcatctctttctgtcgaaatttgcctgttctggactttccaggttgcagaaggacaagaaatatgcgttatcgaggctatgaaaatgcagaactcaatgaccgcaggaaaaaccggaactgtcaaaagtgtgcattgtcaagcaggagataccgtcggcgagggagatctgctggtagaactcgagtag

SEQ ID NO: 236338 - DNA, 2046 bp, synthetic construct
  misc_feature 1..2046: note = Description of Artificial Sequence: Synthetic coding sequence
  source 1..2046: mol_type = other DNA
atggccggtttttgggtaggaacagcccctctcgtggccgctggcaggcgtggtcgctggcctccacaacagctgatgttgagcgcagctctacggaccctgaagcatgtgctgtactacagtcgccagtgcctgatggtaagccggaacctggggtcggtgggttatgaccctaatgaaaaaacgtttgataagattcttgtcgccaacaggggcgaaatcgcctgccgcgtcataaggacctgcaaaaagatgggcataaagactgtagccatccacagtgacgtggacgcttcctccgtgcatgtgaagatggccgatgaagccgtgtgcgtcggtcccgctcctacctctaaaagttatctcaatatggatgcaatcatggaagcaattaaaaaaactagggctcaggcagtgcaccctggctatggcttcctgagcgagaacaaagagtttgctagatgcctcgccgctgaggatgtggtgttcatcggcccagacactcacgccatccaggccatgggggacaagatcgaatcgaagcttctggccaagaaagcagaagtgaacaccatcccaggctttgatggggtagtgaaggacgcagaagaagcagtccgaattgctcgggaaatcggatatcctgtgatgatcaaagcttccgcgggaggagggggtaaaggcatgcgcattgcctgggacgacgaggagacgcgggatggatttcgactgtcctctcaggaggcagcgtcttccttcggagatgacaggctccttatcgagaagttcatcgataatcccagacacatagaaatacaggtactgggggataagcatgggaatgccctttggttaaatgagagggaatgcagcattcagaggcggaatcagaaggtggttgaggaggctccatctatcttcctggacgctgaaacccgccgtgccatgggcgaacaggctgttgccctggctcgtgccgtgaaatatagttcagctggtacggtagaattcctggtggactctaaaaagaacttttactttcttgaaatgaacacaaggctgcaggtggagcatcccgtcaccgaatgtataactggtttagacctcgtgcaggaaatgattagagtcgcgaaagggtatccgttgagacacaaacaagcagatattaggataaacggatgggccgtggaatgcagagtctatgctgaagacccctataagagcttcgggcttccaagcattggcagactgtcacagtaccaggaacccttgcatctgcctggggtacgggtagattcagggatccagcctggctctgatatctctatttattatgaccccatgattagcaaactgatcacttatggctcggacagaaccgaagcgttgaaaagaatggcagatgccctcgataactatgtcatccgcggtgttacccacaacatagcactactgcgtgaggtgataattaattctcgcttcgtcaaaggcgacatctcgactaagttcctgtccgatgtctatcctgacggattcaagggacacatgttaaccaaaagcgaaaagaatcaacttctggccatcgcctcctctttgtttgtggccttccagttgcgtgcacagcacttccaggagaattcccgcatgcccgttatcaagcctgatattgctaattgggagttgtccgtcaaactgcatgacaaagttcatacagtggtagcctcaaacaacggtagtgtgttcagtgtagaagtggacgggtcgaagcttaatgtcacatctacttggaatctggctagcccccttctcagcgttagtgtggatgggacgcaacgcacggtgcaatgcctcagccgcgaagcaggcggaaatatgtccatacagttcttaggaactgtggtggctgaggggcaggaaatttgcgttatcgaggccatgaagatgcagaactccatgaccgcagggaagacagggactgtcaaatccgtccattgccaagccggagataccgtaggtgagggcgacctgcttgtggagctggagtag

SEQ ID NO: 236339 - DNA, 2187 bp, synthetic construct
  misc_feature 1..2187: note = Description of Artificial Sequence: Synthetic coding sequence
  source 1..2187: mol_type = other DNA
atggccggtttctgggtaggcactgcccctctcgtggcagcaggtagacggggacgctggccacctcagcagttaatgctctctgctgccctgagaacattaaagcacgtgctatattactccagacagtgcttgatggtgtcacgcaatctgggaagtgtgggctatgatccaaatgagaaaactttcgacaagattctggtggcaaatagaggcgaaatcgcttgtcgggtcatccggacctgtaaaaaaatgggtatcaaaaccgtagccattcattctgacgttgatgcttcctccgtgcacgtgaagatggccgatgaggctgtctgcgtaggccctgcgcctacatctaagagctacctcaatatggacgccattatggaggccataaaaaagacgagagcccaggcagtgcatcctgggtacgggttcctaagtgaaaacaaggagtttgcacggtgtttggccgctgaagacgttgttttcatcggacctgacacgcacgctatccaggccatgggcgacaagattgagagcaagctcctggcaaagaaagcagaagtgaatacaatccctgggttcgacggagtggtgaaggatgctgaggaagctgttaggattgcgagagagataggctacccggttatgattaaggcttctgccggtggtggaggcaaaggaatgcgcatcgcctgggatgacgaagagacgcgggacggcttccggctgtcctctcaggaggcggcatcgagcttcggcgatgacaggctgctgatagaaaagtttattgataacccaagacacattgagattcaggtcctcggtgacaaacatgggaacgcactatggctgaatgaacgagagtgttctatccaaagacgcaaccagaaggtggtggaagaggctccctcgatctttttagacgccgagacacgtcgagccatgggggagcaggccgtggccctggccagagcggtgaagtattcttctgcaggcaccgtggagtttctcgttgactccaagaagaatttctactttctcgagatgaacactagactgcaggtggaacacccagtgactgaatgcataactggtctggatctcgtgcaagaaatgattagggtggcaaagggctacccattacggcataagcaggccgatattaggatcaacgggtgggccgtagaatgccgtgtgtacgccgaggatccttacaagtcatttggactgccctccattgggcgtctgagccagtatcaggagccgcttcacttacctggggtgcgcgtggactccggcatccagcccggtagcgatatctctatttactatgaccctatgatctccaagttaattacatacggatctgaccggactgaggctttgaagcgtatggccgacgctctggacaactacgtaatcaggggagtgacccacaatatagccctcctgcgtgaagtaattattaatagtaggtttgtgaagggtgatatttcaactaaatttctcagtgatgtgtacccagatggttttaaggggcacatgttaacgaagagcgagaagaatcagctgttggccatcgccagtagtctgtttgtggcgttccagctgagagcacagcacttccaggagaactctaggatgcccgtgatcaaacccgacattgcaaactgggaactcagcgtgaagctgcatgacaaagtgcacaccgttgtggcctcaaacaacggttctgtattttctgtcgaggtggatggttccaaattgaacgtgactagtacctggaacctcgccagtcctctcttatcagtcagcgtggatggaactcaaaggaccgtgcagtgtctaagccgcgaagcaggtggaaacatgtctatacaattcctgggaaccgtgtacaaggtgaacatcctcactcgactagccgcagagctgaataagtttatgctcgaaaaggtcacagaagacaccagctccgtgctgcggagtccaatgcctggggtggtggtggctgtgtcagtgaagccgggagacgccgtcgccgagggccaggaaatttgcgtgatcgaggcgatgaagatgcagaattccatgactgctggtaaaaccgggacagtgaagtccgtccattgccaggccggagataccgtgggagaaggcgatctgctggtagagttagagtag

SEQ ID NO: 236340 - DNA, 2109 bp, synthetic construct
  misc_feature 1..2109: note = Description of Artificial Sequence: Synthetic coding sequence
  source 1..2109: mol_type = other DNA
atggctgggttctgggtgggaaccgcgcctctggtcgctgctgggaggaggggtcgttggccgccacagcagttgatgctgtcagcggcactacggactttgaagacattcgataaaatcctggtagccaatcggggagaaatcgcctgcagagttatccgcacttgtaaaaaaatgggcataaaaacagtggcaatccattctgatgttgatgcttcctccgtgcatgtgaaaatggccgacgaagctgtttgcgtgggcccagcccctacctcaaagtcatacctgaacatggacgcaattatggaagccatcaaaaagacaagggcgcaggcagttcaccctgggtatggattcctgagcgaaaataaggaatttgcacgttgcctggctgctgaggacgtggtgttcataggaccagatacccatgccattcaggccatgggcgacaagatcgagtcaaaactcctggcaaaaaaagccgaggtgaatactatccctggattcgatggagttgtgaaggacgccgaggaggcagtaaggatcgccagagaaataggctacccagtaatgatcaaagcctctgctgggggaggcggtaaggggatgagaatcgcatgggatgacgaggagacaagagacggttttcgactgagtagccaggaggcagcatccagctttggagatgaccgactcctgatagagaagttcatcgataaccccagacacattgaaatccaagtgcttggagacaagcatgggaatgcactctggcttaacgaaagagagtgctccatacagcgcagaaatcagaaagtggtagaggaggcacccagtatttttctggacgccgagacccggagagctatgggcgagcaagccgtagcccttgcacgcgcagtgaaatattcatcggcaggcactgtcgagttcctcgtggactcaaagaaaaatttctacttcttggaaatgaacacgcgcctgcaggtagaacatcccgttactgagtgtatcaccgggctggacctcgtgcaggaaatgatccgcgttgccaagggctaccccctccgtcataaacaagctgacatcagaatcaatggctgggccgtggaatgtcgcgtatacgccgaagatccctataagagctttggtttaccatctattggacgactgtctcagtatcaagagccccttcatctccctggcgtaagagtcgattccggcatccaacctggctccgacatcagcatctattacgaccctatgattagcaagttgatcacctacggctcagatcgcaccgaggccctgaagagaatggcagatgcattggacaattatgtgattagaggtgttactcataatatcgctctgttgcgcgaagtaattatcaactcgcgctttgtaaagggggacatctccaccaaattcttgagtgatgtctacccggatgggttcaaaggccacatgcttaccaaatccgaaaagaatcagctgctggcaattgcatcttcactgttcgtcgcttttcagcttcgagcccagcatttccaagagaatagccgtatgcccgtcataaagcctgatattgcgaactgggaactgagcgtcaaactgcacgacaaggttcacaccgtggtggcatctaataatggcagcgtgttttcagtggaagttgacggcagcaagctgaacgtcacgtcaacctggaacctggcgagtccactcttgagtgtctcggtcgatggtacccagcgcactgtgcagtgtctgtcccgcgaagcagggggaaacatgtccattcagttccttggaacggtatataaagtcaatatcttgactcggctcgccgcagaactgaacaaattcatgctggaaaaagtgaccgaggacacaagctccgtgctgagaagcccaatgccgggtgttgtcgtcgctgtttccgtgaagccaggtgatgctgtcgccgaaggccaggagatctgtgtcattgaagcaatgaaaatgcagaacagcatgaccgccggtaaaacaggtactgtcaagtccgttcactgtcaagctggcgacaccgtgggcgaaggagatctgctcgtcgagttggagtag

SEQ ID NO: 236341 - DNA, 255 bp, synthetic construct
  misc_feature 1..255: note = Description of Artificial Sequence: Synthetic coding sequence
  source 1..255: mol_type = other DNA
taaaattgggagctaagcgtgaagctacatgacaaggtgcacacagtcgtagctagtaacaacgggtctgtgttcagcgttgaggtggacggatcgaaactgaatgtgacttcaacttggaaccttgcttccccactcctttctgtgagcgttgacggcacacagagaaccgtgcagtgcctcagccgagaagctggcggaaatatgtccattcaattcctggggacagtcccatggcgaaaattgcttgactag

SEQ ID NO: 236342 - DNA, 336 bp, synthetic construct
  misc_feature 1..336: note = Description of Artificial Sequence: Synthetic coding sequence
  source 1..336: mol_type = other DNA
tacaaagttaacatccttacccgcctcgctgcagaactgaacaaattcatgctagaaaaagttacggaagatacaagttcagtgctgaggtcacccatgcctggggtggtcgtggccgtgtcggtcaagcccggagatgccgcaacatctagcctcagcgtcgaaatttgtctgttctggacattccaagtggctgagggacaggagatctgtgttatcgaggccatgaaaatgcagaactcaatgacggccggtaaaaccggaacggttaagagcgtgcactgtcaggccggtgatacagtgggcgagggcgacctgctcgtcgaattagagtag

SEQ ID NO: 236343 - DNA, 405 bp, synthetic construct
  misc_feature 1..405: note = Description of Artificial Sequence: Synthetic coding sequence
  source 1..405: mol_type = other DNA
tagatgcccgtcattaagcctgatattgccaactgggagctttctgtgaaactgcatgataaggttcacacagttgttgcctccaataacggctccgtgttttctgtggaagttgatggttctaagcttaacgtcacttcaacctggaatttggcatctcccctcctcagcgtctccgtggacggcacacagagaacggtgcagtgtctgtcacgggaggccggagggaatatgtccatccagttcctaggaacagtggtggctgagggacaggagatttgcgtgattgaagctatgaagatgcagaatagtatgacagctgggaaaaccggaaccgtcaaaagcgtgcactgccaagcaggggacacagtgggagaaggcgatctcctggtggagctggaatag

SEQ ID NO: 236344 - DNA, 309 bp, synthetic construct
  misc_feature 1..309: note = Description of Artificial Sequence: Synthetic coding sequence
  source 1..309: mol_type = other DNA
tctgacgtgtaccccgacgggtttaaaggacacatgttaactaagtcagagaagaaccagttattggccatcgctagcagcctgttcgttgcctttcagcttagggctcagcacttccaagagaacagcaggatgcctgtgatcaaacctgatatagccaactgggaactgagtgtgaaactccatgacaaagttcacaccgtggtggctagtaataatggcagtgtcttcagcgttgaggtcgacgggagtaagttgaacgttacctccacatggaatttattcgccttgatcgtgtgtcagcggtag

SEQ ID NO: 236345 - DNA, 1620 bp, synthetic construct
  misc_feature 1..1620: note = Description of Artificial Sequence: Synthetic coding sequence
  source 1..1620: mol_type = other DNA
atggcggctgcactgagggtggcagcagtaggtgcgagactttctgtcctagcctctggtctacgggcagcagtccgctctctgtgttctcaggcaactagcgttaacgagcggatagaaaataagcgcagaacagccctactgggcggaggacagcgcagaatcgatgctcagcacaagagagggaagctcactgcacgggagcgtatctcactactccttgatcctggctctttcgtggagtccgatatgttcgtcgaacaccgctgtgccgactttggcatggccgctgataagaacaaattccctggagacagcgtggtcaccgggagggggcgaatcaacggaagactggtgtacgtcttcagccaagacttcactgtgttcggaggttcactaagcggggctcatgcccaaaaaatatgtaagatcatggatcaggctatcaccgtgggcgcacctgttattggtctcaatgatagtggaggcgctcggattcaggaaggtgtggagagtctggctggatacgccgacatatttctgagaaacgtcactgcgagcggggtaattcctcaaattagtctaatcatggggccatgtgctggcggagcagtttattcccccgctctaacggattttacattcatggtgaaggatacctcctatctgttcattacaggcccagacgtggtgaagagcgttaccaatgaagatgtcacgcaggaagagctggggggtgccaaaacacatacgactatgagcggcgtggcgcacagagctttcgagaatgacgtggatgcactgtgcaacttgcgcgacttctttaattacctgccactgagctctcaggatcctgctcctgtgagagaatgccatgacccatccgatcgcctggttccagagcttgacaccattgtccccctcgaatcgaccaaagcctataatatggtggacattatccactcagtggtcgatgaacgcgaattttttgaaatcatgcccaactatgcaaaaaacatcattgtggggtttgcacgcatgaatggccgtacggtggggattgtaggcaaccagccgaaggtcgcatccggctgcctggacatcaactcatctgtcaaaggggctcgtttcgtgcggttttgcgacgcctttaatatccctctcattactttcgtggacgtacccggtttccttccgggaacggcgcaggaatacggagggatcattcggcacggagcgaagttactttatgcatttgccgaagccaccgtgcccaaagtgacagtgatcacacgcaaagcatatgggggtgcctacgacgttatgtcctcaaaacacctgtgtggcgacacaaactacgcttggccaactgctgagatagcagtcatgggagctaaaggggcagtagagattatctttaagggacatgaaaacgtagaggccgctcaggctgagtatatcgaaaagttcgcaaatccattcccggcagctgttcgtgggttcgttgatgacatcatccagcctagctcgaccagagccagaatttgctgcgacttggatgtgctggctagtaagaaagtacaacggccttggcgaaaacacgcaaacatccctctgtag

SEQ ID NO: 236346 - DNA, 1680 bp, synthetic construct
  misc_feature 1..1680: note = Description of Artificial Sequence: Synthetic coding sequence
  source 1..1680: mol_type = other DNA
atggcggcagccctgagagttgccgcagtcggagccaggttatcagtgttagcatctggcctgcgcgctgcagtgcggtctctttgtagtcaggctacttcggtgaatgaaaggatagaaaataaacgaaggaccgctctgcttggtggaggacagagacgcatcgatgcccagcacaaacgtggaaagctgacagctcgcgagagaataagcctgctcctcgaccctgggagttttgtggagagcgacatgtttgtagagcatcgttgcgcagattttggaatggccgctgacaagaacaagtttccgggagatagcgtcgtaaccggcaggggtcggattaacggcagactcgtgtatgtgttctcccagcagattattgggtgggctcagtggttacccctggtaatatcggcactttgggaggccgaagacttcaccgtttttggcggaagtctgagcggcgctcacgcccagaagatttgcaagattatggatcaagcaataactgtcggggctcccgtgataggtctgaatgatagcggtggcgcacggatccaagaaggagtcgagtcactcgcaggatatgccgacattttcctgagaaacgtgacagcgtccggcgtaataccgcagatctcactcatcatgggcccatgcgccggaggagcagtctatagtcctgcgttaacagacttcaccttcatggtcaaggataccagctacttgtttataacgggaccggacgtagtgaagagcgtgaccaacgaagacgtgactcaggaggagctggggggagcaaaaactcatactacaatgagcggcgtggcgcacagggcctttgaaaacgacgttgatgcactttgcaacctacgggatttctttaactatttacccttgagttctcaggaccccgctcccgtgcgagaatgtcacgatccatctgatcgtttggtgcctgaactggataccatcgtgcccctggagagcaccaaggcatacaatatggtggatattatccactctgtggttgacgagagggaattctttgaaattatgcccaattatgcaaagaacattattgtcgggtttgcacgtatgaatggacgcactgtgggaatcgtcggtaaccaacctaaagtggcctccggctgcttggacattaattccagtgtaaagggcgctcgatttgtacgcttttgcgatgcttttaatatcccgctgatcacatttgtggatgtacctggcttccttccgggaaccgctcaagagtatgggggtattatcagacatggagcaaaactgctgtacgcatttgctgaggccactgtaccaaaggtcaccgttattacgcggaaagcctacggaggagcctacgacgttatgagcagcaaacacctttgtggggatacgaattatgcttggccgaccgcagagatcgctgtgatgggcgctaagggtgccgtcgagatcatttttaaaggccatgagaacgtcgaagccgctcaagcggagtacattgagaagttcgccaatccctttcctgcagccgtgagaggattcgttgacgacatcatccagccgtctagtaccagggcccgtatctgctgcgatctggacgtgctggcaagtaagaaggtacagcgcccatggcgaaaacacgctaatattccactctag

SEQ ID NO: 236347 - DNA, 1653 bp, synthetic construct
  misc_feature 1..1653: note = Description of Artificial Sequence: Synthetic coding sequence
  source 1..1653: mol_type = other DNA
atggctgcggcactgcgcgtcgctgcagtgggcgcacgcctctcagtattagcatccggcttgagggccgctgtgcggtccctctgttcccaagccacatccgttaatgaacgcatcgagaataagcgcaggaccgcactgttgggtggtggccagaggaggattgatgcccaacacaagcggggtaagctaaccgctcgggagaggatcagtcttctcctggatccagggtctttcgtggagtctgacatgtttgtcgagcaccgatgcgctgatttcggtatggccgcagataaaaacaagtttcccggagatagcgtggtgacaggcaggggaagaatcaacggtcgacttgtgtatgtgttttcccaggatttcacagtgtttggaggcagtcttagcggcgcacacgctcagaagatctgcaaaattatggatcaagccatcacagtgggagctcccgtgataggactgaacgattccggaggtgcgagaatacaagagggagtggaatcactcgcaggatatgccgacatctttttacgaaatgtgaccgcatccggcgttattcctcaaatctcattgatcatgggaccctgtgctggaggcgctgtgtattcacctgcccttacagatttcacttttatggtcaaagatacaagctatttgtttattactggaccggatgttgtgaagagtgttaccaatgaagatgtaactcaggaggagttggggggtgctaagacccatactaccatgagcggcgtggcccaccgtgctttcgagaacgacgtggacgctctctgtaacctccgggactttttcaactatctgccactgtcttctcaagacccagctcctgttcgagagtgtcatgacccatccgaccggcttgttcctgagctcgatacaatcgttcccttggagagcacgaaggcctataacatggtggatatcattcacagtgtggtagacgaaagggagttctttgagattatgcctaactatgccaaaaacatcattgtgggatttgctcgaatgaacgggaggactgtgggcatcgtgggcaaccaacccaaagttgcctccggttgccttgatatcaactcatctgttaagggggctaggttcgtccggttttgtgacgcatttaatattcctctgatcactttcgtggatgtcccgggatttttacccggaacggctcaggaatacggcggtataattagacatggggctaaactgctctacgcctttgctgaagccacagtacccaaggtgacagttattacccgcaaagcttatggaggcgcttacgatgtgatgtcatcaaaacacttgtgcggagacaccaattacgcttggcccactgctgagatcgccgtgatgggggcaaagggagccgttgaaataatctttaagggtcacgagaatgtggaagccgctcaggctgaatatatagaaaaattcgccaacccttttccggcagctgtcagaggctttgttgatgacattatccagccgtcctcgacaagagcaaggatctgttgtgacctggatgtgctcgcttccaagaaagtaagggttcaagaggtctttcaccaggtggtgcagagtggacatagggatggcagaggtgcagtgagatggtag

SEQ ID NO: 236348 - DNA, 387 bp, synthetic construct
  misc_feature 1..387: note = Description of Artificial Sequence: Synthetic coding sequence
  source 1..387: mol_type = other DNA
atgtccctaaggttagataccacaccctcctgcaattctgctaggcctctgcacgcattgcaggtgctcttactcctatccctgctgcttacagccctggcttctagtaccaaggggcagacaaaacgcaacctggctaagggaaaggaagagtctctcgattctgacctgtatgcagaactgagatgtatgtgcatcaagacgacaagtggcattcaccccaagaacatccagtctttagaggtgattggtaagggaactcactgcaaccaggtcgaggttatcgccacgctaaaggacgggcgaaagatttgtctggacccggacgcaccacgcatcaagaagattgtgcaaaaaaaattggcaggcgatgaatctgcagactag

SEQ ID NO: 236349 - DNA, 2262 bp, synthetic construct
  misc_feature 1..2262: note = Description of Artificial Sequence: Synthetic coding sequence
  source 1..2262: mol_type = other DNA
atggagaggcgggcttggtcgctccagtgtactgcctttgtgcttttttgcgcctggtgcgctcttaacagcgcgaaagccaagcgccagttcgtgaatgagtgggccgcagaaatccctggcggacccgaggctgctagcgccatcgccgaagaattgggatacgacctgctgggccagataggttccctcgaaaaccactacttgtttaagcacaaaaatcatccgagaaggagccgcaggtctgcttttcacatcactaaacgtttgtcagatgacgatcgggtcatctgggccgaacagcagtatgaaaaggagaggtcgaaacggtcagccttaagagatagcgcgctcaatctgtttaatgaccccatgtggaaccagcagtggtatctccaggacacgcgcatgaccgccgctctgccaaagttggacctacatgtcattcctgtctggcagaaaggtatcaccggcaaaggtgtagtgattacagtactcgacgacggtcttgaatggaaccataccgatatttatgctaactacgatcccgaagcaagctacgactttaacgataacgaccacgatccttttcctcgctatgaccccacaaacgaaaacaaacacggcacgagatgtgctggggagatcgcaatgcaggcaaataaccacaaatgtggggttggagtggcttataatagcaaagtcggaggcatccggatgctggatggcatcgtcactgacgcgatcgaggcgtcatctattgggttcaatcctggccatgttgatatctattcagcatcctggggcccaaacgacgatgggaagaccgtcgaagggccagggagactggcgcagaaggcctttgaatatggagtcaaacagggcagacagggcaaaggcagcatatttgtttgggccagtggcaacggtgggcgacagggcgataattgcgattgcgacggatataccgacagcatatacaccatttccatttcctcggcctctcaacagggcttatccccatggtacgccgagaagtgtagtagcactctggcaacatcttactcaagcggcgactataccgatcagagaatcacatcagccgatcttcataatgactgcacggagacccatacaggtacaagcgcatcagccccactcgcagcgggtatcttcgctctggcactggaagccaatcctaacctgacctggcgcgacatgcagcatctggtggtttggaccagtgaatacgacccactcgctaataatcccggttggaaaaagaacggcgcagggctgatggtgaattcccgcttcggcttcggacttcttaacgccaaggccctggtcgacttggccgaccccagaacttggcggtctgtgccagagaaaaaggaatgtgtggtcaaggataacgacttcgagccacgggcactgaaagcaaatggtgaggttataatcgaaataccgacccgagcatgcgaaggccaggagaacgccattaagtctctcgagcacgttcaattcgaggccactatcgagtactctcggagaggcgatctacacgtcaccctgacttccgccgctggcacctccacagtgcttctagcggagagggagcgagatacctcaccaaatggctttaagaattgggattttatgagcgtgcacacttggggggagaatcccatcgggacttggacactacgaattactgatatgagcgggcgtatccagaatgagggacgaattgtcaactggaaattgatactgcatggcacctcatcccagcctgagcacatgaagcagccaagagtctacacatcctataataccgtgcagaacgacaggcgcggtgtagagaagatggtggaccctggggaggagcagcctacacaggagaatccaaaggagaacaccttggtgtcgaaatctcccagttcctcctctgtgggcggtagaagagacgagctggaggaaggcgcaccatcccaggccatgctgaggttgctgcagagcgccttctctaaaaatagcccacccaaacagtcgcccaagaagtccccttccgccaaactcaacattccttacgaaaatttctacgaagctctggaaaaactcaataaaccaagccagttgaaggacagcgaggactcactatataacgattatgtagacgtgttttacaacacaaagccctacaagcaccgagatgaccgattactgcaggctttggtggatatccttaacgaggaaaactag

SEQ ID NO: 236350 - DNA, 477 bp, synthetic construct
  misc_feature 1..477: note = Description of Artificial Sequence: Synthetic coding sequence
  source 1..477: mol_type = other DNA
atggagcgccgtgcatggagcctccaatgtactgcattcgttctgttctgtgcttggtgtgcgctgaatagtgccaaagcgaagcgccagttcgtcaacgagtgggccgctgaaatccctggaggaccggaagcagcatccgctatcgctgaggaactggggtacgatctcctgggccaaattggatcactggagaaccactacctgtttaagcataagaaccaccccaggcgatcccgacgcagcgcctttcacatcaccaaacgtctgtcagacgatgaccgcgtgatctgggctgagcagcagtatgaaaaagagagatccaaacgttcggccttaagggattccgcactgaacctgtttaacgacccaatgtggaaccagcagtggtatctgcaggacacacgcatgacagcagccctgcccaaattggacctgcatgtgatcccggtttggcagaaaggcattactggatag

SEQ ID NO: 236351 - DNA, 2121 bp, synthetic construct
  misc_feature 1..2121: note = Description of Artificial Sequence: Synthetic coding sequence
  source 1..2121: mol_type = other DNA
atgggtaagggaagcattagctttcttttcttctcccaaattgggtcactggagaaccactacctgttcaaacataagaaccaccctaggagaagtaggcgctcagcatttcatataaccaaacggttaagcgatgacgatcgtgtcatttgggctgaacagcagtatgagaaagagcgcagcaaacgttctgccttgagagatagcgcactgaatttattcaatgaccctatgtggaaccaacagtggtacttgcaggatacacgtatgacagcagccttgccaaaactagacctccatgtgatcccagtttggcaaaagggaattaccggcaaaggtgtggtgatcaccgtccttgacgatggactggaatggaaccatactgatatctacgccaactacgacccagaggccagctatgactttaatgataatgaccacgatccctttcccaggtatgatcccaccaatgaaaacaagcacggtactaggtgcgccggagagattgccatgcaggctaacaaccataaatgcggcgtcggtgtcgcttacaactcaaaagtgggcggtatccggatgctggacggaatcgttacagatgcaattgaagccagctctatcgggttcaaccccggacacgtcgatatctattccgcctcatgggggcctaacgatgacggcaagactgtggagggtccagggaggttggcccagaaggcattcgaatacggggtaaagcagggtaggcagggaaaaggtagcatcttcgtctgggcctctggaaacggaggcaggcaaggcgacaattgtgattgtgacggttataccgacagcatctatacgatctctatatcgagtgcctctcagcaggggctgtctccttggtacgccgagaaatgcagttccacattggctacgtcctactcatccggggactatacggatcagcgcattacatcagctgaccttcacaacgattgtacagagacacatactgggacttcggcctctgcgccacttgctgctggcatctttgctttggctctggaggcgaatcccaatctgacttggagagacatgcagcacttggtcgtgtggacctctgaatacgatcccctcgccaacaatcccggttggaagaagaacggggcaggactgatggtgaactcaaggtttggatttggcctcctaaatgctaaggccctggtagatttggctgacccacgcacctggagatcggtacccgaaaagaaggagtgcgtggtgaaggacaacgactttgaaccccgagccttgaaggcgaacggcgaagttatcattgagatccccacgagggcttgtgaggggcaggaaaatgcaataaagagtctcgagcacgtgcagttcgaagctaccatagaatactctaggcggggagacctgcatgtaacactcacttctgcggctggaacaagcaccgtcctcttggcagagcgggaacgcgatacaagcccaaacggattcaagaactgggactttatgtccgttcatacttggggtgaaaatcccataggtacgtggacactgcggatcaccgacatgtctggccgaatacagaatgaggggcgtattgtcaactggaagctgatcctgcatggtacttcgtcacagccagagcacatgaaacagcctcgggtttacacaagttacaatacagttcaaaatgatagaagaggcgttgagaaaatggtcgatccaggcgaagagcaacctactcaggagaaccccaaggagaatactctggtgagtaaatcaccatcttcttcttctgtgggcggaaggagagacgaactggaggagggagctccctcacaggccatgttgaggctcctccagagcgctttttctaaaaattcgcctcccaagcaaagccctaaaaaatcaccttctgcgaaactgaacataccttacgagaacttctatgaggccctggagaaattgaacaaaccaagtcaactcaaagattcagaagacagtttatataatgactatgtcgatgtgttctacaacaccaagccatacaaacaccgagacgacagactgcttcaggccctggttgacatcctgaatgaggaaaactag

SEQ ID NO: 236352 - DNA, 798 bp, synthetic construct
  misc_feature 1..798: note = Description of Artificial Sequence: Synthetic coding sequence
  source 1..798: mol_type = other DNA
atgccactgcccgtggcactgcaaactcgcttggcgaaacgtgggatcctaaagcatttagaacccgaaccagaggaagagattattgctgaggactatgacgacgaccccgtggactacgaggccacgagactggaaggtctgccaccaagttggtataaggtttttgacccctcttgcggtcttccctactactggaatgcagatactgacctcgtatcctggttaagcccccatgatccaaattcggtggtaactaaatctgccaaaaaactcagatctagtaacgccgacgctgaagagaagctggatagatctcatgacaaatcagatagaggtcacgacaaaagcgaccgtagtcatgagaagctcgatcgagggcacgacaagagcgaccgtgggcacgacaagagtgatagggacagagaaaggggatacgacaaggttgatcgtgaacgggagcgggaccgcgagagagacagagacaggggctacgataaggcggaccgtgaagaagggaaggagcgcagacaccatcggagggaggagttggccccatatccaaaatcgaagaaggctgtcagccgcaaagacgaggagctggacccaatggaccccagctcttactcagacgcgcctaggggaacttggagcactgggcttccgaaacggaatgaggccaagactggcgctgataccacagctgccggacctttgtttcaacagcgaccctatccatcccccggagcggtgctcagagctaatgcagaggccagccgcacaaaacagcaggattag

SEQ ID NO: 236353 - DNA, 1917 bp, synthetic construct
  misc_feature 1..1917: note = Description of Artificial Sequence: Synthetic coding sequence
  source 1..1917: mol_type = other DNA
atgaaagggggatgtgtgtcacagtggaaggctgccgctggttttctgttttgtgttatggtctttgcttcagcagaaaggcccgtatttactaatcatttcctggtggagctgcacaaaggcggtgaggacaaggccagacaggtggccgctgaacacggattcggggtcaggaagttaccgttcgcagaaggcctttatcatttctatcataacgggctggctaaagctaaacggaggcgctctctgcaccataagcagcaactggagagagaccccagggtgaagatggccttacagcaggaagggttcgatcgcaagaagagggggtaccgggacatcaacgagatcgacattaacatgaatgaccctctcttcaccaagcagtggtacttaattaataccggccaggcagacggcacacccggacttgatctgaacgtcgctgaagcctgggagctcgggtacacaggtaaaggagtgacgataggcattatggatgacggaatcgattatctgcatcctgacctggcatcaaactacaatgcagaggcgtcgtatgatttcagcagtaacgatccttacccctatccccgatataccgatgactggtttaactcacatgggacccgctgcgctggcgaggtttccgcggctgcaaacaacaatatctgtggcgtgggggtcgcttacaatagcaaggtggccggtatcaggatgctggaccagccgtttatgacagatataattgaagcctcgtccattagtcacatgccccagttaattgacatttattcggcttcctggggtccaacggataatgggaaaacagtggacggcccacgtgagctcacacttcaggccatggcggacggcgtgaataagggcagagggggaaaaggctccatatacgtgtgggccagtggggacggcggaagttacgatgattgtaattgcgatgggtatgcctcctctatgtggaccataagcattaatagtgctatcaatgatggacgcacggccctctatgacgaaagctgcagctcaaccctggccagcacattttctaatggaagaaagaggaaccctgaagctggggtggcgacaacagatttatacggaaattgcacactgcggcattctggcacctccgccgcagctccagaggccgctggggtctttgctctggctcttgaggccaatcttggccttacctggagggacatgcaacatctgactgttctcacgtctaagaggaaccaactacacgatgaagtacaccaatggagacgcaatggcgtcggtcttgagtttaatcatctcttcggctacggagtactggatgccggagccatggtcaaaatggctaaggattggaaaactgttcccgagagatttcactgcgttggtggcagcgtccaggaccctgagaagatcccaagcacagggaaactggttctgaccctgactacagacgcatgtgagggcaaggaaaatttcgtgagatatctggaacacgtgcaggctgtgatcaccgttaacgccacccggcgaggcgatctcaacataaacatgaccagccctatggggacaaaatcaatcttgctgagccggaggcccagggatgatgatagtaaagtagggttcgacaaatggccttttatgactacacacacttggggcgaggacgcaaggggaacttggaccctggagctcgggtttgttggcagcgctccgcagaaaggtgttcttaaggagtggactttgatgctgcacggtacgcagtcagcgccttatatagaccaggtagtcagagactaccaatccaaactggcaatgtctaagaaagaggaactagaggaagaattagatgaggcagtggagagaagcttgaaatccattctgaataagaactag

SEQ ID NO: 236354 - DNA, 1860 bp, synthetic construct
  misc_feature 1..1860: note = Description of Artificial Sequence: Synthetic coding sequence
  source 1..1860: mol_type = other DNA
atggtttttgcttccgccgagcgtccggtgtttacgaaccattttcttgtggagcttcataaggggggagaggacaaagctaggcaggtggcagccgaacatgggttcggtgtgcgtaaactccccttcgccgaaggtctgtaccatttctatcacaatgggctagctaaggccaaaagaaggaggtcgttgcatcacaaacagcagcttgagagagatcccagggtgaagatggcccttcagcaagaggggttcgatcgcaagaagcgaggttaccgggacatcaacgagattgatattaatatgaatgatcctctgttcacgaagcaatggtacttgataaataccggacaggcagacgggacccccggacttgaccttaacgtggccgaggcctgggaactcggctacaccggaaaaggtgtgacaattggtatcatggacgacgggatcgattatttacatccggacctggcttcaaactataatgccgaggcttcttacgacttcagtagcaatgatccttacccatatccaagatacactgatgactggttcaatagtcatgggaccagatgcgccggagaggtctctgcggctgccaataataacatctgtggggtcggagtggcttataacagcaaagtggcaggcatacggatgctggatcagccattcatgaccgacattatagaggctagcagcatttcccacatgcctcagctaattgatatttactctgctagctgggggcctactgacaatgggaagacagttgacggtcctcgggagctgaccctgcaggccatggctgacggcgtgaacaagggcaggggcggtaagggcagtatatacgtctgggccagtggggacgggggaagttatgacgactgcaactgtgacggctatgcaagcagtatgtggactatcagcatcaattcagcgatcaacgacgggagaactgccttgtatgatgagtcatgcagcagtacgctggctagtacgttcagtaatggcagaaagagaaacccagaggcaggcgtggcaaccactgacctttatgggaactgtacccttaggcatagcgggactagcgcagcagctccagaggcagcaggggtttttgccctggctttggaagctaacctaggcctaacctggcgcgatatgcagcacctgaccgtgttgacgtccaaacgcaatcaactacatgacgaggtccaccagtggagaagaaatggcgtgggtctggaatttaatcacctctttggctacggcgtgcttgacgcgggagcaatggtcaagatggctaaggattggaaaaccgtgccagaaagatttcattgcgtcggtggaagcgtccaagatccagagaaaatcccctcaacgggcaagttggtgttgacactgaccacagacgcatgcgagggaaaggaaaattttgtcagatacttggaacatgtgcaggcagtgattactgtgaatgccacccgcaggggcgatctgaatataaacatgaccagtcctatgggaacaaagtccatcctgctgagtaggaggccgagagatgatgatagcaaagttggctttgacaaatggccatttatgaccacgcatacatggggagaagatgcgagggggacctggactctagaactaggctttgtggggtccgccccacaaaaaggtgtactgaaggagtggaccttgatgcttcacgggactcagagcgctccttacattgaccaagttgtacgcgactaccaaagtaagctcgcaatgtccaagaaggaagaactcgaggaagagttagacgaggctgtcgaaagatctttgaagtcaattctaaataagaattag

SEQ ID NO: 236355 - DNA, 1812 bp, synthetic construct
  misc_feature 1..1812: note = Description of Artificial Sequence: Synthetic coding sequence
  source 1..1812: mol_type = other DNA
atgaaggggggttgcgtgtcacagtggaaagccgcagctgggtttctgttctgtgtaatggtgtttgcttctgccgagagaccggttttcactaaccactttttggtggagttacacaagggaggtgaagacaaagctcgccaggtggccgctgagcacggatttggagtaagaaaagttaaaatggccctgcagcaggagggcttcgaccggaagaagagggggtaccgtgacatcaatgaaattgacatcaacatgaacgacccgctctttacaaaacagtggtatctcatcaacactgggcaggccgatgggactcctgggcttgatctgaatgtggccgaagcttgggaactgggctacactggtaagggagttaccatcggcatcatggatgacggaatagattatctccaccctgatctggcaagtaactacaacgcagaagcgagctatgatttcagctctaatgacccatacccatacccccgatataccgatgactggtttaatagccacggaacacggtgcgccggtgaggttagtgcagctgcaaacaacaatatatgtggcgtgggtgttgcttacaattccaaagtggcaggtataaggatgcttgaccaaccgtttatgactgatattatcgaggcttcaagcatcagtcatatgccccagctgatcgacatttacagcgccagctggggtcccactgacaacggcaagacagttgacgggccacgggagttgacactgcaagctatggcggacggagttaacaaaggcaggggcggaaagggctcaatttatgtctgggcaagcggggacggtggaagctacgatgactgcaattgcgacggatacgcatcttcaatgtggaccatctccattaactccgctattaatgatggcaggaccgcgttgtacgatgagtcttgctcgagcactctagcctccacattctcaaatggcaggaagaggaacccagaagctggggtggcaacaacggacctctacgggaattgtacactccggcattcagggacttccgctgcagcccctgaagcagctggagtgttcgcactggctcttgaagccaatctggggctgacctggcgcgacatgcagcacctcaccgtgctcaccagcaagagaaatcagctgcacgatgaggttcatcaatggaggcgcaatggagtgggactcgaatttaatcacctcttcggatacggcgtattagacgctggtgcgatggtcaagatggctaaagactggaagaccgtgcccgaaagatttcactgtgtcggcggttccgtccaggacccagaaaagatcccttcaactggtaagctggtactcacactgacaacagacgcgtgcgaagggaaagaaaatttcgtgcggtacctcgagcatgtgcaggctgtgattacagtaaacgccacacgccgtggcgacctcaatattaacatgacttccccaatgggcacgaagtcaatacttctgagcagacggcctcgggatgatgattcaaaagtcggctttgataaatggccctttatgaccacccacacttggggagaggatgcgcgtggcacctggaccctcgagctgggctttgtcggctctgcgcctcagaaaggtgtgctgaaggagtggaccctcatgcttcacgggacccagtctgcgccttacatagaccaggtggttcgggattatcagtctaagctcgccatgtcaaagaaggaggagctggaagaagaactggatgaggctgtggagagatcgcttaagtctatactgaacaaaaactag

SEQ ID NO: 236356 - DNA, 2268 bp, synthetic construct
  misc_feature 1..2268: note = Description of Artificial Sequence: Synthetic coding sequence
  source 1..2268: mol_type = other DNA
atgcggcctgccccaattgctctgtggctgaggctggtgcttgctctggctctagtgaggcccagggccgtagggtgggctcctgtcagggcacccatttacgtgagctcttgggctgtgcaagtaagtcagggcaaccgagaagtggagaggctggcccgaaaattcggatttgtcaatctgggcccaatctttccagatggccaatacttccacttacggcacagaggcgtggtccaacagagcctcacaccacactggggccacaggctgcatctgaaaaagaatccgaaggtccagtggtttcagcagcagaccttgcagaggcgagtgaagcgcagcgttgtcgtgcctaccgatccctggttctctaaacaatggtatatgaattctgaagctcagcctgacctctccatactgcaggcttggtcccagggtctatcgggacagggtatcgttgtgtcagttctggacgatgggatagaaaaggaccaccctgatctgtgggctaactatgatcccttggcttcatatgacttcaacgattatgaccccgacccccagccgaggtatacccccagtaaagagaaccgtcatgggacaaggtgcgccggagaggtggcagctatggccaacaacggattctgtggtgtgggcgtcgctttcaatgcaaggattgggggagtgcgcatgctagatggtacaataacagacgtgattgaggcccagagtctgagtctccagccgcagcatattcacatatactccgcgtcatggggccctgaggacgatgggaggactgtggatggtcccggtattctgactagggaggcctttcgtcgcggagtcactaagggacgtgggggactggggacactgtttatttgggctagcgggaatggtggtctccattacgacaactgcaactgcgatggatacaccaactctatacacaccctgtctgtgggcagtaccacccagcaaggtcgagtcccctggtattcggaggcatgtgctagcacactgactacaacatattcaagcggggttgctaccgatccgcagatagtgaccactgacctgcaccatggatgcaccgatcagcacacaggaacatccgccagtgccccactcgcggctgggatgattgctctcgcgctggaagcaaatcctttcctgacgtggagagatatgcagcacctggttgtaagggcgagtaaaccagcccatctgcaagcagaggattggcggacaaatggggttgggcgacaggtaagtcatcattacggttatggtctccttgatgccggattgttggtcgataccgctaggacgtggttaccaacccagccacagcggaagtgcgccgtcagagtgcagagccggcctacaccgatccttcccctgatctatatcagggagaatgtcagtgcctgcgccggtttacacaacagcatacggagtctcgaacacgtccaggcgcagcttaccctttcatacagtagacgcggagatttggagattagcctcacgtcacctatgggaactcggtctacgttggttgcaatccggcctctagacgtgagtacagagggctataataattgggtcttcatgtctacccacttctgggatgagaacccccagggcgtatggacgctcggcctggagaacaaggggtattacttcaacacagggactctgtatcgatacacactcctgctgtacggtacagctgaagacatgacagcacgtcccacaggccctcaggttaccagctccgcctgtgtgcagcgggacacagagggactgtgccaagcttgcgacggccctgcgtatatactgggacagctctgcctagcatattgccctcctagattcttcaaccacacgcgcctcgtgaccgctgggccaggccataccgcggctcctgccctaagagtttgctcaagctgccacgctagttgttacacatgccgcggaggcagccctagggactgtacctcctgtccccctagctcaacccttgatcagcagcaaggaagttgtatgggcccaaccacgcccgatagtcgacccagactgagggccgcagcctgcccacaccatcgatgtccggctagcgccatggtgctgtcgctcctggccgttacactgggaggacctgtcctatgtggcatgtctatggatctcccactgtacgcctggttgtctagggctcgcgcaactcccaccaagccccaagtatggttaccggcaggtacctag

SEQ ID NO: 236357 - DNA, 1137 bp, synthetic construct
  misc_feature 1..1137: note = Description of Artificial Sequence: Synthetic coding sequence
  source 1..1137: mol_type = other DNA
atggctagcagacggacaacaagaacctctggacccacaacaacaccttggcctgcgatgaccagcatgaccactacccggacaccaagccccgcaacacctcccgctaaacgcactggggtgcggatgctggacgggacaattaccgatgtaattgaggctcaatctctctcgctgcaacctcagcacattcatatctactccgcctcgtggggtcctgaggacgacggacgaacggtggacggtccaggaatcctgaccagagaagctttccgccgtggcgtcactaagggacgtggcggactgggtactcttttcatctgggcatcggggaatgggggtctgcattacgataattgtaactgtgatgggtacaccaatagcatccacaccctttctgtcggctcgacgacacagcagggcagagttccttggtactctgaggcctgcgcaagcacccttactaccacctacagctccggggtggcgactgacccccagatcgtaacaactgacctgcaccacggatgcactgatcagcatactggtacatctgcatctgcccctctggcagctgggatgatcgccctggcactggaagcaaatccattcctgacctggcgcgatatgcaacacttggtggtcagagcctcaaagcctgctcacctacaagctgaagattggcgcactaacggcgttggcaggcaggttagtcatcattatgggtacggacttctggacgctggacttctggtcgacaccgccaggacatggttacctacacagccgcagcgaaaatgcgctgtcagagtgcagagcaggcccacgcccattctgcccctgatctacatcagagagaatgtatccgcgtgtgccggactgcataacagtattcgcagtttagaacacgtccaggcacagctgacgctgagctactcccgcaggggggacctggagattagtctgacgtccccgatgggcacacggagcaccctggtggccattcgggatgtcgtcccactgcacgctgcggctttatgggacgggagagggcacgactcagcggcttatcgcccacctggggaccaacagcgagtgtgcgccgcaggacataggggcgcagttccaggagtgtag

SEQ ID NO: 236358 - DNA, 2742 bp, synthetic construct
  misc_feature 1..2742: note = Description of Artificial Sequence: Synthetic coding sequence
  source 1..2742: mol_type = other DNA
atgggctggggcagcaggtgctgttgccctgggagactcgatctgctgtgtgttcttgctctgttgggcggatgccttctgcccgtgtgccgtacccgcgtttatactaaccattgggccgtgaaaattgctggaggctttcccgaagcgaacaggatagcaagtaaatatgggttcattaacattggacagatcggagctctgaaggactactatcatttttaccattcaagaaccatcaagaggtccgttatcagctctcgaggaactcattcttttataagtatggagccgaaggtggagtggatacagcagcaggtggtgaagaaacgcaccaaacgggattacgatttttctagggcccagagcacctattttaatgaccccaaatggccaagtatgtggtacatgcattgtagcgacaacacccacccctgccagagtgacatgaatattgagggcgcttggaaacggggttataccggcaaaaatatcgtcgtcactatactggatgatggtatcgagcgcacgcatcccgacctcatgcagaactacgatgctttggcttcctgcgacgtgaatggaaacgatcttgacccgatgcctaggtacgacgcttcaaacgagaataagcatggcactagatgcgccggagaagttgccgctgccgctaacaacagtcactgcacagttggaattgcttttaacgccaagatcggcggagtccgaatgctcgatggggatgttacagacatggtagaggctaagtcggtgtcctttaacccccagcatgtgcatatttattctgcaagctggggtccagacgacgacgggaagacagtcgacggtccggctccacttacccgccaggccttcgagaatggcgtgaggatgggccgacggggactaggatctgtctttgtttgggcaagcgggaatgggggaagaagcaaggaccattgttcatgcgacggatataccaacagcatatacacgatttctatctcaagtaccgctgagagcggtaagaaaccttggtacctggaagagtgtagcagcaccctggctacaacctatagtagcggggaatcatatgacaaaaagataattactacggacttgcgacagcggtgcactgacaatcatacagggacatcagcctccgccccaatggcagcaggcatcatcgccctagcactcgaggccaacccattcctcacctggcgcgatgtacagcacgtgattgtacggacctcacgcgctggacacttgaacgctaacgattggaagacaaatgctgctgggttcaaggtatcacacctatacggcttcggcctaatggatgccgaagcaatggtaatggaagcagaaaaatggaccactgtgccccgacaacatgtctgcgtggagtcaacagaccgacaaatcaagacaatcaggcctaattccgcagtgaggagtatctacaaagcctccgggtgtagcgacaacccgaacaggcatgtcaactatcttgagcatgtagtggtgcggatcactatcacccatccccgacggggtgacctcgccatctacctaacgtctccgtctggcacgcgcagccagctccttgccaacagacttttcgatcacagcatggaaggcttcaagaattgggaatttatgactatccattgttggggcgagcgtgccgctggcgattgggttctggaagtgtacgacactccaagccaattacgaaatttcaaaacgccgggaaaactaaaggaatggagtctggtgctttacgggacatccgtgcagccctacagccccaccaatgagtttcctaaagtggaacggttccggtactctcgagttgaggatcccaccgatgattacggaactgaggactacgcgggtccttgcgaccccgagtgtagcgaggtcggatgtgatgggccaggtccagatcattgtaatgattgtctacactattattacaagcttaagaataacacaaggatctgcgtttcctcctgcccccctggtcactatcacgcagataagaaaagatgtagaaaatgcgcgcctaattgtgaatcgtgctttggatctcacggcgatcagtgtatgtcatgcaagtacggttatttcctaaatgaggaaaccaattcctgcgtgacacactgcccagacgggagctatcaggacacgaaaaagaatctgtgccggaagtgcagtgagaattgcaagacttgtactgagtttcacaactgtaccgagtgtcgcgacggcttatcacttcaggggtcacgttgctctgtctcctgtgaggacggtcgctatttcaacggtcaggactgtcagccatgccatagattctgcgctacttgtgccggtgccggagccgatggatgcataaattgcacagaaggctattttatggaagacgggaggtgtgttcagagctgttctatttcctattacttcgaccatagctcagagaacgggtataaaagctgtaaaaagtgtgacatctcatgcctgacctgtaacggcccaggttttaagaactgtactagttgcccctctgggtatttgctggatcttggcatgtgccaaatgggagcgatttgcaaggacgcgaccgaagagtcatgggccgagggtgggttctgcatgctggtgaaaaagaataacctatgtcagcgcaaagtactgcagcagctgtgctgtaaaacctgcactttccaggggtag

SEQ ID NO: 236359 - DNA, 4773 bp, synthetic construct
  misc_feature 1..4773: note = Description of Artificial Sequence: Synthetic coding sequence
  source 1..4773: mol_type = other DNA
atgggcagacggggattggggtcggtcttcgtgtgggcttcaggaaacggaggacgctcaaaagatcactgttcctgcgatggctatacgaacagcatttacacaatctctatttcctctactgctgagagtgggaagaaaccctggtacctggaggagtgctcatcaaccttggctacaacttactccagtggagaatcttacgataaaaagattataaccactgacctccgccagagatgtacagacaaccacactggcaccagcgcctccgcccctatggctgctgggattatcgccctggctctggaagcgaatcccttccttacctggcgtgatgttcagcatgtaattgtcagaacctctcgcgctggacatctcaatgctaatgactggaagactaacgccgcagggtttaaggtgtctcatctctacggcttcggcctgatggatgcagaagccatggtgatggaggctgagaagtggaccaccgtgccgagacaacatgtgtgcgtggagtcaacggaccgccagatcaaaacaattcggccaaacagtgctgttagatcaatctataaagcctctgggtgcagtgacaaccctaaccggcacgtgaactacttagaacacgtggtggttcgcatcactattacgcatccacgtcgaggcgacctcgccatctacctcacaagtccttctggaactcgcagccagctgcttgctaatcggctgtttgatcactctatggaagggttcaagaactgggagtttatgacgatacactgttggggtgagagggccgctggggactgggttctcgaggtgtacgacaccccaagtcagctgcgaaatttcaagacaccaggaaaactcaaggagtggagtttggtcttgtatggcacttctgtccaaccctattctccaacgaatgagttccctaaggtggagagattcagatactcccgggttgaggatccaacggacgactatgggactgaagattacgccggtccttgtgatcctgagtgcagcgaggtggggtgtgatggccctggcccagatcattgtaacgattgtttgcactattactacaagctgaagaataatacccggatatgcgtcagttcctgcccacccggacactatcacgctgacaagaaaaggtgccgtaaatgcgctccgaactgtgaaagttgctttggatcccacggagaccagtgcatgtcctgtaagtacggctactttctgaatgaagagaccaatagttgcgttacccattgtcctgatggctcatatcaggataccaaaaagaatctgtgtcgaaagtgctctgagaattgcaaaacatgcacagaatttcacaattgcacagaatgtagggatggtttgtcacttcaggggtcaaggtgcagtgtctcctgtgaggacgggcgatattttaatggacaagattgccagccctgccaccggttctgtgcaacttgtgcaggagccggtgcagatggctgcattaattgtaccgagggatattttatggaagacgggaggtgtgtccagtcctgtagcatctcttactatttcgaccactctagtgaaaacggatacaaatcttgtaagaaatgcgatatcagttgcctgacgtgcaatggacccggtttcaagaactgcactagttgtccttccggctacctgttagacttgggcatgtgccagatgggcgctatttgcaaagacggagagtatgtggatgagcacggtcactgtcagacatgcgaggctagttgcgcaaagtgtcagggtccaactcaggaagattgtacgacctgcccaatgaccagaatctttgatgatggaagatgcgtttccaactgcccttcgtggaagttcgaattcgagaaccagtgtcacccctgtcaccatacctgccaaaggtgtcagggcagtggaccaacacactgtactagttgcggagccgacaattatggcagggagcactttctttatcagggcgagtgtggggactcgtgccccgagggacactacgcgacagaggggaacacctgtttgccctgtccagacaattgcgaactttgccattccgtgcatgtatgtaccaggtgcatgaaggggtattttatcgcacccacgaaccatacctgccagaaactggagtgtgggcaaggtgaggtgcaggatcctgattacgaggagtgcgttccgtgtgaggagggctgcctcgggtgttcactggatgaccctggcacgtgtacatcttgcgctatgggatactatcgttttgaccatcattgttacaagacctgcccagagaagacatatagcgaagaagtggaatgtaaagcttgcgactctaactgtggaagttgcgatcagaatgggtgctattggtgcgaggagggcttcttcttactgggtgggtcctgcgtacgcaagtgcggtcccggattttacggcgatcaggaaatgggagagtgtgaatcctgtcacagggcctgtgaaacttgtactggtcctggtcacgatgaatgttcgagctgtcaggagggattgcaactgttacgtgggatgtgcgtgcacgctaccaaaacgcaggaagaagggaaattttggaacgaggctgtcagtactgctaacctgagcgtcgttaagtccctgctgcaggaacgcaggcggtggaaggtccagattaaaagggatatcttgcgtaagcttcagccgtgtcacagtagttgcaagacctgcaatggctctgcaacactgtgtacctcctgtcctaagggagcttatctgctggctcaagcatgcgtgtctagctgcccccaggggacctggccttccgtgagatctgggagctgcgagaactgtactgaagcgtgcgcaatctgctctggcgcagacttatgcaaaaaatgccaaatgcagccagggcaccccttgttcctccacgagggtcgttgctatagcaagtgcccagaaggctcatacgcggaggacggtatatgtgaaaggtgctctagcccatgccggacctgtgaagggaacgctacgaactgccacagttgtgagggaggacatgtgctgcaccacggcgtgtgtcaggaaaactgtcctgaacggcatgtcgcagtgaaaggagtttgcaaacattgccctgaaatgtgtcaggattgtattcacgaaaagacctgcaaggagtgtacccctgaattcttcctccatgatgatatgtgccaccaatcttgtccacgaggtttttacgccgatagcagacactgcgttccctgccacaaagattgcctggaatgtagcggtccaaaggccgacgactgtgagctgtgcctcgagagtagctgggttttgtatgatggcctctgtctggaagagtgccctgccggtacatattacgagaaggagacaaaagagtgtcgggactgtcataagtcctgcctgacctgcagttcctccggcacctgcactacatgccagaagggcctgatcatgaacccacgtggatcctgcatggccaatgaaaaatgctcccctagtgaatattgggacgaggacgcacccggatgtaaaccttgccacgtgaagtgtttccactgtatggggcctgccgaagaccagtgccaaacctgccctatgaactccctgctgttgaatacaacatgtgtgaaagattgccctgagggttattatgccgatgaggacagtaacagatgcgcacactgccactcttcctgtcggacatgtgagggcagacatagccggcagtgccacagttgtcgtccaggttggttccagctcggcaaggaatgtctgctgcagtgtcgagaaggctattacgccgacaactccaccggacgctgcgagagatgcaatcgttcttgcaagggctgccaagggcctcggcctaccgactgtctctcctgcgatcgcttctttttcctgctaagaagtaagggggagtgtcataggagctgtccggaccattattatgtggagcagagtactcagacctgcgaaagatgccatcccacatgtgaccagtgtaagggcaagggcgcactcaattgccttagctgtgtgtggagctaccacctgatgggcggaatctgcacctctgactgtttggtgggcgagtatagagttggcgagggcgagaaattcaattgtgagaaatgccatgaatcatgcatggagtgcaaagggccaggagcaaagaactgcacactgtgcccagccaatctcgttttgcacatggatgattcccattgcctccactgttgtaatactagtgatcctccaagcgcgcaggagtgctgtgattgccaggacacgaccgacgaatgcattctgagaacaagtaaagtccgcccagccaccgagcacttcaaaacggcactttttatcacatccagcatgatgctggtgctgttgctgggggcagctgtggtggtctggaaaaagtctagaggacgtgtgcaaccagccgctaaagccggatatgagaaactggcggatccaaacaaatcctactccagctacaagagttcctacagagagtcaacttcctttgaggaagaccaagtcatcgagtacagagacagggactacgacgaagacgacgatgacgacatcgtgtacatgggccaggatgggactgtgtacagaaaattcaaatacgggctgctggacgacgatgacatcgacgaactagagtacgacgacgagagttactcttattaccagtag

SEQ ID NO: 236360 - DNA, 2073 bp, synthetic construct
  misc_feature 1..2073: note = Description of Artificial Sequence: Synthetic coding sequence
  source 1..2073: mol_type = other DNA
atgggctgggggtcaaggtgctgttgcccaggaagacttgatttactctgtgtacttgccctgctgggcggttgtctgttgcccgtgtgccgaactagggtgtacacaaaccactgggctgtaaaaatcgctggaggatttcctgaggcaaaccggattgcctcaaagtacgggtttatcaatatcggacaaatcggcgctctcaaggactactaccacttttaccactctagaacaatcaagcgatccgtgataagcagccgcggaactcacagttttataagcatggaaccaaaagttgaatggattcagcagcaggtggtgaaaaagcggacgaagcgggactacgacttctcgagagcgcagagcacctactttaacgaccccaagtggccatctatgtggtatatgcactgcagtgacaatacacatccatgccagagcgacatgaatattgagggtgcttggaagaggggctatacgggcaagaatatcgttgtgaccattctcgacgacgggattgagaggacccatccagatcttatgcagaattacgacgccctggcaagctgcgatgtgaatggcaacgatctggacccgatgcccaggtatgatgcatcaaacgagaacaaacatggtactcgttgcgccggagaggtggctgcagcagcaaacaattcccactgtactgtcggtattgcgttcaatgcaaaaatcggcggtgtgcgaatgctcgacggtgatgtgacagatatggtagaagccaaatctgtcagctttaatccacagcacgtccacatatatagcgcctcgtgggggcctgatgatgatggaaagaccgtggacggacccgctccgcttactcgacaggcatttgagaacggggtgaggatgggaagaagaggtcttgggagtgtcttcgtgtgggcaagcggtaacggaggtcgctctaaggatcactgctcttgtgacgggtataccaattcaatctatactatcagcattagctcaactgccgaaagcggtaaaaaaccttggtatcttgaggaatgttcaagcacactagccactacttattctagtggcgagtcctacgacaagaaaattatcaccactgatctgcgacagagatgcaccgacaaccatacagggacaagtgcaagcgctccaatggccgcaggcatcatcgccctcgcgctggaggccaatccatttctgacctggcgcgacgtgcagcacgtaatcgtcaggacaagccgcgcagggcaccttaatgccaatgattggaaaaccaacgcggctggctttaaggtgtcccatctatatgggttcggtcttatggacgccgaggccatggtgatggaggctgagaaatggacaaccgtgcctcggcaacatgtctgcgtcgagtccaccgatcgtcagataaagactataaggccaaacagcgcggtgcgctccatctataaggcctccgggtgctctgacaatccaaaccgacatgttaactacctcgaacacgttgtggtgcgaatcactattacccaccccagaaggggtgatcttgctatctaccttacaagcccgtccggaacccggagccagcttctggccaaccgccttttcgaccactctatggaggggttcaaaaattgggaattcatgacaatacactgttggggggagcgcgctgcaggcgattgggtcctggaggtgtacgacacaccctcccagctccggaacttcaaaactcccggtaaactaaaggagtggtccctggtgttatacggcacatccgtccagccttactcaccgaccaatgagttccctaaggtggaacgtttcaggtactcccgggtggaagatcctaccgacgactacggcacagaggactacgccggtgagctggccagctcaggcacccaagcgaagaagcgacagctgatgcatcaccctactacttgggagaatcgcatggagtggaacgggatgaagtggaatggcatgaagtggaatggcatggaatggaacggcatggagtggaaccggatcgagtctaatcgcatcgaatag

SEQ ID NO: 236361 - DNA, 2073 bp, synthetic construct
  misc_feature 1..2073: note = Description of Artificial Sequence: Synthetic coding sequence
  source 1..2073: mol_type = other DNA
atgggttggggcagcaggtgctgctgccccggaaggctagatctgctatgcgtcctggctctgctcggaggctgcctccttcctgtgtgccggacacgcgtgtataccaaccactgggcagtgaagatcgcagggggtttccccgaggcaaatcgtattgcatctaagtatgggtttattaatatcggccagattggcgcactgaaggactattaccacttctaccactccagaaccatcaagaggtcagtgatctcgagccggggaactcattcgttcatcagcatggaacccaaggtggagtggattcaacagcaagtggttaagaagcgtacaaagagggattatgacttctcaagggctcaaagcacatacttcaacgatcccaaatggccatcgatgtggtacatgcactgttccgacaacacacacccatgccaaagcgacatgaatatcgaaggggcttggaagcgcggatatacaggcaaaaacatagtcgtaactatacttgatgatgggatcgagcggacacacccagacctgatgcaaaattatgacgccttagctagctgtgatgtgaacgggaatgatctggacccaatgccacgctatgacgcgagcaatgaaaataagcatggcacaagatgcgccggagaggtggctgcggctgctaacaattcacattgtaccgtgggcattgccttcaatgcaaaaatcggcggagtgcgcatgttagacggggacgtcacagacatggtggaggctaagtcggtgtcctttaatccacagcatgtccacatctatagtgcatcttgggggcctgatgatgacggaaaaaccgtggacggccctgcacctttgacaaggcaagctttcgaaaacggagtgcgcatgggcagacgagggctgggcagcgtattcgtctgggcttctgggaacgggggaagaagcaaggatcattgttcctgcgatggctacacaaactctatttacacgatatccatttcgtcaacagcagagtccggtaagaagccttggtacctggaggagtgctccagtactctggctaccacctattcatctggcgagtcctatgataaaaagataattacaacagatcttaggcaacgttgtaccgacaatcacaccggtacttcggcttcagctcctatggccgctggcattatagccctcgccctggaagccaatcctttcctcacctggagggacgtccagcacgtcatcgttaggactagccgtgccggacacctgaatgccaacgactggaagacaaatgccgctgggtttaaagtttcgcacctctatggcttcggcttaatggatgctgaagccatggtaatggaggccgagaagtggacaacggtgccacggcaacatgtgtgtgtcgagtcaacggaccggcagataaagacgatccgtcccaatagtgctgtgaggtccatttacaaggcctctggttgtagcgacaatcccaatagacatgtcaactatctcgaacatgttgtagtcaggatcaccatcactcacccacgcaggggggaccttgcgatctatctgacttcacctagtggcactcgatcccaattgctagctaaccgtctcttcgaccatagcatggaaggctttaaaaactgggaatttatgactattcactgctggggtgaaagggctgccggagattgggtactggaggtctacgatactccctctcagctgaggaatttcaagacgcctggtaaactgaaagagtggtctttggttctgtacggcacaagcgtccaaccttattcgcccactaatgagttccccaaggtcgaacgatttcgatattccagggtcgaggatcccaccgatgattatggtaccgaggattacgccggagaactggccagctccggcacccaggctaaaaagaggcaactcatgcaccatccgaccacgtgggagaaccggatggagtggaatggaatgaagtggaatggcatggagtggaatgggatggaatggaatggaatggaatccaacagaatcgaatctaatcggattgaatag

SEQ ID NO: 236362 - DNA, 4683 bp, synthetic construct
  misc_feature 1..4683: note = Description of Artificial Sequence: Synthetic coding sequence
  source 1..4683: mol_type = other DNA
aacagcatttacaccatcagcatcagttcaactgcagagtcaggtaagaaaccatggtacctggaagagtgctccagtacgctcgcaacgacatactcctcgggggagtcctatgacaaaaagatcattactactgacctgcgacagcgctgtaccgataatcacacaggaacaagcgccagcgcccctatggcagcagggattatcgccctcgccctagaggcaaatcctttcctcacatggcgggatgttcagcacgtgatcgtgcggacgagccgtgctggccatcttaatgcaaatgattggaaaacaaatgccgctggcttcaaggtcagccatttgtatggcttcggccttatggatgcagaggccatggtcatggaggcagaaaaatggaccactgtccctcgtcaacacgtgtgtgtagagtccaccgaccggcagattaagactatccgacccaactctgccgtgcggagcatctacaaagccagcggatgtagtgataatcctaatagacacgtcaactacctcgaacatgtggtcgtccgaataactattacacatcctcgcagaggggatctcgctatctatctgactagtccatctggaacacggagtcagctgttagccaacagactcttcgatcactccatggaaggattcaaaaattgggaatttatgaccattcattgttggggggagagggctgccggagactgggtcctggaggtgtacgacacaccctcacaactacggaacttcaaaaccccaggaaagctcaaagagtggtccttagtcctttacggcactagtgtccagccatatagccccacgaacgagttccccaaagtagagcgctttagatacagtcgagtagaagaccctacagacgattacggcaccgaagattacgccggtccttgtgaccccgaatgctctgaggtaggttgcgacggccctggacctgaccattgcaatgactgtctgcactattactataagctaaagaacaataccaggatctgcgtgtcctcatgcccccctggtcattaccacgcagacaagaagcgttgcagaaaatgtgctcccaactgcgagagctgtttcggctcgcatggcgatcagtgcatgtcttgtaagtacggttatttcctgaatgaagaaaccaattcgtgcgtcacgcattgcccagacgggagttaccaggacactaagaagaacctgtgccgtaagtgtagcgagaactgtaaaacttgtactgaatttcacaattgcactgagtgccgcgacgggctcagcctgcagggttcaaggtgctccgtctcctgtgaggacggtcgctatttcaatggccaggactgccagccctgccaccgattttgcgcaacatgtgcaggggcaggagctgacgggtgcatcaattgcactgaagggtattttatggaggacggcagatgcgttcagtcatgttcgatttcctattattttgaccattcaagtgaaaacggatacaaatcatgtaaaaagtgtgatatctcctgtctgacctgcaatggacctggctttaagaattgtacctcttgcccgtctggctaccttctggacctaggcatgtgccagatgggggctatctgcaaagacggtgaatacgttgatgagcatggccattgccagacatgcgaagcctcatgtgccaagtgccagggacccactcaggaagattgcacaacttgtcctatgacacggatcttcgatgacggaagatgtgtgtcgaattgcccaagctggaagttcgagtttgaaaatcagtgtcacccatgccatcacacctgtcagcggtgccagggttccggcccaacccattgtaccagctgcggcgcagataactacggccgagagcacttcctgtatcaaggcgagtgtggcgactcgtgccccgagggccattatgccaccgaggggaacacgtgtcttccctgcccagacaactgtgagttgtgtcactctgtacatgtctgtacccggtgtatgaaggggtacttcattgctccgacgaaccacacatgtcagaaactcgaatgtggtcagggggaggtacaggatcccgactatgaggagtgcgtcccatgcgaggagggatgcttaggatgtagtctggatgatcccggaacgtgcacaagttgcgctatgggttattacaggttcgaccatcattgctacaaaacatgtccggagaagacctattccgaggaggtcgagtgcaaagcatgtgattcaaactgcggctcttgcgaccagaacgggtgctactggtgcgaagaggggttctttctactgggtggaagctgtgtccgcaaatgcggacccggattttatggcgaccaggaaatgggagagtgcgaaagctgtcatcgggcatgcgagacctgcacaggccctggtcatgatgaatgctcctcttgtcaagaaggcctgcagttgcttcggggtatgtgtgttcatgcaaccaaaacccaagaggaaggaaagttctggaacgaggccgtcagcacagcaaacctgtcagttgtcaagtcccttctgcaggagcggcgtcgctggaaggtgcaaattaagcgtgatatcctgcgcaaattgcagccgtgccactctagctgtaagacttgcaatgggtccgctacactctgcacaagttgccccaagggcgcttatcttctagcccaggcatgtgtgtcatcttgccctcagggaacttggccaagcgtgcgctcaggatcctgcgagaattgtaccgaagcttgcgcgatctgtagcggggctgatctctgtaagaaatgtcagatgcagcccggacatcctctgtttctgcatgagggcaggtgttatagcaaatgtccggaaggctcatacgcagaagacggcatttgtgagaggtgttcctctccttgccgcacatgtgagggtaatgccaccaactgtcactcttgcgaaggtggtcacgtgttacaccatggggtttgtcaagagaattgtccggaacgccatgtcgccgttaagggagtgtgcaagcattgtcctgagatgtgccaggactgcatccacgagaagacgtgtaaagagtgtacacccgagtttttcctccacgacgacatgtgccaccaaagctgccccagaggattttatgccgactctaggcattgtgtgccatgtcacaaagactgtctggagtgttccggaccgaaagcggatgactgcgagctctgcttggaatctagctgggttctgtatgatggattatgcctcgaggagtgcccagctggcacttattacgaaaaggaaaccaaagagtgcagggactgtcacaagtcctgcctgacatgtagcagctctggtacctgcacaacgtgccaaaagggcctcatcatgaacccccgtggctcatgcatggctaatgaaaagtgctctccatctgagtactgggacgaggacgcacctggctgcaagccttgtcacgtgaagtgtttccattgcatgggcccagctgaagaccagtgccagacttgcccaatgaattccttattgctgaacaccacttgcgttaaggactgcccagaggggtattatgccgacgaagattccaacaggtgtgcacattgccatagctcatgcagaacctgcgagggcagacacagcaggcagtgtcactcttgtcgcccaggatggtttcagctaggaaaagaatgcctgcttcagtgtcgagaaggttactatgcagacaattctacgggccgttgcgaacgctgcaaccgcagctgtaaaggttgccaagggccacgccctactgattgcctctcatgtgataggttcttcttcctgctgcggtcaaaaggcgagtgccataggtcttgccccgaccattactatgtcgaacagagcactcagacgtgtgaaaggtgccaccctacatgtgatcagtgcaaagggaagggggctttgaactgtttgagctgcgtgtggagctaccacttgatgggaggaatttgcactagtgattgcctggtaggggagtaccgggtgggcgagggcgaaaaatttaactgtgagaagtgtcacgagtcctgcatggagtgtaagggcccaggggcaaagaactgtacactgtgtcccgctaacttagttctgcacatggatgattcacattgtctgcattgctgtaatacttccgacccgccttcagcccaggagtgctgcgattgtcaagataccactgatgaatgtatactgaggacttcgaaggtgagacccgctactgaacactttaagaccgcactcttcataacttcatctatgatgttggtgcttcttctcggagcagcggtcgtcgtatggaagaaatctagaggtcgcgtacagcccgcagccaaagcaggttacgagaaactggctgacccaaataaatcgtatagcagctacaaatcctcatacagggagtcaacatcttttgaggaagatcaagtaatcgagtatcgcgacagagactacgacgaggacgatgatgatgacatcgtatacatgggacaagatggcacagtttatcgcaagtttaaatacggcctgctggacgacgatgatatcgacgagcttgagtatgatgatgagagctactcctactatcagtag

SEQ ID NO: 236363 - DNA, 306 bp, synthetic construct
  misc_feature 1..306: note = Description of Artificial Sequence: Synthetic coding sequence
  source 1..306: mol_type = other DNA
tgccagccgtgtcaccgattctgcgccacttgcgcaggtgcaggcgcagacgggtgcattaattgtaccgaaggctacttcatggaagacggtaggtgtgtccagtcttgcagtatttcctactacttcgatcatagcagcgaaaacgggtacaaaagttgtaagaaatgtgacatcagttgcttaacctgcaatggacctggcttcaaaaattgtacttcctgtccgtctgggtacctgctagaccttggaatgtgccagatgggtgctatttgcaaggacgtctcactattcaggggagcttag

SEQ ID NO: 236364 - DNA, 5582 bp, synthetic construct
  misc_feature 1..5582: note = Description of Artificial Sequence: Synthetic coding sequence
  source 1..5582: mol_type = other DNA
atgggatggggcagtcggtgctgctgtccaggcagactcgatctgctgtgcgtactcgcgctcctcggaggttgcctgcttcctgtgtgcagaactagagtgtataccaatcattgggccgttaagatcgccggagggttcccagaggcgaataggattgcatcaaagtatggcttcattaacatcgggcagatcggagcactgaaggattactaccacttttaccacagcagaaccattaagcgatctgtgatctcatcaaggggcacccactcctttataagcatggaacctaaagtcgaatggattcagcagcaggttgtgaagaaacggaccaagagagactacgatttctcacgcgctcaaagcacgtattttaatgatccgaagtggccctccatgtggtacatgcactgctccgataatacccacccatgccagagcgacatgaatatcgagggcgcatggaaacgaggatataccggtaagaatatcgtcgtaactatcctggatgacggaatcgagcgaacacatccagacctgatgcaaaactatgatgctctagcaagttgcgacgttaacggcaacgatctcgatcccatgcctcgctacgatgccagtaacgagaacaagcatggaaccaggtgcgccggagaagtggctgcagccgcaaacaatagccactgcacagtgggaatagcctttaacgccaagatcggcggtgtgagaatgctcgacggggacgttaccgacatggttgaagccaaaagcgtctcttttaacccccagcacgtgcatatctactcggcctcctggggtcccgacgatgacgggaagacggtcgacgggccagccccactcacaagacaggcttttgaaaacggcgtacgtatggggaggagaggtctcggttcagtcttcgtctgggcctctggcaatggcggaagatctaaagaccactgcagttgcgatggttacacgaattcgatttacactatctccatctcgagtactgccgaatcagggaagaagccctggtatctggaggaatgcagtagcacactggctaccacttactccagtggagaatcgtacgacaaaaaaatcatcactaccgatctgagacagagatgcacggacaatcacacgggaactagcgccagtgcaccgatggccgcaggaattatcgcactcgccctcgaggcgaaccctttcctgacgtggagggatgtgcagcacgtgatcgtgagaacatcacgcgctgggcacctgaatgcaaacgactggaaaacaaatgcggctggctttaaagtgtcccacctgtatgggtttggcctgatggatgcagaggctatggtcatggaggccgaaaagtggactaccgtccctagacaacatgtatgcgtggagtcaacagacagacagataaaaactatcagacctaattccgctgtgcggagcatctataaggccagcgggtgtagtgataacccaaacagacacgtcaattatctcgaacacgtcgtggtcagaatcaccatcactcatccacggcgaggagatctggcaatctatttaactagtccttcaggtactcggagccaactactcgcaaacagactttttgatcattctatggaaggctttaaaaattgggaattcatgactatacactgctggggtgagcgagccgctggagactgggtgctggaggtatacgatacccctagtcaactgcgcaactttaaaacacccggtaagttgaaagaatggagtcttgtgctgtacggtacgtctgtacaaccatactcacccaccaatgagttccccaaagttgaaaggttcaggtattcacgggttgaggaccctacagatgactatggaacagaagattacgccggtccgtgtgaccccgagtgttctgaagtgggatgtgacggcccagggcctgaccactgtaatgactgcctacactactattataagctgaagaataatacaaggatctgtgtgtccagctgcccaccaggacattaccatgcagacaaaaagcggtgcaggaagtgcgcccctaactgtgagagctgtttcgggtctcatggggaccagtgtatgtcttgcaagtatggatactttctgaatgaagaaaccaacagttgtgtaacacattgtcccgacggaagctaccaggataccaaaaagaatctctgtagaaagtgttcagagaactgcaagacctgtaccgagtttcacaattgcacagaatgcagggacggtttgtcccttcagggaagtaggtgctccgtgtcttgtgaagacggccgttactttaatggccaggattgtcagccctgccatcggttctgcgctacttgcgccggagcaggtgccgatgggtgtatcaattgcactgagggctacttcatggaggatggcagatgtgttcagtcttgcagcatatcttactattttgaccacagcagcgagaacggatataaatcgtgtaagaagtgcgatatttcctgcctgacgtgcaatggacccggattcaaaaattgtaccagttgcccgtcgggttatctgctggatcttggtatgtgccaaatgggggcaatctgtaaagatggagagtacgtggatgagcacggtcactgccagacttgtgaggcctcctgcgcaaagtgtcaaggccctactcaagaggactgtacgacatgtccgatgacccgaattttcgacgacggacgatgtgtttctaattgccctagctggaagttcgaattcgaaaaccagtgtcacccttgtcaccacacctgtcagcgctgccagggatctgggcctactcattgcacttcatgcggcgcagacaattatggtcgagaacatttcctgtatcagggcgagtgcggggattcatgcccagaaggccactatgccacagaaggcaacacctgcttgccttgccctgacaattgtgaattgtgccatagcgtgcacgtgtgcactcggtgcatgaagggctatttcatcgcccctacgaaccacacctgtcagaaattggagtgcggacagggcgaggtccaagatcctgactacgaggaatgcgtgccttgtgaagaggggtgtttagggtgtagtttggacgatccaggtacttgtacaagctgtgctatgggctactacagatttgaccaccattgctacaaaacctgtccggaaaaaacatacagtgaagaggttgaatgtaaagcctgcgactcaaattgtggctcatgtgatcagaatggctgctattggtgtgaggaaggcttttttcttctcggcggtagctgtgttcgcaaatgcggtccgggattctatggggatcaggagatgggcgagtgcgagtcctgccacagagcctgcgagacgtgcactggaccgggacacgatgagtgttctagctgccaggaggggctccagttattgaggggtatgtgcgtgcacgcaacgaagacgcaggaggaaggcaaattttggaatgatatcctgagaaagctgcaaccatgccacagttcttgtaagacgtgtaacgggtccgctacgctgtgcacaagctgcccgaaaggagcgtatctgctggcccaggcatgtgtttcctcctgtccacaagggacctggcccagtgtccgctcaggctcctgcgaaaactgtacagaggcttgcgcaatttgttccggtgccgacctgtgcaagaagtgccagatgcaacctgggcatcctctgtttctgcatgaaggaagatgttattcgaaatgcccagaaggctcctacgctgaggacgggatatgtgagaggtgttcctcaccctgccgcacttgcgagggtaatgccaccaactgtcatagctgtgagggtgggcatgtactacaccatggtgtgtgccaagagaactgccctgagcgacacgtcgcggtcaaaggtgtctgtaaacactgtcctgaaatgtgccaggactgcatccacgagaagacttgcaaagaatgtacacccgaattctttctgcatgacgacatgtgccatcaaagttgtccgagggggttttacgccgattccaggcactgtgtgccttgccataaggactgcctggagtgcagtggacctaaagccgatgattgtgagttgtgtcttgaatccagctgggtgctgtacgatggactgtgcctggaggagtgcccagcaggaacctactatgaaaaagaaactaaggagtgccgggactgtcataagtcatgcctgacctgcagcagcagtgggacatgcaccacctgtcaaaaaggcctgatcatgaacccgaggggtagctgcatggctaatgaaaagtgttccccctctgagtattgggatgaagacgccccaggctgtaagccttgccacgtcaaatgtttccactgcatgggcccagccgaggatcagtgtcagacttgtcccatgaactccctgctgctgaatacaacctgcgtgaaggattgcccagagggatactacgccgacgaagactctaatcgatgtgcccactgtcattctagctgcagaacatgtgagggcagacattcccggcagtgccatagctgtaggccgggttggttccaattggggaaggagtgtctcctgcagtgccgagagggttactatgccgacaactctacaggacggtgcgagcgctgcaaccgaagttgtaaaggctgccagggaccacgtcccacggattgtcttagctgcgaccgcttttttttcttactccggagcaagggagaatgtcacaggtcctgccccgatcattattatgtcgagcagagcacccagacctgcgagaggtgccatccaacatgtgaccagtgtaagggaaagggagctcttaattgtctgtcatgcgtgtggagctatcacctgatgggaggaatttgtaccagtgactgtctggtaggcgaataccgtgtgggcgagggcgagaagtttaattgtgaaaaatgccatgagagctgtatggagtgcaaaggccctggggcaaaaaattgcacactctgccctgcaaatttggtgcttcacatggatgattctcactgtctgcattgctgcaacactagtgatccccctagtgctcaagaatgctgtgattgtcaggacaccactgatgaatgtatcctgaggacgtccaaggtccgacctgccactgagcacttcaaaacagcactgttcatcacttccagcatgatgctggtcctcctcctgggggctgctgtggtggtgtggaagaaatccaggggaagggtccaacccgctgctaaggccggttacgaaaaactggcagatcccaataaatcttactccagctacaaatccagctatagagagtccacctcttttgaggaagaccaggtgatagagtatagagaccgggattacgatgaagatgatgacgatgacatcgtttacatggggcaagacggaaccgtgtacagaaagttcaaatatggcctcctagacgacgatgatatagacgaactggagtacgatgacgagtcatattcctactatcagta

SEQ ID NO: 236365 - DNA, 1497 bp, synthetic construct
  misc_feature 1..1497: note = Description of Artificial Sequence: Synthetic coding sequence
  source 1..1497: mol_type = other DNA
atctggaatgtacaccactgtggcgataaaaacagtaggtgccggagcgagatgaacgtacaggcagcctggaagaggggttacactggaaaaaatgttgtagtcacgatccttgacgacggaatcgagcggaaccaccccgacctagcccctaactacgactcctatgccagctacgatgttaatggcaatgactatgatccctcacccagatatgacgcatccaatgaaaacaagcacggaacccgatgcgccggtgaagtcgcagcttccgccaacaattcctactgcatcgtcggaatcgcttacaatgctaagataggagggattcggatgctggacggtgacgtaaccgatgtcgtggaagctaaatctctgggcatacgccctaactacattgatatctatagcgcgtcctggggacccgacgatgatggaaagaccgtcgacggacctggcagactggccaagcaggccttcgaatacggtattaaaaaaggcaggcaaggcctgggatctatatttgtgtgggcttctgggaacgggggacgcgagggagactactgtagttgtgatggctacaccaactctatctacaccatatccgtctccagcgccaccgagaatggctacaaaccctggtacctggaggaatgcgcgtctaccctggctacgacttattcttctggcgcattttacgagcgaaaaatcgtgaccaccgacctacgacagagatgtaccgatggccatacaggcacttctgtgagcgctcccatggtcgctggaatcatcgccctggccctggaggcaaactcgcaattaacctggcgtgatgttcagcacctgctagttaagacatcccggccagcccacctgaaggcctctgactggaaagtcaacggggctggccataaggtttcccacttttacgggttcggccttgtagacgcagaggctctcgtggtcgaggcaaaaaagtggacagcggtcccttcgcaacacatgtgcgtggccgcatccgataagcgcccacggtccatacctttggtccaggtgttgcggacaaccgcgcttacatctgcctgtgccgagcactccgaccagagagttgtgtacctggagcatgtggttgttcgaacctccatctcacacccccgacgtggcgatctgcagatctacttagtgtcgccaagcgggacaaaatcacagctactcgccaagcgactcttggacttgagcaacgaaggatttactaattgggaattcatgactgtgcactgttggggtgaaaaagcagagggtcagtggactctggagatccaggacctgcctagccaggtgaggaacccagagaagcagggggacctggagacaccagtggccaatcaactgactacagaggagagattcgtgtcaacgctgtcaatactattccactggtccgtgtacttgtcgtggtcacagtatcatatcgtgctcatcactgtcgctctttag

SEQ ID NO: 236366 - DNA, 1956 bp, synthetic construct
  misc_feature 1..1956: note = Description of Artificial Sequence: Synthetic coding sequence
  source 1..1956: mol_type = other DNA
atgccgcctagggctcccccagcaccgggacctcggccaccacccagagccgcagctgccacagatacggctgcaggcgctggtggcgcaggcggagcaggcggagctggaggaccgggattccgacctttggctcccaggccctggcgctggctgctgttgctcgcgttacccgcagcctgcagcccccctcctcggccagtgtataccaatcactgggctgtgcaagtgctcggcggtcctgcagaggccgatagagtcgctgccgctcatggatatctgaacctcggccagatcggcaacttggaggactattatcatttctatcattcaaaaacctttaaaaggagcacgctctcaagccgcggaccccatacgttccttcgaatggatcctcaggtcaaatggttgcagcaacaggaggtcaagcgcagggtcaaacgccaggtaagatcggatccgcaggccttatactttaatgacccaatatggtcaaacatgtggtatctgcattgcggcgacaagaacagtaggtgccggtccgagatgaacgttcaggcggcttggaaaagagggtatacgggcaagaacgtcgttgtcactatcctggacgacggcattgagcgcaaccatcctgacctcgcccctaattatgactcctatgcatcatatgatgtgaacggaaacgattatgatccgagccctagatatgacgcttcaaacgagaataaacacggaactcgatgcgccggtgaggtggctgcttctgccaataatagttattgtatcgtaggcatcgcctataatgcaaagatcggtggtatccgaatgctggacggagatgtgaccgatgttgtggaggccaaaagcctcgggattcggccaaactatatcgatatatatagcgcatcgtggggacccgatgacgacgggaagacagtggacggacccggaaggctagcaaaacaggccttcgagtatggaatcaagaagggtcgtcagggcctggggtctatctttgtgtgggcctctgggaacgggggacgagaaggagattattgcagctgcgacggatacaccaactccatctacacaatctccgttagttctgccacagagaacggatacaagccatggtatctcgaagagtgcgcctccaccctcgcaacaacctatagcagtggcgctttttatgagagaaaaattgtgacaactgatttacgccaaaggtgcactgatggtcacacaggcacttccgtgagtgcccctatggtggcgggtataatcgccttagctctggaggcaaactcccaacttacatggcgagatgtacagcacttgctggtgaagacctccaggccagcccacctcaaggcatctgattggaaggtgaacggtgcaggacataaagtttcccatttctatggcttcggccttgtggatgcggaggccctggtcgtagaggccaagaagtggacggccgtgccatctcagcatatgtgtgtcgctgccagcgataagcggccacgaagtattcctttagtccaggtgttgagaaccacagctctcacatccgcttgcgctgagcacagtgatcagagggtagtatatctggagcatgtggttgtgaggacctccatcagtcatccgaggcgaggggacctgcaaatttacctggtgtccccgtcaggaacgaagtcgcagctgctggcgaaacggctgctcgatttgtccaatgaggggttcaccaattgggagttcatgacagtccattgttggggagaaaaggccgaaggccaatggactctcgaaattcaggaccttccttctcaggtgagaaaccccgaaaagcaaggggatttagaaactccagttgctaaccagctaacaacagaggagagggagcccggtctgaagcacgtttttagatggcaaattgaacaggaactctggtag

SEQ ID NO: 236367 - DNA, 2907 bp, synthetic construct
  misc_feature 1..2907: note = Description of Artificial Sequence: Synthetic coding sequence
  source 1..2907: mol_type = other DNA
atgccaccaagagcccctcccgctccaggtcctcgtccgccacctcgtgccgcagcagctactgataccgctgccggagccggaggagctggaggcgctggaggcgctgggggacccggttttcgtccactggcacccagaccctggagatggctgctgctcctggcgctgcctgcagcttgctcacctcctcccaggccagtatacacgaatcattgggctgtgcaggtgttaggaggccctgcagaggccgatagggtggctgctgctcatggctacctcaacctcggacagataggaaatttggaagactactaccacttctaccattcaaagactttcaagcggagtaccctttcttcaaggggcccacatacgttcttgcgaatggatcctcaagtaaaatggctgcaacaacaggaagtgaagcgacgagtgaaaagacaggtacgctctgatccccaggccctttatttcaatgacccaatttggagcaacatgtggtacctgcactgcggggacaagaactcaagatgtcgtagtgaaatgaacgtccaggccgcttggaaaagagggtatactggcaaaaatgtggtggtgactatattagatgacggaatcgagcgaaatcaccccgatctcgcgccaaactacgactcatacgccagttatgatgtgaatggcaatgactatgatccgagcccgaggtacgatgcttccaacgaaaataagcacgggacaaggtgtgcgggtgaagtagctgcaagtgctaataacagctattgcatcgtcggcattgcttataacgccaagattggagggatccgaatgctcgatggagacgttacagacgtggtggaggccaagagtctgggcattcggccaaactatatagacatatattccgcatcgtgggggcctgatgatgatggcaagacagtggatggcccaggcaggctagccaaacaggcatttgaatacggaatcaaaaagggccgtcagggcctgggaagcatttttgtctgggccagcggaaatggaggtcgtgagggcgactattgcagctgcgacggctacacaaactccatttataccatcagcgtttcatcggctaccgagaacggttacaagccttggtacctggaagaatgcgctagcaccctggccaccacatattccagtggcgctttctatgagagaaaaattgtgaccacagatctgcgccagagatgcacagacggtcacaccggaacatctgttagcgcccctatggtggccggtatcattgccctggctctggaggcgaactcccaattaacttggcgggacgttcagcatctgttagtcaaaacgtcaagaccggcacatttaaaagcttcagattggaaagtgaatggcgctgggcataaagtgtcacacttttatggattcggccttgttgatgccgaggccttggttgtcgaggccaagaaatggaccgccgtgccaagtcagcatatgtgcgtggcagcaagcgacaagagacctcgttcaatcccattggttcaggtactgcgaactacagctctgactagcgcttgtgcggagcatagcgatcaacgggtcgtgtacctggagcacgtggttgtgcggacaagtattagccacccgagaagaggcgatctgcagatttacctggtaagcccttccgggaccaagtcacagcttctggcgaaaagactccttgatttgtctaacgagggtttcacgaactgggagtttatgaccgttcattgctggggggagaaggcagagggtcagtggacgctggagatccaagacctcccgtcacaagtacgaaatccagaaaaacagggtaaacttaaggaatggtcactcatactatatgggaccgccgaacacccatatcacacattttccgctcaccagtctaggtctagaatgctggagctctctgccccagagttagagccacctaaggcagctttgagtccatctcaggtggaggtgcccgaagatgaggaggactatacagcacaatccacgcccggatcagcaaatattttgcaaactagcgtctgccatccggagtgcggggataaaggttgcgacggccctaacgcagatcagtgcctgaactgcgtccatttcagccttggaagtgtgaaaacttccagaaagtgcgtctctgtttgtccccttgggtacttcggcgatactgctgcccgtaggtgccggcgttgccataaaggctgcgaaacatgttcatcgagggccgctactcagtgcctgtcatgccgacgagggttctaccaccaccaggagatgaacacatgcgttaccctctgccccgcaggcttctatgctgacgagtctcagaaaaactgtttgaagtgccacccctcatgcaagaagtgcgtcgatgagccggagaaatgtaccgtctgcaaagaggggttttcgttggcgaggggctcttgcatcccagattgcgaacccggtacttactttgacagtgagctgattagatgcggcgaatgccaccatacatgcgggacctgcgttggcccaggtagggaggagtgtatccactgcgcaaaaaatttccactttcacgattggaagtgcgtgccagcgtgtggagagggcttctatccagaggaaatgcccggtctgccacacaaagtctgccgccgatgtgatgagaattgcctttcatgtgcgggttcttcacgcaattgttcccgttgcaagacaggctttacgcagcttggcacatcatgcatcacaaatcacacatgctctaatgctgacgagactttctgcgagatggttaagtccaaccggctctgtgaacgaaagctttttattcagttctgctgtcgcacctgcttgttggccggatag

SEQ ID NO: 236368 - DNA, 2868 bp, synthetic construct
  misc_feature 1..2868: note = Description of Artificial Sequence: Synthetic coding sequence
  source 1..2868: mol_type = other DNA
atgcctccacgcgcacctcctgccccaggcccacgccctccacctagagcagcggctgccaccgacactgctgctggggctggaggagccggtggagcaggtggggctggaggtcccggattccgcccactagctccccgaccttggcgctggcttctgctccttgccctaccagctgcatgcagcccgcctccgaggccggtttatacaaatcattgggcggtgcaggtcctcgggggtcccgctgaagcggacagggtagccgcagctcacggatatcttaatctggggcaaatcggcaacctggaggattactaccacttttatcactccaagaccttcaagcggtccactctgtctagccgcggtccccacacctttttgaggatggacccccaggtgaagtggctgcagcagcaggaagtaaagagaagagtcaagagacaggtgagatccgacccacaggccctgtacttcaacgaccccatctggtctaatatgtggtatctgcactgcggtgacaagaattcaaggtgccgatctgaaatgaatgtgcaggctgcttggaagagaggctacactggaaaaaatgtagtcgttaccatcctggatgatggaatcgagcgcaaccatcctgacttagctcccaactacgatagttacgctagctatgatgtcaacggaaacgactatgatccgtccccgaggtacgacgccagtaacgagaataagcacggcactagatgtgcaggcgaggtcgccgcttctgcaaacaattcgtattgcatcgtggggatagcgtacaacgccaaaattgggggaatacggatgctggatggggacgtaacagacgtggtagaagccaaaagcttgggtattcggccaaactacatcgatatttactccgcctcctggggacccgatgacgacggcaagaccgtggacgggccaggaagattggctaaacaagctttcgagtatggtatcaaaaaaggcagacaaggactcggaagcatcttcgtgtgggccagtgggaatggcggaagggaaggagattactgttcatgcgacggctatactaattccatctataccataagcgtgtcatcagcgactgaaaatggctacaagccgtggtatttggaggaatgcgcatcaactctggctactacatactcctcaggtgccttttatgaacgcaagatagtcaccacagatctgcgtcagcggtgtaccgatgggcatacaggcacaagtgtgtcagcacctatggtggccggtattatcgccctggccctggaggccaattcccagctgacttggagagatgtccaacacttgttagtcaaaacttcaaggcccgctcatctgaaggcctcagattggaaggtgaacggcgctggccacaaagtcagccatttttacggcttcggcctggtggacgccgaagctctggttgtcgaggccaaaaagtggacggccgtgcccagccagcacatgtgtgtggcggcttcagacaaaaggcctaggtcaatccccttagtccaagtccttaggactacggcacttaccagcgcctgtgctgaacatagcgaccagagagtggtgtacctggaacacgtggtggtgcgcacaagtatttcacatcctagacggggagatttacagatctacctggtgtcaccatccgggaccaaatcccagttgttagctaagaggttacttgacctgagtaacgagggcttcacaaactgggaatttatgaccgtgcattgctggggggagaaagctgagggccagtggactctcgagatccaagacctcccttcgcaggtgcgcaaccctgaaaagcaaggcaagttgaaggaatggtctctgatcctttacgggactgcagagcacccttatcacactttcagcgcccatcagagccgctccagaatgcttgaactgtctgcccctgagctcgagccccctaaagccgctctgtctccttcgcaggttgaagtgcctgaagatgaagaggactacacaggggtgtgccacccagagtgtggcgacaagggttgcgacggaccgaacgcggaccagtgcctaaactgtgttcactttagtcttggatccgtcaaaacttccaggaaatgtgtgagtgtttgccctctggggtacttcggtgatacggcagccagacgctgccgaagatgtcacaaaggttgtgagacctgcagcagccgtgcagctacacagtgcttatcttgcagacggggattctatcaccaccaggagatgaatacatgcgtcacgctgtgtcccgctggattctatgccgatgagagtcagaagaattgcctgaaatgtcatccatcttgcaagaagtgcgtagacgagccagaaaagtgcaccgtctgcaaggaagggttctccttggcccgagggtcttgcatcccggattgcgagccaggcacgtacttcgattcagagctcataagatgcggagagtgccatcatacgtgtggaacatgtgtgggaccgggacgagaagaatgcattcactgcgccaagaacttccattttcacgactggaaatgcgttccagcgtgtggggaggggttttaccctgaagagatgccgggactcccccacaaggtgtgcaggcgatgtgatgagaattgcctcagctgcgccggttcctctcgcaactgctcaaggtgtaaaaccggatttacccagcttgggaccagttgcattaccaatcatacatgctccaatgccgatgagacattctgcgaaatggtaaaatcgaaccgcctgtgcgagagaaaattgttcatccagttttgctgccgaacctgtctgctagctggatag

SEQ ID NO: 236369 - DNA, 1869 bp, synthetic construct
  misc_feature 1..1869: note = Description of Artificial Sequence: Synthetic coding sequence
  source 1..1869: mol_type = other DNA
atgccccctcgggcaccacctgcacccggacccagacctccccctagagccgcagctgccaccgataccgccgcaggtgctgggggagccggaggggctggcggtgctggcggaccgggatttcggccactggcacctaggccatggcgatggctgcttcttctcgctttacccgcagcctgctccgcaccaccacgacccgtctataccaaccattgggctgtacaggtcctgggagggccagcagaggccgatagagtggccgcagcccatggctatctgaacctgggtcaaatcgggaacctcgaggattactatcatttttatcactccaaaacctttaagcgatctacactgtctagccggggaccacacacctttctgcgcatggaccctcaggtgaaatggttgcaacagcaggaggtgaagaggagagttaaaaggcaggtgcggtctgatccacaggcactctatttcaacgatcctatctggtcaaatatgtggtacctgcactgcggagacaaaaattcccgttgtaggtctgagatgaatgttcaagccgcttggaagagagggtataccggaaagaatgtggtcgtaacgattttggatgacggtatcgagcgtaatcacccggacctcgctccaaattacgactcttacgccagttacgacgtcaatgggaatgattatgaccctagccctcgttatgatgccagcaatgaaaacaagcatggcacaaggtgtgcaggcgaggttgccgcatcagccaataattcctattgtatcgtaggcattgcttacaacgcgaagattggaggcatccgaatgttggacggtgatgtaaccgatgtggtcgaggcaaagagcctgggcatcagacctaactatatcgacatttactcagcctcttggggaccggatgatgatggcaagactgtcgatggtcccggaagactggcaaagcaggcattcgaatatggaatcaaaaagggcagacagggcctcggctcaatctttgtgtgggcctctggcaatgggggacgagagggggactactgcagctgcgacggctatacgaactctatttatacgataagcgtttcatcggcaacagaaaacggttacaaaccttggtatctggaagaatgcgccagtactctagccacaacatacagttctggcgctttttacgagaggaagatcgtgaccactgacctgcgccagcggtgtactgatggccataccggtacctcagtgtccgctcctatggtagcgggaatcatcgccctggccctcgaagctaatagtcaacttacatggcgggatgtacagcacctcctggtgaaaacctctcgccctgcacatctcaaggcctctgattggaaggtcaacggagccggacataaggttagccacttctacggcttcggactggtcgacgccgaggccctggtcgtagaagccaaaaagtggactgccgttccctctcaacacatgtgtgttgcagccagcgacaaacggccacggagcatccccctggttcaggtactcagaaccactgcattaacatctgcatgtgccgagcacagcgatcagagggtggtgtacctggaacacgtggtggtgcgcacatcaatctcacacccccgacgcggagacctgcagatatacctggtgagtccttccgggactaagtctcaactcctggccaagagattgctggatctgtccaacgagggtttcacaaattgggagtttatgactgtacattgctggggggagaaggccgaagggcaatggaccctggaaattcaggaccttcccagtcaagtcaggaacccagagaaacaaggcaacctggactag

SEQ ID NO: 236370 - DNA, 1584 bp, synthetic construct
  misc_feature 1..1584: note = Description of Artificial Sequence: Synthetic coding sequence
  source 1..1584: mol_type = other DNA
atgtacgctctgttcctgctagcgagcttgctgggggcagcgctcgcaggacctgtgctggggcttaaagagtgcacacgcggaagcgccgtgtggtgtcaaaatgtcaagactgcctccgactgcggcgctgtgaagcactgccttcagaccgtctggaacaaaccaactgtgaagtccctgccatgcgatatctgtaaagatgtagtcacagcggctggcgatatgctaaaggataatgccacggaagaggaaattcttgtttatttggagaagacttgcgactggctgccgaaacccaatatgtcagcctcctgcaaagagattgtggattcctatttgccagtaatactcgatatcataaagggcgagatgtcccggccaggagaggtgtgctctgcactcaatttgtgcgagtccctgcaaaagcatttagccgagctgaatcatcagaagcagctggagagtaacaagataccggaactcgatatgaccgaagtggtcgccccatttatggctaatatcccactcctcctctacccacaggatggacccagaagcaagccccaacccaaagataatggagacgtctgtcaagattgcatacaaatggtgactgatattcagacggcagtgcgcacgaactctaccttcgtgcaagcacttgtcgaacacgtgaaggaagaatgtgacagactcggtcctggcatggcagacatttgcaagaattatattagtcagtacagcgagatcgcaatccagatgatgatgcacatgagcgcggagcagccgaaggaaatctgtgctctggtggggttctgcgacgaggtcaaggaaatgccaatgcaaacccttgtccctgctaaggtggcctctaagaatgtgatacctgctctagagcttgttgaacctatcaaaaagcacgaggtacctgccaaaagcgacgtgtactgcgaagtctgcgaattcttggtcaaagaggtgactaaattgatagataacaacaagaccgagaaggagattctggatgccttcgataaaatgtgtagtaaattgccgaaatccctttcagaggaatgtcaggaagtggtggacacctatggctccagcatattgagcatcctactcgaggaagttagcccagagctcgtttgctccatgctgcacctctgttctgggaccaggttacccgctcttaccgtgcacgtgacccagccaaaagatggtggcttctgcgaggtctgcaaaaagctggttggctatcttgaccgcaaccttgagaagaattcgacaaaacaggaaattctcgcagcattggagaaggggtgctcctttctgccagacccttaccagaaacaatgcgatcagtttgtggcggaatatgaacctgtgttaatcgagattctggtcgaggtcatggatcccagtttcgtgtgcctgaaaatcggcgcttgtccaagcgcacacaagccattgttgggcacagaaaagtgcatatggggaccatcatattggtgccagaacaccgagacagctgcccagtgtaacgctgttgagcactgcaaacggcacgtgtggaattag

SEQ ID NO: 236371 - DNA, 1680 bp, synthetic construct
  misc_feature 1..1680: note = Description of Artificial Sequence: Synthetic coding sequence
  source 1..1680: mol_type = other DNA
atgtatgccctctttttattagcatccctgttaggtgcagcactggctgggccagtcctgggcctgaaggagtgtactcgcggatcagctgtgtggtgccaaaacgtaaaaaccgcttctgactgtggtgcagtgaagcattgcttgcagactgtctggaacaagcccactgtcaagtcccttccttgcgatatctgcaaagatgtggtgactgctgccggtgatatgctaaaagacaatgctactgaagaagaaatcctggtgtatcttgagaaaacgtgtgactggttgccaaaacctaacatgagtgcatcgtgtaaagaaatcgtggactcatatctacccgttatactggacattatcaaaggagaaatgagcagacccggagaggtttgttccgccttaaacctgtgcgagtcacttcaaaagcatctcgcagagttaaaccaccagaaacagctggaaagcaacaagatccccgagctggatatgactgaagtcgtagcacctttcatggctaacatccccctgttgctgtaccctcaggacggacccagatccaagccgcagcctaaggataatggagacgtctgtcaagattgcatccagatggttacggatatccagaccgctgtacgtaccaatagcactttcgtacaggccctggttgagcacgtcaaagaggaatgcgatcggctgggccctggtatggccgacatttgcaaaaactacatcagccaatacagtgagatcgcgattcaaatgatgatgcatatgcagcctaaggagatatgcgcgctggtgggattttgcgacgaagtgaaggaaatgccgatgcaaactcttgtccccgcaaaagttgctagcaagaatgtcatcccagccctggaactggtggagcccatcaagaaacacgaagtcccagcaaaatcggatgtctactgcgaggtatgtgaattcctcgtaaaagaggtgacaaaactgatcgacaacaataaaaccgagaaggagatcctcgatgctttcgacaaaatgtgtagcaaattgccaaagagtttgagtgaggaatgccaggaagtggttgatacgtatggatcctctatactcagtatcctgctggaggaagtgtcacctgaactggtctgtagcatgctgcacctgtgctccgggacccggcttccagcactcacagtgcacgtaacacagcccaaggatggtggattctgcgaggtgtgcaaaaaactggtgggttatctggacagaaacctggaaaagaattctaccaagcaagagatcctggctgccctcgagaagggctgctcattccttccagacccatatcagaagcagtgtgatcagtttgtagctgaatacgagcctgtgctgatcgaaatacttgtggaagtgatggacccttcttttgtgtgcctgaaaatcggagcctgtccttcagctcacaaaccactgctgggtaccgaaaagtgcatatggggtccatcatactggtgccagaatacggaaactgcggcacaatgtaatgccgtggagcattgcaaacggcacgtgtggatcgggtgttggggtgtaggggtcgggagctgcctgtggcctacctgggccccaacgctcttgtctaccagtggatgccaggagaccgccagcaaggcatctcggacatag

SEQ ID NO: 236372 - DNA, 723 bp, synthetic construct
  misc_feature 1..723: note = Description of Artificial Sequence: Synthetic coding sequence
  source 1..723: mol_type = other DNA
atgtacgctctctttttgctagcttctctcttaggcgctgccctggccggacccgtactgggtctaaaagagtgtacacggggaagcgccgtctggtgccagaacgtgaaaacagcttcggactgcggcgctgtgaaacactgtttacagacggtatggaataaacccaccgtgaaatcattaccatgtgacatatgtaaagatgttgtgacagctgctggggacatgcttaaggacaatgcgactgaggaggagatccttgtctatctggaggttagtccggagttggtctgttcgatgctccatctctgctccggaacaagactccctgctcttaccgtgcatgtgacccagccaaaagacgggggattttgtgaagtgtgcaagaagctggtggggtaccttgatcgtaacctagaaaagaactctacaaagcaggagattctcgcagctctggagaagggctgctccttcctgcctgacccgtatcagaaacagtgcgatcagttcgttgcagagtatgaacctgtgctgattgagatcctggtcgaggtgatggaccccagttttgtgtgtctcaaaataggagcctgcccctccgctcacaaacccctcctcgggactgaaaaatgcatatggggcccttcatattggtgtcagaataccgagacagccgcacagtgcaacgccgtggaacactgcaaacgtcacgtgtggaactag

SEQ ID NO: 236373 - DNA, 1581 bp, synthetic construct
  misc_feature 1..1581: note = Description of Artificial Sequence: Synthetic coding sequence
  source 1..1581: mol_type = other DNA
atgtacgcactgttcctgttggcgtcgctgctcggggctgccctggcgggacccgtgttagggctcaaagagtgtactcgaggcagcgccgtatggtgtcagaatgtcaagaccgcttcagattgtggagcggtgaagcattgcctgcagactgtttggaataagcccaccgttaagagcctgccctgcgacatttgcaaagacgtggtcacagcggcaggagacatgctgaaggacaacgctaccgaggaggaaattttagtgtacctggaaaagacctgcgactggctgcccaaacctaatatgtcggctagctgcaaggagattgtggactcatacttgcccgtgatcctggacatcattaaaggggagatgagcaggcctggcgaggtctgctcagcccttaacctgtgcgaaagtctccaaaaacatctggcggaattgaatcaccagaaacagctcgaaagcaacaaaatacccgaactggacatgaccgaggtcgtggccccatttatggcaaacatcccactgctgctttatccacaggatggtccacgcagtaagccacagcccaaagataatggagacgtttgtcaggactgcatacagatggtcaccgacattcagaccgcagtccgtacgaactccactttcgtccaggctctcgttgagcacgttaaggaagagtgtgatcggctcgggcctgggatggccgatatctgcaaaaattacatttcgcagtactctgagattgccattcaaatgatgatgcatatgttacaacagcctaaagagatttgcgctctcgtaggtttctgtgacgaggtaaaagagatgccaatgcagaccctggttcctgctaaagtagcctccaaaaacgtgattcctgccttggaactggtcgagcctattaagaagcatgaagtgcccgcaaagtctgatgtttactgcgaggtctgcgagttcctggtgaaggaggtgaccaagcttatagacaataataaaaccgaaaaagaaatactggatgcattcgataagatgtgctcaaaattacctaaatcccttagcgaagagtgtcaggaggttgttgacacatacggatctagcatcctgtcgattctgctcgaggaggtatctcctgaactggtttgttcaatgttacacttatgttcaggcactaggctgcccgcactgacagtccacgtgacccagccaaaggatggagggttttgtgaggtgtgtaagaagctggtggggtatctcgataggaatcttgagaaaaactcaaccaaacaggaaattctggccgcacttgagaagggatgctcattcctgccagacccctaccagaagcaatgtgaccagttcgtcgcggagtatgagccagtgctgattgagatattagtggaggttatggatccatctttcgtttgcctcaagatcggcgcttgtccttctgcccataagcccctcttgggaactgaaaagtgcatctggggcccatcttattggtgtcagaacaccgagacggctgctcaatgtaatgccgtggaacactgcaaaagacacgtctggaactag

SEQ ID NO: 236374 - DNA, 1575 bp, synthetic construct
  misc_feature 1..1575: note = Description of Artificial Sequence: Synthetic coding sequence
  source 1..1575: mol_type = other DNA
atgtatgccctattccttttggcaagcctcctcggggcagcactcgctggacccgtcctcggattgaaagaatgtacccgcggatctgctgtctggtgtcagaacgtgaagaccgcttcagactgcggggctgtgaagcactgtctccaaacagtgtggaacaagcccacagtaaaaagtctgccttgtgacatatgtaaagatgtggttacagccgctggggatatgctgaaggataacgcaaccgaagaagaaattttagtgtaccttgagaaaacctgtgattggttgcctaaacctaatatgagtgcaagctgtaaggaaattgttgatagttacctccctgtgattctggacataattaagggcgaaatgtcccgcccaggcgaggtgtgctccgcactgaacttatgtgaatccttgcagaaacatttggctgagctcaatcaccagaagcagcttgagtccaacaagattccagaattggacatgactgaagttgtcgcaccattcatggccaacatacctcttctgctgtaccctcaggatggccctcgctcaaaaccgcagccgaaagataatggcgatgtgtgtcaggattgtatccagatggtcactgatatccagaccgcagtcaggaccaactctacgttcgtccaggctttggtggagcacgtaaaggaggagtgcgatcggttgggcccaggaatggctgacatctgcaagaactatatctcccaatatagcgagattgccatacagatgatgatgcacatgcagcccaaagagatatgcgctctggtggggttctgtgacgaggtcaaagagatgccaatgcagaccctggtgccagcaaaggtggccagcaaaaacgtaatccctgctcttgaactagtggagccaataaaaaaacacgaggtccccgcaaaatctgatgtctactgtgaggtctgcgagttcctcgtgaaggaggtgacaaagctgatcgacaataacaagaccgagaaagagatcctggatgcattcgataagatgtgcagtaagctcccaaagagcctaagtgaagaatgccaggaggtggtggacacttatggtagctccatattgtctattttattggaggaggtgagcccagagctggtatgcagcatgctccacctgtgttctggaacgcggctgcctgcattgacagttcacgtgacccagcccaaagacggtgggttttgtgaggtgtgcaagaaactagtggggtatcttgacagaaatctggagaaaaactctaccaaacaggaaattctcgccgcactcgaaaagggctgttcttttctcccagatccttaccagaaacagtgtgatcaattcgtcgcagagtacgaacccgtcctaattgaaatcttggttgaggtgatggacccatcatttgtttgtctaaagataggtgcttgcccatcggcacacaagcctctcctcgggaccgagaagtgtatatgggggcctagctattggtgccagaacacagagactgcagcacaatgtaatgccgtcgagcattgcaaaaggcatgtttggaattag

SEQ ID NO: 236375 - DNA, 1353 bp, synthetic construct
  misc_feature 1..1353: note = Description of Artificial Sequence: Synthetic coding sequence
  source 1..1353: mol_type = other DNA
atgcttaaagacaatgccactgaggaagagattctggtctacctggagaaaacatgcgactggctgcctaaacccaatatgagtgcatcttgtaaggagattgttgatagctatctccccgtcatcctggacatcatcaagggcgaaatgtccagacccggtgaggtttgcagtgctttaaatctctgcgaaagcctgcagaaacacctggccgagctcaatcatcagaagcagctggaatctaacaagatcccagagcttgatatgaccgaagtggtcgcaccatttatggccaatattccactgctcctgtatccccaggatgggcctcgctctaagccccagcctaaagacaatggagacgtgtgtcaggactgtatccagatggtgaccgatattcagacggccgttagaacaaattccacattcgtgcaggccttggtggaacacgtcaaggaggagtgtgataggttaggcccaggcatggctgacatttgcaaaaactatataagtcagtatagcgagattgctatacaaatgatgatgcatatgcaacaaccaaaagaaatctgcgccctggttgggttctgtgatgaggtaaaggagatgccaatgcagactctggtgccagccaaggtggcaagcaagaacgtgattcccgctttggagctcgtggagccaatcaagaagcacgaagtccccgctaagtctgatgtgtactgcgaagtgtgtgagtttctggttaaagaagtaacgaaactgatagacaataacaaaacagagaaggaaatcctcgatgcatttgacaaaatgtgctccaagttacccaagtctttgtcagaggaatgtcaggaagtcgttgacacctatggctccagtatcctgagcattctgttggaggaagtcagcccggagttagtctgctctatgctccacctgtgtagcggaactagactgcctgctttaactgtccacgtgacacagccgaaggacggtggcttctgcgaagtctgtaagaagctagtggggtacctggaccggaacttggagaagaattccaccaaacaggagatcttggcagccctggaaaaaggttgcagcttcctgcccgatccttaccagaagcagtgcgaccagtttgtcgccgaatacgaacctgtcttgattgaaattctagtagaggtcatggatccatcttttgtgtgcctgaagattggggcttgtccaagcgcgcacaagcctcttttgggaacagaaaagtgcatctggggaccgagctattggtgtcagaacacagagactgccgcacaatgcaacgccgtcgaacactgcaaaaggcatgtgtggaactag

SEQ ID NO: 236376 - DNA, 1593 bp, synthetic construct
  misc_feature 1..1593: note = Description of Artificial Sequence: Synthetic coding sequence
  source 1..1593: mol_type = other DNA
gatggcgcaatgtacgcactgtttctcctggcctcgctgctgggcgctgctctagctggcccagtcctcggattaaaggagtgtacccgcggatcagctgtgtggtgccagaacgtgaagacagccagtgactgcggtgctgttaagcattgcctgcagaccgtatggaacaagcccaccgtgaagagtttgccctgcgacatctgtaaagacgtggtgacagcagcaggagatatgctgaaagacaacgccacggaggaggaaatactcgtctacttagagaagacttgcgattggcttcccaaacctaatatgagtgcatcctgcaaggagattgtggactcctatctccctgtgatccttgatatcataaaaggtgaaatgagtaggcccggtgaagtgtgttccgctctcaatctgtgtgagtcgcttcagaagcatttagcagagctgaatcaccaaaagcagctggagagtaacaagatcccagagctggacatgactgaagtggtggcaccttttatggcgaatatccctctgcttctatatcctcaggatggccctcgaagcaaaccacagccaaaagataatggggacgtttgccaggactgtatacagatggtcactgatattcagactgccgtacgaaccaattccactttcgtccaggcgcttgtggagcacgtgaaagaggagtgcgatcggctgggacctggcatggctgacatttgtaaaaattacatttctcaatatagcgaaattgccattcagatgatgatgcatatgtctgccgagcagcctaaggagatctgtgctctcgtggggttttgcgatgaagtgaaggagatgccgatgcaaaccctagtgccggcaaaggtggcttctaagaatgtgatacccgcattggagcttgtggaacccattaaaaaacacgaagtgccggctaaatcagacgtttactgtgaggtgtgcgaatttctggttaaagaagttaccaaactgatcgataacaacaaaaccgagaaagagatcttggatgcttttgataaaatgtgttctaaactgcctaagtctctgagcgaggagtgccaggaggtggtcgacacctatggcagcagcatcttgagcatcctcttggaggaagtttcacctgaactggtctgcagcatgctgcacttatgctccgggacaagattgccagctctcaccgttcacgtaacacaacccaaagatggcggattctgcgaagtctgcaaaaaactggtgggctatctcgacaggaacttggagaaaaacagtacaaaacaggagatcctcgcagcgttggagaaagggtgtagcttcttacctgatccctaccagaagcaatgcgatcaatttgtcgccgagtatgagcccgtgctgatcgagatccttgtggaagtcatggatccctcttttgtgtgtttgaaaataggcgcttgcccgagtgcacataagcctctactggggactgagaaatgcatctggggcccaagctactggtgtcagaatactgagactgcagcacaatgtaatgcagttgagcactgcaaacggcacgtctggaactag

SEQ ID NO: 236377 - DNA, 2214 bp, synthetic construct
  misc_feature 1..2214: note = Description of Artificial Sequence: Synthetic coding sequence
  source 1..2214: mol_type = other DNA
atgcccgatcacgactcaaccgcactgctcagccgccagaccaagcgaaggagagtcgacatcggcgtcaagagaacagtgggaacagcgtctgccttcttcgcaaaagccagagcgacattcttctcagctatgaaccctcagggttctgagcaggacgtggaatatagtgttgtccaacacgctgatggggagaaatctaatgtgttgcgcaaactgctcaaaagggcaaatagctacgaggacgcaatgatgccgtttccaggggcaacaattatcagtcagctcctaaagaataatatgaacaagaatggcggaacggagccctctttccaggcatcaggtctcagtagcactggatccgaggttcaccaggaagatatctgcagcaatagctctagggattcccctcctgagtgcctgtcacccttcggtcggccaacaatgtcccagtttgatatggatagactttgtgatgaacacctgagggctaaacgtgccagggtcgagaacatcattcgaggaatgagccatagtccatctgtcgctctgcgcggtaacgaaaacgagagagaaatggcaccacagtccgttagccctcgcgagtcatatcgtgagaacaagcgcaaacagaagttgccccagcagcaacaacagagtttccagcagctcgtctccgccaggaaggaacagaagcgggaagaaagacggcaattaaaacagcagctcgaggatatgcaaaagcagctcagacagcttcaggaaaaattctaccagatatatgattcaaccgattccgagaacgacgaagacgggaacctgtctgaggactctatgcgctctgaaatcctcgacgccagggctcaggatagcgtggggaggagcgacaacgagatgtgcgaactagaccctggtcagttcatagaccgggcaagagcactgattagggaacaagaaatggccgaaaacaaacctaaacgcgaagggaacaacaaggagagggatcatggacctaatagcctgcagccagagggcaagcacctggcagaaacgctcaagcaagagctcaacacagcaatgtcacaggtcgtcgacactgtcgtaaaggtctttagcgccaaacccagtaggcaggtcccgcaggtctttcccccactacagatccctcaggccagatttgcagttaatggagagaatcataatttccacaccgctaaccagcgcctccagtgtttcggtgatgttatcattccaaaccctctggatacattcggaaacgtgcagatggctagctcaaccgatcaaactgaggccctgcctctagtagtaagaaaaaacagctctgaccagtcagcatctgggccagcagctggcggacaccatcagcccctgcaccagtcacccctgtctgccaccaccggattcacaacctctacattccgccacccctttcccctacctctgatggcctatccattccaatccccgcttggagcaccctccgggtcatttagtgggaaggatagagcatcaccagagagcctcgatcttactcgggataccacatcattgcgaactaagatgagctctcaccacctgagtcaccacccctgcagccccgctcatcctccaagtacagctgaagggttaagcttgtcactcatcaagagcgaatgtggagacctgcaggacatgtccgagatttctccctacagtgggtcggccatgcaggaggggctatctcccaaccacttgaaaaaggctaagctcatgttcttttacacacggtacccatcatcaaatatgcttaaaacctactttagcgacgtgaagttcaatcgctgcataaccagtcagcttattaagtggttcagcaacttcagagaattttactatattcagatggagaagtacgctagacaggccataaacgatggggtgacgtctactgaagagctgagcattactagagattgtgagctctaccgtgcactgaacatgcattacaacaaggcaaacgactttgaagtccccgaacgcttcctggaggtagctcaaataactctgcgggagttcttcaatgccatcatagccggtaaggatgttgaccctagttggaagaaggcaatctacaaggtgatctgcaaacttgattcagaggttccagaaatattcaagagcccgaattgcctacaggaattgcttcatgagtag

SEQ ID NO: 236378 - DNA, 2031 bp, synthetic construct
  misc_feature 1..2031: note = Description of Artificial Sequence: Synthetic coding sequence
  source 1..2031: mol_type = other DNA
atgcctgatcatgattcaaccgctctactgtcccggcagacaaagagaagaagggtagacataggtgtcaagcgcacagttggaacagcttcggcgtttttcgctaaagccagagccaccttcttttcggccatgaacccccaaggttccgagcaggacgtggagtattccgtggtgcagcatgctgatggtgagaaaagtaacgttctgcgtaaactgctaaaaagggccaattcctatgaggatgccatgatgcccttccccggtgcgacaataatttcccagctgttaaaaaacaatatgaacaagaatgggggaactgagccctcctttcaggcttctggcctaagcagcacgggctccgaggtacatcaggaagacatctgtagtaattctagcagggatagcccgcctgagtgtctgagcccatttggcagacctacaatgtctcagttcgacatggaccggctctgcgacgaacatctgagggcgaaacgggctcgggtggagaatattattaggggaatgagccactccccgtccgtggcgctgcgcggaaatgagaacgagagggagatggcgccacagtctgtgtcccccagagaaagttaccgggaaaacaagaggaagcaaaaactgccacagcagcagcagcagagctttcagcagctggtaagtgcacgtaaggaacaaaagcgagaggagagacggcagctcaagcagcagctcgaggacatgcagaagcagttgcggcagctccaggaaaagttttaccagatttacgactctacagatagtgaaaatgacgaggacggcaacctttctgaggattccatgaggagcgagatcctcgatgcgcgtgctcaggattcagtgggtagaagtgataacgagatgtgcgagctggatccaggccagttcattgatcgagcccgtgcccttatccgagaacaggaaatggccgaaaataagccaaaaagggagggcaataacaaagagagggatcatgggcctaattctctgcagcctgaagggaagcacctagctgagaccttgaaacaggagctgaataccgcgatgtcacaggtggtcgacactgtggttaaagttttctcagccaaacctagccggcaggtcccccaggttttcccaccattgcaaattcctcaggctcggtttgcagtcaatggagaaaaccataacttccataccgctaatcaacgtcttcagtgcttcggagatgtcatcatcccgaatcccctcgacacgtttgggaatgtccagatggccagctctacagatcagaccgaagccttaccactggtcgttcgcaaaaattccagtgatcagagcgcctctggccctgctgctggcggacaccatcagcctttacaccagtcacctctgtccgccactaccggtttcaccacgtcaacattcaggcacccttttccactgcccctgatggcatatcccttccagtctccccttggggctccttcgggcagctttagtggaaaagaccgggcttcccccgagagcctggatttgactcgtgatactacatccctgcgcaccaagatgtcatcccaccacctgtctcatcatccgtgctccccagcacaccccccttcaactgccgaaggcctcagtctctctttaatcaagtcggaatgtggggacttgcaggacatgagcgagatttcgccctatagtggaagcgccatgcaggaaggactttccccaaaccatttaaaaaaagcgaaactcatgtttttctacaccagatacccaagttccaacatgctgaagacctatttttccgacgtgaagttcaatcgctgcattacctcccaacttattaaatggttcagtaacttccgggagttttattacatccaaatggagaaatatgccaggcaagcaatcaacgatggggtcacctctaccgaagaactgtccatcacgagggactgcgagctgtatagggccctgaacatgcactacaacaaggccaacgatttcgaatag

SEQ ID NO: 236379 - DNA, 2214 bp, synthetic construct
  misc_feature 1..2214: note = Description of Artificial Sequence: Synthetic coding sequence
  source 1..2214: mol_type = other DNA
atgccagaccacgattcaaccgccctgctgagtcgacagactaagcgcagacgtgtggacatcggcgttaagcgcactgttggcacagcctcagctttttttgctaaggccagagctacatttttttccgcgatgaacccacaggggtccgaacaggacgtggaatactccgtggtgcagcacgcagacggagaaaagagcaacgtcttgcgcaagctgttaaagagagctaactcgtacgaggatgccatgatgcctttcccgggtgctactatcatttctcagcttttgaaaaacaatatgaacaagaacggagggacggagccctctttccaagccagcggtctttcttccaccgggagcgaagtacaccaggaggacatatgcagcaactctagtcgtgacagccccccagagtgcttgtcacctttcgggaggccaaccatgtcccagtttgacatggaccggctctgtgatgaacatctgcgagctaagagagccagagtcgagaacattatcaggggtatgtcccactcacccagcgttgccctcagaggtaacgagaacgagagggaaatggcccctcagagtgtgtcccccagggagtcgtaccgcgaaaataagcgcaaacagaagctcccacagcagcagcagcagtctttccagcagctcgtttcagccagaaaggagcaaaagagggaggaacgtcgtcaactgaagcaacagctcgaggatatgcaaaaacagctccggcagctgcaggagaagttttaccagatctacgactccacggattcagaaaacgacgaagacggcaatttatctgaagattccatgcgttctgagattctcgatgcaagagctcaggactccgtcgggcgaagtgacaatgagatgtgcgagctggatccaggccaatttattgaccgggcaagagcgctgattcgcgagcaagaaatggcagaaaataagcccaagagagaaggtaacaacaaggagcgggaccacgggcctaactctctgcagcccgaaggtaagcacctggcagagacactaaagcaagaactgaacacagcgatgtctcaggttgtcgacaccgtggtgaaagtattctctgctaagccaagcagacaggttccacaagtctttccccctcttcaaatcccccaggcgagatttgctgtcaacggagagaatcataattttcacaccgctaatcagagattacagtgtttcggagatgttataattcctaatcccctggatacctttgggaacgtgcaaatggcttcttctaccgaccagacggaggccctgcctctggtggtacgcaaaaatagttccgaccagagtgcgtccgggccagcagccggtgggcatcaccagcctctgcatcagtcccctctgtccgctaccaccggttttactaccagcaccttccggcacccctttcccctgcctctgatggcatacccctttcagagcccactgggagcccctagtggttcgttctcgggtaaggacagggctagtcccgaatcgctggatttgacaagagacacaacatccctacgtacaaagatgagcagccatcatttaagtcaccacccttgcagccccgcacacccccctagcactgccgaagggttgtcccttagcctgatcaagagcgaatgcggagacctgcaagacatgtccgagatcagcccgtacagcggaagcgctatgcaggaagggctaagtcctaaccatctcaagaaggccaaactcatgtttttctacacacgctacccctcgtctaacatgctgaagacatactttagtgatgttaaatttaaccgctgtatcacaagtcagttaattaagtggtttagcaacttcagggagttctactatatccaaatggaaaaatacgcacgtcaagctatcaacgacggcgtgacgagcacggaagaactttccatcactcgcgattgcgaattgtatcgagccctcaacatgcattacaataaagccaatgacttcgaggtgcctgagagatttctggaggtggctcagatcacgctccgagagttttttaatgccattattgccggtaaagatgttgacccaagctggaaaaaagctatttataaagtgatctgtaaactagattctgaggtgcctgagatatttaagagcccaaactgcctgcaggaattactgcacgagtag

SEQ ID NO: 236380 - DNA, 693 bp, synthetic construct
  misc_feature 1..693: note = Description of Artificial Sequence: Synthetic coding sequence
  source 1..693: mol_type = other DNA
atgcctgatcatgatagcactgcactcctgtccagacagaccaagagaaggagagttgatatcggagtaaagcgcaccgtgggaacagcttctgccttctttgccaaagccagagcgacattctttagcgccatgaatcctcagggatcggaacaagatgtggagtacagcgtcgtgcagcacgctgacggcgagaagtcaaacgttctgaggaagcttctaaagcgggctaactcttacgaagacgcgatgatgcccttcccaggcgctacaatcattagtcagctgctgaaaaataatatgaacaaaaatggcggaactgagccctccttccaggcttccgggctcagtagtacgggcagcgaggtccaccaagaggacatatgttccaacagcagccgagatagcccaccagaatgtctcagcccctttggcagacccaccatgtctcagtttgatatggaccgtctgtgcgatgagcacctgagagcaaagcgcgcaagggtcgaaaatattattcggggtatgtctcactccccatcagtggccttacgcggaaatgaaaacgagcgagagatggctccccaaagcgtgagccctcgcgagtcttatcgggagaataagcgaaaacagaagctgccgcagcaacagcaacaatccttccagcagctggtttctgccagaaaggagtag

SEQ ID NO: 236381 - DNA, 2214 bp, synthetic construct
  misc_feature 1..2214: note = Description of Artificial Sequence: Synthetic coding sequence
  source 1..2214: mol_type = other DNA
atgcccgatcatgacagcaccgcactgctctctagacagactaaaagacgacgtgtcgatatcggggtgaaaaggacagtcggcacggcatctgccttcttcgcaaaagcccgagccacattcttttctgccatgaacccccagggatctgaacaggacgtggagtattctgttgtgcaacacgctgacggcgagaagtccaacgttctgcgaaaactgcttaaacgggctaattcatacgaggatgcaatgatgccgttccctggcgctaccattatttcacaactgcttaaaaacaatatgaacaaaaatgggggaactgaaccttcctttcaagctagtggcctgtcctcaacagggagcgaagtgcaccaagaagatatatgttccaatagcagtagagacagcccccctgagtgtctgtcaccatttggtcgcccaacgatgtctcaatttgatatggacagactgtgcgatgagcatcttcgagccaagagagcgagagtggagaacattatccggggtatgagccacagccccagcgtggccctgagagggaatgagaacgagcgggaaatggcccctcagtccgtgtcgccgagagaaagctaccgcgagaacaaacgcaagcagaagctgccgcagcagcagcagcagtcatttcaacagctcgtttcagctcgaaaggagcagaagcgtgaggagaggcgccagcttaagcaacaacttgaagatatgcaaaaacagctgcgtcagttacaagagaagttctaccaaatttatgatagcaccgactcagaaaatgatgaggacggtaacttgagtgaggactcaatgcgcagtgagattctggacgcccgtgcccaggattcagtcggccgttccgataacgagatgtgtgaactagatccgggacagtttattgatagggccagagctctgattcgggagcaagaaatggctgagaacaagccaaaaagggaaggaaacaataaggagagagaccatggaccaaattcattgcagcctgaaggtaagcacctggcagagacgcttaagcaagagctcaacacagccatgagccaggtcgtggatactgtcgtcaaagtcttttccgccaagccatccagacaagtgccccaggtgtttccccctctccagataccccaggctaggttcgctgtcaacggggaaaatcataatttccacaccgctaaccagaggttacagtgttttggggacgttattatccctaaccccctggacacatttggcaacgttcagatggcttcttctactgatcagaccgaggccttacccctggtggttcggaaaaatagcagtgatcagtcagcgtcagggccagccgctggcggacaccatcaacctctccaccagtcacctttaagtgcaacaacagggttcactacaagtacattcagacaccctttccctctccctctgatggcatatccattccagtctccactcggggcaccctcagggagtttttctggaaaagaccgcgcaagtccagaaagtctggatctaacacgagacacgacctccctgagaaccaagatgagtagccaccatctgtctcatcacccctgttctccggcacacccgccttccaccgctgaaggcctttcactgagcctgataaagtctgaatgtggcgaccttcaggacatgagcgagatatctccttactcaggtagtgccatgcaggagggcttatccccaaaccatctgaaaaaggccaagctaatgttcttttatacccgttatcctagttctaacatgctcaagacttacttctccgacgtgaagtttaaccgatgtatcacctcacagctgataaagtggtttagcaatttcagggagttttattacatacagatggagaagtacgcaagacaagctatcaatgacggcgtgacatctactgaagagcttagcattacccgcgattgtgaactgtaccgggctctgaacatgcattacaataaagccaatgactttgaggtcccagaacgattcctcgaggtggctcaaatcacactgcgtgaatttttcaacgccatcattgccggtaaagatgtcgatcccagttggaagaaggctatctataaagtgatttgcaagctggactccgaagtgcccgaaattttcaagagccccaattgcttgcaggaactcctacacgaatag

SEQ ID NO: 236382 - DNA, 930 bp, synthetic construct
  misc_feature 1..930: note = Description of Artificial Sequence: Synthetic coding sequence
  source 1..930: mol_type = other DNA
atggccagttccactgatcagactgaggctctgccgctcgtggtgagaaagaattcgtctgatcagtcagcaagcggacctgctgccggagggcatcaccagcccctgcatcagtccccgctgagcgctacaactggctttactacctccacttttcgccatccatttcccctgcctttaatggcatacccttttcaatcgcctcttggagccccttctggaagcttcagcggcaaagacagagccagtcccgagagtctggaccttacacgtgacaccacgtctttacgtaccaagatgagttcccatcacctgagccaccacccttgttcaccagcacatcccccatccaccgccgaaggtctgtcgctgtcactcataaagtcagagtgtggcgacctgcaggacatgtcggaaatcagcccatacagtgggtccgctatgcaggaaggcctctctccaaatcatctaaagaaagctaagctcatgttcttctacaccaggtacccatcttcaaacatgctgaagacctatttttctgacgtgaagttcaaccgctgcatcaccagccagctgatcaaatggttctcaaactttcgcgaattctattacatccaaatggagaaatatgcccgtcaggctattaatgatggggtcacaagtactgaggagctcagcatcacccgggattgcgagctgtatagagcactcaacatgcactacaataaagccaacgatttcgaagtacctgagaggttcctggaagtggcacaaattactctgagggagttctttaacgcaattatagctggaaaggatgtggatccatcttggaaaaaggccatttataaggtgatctgcaaattggactctgaggttcccgaaatctttaaatccccaaattgtctgcaggagctgttacacgaatag

SEQ ID NO: 236383 - DNA, 1080 bp, synthetic construct
  misc_feature 1..1080: note = Description of Artificial Sequence: Synthetic coding sequence
  source 1..1080: mol_type = other DNA
atgaaaagcccattctatagatgtcagaacacaactagtgttgagaagggaaacagcgccgtgatgggcggtgttctgttctcaaccgggttgctcggcaacttgctggcgctcgggctccttgccagaagcggattggggtggtgttcacggaggccattgagacctctgccaagcgtcttttatatgctggtgtgcggtttaaccgtcacggatctgctggggaagtgcctcttgagtccagtggttctcgcagcttatgcacagaatcgatcccttagggtcttggctccagcactcgataactccttgtgccaagctttcgctttcttcatgagcttcttcggcctctcgagtacactgcagctgctggccatggccctcgagtgttggttgtccctgggtcatccgttcttctatcggaggcatataactctgaggctgggagcactggtagcccctgtcgtctcagcattctctcttgcgttttgcgccctacccttcatggggttcggcaaattcgtacagtactgcccaggcacctggtgctttattcagatggttcacgaggaagggagcctgtctgtgctggggtactctgtgctgtacagttccctcatggcactgctggttctcgcaactgttctgtgcaacttaggggctatgagaaatctgtatgcgatgcatagacgcttacagaggcacccacgtagctgtacccgcgactgcgctgagccacgggcagatggtagggaggcctctcctcagcccctagaggaactggaccacctcttgctgctggcccttatgacagtactgttcacaatgtgcagcctgcccgtaatttatagggcatactacggggcatttaaagatgttaaggagaagaaccgaactagtgaagaggccgaagatctgagggcactgcgttttctttcggtgatttccattgtagatccctggatattcataatctttcgctctccagtcttccgaatcttttttcacaagattttcattcgccctttgcgatatcggtcacgctgctccaattcgacgaacatggagtcctccctgtag

SEQ ID NO: 236384 - DNA, 8034 bp, synthetic construct
  misc_feature 1..8034: note = Description of Artificial Sequence: Synthetic coding sequence
  source 1..8034: mol_type = other DNA
atgagcacatgttgttggtgtactcccggaggcgcaagtaccatagatttcctgaaacgctacgcttccaataccccctctggggagtttcagacggccgatgaggatctctgttactgcctcgagtgtgtagctgaataccacaaagcacgggacgaactgccttttctccatgaggttctctgggagctcgagactctcaggctcataaaccacttcgagaaatctatgaaagccgagatcggggatgacgacgaactgtatattgtggacaataatggcgagatgcctctctttgacattacgggccaggatttcgaaaataagcttcgggtacccctcctcgaaatcttgaaatacccgtacttattactgcacgagcgcgtcaatgagttgtgcgtggaggctttgtgtcggatggaacaggccaattgcagtttccaggtatttgataagcaccccggaatctatctgtttttagtccatcccaacgaaatggtgcggagatgggcaattctgaccgcgcgaaatttgggcaaggtggatcgcgatgattactacgatctgcaggaggtgttactttgcttattcaaggtgattgagctgggtttattagagagcccagatatttatacgtcctccgtgctggaaaaggggaagcttatcttgcttccctcacacatgtatgacactaccaattacaagtcgtattggttggggatctgtatgctactgactatcttggaagaacaggcgatggattctcttctgctgggctcagacaagcaaaacgatttcatgcaatccattttacacactatggaaagagaggcggacgatgatagtgtcgatcctttctggccagctttgcactgcttcatggttattctagatcggctgggatccaaagtctggggccagctaatggatccgattgtcgcatttcagactataatcaataacgcatcctataatagggagattcgacacattaggaactcatctgtacggaccaagctagaacctgagtcttacttggatgacatggtaacatgctcgcagatcgtgtataattataatcctgaaaaaaccaaaaaggactcgggctggaggacagcgatctgcccagattattgcccgaatatgtacgaggagatggagacactcgctagcgtcctccagagtgacattggccaggatatgagagtacacaattcaacattcctgtggtttatccctttcgtacagagcctgatggacctgaaagaccttggggttgcatatatagcccaggtagtgaatcacctgtactccgaagtgaaagaagtgctcaatcagaccgatgctgtgtgcgataaagtgactgagttttttcttttgatactcgtgtctgtgatcgagctacatagaaacaagaaatgtctgcacttattgtgggtgtccagccagcagtgggtcgaggccgtcgtgaagtgtgcaaagctccccacgaccgccttcaccaggtcaagtgagaagagctctggcaactgctcaaagggtaccgctatgataagttccctttcgttacactcaatgccatccaacagcgtccagctggcctatgtccagctcatcaggtctttgctgaaggaggggtatcagctgggacagcaatctctgtgtaagcgcttctgggataaactcaatctattcctgaggggcaacctttctttgggctggcagctaacatcccaggaaacacacgagcttcagtcgtgccttaagcaaattatcagaaatattaaatttaaagcccctccatgcaatacctttgtggaccttacaagcgcttgcaagatttctcccgcttcctataacaaggaggaatccgagcagatgggaaaaactagcaggaaagatatgcattgcttagaggcaagctcacctacgttttccaaggagcccatgaaagtgcaggacagcgtcctcataaaagcagataataccatagaaggtgacaataacgaacaaaattatattaaggatgtgaagctggaagaccacctgttggcaggttcttgtttaaaacagtcttccaaaaatattttcaccgaacgtgctgaagatcagatcaagatcagcacacgaaaacaaaagtccgtcaaagagatttcctcatacaccccgaaggattgtacctctcgtaacggcccagagaggggatgcgaccggggaattatcgtgtccactaggctactcacagatagtagcacagatgctttggagaaggtcagcacatctaacgaggatttttcccttaaagacgacgcccttgccaaaaccagcaagaggaaaactaaagtgcagaaagatgagatttgcgctaaattgtctcatgtgattaaaaagcagcaccgtaaatcaacattggtcgataacacaatcaacctcgacgagaatctcacagtgtcaaatattgaatcgttctactccaggaaagatacaggagttcagaaaggtgacggatttatccacaatttaagcttagaccctagtggtgttctggacgataagaatggggagcagaaaagccaaaataatgttttgcccaaggagaagcagttgaagaatgaggaactggttatttttagttttcatgaaaacaattgcaagatccaggagttccatgtggatggcaaggagctgataccttttactgaaatgacgaacgcttcagaaaaaaagtcatctcccttcaaagacctgatgactgtccccgaatccagagacgaagaaatgagcaactctacttccgtgatttactccaatttgaccagagaacaagcaccagatataagtcccaagtctgacactcttacggactctcagatcgatagggaccttcataaactttcattgttggctcaggccagcgttatcacattcccctccgactcaccccagaatagcagccagctgcagcgcaaggtcaaggaggacaagagatgcttcacagctaatcagaataacgtgggcgataccagcagagggcaggtaatcatcatttccgatagtgacgacgatgatgatgagcgcatcctttctctagagaaactgacaaagcaagataaaatctgtctggaacgagaacatcctgaacaacatgttagtaccgtgaatagtaaggaggaaaagaatccagtcaaggaagagaaaaccgagacgctcttccagtttgaagagtctgacagccaatgtttcgaatttgagtctagctccgaggtcttcagcgtttggcaggaccatccagacgataataatagcgtgcaggatggagagaagaaatgtctcgcacccatcgcaaatacaacaaacggccaaggttgcactgactatgtcagtgaggtagtgaaaaagggcgcagagggaatagaggaacatactcggccaaggagcatttctgtggaagagttttgcgagatagaagtgaagaaacctaagagaaagcgctcagaaaaaccaatggcggaagatccagtccggccttcgtccagtgtcaggaacgaaggccagtctgacacgaataagcgtgatctggtaggaaatgactttaagagcatcgatcgcagaacctcaacccctaacagccggatacaaagagcaactactgtttcccaaaagaagagcagcaaactttgcacgtgcaccgagcccatcaggaaggtgcctgtctcaaagacgcctaaaaagacccactcggatgccaaaaagggccaaaatcgatcctccaactacttaagctgtagaactaccccagccattgtgccacctaagaaattcagacagtgccccgagccaactagtaccgctgagaaattaggcctaaagaaggggccacgcaaggcctacgaactgtctcagaggtccctagattacgtggcacagctccgggatcacgggaagacagtaggcgtcgtggacacacgcaagaagactaaacttatttcaccccagaacctatccgttcgaaacaataaaaaacttctcacatcccaggaactccagatgcagagacaaattagacccaagtctcagaaaaacaggaggaggctgtccgactgtgagagcacagatgtgaaacgcgctggttctcacactgctcagaactctgacattttcgtgcctgaatccgatcgctccgattataattgcacagggggaactgaagtgctcgccaactcgaatcggaagcagctgataaagtgtatgccgagcgaaccggaaacaatcaaggccaagcacgggtcccctgctacggatgacgcctgtcctctgaatcaatgcgactccgtggtactgaacggtactgtccccaccaatgaggttattgtgagcaccagtgaggacccccttggaggaggggacccaaccgcgcgacacatcgaaatggccgcactcaaggagggggagcccgatagcagctcagacgctgaagaagataacctgtttttaacccagaatgatccagaggatatggacctgtgtagtcagatggagaatgacaattacaagctcattgaacttatacacggaaaggacaccgtggaagtggaggaagactccgtttcccggcctcagcttgaatctctgagcggtacgaaatgtaagtataaggattgcctggagactaccaagaaccagggagaatactgccccaaacattccgaagtaaaggccgctgatgaggatgtttttagaaagcccggattacccccacccgcttcaaagcctcttcgccctacaaccaagatattctcttccaaaagcacctctcgtatcgcaggcctgagcaaaagccttgagaccagtagcgccttgtctccatctctgaagaataagagcaaggggattcaatctattctaaaggttcctcagcctgtccccctaatagcgcagaaaccggtgggcgagatgaagaatagctgcaacgtgttgcatccccagtctcctaacaatagcaataggcaaggctgtaaggttccttttggtgagagcaagtacttcccctccagttccccagttaatatcctcctgagcagccagagcgtcagtgacacttttgttaaggaggtgcttaagtggaaatacgagatgttcctgaatttcggacaatgtgggcctccggcaagcctctgccaatcaatctctaggcccgttcctgtgcgtttccataactatggagattatttcaacgtcttttttccactcatggttttaaacacgttcgaaactgttgcccaggaatggctgaatagccccaatagagagaatttttatcagctgcaggtgcggaagtttcccgctgactatatcaagtactgggaattcgccgtttatctcgaggagtgtgagcttgcaaaacagttgtatcctaaggagaatgatctggtcttcttggcacccgaacgcattaatgaagagaaaaaagatactgagagaaatgatatccaggaccttcacgagtatcattccgggtacgtccacaagtttcgccgaacatcagtgatgaggaatggcaagaccgagtgttatctgtcaattcaaacacaggagaacttccccgcaaacttaaacgagctcgtgaactgcatcgtcattagttccctggtgactacacagcgaaagctgaaggccatgagtcttctaggttctcggaatcaattggctagggcagtgctaaaccctaatcccatggacttctgcacaaaagatctgctgacaacgacaagtgagcggattatcgcctacctgcgggattttaatgaggatcaaaaaaaggctattgaaaccgcctatgcgatggtcaagcactcgccaagcgtcgccaaaatttgtctaatccatggtcctccaggcacaggtaaaagcaagacgatcgtgggactgctatatcgccttctgacagagaatcagagaaaaggacattcagatgagaattcaaacgcaaaaattaaacaaaatcgtgtgttggtttgcgcaccatcaaacgccgctgtcgatgaattaatgaagaaaatcatcctggagtttaaagagaagtgcaaagacaaaaagaaccccttgggcaactgcggagacatcaacctcgtgcggctcggaccggagaaatcaatcaattcagaggtcctgaaatttagtttagactcccaggtgaatcaccgcatgaaaaaagagctgccctcccacgtacaggccatgcataagcgtaaagagtttctggactaccaactcgacgaactgtctagacaaagggccctctgtcgagggggtagggaaattcagaggcaggagctggatgagaatatctctaaggtcagcaaggaacggcaagagctggccagcaagattaaagaggtccaaggacgcccacaaaagacccagagtattatcatcctggagtcgcacattatatgctgtaccctgagcacttcaggcggtcttttactggagagcgcattcagggggcaaggtggagtgcctttttcttgtgtgatagtggatgaagccggacagagctgcgagatcgaaaccctcaccccgctcatacacagatgtaataaactgatcttagttggcgaccccaagcagttgccacctaccgtcatctcaatgaaggctcaagaatatggatacgatcagtctatgatggcccgtttctgcagactcttggaggaaaatgtcgaacataacatgatctctcgcctccccatcctccagctcaccgtacaataccggatgcaccccgatatttgcctgtttccttcgaactatgtatataatagaaatctcaagacaaatcgacaaactgaggctattcgctgctcatccgactggccctttcagccctatttagtgtttgatgtcggagacggatctgagaggagagacaacgactcatatattaatgtgcaagaaataaagctcgtgatggagataattaaactgatcaaggataagagaaaggacgtcagcttcaggaatattgggatcataacccactataaggcccagaagactatgattcagaaggatctggataaggaattcgatcggaaggggcctgccgaagtcgacaccgtcgatgctttccaggggaggcagaaggattgcgtgatcgtcacatgtgtacgcgcaaattcgatacagggatccattggttttctcgcctcattgcagagactgaatgtgaccattaccagggccaagtacagtctgtttatcctggggcacctgaggactctaatggagaatcagcattggaatcagctgatccaggacgcccagaagcgaggagccataatcaagacatgcgacaaaaattatcgccatgatgctgtgaaaatcctaaagttgaagccggtgctgcagcgtagcttgacacatccccctactattgcaccagaagggagccgccctcagggcggactcccatcatcaaagttagacagtggattcgctaagaccagcgtcgccgcatctttatatcatacccccagcgatagcaaggaaatcacacttacggttacctccaaggacccagaacgaccccctgtacatgatcagctgcaggatcctagactgctgaagcgcatgggaatagaggtcaagggtgggatcttcctctgggatccgcaaccctcttctccacaacaccccggtgccacaccaccgacaggcgagcctggatttccagtagtgcatcaggatctgagccacatccagcagcctgcagcagtagtcgccgctttatcatctcacaaaccccctgtgagaggggagcccccagcagcgtcaccggaggcgtccacttgccagagcaaatgtgacgacccggaagaagaactttgccaccgccgtgaggcccgtgccttcagcgaaggtgagcaggaaaaatgcgggagtgagacacaccatacaaggcgcaattcacgctgggacaaaaggacattagagcaggaggactccagcagcaaaaagagaaaattgttgtaa

SEQ ID NO: 236385 - DNA, 483 bp, synthetic construct
  misc_feature 1..483: note = Description of Artificial Sequence: Synthetic coding sequence
  source 1..483: mol_type = other DNA
atggctacacaccatactctgtggatggggctggccttactgggggtgttgggggacctgcaagctgccccagaggctcaagtctctgtccagccaaattttcagcaggataaattcctcgggagatggttcagcgccggtctggcgtccaattccagttggctgcgggaaaagaaggctgcactgtccatgtgcaagtccgtggtagcgccagcaaccgacgggggactaaatctcacttctacctttctgcgcaagaaccagtgtgagacccggacaatgctgctccagccagccggttctttgggatcctattcctatagaagcccaagggagtggggcctccaccggcctccaggccctagcctgggggcaacgctcgctggaactactttgggacaaccacctgctgccgagatccatggggtgggcggtgatggatgtccaaccagtgtaagaggcaagggacaagcctgggcctag

SEQ ID NO: 236386 - DNA, 573 bp, synthetic construct
  misc_feature 1..573: note = Description of Artificial Sequence: Synthetic coding sequence
  source 1..573: mol_type = other DNA
atggcaacccaccataccctgtggatggggttagccctgctgggagtgctcggtgatctccaggcagctcccgaagcacaggtctctgtgcaaccgaattttcaacaggataaatttctaggacgatggttctccgcagggttagcctccaatagcagctggcttcgcgaaaagaaggccgctctgagtatgtgtaagagcgtggtggcaccagcaaccgatggcggactgaacttgacgagtacatttctcaggaagaaccagtgtgaaacgcgaacaatgctcctacagccagctggatcacttgggtcctacagctaccgaagtcctcactggggctcaacgtacagtgtatctgtggttgagacagattacgaccaatacgctcttttgtactcccaagggtccaaagggcctggagaggacttccgaatggctaccctgtattctagaacacagacccctcgagcggagctaaaggaaaagttcaccgcattctgcaaagcccagggatttacagaagatacaatcgtctttctgccacagaccgataagtgtatgaccgagcaatag

SEQ ID NO: 236387 - DNA, 189 bp, synthetic construct
  misc_feature 1..189: note = Description of Artificial Sequence: Synthetic coding sequence
  source 1..189: mol_type = other DNA
tagggttatcattgtctcccagcccctaacagggcacagggagaagtcggaggcgatggaggctccgtccaattcggtggctccgtgaaaacatcatctgccctgcgcgaggaacaggaggcccagtgggaaaactggccaaaaagcggcgtgttgaccaccgccccagggtttttcctgggaaggtag

SEQ ID NO: 236388 - DNA, 642 bp, synthetic construct
  misc_feature 1..642: note = Description of Artificial Sequence: Synthetic coding sequence
  source 1..642: mol_type = other DNA
tagctacgtggagggggtcagttcctgggcaggggcgtccgcggagttgccgcacgtggcatcgggaggggaggcggagcgggtctggagactggaggtgtcgacggtcggggagcacccgctggtagacgccgttgggtccgcagagtcctggcagatgccggtggcggacgctccccgcaattcctgggcaggtggttcagcgcaggtctggcaagtaactcttcttggctgagggagaagaaagctgccctgagcatgtgcaagtctgtggttgcccctgccacagatggtggcctcaacctcaccagcactttcctgcggaaaaatcagtgcgaaacgagaaccatgctcttgcagcctgcaggatctctagggtcctacagctatagatctccccactggggatctacctatagcgtttctgtcgtcgaaaccgactacgaccagtacgctctcctgtattcccaaggctctaaaggccctggagaggacttccgcatggccaccctatactccaggacacagacccctcgtgcagagttgaaagaaaagttcaccgcattttgcaaggcacagggttttacagaggataccattgtgtttttgccccagaccgacaaatgcatgaccgaacagtag

SEQ ID NO: 236389 - DNA, 588 bp, synthetic construct
  misc_feature 1..588: note = Description of Artificial Sequence: Synthetic coding sequence
  source 1..588: mol_type = other DNA
atggccacacatcatactttgtggatgggactggcattgttgggggtgctgggcgacctccaggctgcacctgaagctcaggtctcggtccagcccaattttcagcaggacaaatttcttgggcgttggttttcggctggactagcttctaatagtagctggctaagggagaaaaaggcagcacttagtatgtgcaagagcgttgtggcccctgcgaccgatgggggactgaatctcacctccacgtttttgagaaagaatcagtgtgaaacgcgcacaatgctcctccagcctgccggaagtctcgggtcttactcctatagatcaccgcgtgaatggggtctgcatcgaccccctggacccagcttaggcgcaactctggcaggcaccaccctcggtcagccgcctgccgcagaaattcacggggtcggcgactggggctcaacgtattccgtgtctgtggtagaaacggattacgatcagtacgccctgctgtattctcaagggtccaagggacctggcgaggatttccgcatggccacattgtattctcggacccagacaccccgagctgagctgaaggagtag

SEQ ID NO: 236390 - DNA, 573 bp, synthetic construct
  misc_feature 1..573: note = Description of Artificial Sequence: Synthetic coding sequence
  source 1..573: mol_type = other DNA
atggccacacaccatactttgtggatgggcttggcattgctgggcgttctcggggatctgcaggcagcgcctgaagcccaggtgtccgtccaacccaacttccagcaggataaattcctcggcagatggttctctgccggtctggcaagtaacagttcttggcttcgggaaaaaaaggcggctctttcaatgtgcaagtcagttgttgcacctgccaccgacgggggtctcaatctaacatcaacatttctccggaaaaaccagtgtgaaacaagaaccatgctcctccaaccagcaggatcactgggttcatacagttataggtctccccattggggttctacttactctgtctccgtggtggaaacagactacgaccagtatgccctactttatagccaaggttctaagggcccaggagaagactttagaatggcgacattatattctaggacgcagacaccacgcgcagagctgaaagaaaaattcactgccttttgcaaggcacaaggctttactgaagacactattgtcttcctgcctcaaaccgacaaatgtatgaccgagcagtag

SEQ ID NO: 236391 - DNA, 1209 bp, synthetic construct
  misc_feature 1..1209: note = Description of Artificial Sequence: Synthetic coding sequence
  source 1..1209: mol_type = other DNA
atgtccccctgtggaccgctcaacttgtctcttgcaggggaggccaccacttgtgctgcaccctgggtccccaatacgtcggcagtgcctcccagcggcgcatcacctgcgttacccatatttagcatgacgttgggtgccgtgtctaatctgctggccctagctctgctggctcaggccgcaggtaggctgcgtcggagaaggtccgctgctacctttctcttattcgtcgcttccctgctagcgactgacttggcgggtcacgtgataccgggagcactagtgctgcgcctgtatacagccggacgtgctcccgctggaggggcttgccatttcctgggtgggtgtatggtgttctttggactgtgtcctctgctcctcggatgtggcatggccgtggagaggtgcgtgggagtcactaggcctctgctgcacgctgccagggtcagtgtcgccagggctagactcgccctggccgctgtggctgctgtggcactggccgtggctctgcttcccttggccagagtgggcagatacgagcttcaatatcccggaacatggtgttttatcggcctgggccctcctgggggatggcgccaggcacttctcgctggcctcttcgcttccctcgggttggtggctctgctcgctgcgcttgtctgtaatacactgagcggtctcgcacttctacgagccaggtggaggcgtcgcagcaggcgccctcctcccgcttccggccctgactctaggcgcagatggggcgctcacggccctcgctccgcctccgcatctagtgcaagcagcatcgcctctgcctcaactttttttggaggatccagatctagcggaagcgctcgcagagccagagcgcatgacgttgaaatggtgggtcagctggtaggtatcatggtggtgagctgcatctgttggtcgcctatgctggttcttgtcgccctggccgtcgggggttggtcctctacttctttgcaacgtccactctttctcgctgtgcggttagcttcatggaaccagatactggacccgtgggtgtacatactccttaggcaagcggtgctgaggcagttgctcagactgctccctccacgggcaggcgcaaaaggcggacccgctggactaggcctgactcccagcgcctgggaggcgagtagtctgcgctcttcccggcacagtggccttagccacttctag

SEQ ID NO: 236392 - DNA, 1077 bp, synthetic construct
  misc_feature 1..1077: note = Description of Artificial Sequence: Synthetic coding sequence
  source 1..1077: mol_type = other DNA
atgggaaatgcatcaaacgatagtcaatccgaagactgcgaaaccagacagtggttgccaccgggagaatctccggctatttcatccgtaatgttctcagccggagtgctggggaatctaatcgcattggccctcctggcccgaaggtggagaggcgatgtcggctgctccgctggtcggagatcctcgctttctctgtttcatgtgttggttactgagcttgtctttactgacctgctgggcacctgtcttatttctccagttgtcttggcttcctacgccaggaatcaaacgctggtggccctagcgcctgagagtagggcctgtacgtatttcgccttcgctatgacgttcttcagcttggcaacgatgctgatgctgtttgccatggcactggaacgttacctgtctattgggcacccctatttctatcagaggagggtttctcgctcaggcggattggccgttctgcctgttatttacgctgtttcactgttgttctgtagcttaccactgcttgactacggccagtatgtacagtactgtcccggtacatggtgtttcattaggcatgggaggactgcatacctgcagctgtatgccaccttgctcttactcctaattgtgtcagtgctggcctgtaacttctctgtcattttgaatctgattcggatgcatcgtcgaagccggaggtcccgctgtggtccctccctaggcagcgggagggggggaccaggcgcacgtcgcagaggggagagggtaagtatggcagaagaaaccgatcacctgattctccttgccatcatgaccatcacatttgcggtctgcagcctgccctttaccatctttgcttatatgaacgagacctcttcgcgcaaggagaaatgggacttacaggccctgcggttcctaagcattaactctattattgatccatgggtgtttgctatcctcagaccccctgtgttaagattaatgcggtcagtcctgtgttgtaggattagcctccgaacccaagatgcgacccagactagctgtagcacacaatcagacgcctcaaagcaagctgacctgtag

SEQ ID NO: 236393 - DNA, 1173 bp, synthetic construct
  misc_feature 1..1173: note = Description of Artificial Sequence: Synthetic coding sequence
  source 1..1173: mol_type = other DNA
atgaaggagacacgagggtacggaggtgatgcgcctttttgtacacggctgaaccattcatacactgggatgtgggccccagagcggagtgcagaagctcgcggaaaccttacacgaccgcctggatctggggaggattgcgggagtgtctcagtcgctttccccatcacaatgttgctcacaggattcgtgggcaatgcattggctatgctgctcgtaagcagatcatatcggagacgggagtccaaacggaaaaaatccttcctcctttgtattggttggctggcgctgacagacctggtaggacagctgctaaccacacctgtggttatcgtagtctacctaagcaaacagcgatgggagcatatcgacccatctggacgactgtgcacattctttggactcacgatgactgtgtttgggttgagctcattgtttatcgccagtgccatggcagtggagcgcgctctggccattagggctccccactggtatgcatcccatatgaagacccgagctactcgggcagtgctcctgggtgtctggctggcggtgctggcgttcgcgctgctccctgtcttaggcgtgggtcagtatacagtccagtggccagggacatggtgttttatcagcacgggacgcggaggaaacggcacaagctccagtcataactggggaaacttatttttcgcatctgcatttgccttcctgggccttctcgcgctcaccgttactttctcctgtaacctggccactataaaggcgctcgtctcacgctgccgcgctaaagcaaccgctagccaatcatccgcgcaatgggggcgtataacaacagagacggcaattcagctgatgggcatcatgtgtgttctgagcgtgtgttggagtccccttctcattatgatgctcaaaatgatcttcaaccaaacctcggtggaacactgtaaaacacacacagagaagcagaaggagtgtaattttttcttaatcgcagtaagattagcgtcactcaatcagattctggatccctgggtctatctgctcctacgcaagatactactgaggaagttttgccagatcagataccatacgaataattatgcttctagttccacaagtctgccgtgccagtgtagttcaacactcatgtggtcagaccacttggaaagatag

SEQ ID NO: 236394 - DNA, 1260 bp, synthetic construct
  misc_feature 1..1260: note = Description of Artificial Sequence: Synthetic coding sequence
  source 1..1260: mol_type = other DNA
atgaaagagacccggggatacggcggtgacgcccctttttgcacacgactcaatcacagttacaccggtatgtgggcgccagagaggagcgctgaagcacgcggaaacctcacaaggccccctggcagcggggaggactgcggatcagtcagtgtagcgttcccgattactatgctgttaacaggtttcgtgggcaatgcactggcaatgttgcttgtatcaaggtcctaccgaaggcgggagagcaagcgaaaaaaaagttttctgctatgcatcggatggttggcacttactgatctggttggacagcttcttaccacgcctgtggtgatagtggtttacctctctaaacagcgttgggaacatatcgatccctcagggagactatgcaccttcttcggtctgacgatgacggtgtttggattgagtagcctttttattgcctccgctatggctgtcgaacgggcacttgccatccgggctccacactggtatgccagccacatgaaaacgagggcaacccgagcggtcttgttgggcgtctggctggctgtgcttgcttttgcattgctacctgtcctgggggtcggacagtacactgtccagtggcccggtacttggtgttttatttctactgggcgtggtggcaatggaacgagttcctcccataattggggaaatctgttttttgcctccgccttcgcatttttgggactgttggctctgactgtcactttttcctgcaacttggccacaataaaggctctcgtttcgcggtgccgcgctaaagccaccgcaagccagtcctctgcccagtggggcagaatcacaactgaaaccgcgatccaactcatggggattatgtgtgtgttatcagtgtgctggtccccattactgattatgatgctgaagatgatcttcaatcaaacgagcgtggagcactgcaagacacacacggaaaaacagaaagaatgcaacttcttcttgatagctgttcgtttagcatcactcaaccagatactcgatccatgggtatatctcctcctgcgcaagatcctcctgagaaagttttgtcaagtggctaacgccgtctcatcctgtagcaatgatggtcagaaggggcagccaatcagtctcagtaacgaaattatccagaccgaggctatccggtaccacactaacaattatgcatcaagctcaacaagccttccatgccaatgcagcagcactctgatgtggagtgaccatctggaacggtag

SEQ ID NO: 236395 - DNA, 1290 bp, synthetic construct
  misc_feature 1..1290: note = Description of Artificial Sequence: Synthetic coding sequence
  source 1..1290: mol_type = other DNA
atgaaagaaactcggggatacggcggagatgctcccttctgcacccggctcaatcattcttacactgggatgtgggccccagagcgctcagctgaggccagagggaatctgacaagacctccaggcagtggggaggattgtgggtcagtgagcgtggcctttcctattaccatgctgctgactggcttcgttggcaacgctctggcgatgctgctggtgtcccgcagctatagacggagagaatcgaaacgcaaaaaatcctttctgttgtgcatcggctggctggctttgacagacctggttggccagctcctcaccacgcccgtcgttatcgtagtgtacctctcaaagcagaggtgggaacacatcgacccctcagggagactatgcacttttttcggactgacgatgactgtgtttggcctctccagtttattcatcgccagtgcaatggcagtggaaagagcccttgccattcgggctccccattggtacgcctcacacatgaagaccagggcaactcgagccgtgctattaggggtgtggctggctgtgctggcctttgctttactgccagtgctcggcgtgggccagtacactgtacagtggcctggcacgtggtgtttcattagtacaggcaggggcggaaatggcaccagcagttctcataactggggtaatctctttttcgcttcggcctttgcgtttctcggcctattagcattaaccgttacattcagttgtaacctagccacaatcaaggctctggtcagtaggtgccgcgctaaagctacggcctcacagtcctccgcccaatgggggcgtattaccacagagaccgccatccagttgatgggcattatgtgtgtcctatcggtttgttggtcaccattgctgattatgatgctgaaaatgatctttaaccagacgtctgtagagcattgcaagacacacaccgaaaaacagaaggaatgcaatttcttcttgatcgctgtacggctggcttcactaaaccagattttggatccatgggtctacttgctgctgagaaaaatcttgctccggaaattctgccagatgcggaaaagacgcctgagggagcagttttggcgcccagcgagctccggctccgggtgccagcaaattaggtgtctgatggagagctgttcgttaactcagactggagtgcagtggtcagatttccgctcactgcagccctcacctcctcccctgacagccattttcgcatcctgggtgcaggtcattctgcttccacaaccgcctaagtag

SEQ ID NO: 236396 - DNA, 1257 bp, synthetic construct
  misc_feature 1..1257: note = Description of Artificial Sequence: Synthetic coding sequence
  source 1..1257: mol_type = other DNA
atgaaggagactcgcggttacggaggagacgcacccttttgcaccagattaaatcactcttacaccggcatgtgggcccctgagcggagtgccgaggctcggggtaatctaaccaggcctccaggatcaggcgaggattgcggtagcgtctctgttgctttcccgatcactatgctgttaactggttttgtgggcaacgctcttgcaatgctgctcgttagcaggtcctacaggcggagagaaagcaagcggaagaaatcatttctcctctgcattggatggctggccctgactgacttggtcggccaactgctgactacgcccgtggtgattgtggtctatctttctaaacaacggtgggaacacatcgacccttcaggcaggctctgcacgtttttcgggctgactatgacagtgtttggactatcctccttgttcatagcctctgccatggcagtcgagcgtgcgctcgcaatccgggctcctcactggtacgcgagccacatgaaaacacgcgctacgagagccgtcttgcttggtgtctggcttgctgtgctggctttcgcactgctgcccgtgctgggcgttggacagtacacagtgcagtggcccggtacctggtgctttatttccacaggccgtggaggaaacggaaccagttcctctcataattggggcaacttgttctttgcaagcgcttttgcctttctgggactgttagctctaaccgtcactttttcgtgtaatcttgcaactattaaagccctggtctcacggtgccgggcaaaggctactgctagtcaaagttccgcccagtggggtagaataactacagaaactgctattcagctcatgggtatcatgtgtgtcctgtccgtgtgctggagtccattgctgataatgatgctgaagatgatctttaatcaaacgtcggtagaacattgcaagacacatacagaaaaacagaaagagtgcaactttttccttatcgcagtgagactggcttccttgaaccaaattctcgatccctgggtgtacctgttactgcgcaaaatcttattaaggaagttttgccagatgcgcaagcgaaggctgcgagagcagctgatatgctcactacagaactctcagatccaacgagcaactgcccattgtggtcaggttcagacttatcgggtactcaatcgcgaggaaatggaagttctcgtgtccagcattaacgtgtatactcggatttctactgtaaaaaccgaatag

SEQ ID NO: 236397 - DNA, 1209 bp, synthetic construct
  misc_feature 1..1209: note = Description of Artificial Sequence: Synthetic coding sequence
  source 1..1209: mol_type = other DNA
atgaaggaaacccggggatacgggggagatgcacccttctgtactaggctgaatcactcctacaccgggatgtgggccccagaaagatcagccgaagctagggggaatctgaccagaccaccgggtagtggcgaagactgcggctccgtttccgtggcctttcctataaccatgcttctcacaggctttgtcggtaacgcactggccatgttgctggtgtctcgttcgtaccgaaggcgcgaaagcaagcggaagaaatcctttttactctgcatcggctggctagccttaactgacctggtgggtcagctactgaccacacctgtggtgatcgtcgtgtacctgtctaagcagagatgggagcatattgacccatctgggcgactctgcaccttctttggtctcaccatgacggtctttggtttgtcatcgctgtttatagcctcggctatggctgtggagcgcgcactcgccataagagcccctcactggtatgcctctcatatgaagacgcgggcaacacgggctgtgttgctgggagtatggctggccgtgctggccttcgctctcctgccggtgctgggagtggggcagtataccgtgcagtggcctgggacgtggtgtttcattagtactggtagaggcggtaacggcactagcagctcccataactgggggaacttgtttttcgccagtgcattcgcattcctggggctgcttgccctcactgttaccttttcctgcaacctcgccaccatcaaggcactggtcagtcggtgtcgggctaaggccaccgcttcccaatccagtgctcagtggggcagaatcacgacggaaaccgctattcagcttatgggtatcatgtgcgtgctctcagtttgttggtctccactccttattatgatgctgaagatgatcttcaaccagacgagcgtagagcattgtaaaacccatactgagaagcagaaggaatgtaattttttcctgatcgccgtacggcttgcctctctgaatcagattctggacccttgggtctatctgctactgagaaaaatcctactccggaagttctgccagatgagaaagcggcgactccgtgaacaggaaatgggccctgacggcagatgtttttgtcacgcttggaggcaagtgcctcgaacatggtgtagttctcacgaccgggaaccttgttcagtgcagctttcttag

SEQ ID NO: 236398 - DNA, 1167 bp, synthetic construct
  misc_feature 1..1167: note = Description of Artificial Sequence: Synthetic coding sequence
  source 1..1167: mol_type = other DNA
atgaaagagacaagaggctacggtggggacgccccattctgcacgaggctgaaccactcatataccgggatgtgggccccagaacggtcggccgaggccaggggtaacctgacacgtcctcctggcagtggcgaggattgtggttccgtgagtgtggcgttcccgatcacaatgctcctgacaggctttgtgggtaacgccctagccatgctacttgtgagtcggtcctaccgacgtcgcgaaagcaagcggaagaagagcttcctgctgtgtattggctggctggcactgacggatctggtgggccagctactgactacccctgtggtgattgtggtgtatctgagcaagcagagatgggaacatattgatccctccggacgcctctgcaccttttttggcttaaccatgacggtattcggactctcttctctgtttatcgcctcagccatggcggtcgaacgcgctctggcaatacgggctccacactggtacgcctcgcatatgaagacccgagccactcgtgctgtgctcctgggagtctggctggcagtgctagcattcgccctattgcccgttctgggcgtaggacagtacacagttcagtggcccggaacgtggtgcttcatcagcacagggaggggcggtaacggtacttcttcctctcataattggggaaacctcttcttcgcctccgccttcgccttcctcggtctcctggccttgaccgtcactttctcctgcaacctggccaccatcaaggcccttgtgagccggtgccgggcaaaggccaccgcttctcagtctagcgctcagtggggtaggattactacagagactgccattcagctgatgggcatcatgtgcgtactgagcgtgtgttggtcaccactgctgattatgatgttgaagatgatttttaatcagacctccgtagaacattgcaagacacacacagagaaacaaaaggaatgcaacttcttcctcatcgccgtgaggcttgccagcctcaaccaaatcctggacccttgggtgtatctgttgctccgcaagatcctgctgcgcaaattttgtcaagtggcaaatgctgtgtcctcctgctccaacgacggacaaaaggggcagcctatttccctgtcaaacgagatcatccagaccgaagcttag

SEQ ID NO: 236399 - DNA, 1173 bp, synthetic construct
  misc_feature 1..1173: note = Description of Artificial Sequence: Synthetic coding sequence
  source 1..1173: mol_type = other DNA
atgaaagaaactagaggctacggcggtgatgcacccttctgtacaagacttaatcatagctacacggggatgtgggctcctgagcgcagcgccgaggcgaggggaaatctgacccgccctcccggatctggcgaggattgcggcagtgtgtcagtggcctttcccatcaccatgttgctgacgggttttgtgggaaatgcactagccatgctcctagtatctaggagttacaggcgtcgtgagagtaaaaggaaaaaatcatttcttctctgcatcgggtggctggctcttactgatctggtggggcaactcctgaccaccccggtcgtgattgtggtttacttgtcaaaacaacggtgggaacacatcgatcccagtgggcgactctgtacattttttggactgaccatgactgtgtttgggctgtcgtcccttttcatcgccagtgctatggccgtggagcgggcactggccattcgcgcaccacattggtatgctagtcacatgaagacacgagcaacccgtgccgtgctgctgggcgtgtggctagccgttctggcctttgctctcctaccggtgctgggagtcgggcagtacaccgtgcaatggcctggcacttggtgcttcatttccactggccgaggcggaaatggcacctccagttcccacaactggggcaatctgttcttcgctagtgctttcgcgttcctgggattgctggctctgactgttactttttcctgtaacctggccacgattaaagctctggtgagccgctgccgggcaaaagctacagcttcacagagttctgctcagtggggcagaattaccacagaaacagccatccaactgatgggcattatgtgtgttctttctgtctgttggagccctctgctcatcatgatgctcaaaatgatttttaaccagacatccgtggagcactgcaaaacacataccgagaaacagaaggaatgcaacttctttttgatcgccgtccgtctggcctccctgaaccaaatactcgatccttgggtatacctgctgcttaggaagatcctgctgcgtaagttttgtcagatccgataccacacgaacaactacgcctcatcgtctacgagcctcccctgccagtgcagctctacgcttatgtggagcgaccacctagaacgctag

SEQ ID NO: 236400 - DNA, 1098 bp, synthetic construct
  misc_feature 1..1098: note = Description of Artificial Sequence: Synthetic coding sequence
  source 1..1098: mol_type = other DNA
atgaaggaaactcgtgggtacggcggagatgcacctttctgtactaggctgaaccattcgtacaccgggatgtgggcgccagagcgctcggctgaggcaagaggcaatctcacccgccctccagggtcgggcgaagattgcggatccgtgtccgtcgctttcccgataacaatgctgctaactgggtttgtggggaacgccctcgctatgctcctggtatctcgctcatacagacgcagagagagtaagaggaagaagagcttccttctctgtatcggctggttggcccttacggacctggttggacagcttctgactacgccagttgtaatcgtcgtgtatctgtccaagcagcgttgggagcacatcgacccaagcggtcggctgtgcacatttttcggtctgactatgactgttttcggactctccagtctattcattgcctccgccatggccgtagagcgtgctctggcaattagggcaccccactggtatgcgtcccacatgaagaccagggcaactagagccgtgctccttggagtgtggttggcagtgcttgctttcgccctgttgcccgtcctgggggtgggacagtacactgtgcaatggccagggacttggtgtttcatttcaacgggaagggggggaaatggtacttccagcagtcacaactgggggaatctcttcttcgcatcagccttcgcatttctggggctccttgccctcaccgttacattttcttgcaatcttgcaacaatcaaagccttagtttcacgatgccgtgctaaggcaacagcatcgcagtccagtgcccagtggggccgaatcaccacggaaaccgccattcagcttatgggaattatgtgtgtactgtcggtgtgttggtcaccactgcttatcatgatgctgaagatgatctttaaccagaccagcgtggagcattgcaaaacccacaccgagaagcagaaagaatgtaacttttttttgattgcagtgagactcgctagcctcaatcagatcctcgatccctgggtctacttactgctgcggaagatccttctgaggaaattctgtcaggaggagttctgggggaactag

SEQ ID NO: 236401 - DNA, 1365 bp, synthetic construct
  misc_feature 1..1365: note = Description of Artificial Sequence: Synthetic coding sequence
  source 1..1365: mol_type = other DNA
atgaaggaaacgcgtgggtatggcggagatgcccctttctgcactcgcctaaatcatagttacacgggtatgtgggctcctgagagatccgctgaagcccgagggaatctaacccggcctcccggaagcggggaagattgcggctctgtcagtgttgcgtttcccatcaccatgctactcacaggtttcgtcggaaatgctcttgcaatgctgctcgtctctcgcagttatcggaggagagagagcaagaggaagaagagtttcctgttgtgcatcggatggttagccctgaccgatctagttggccagttgttaaccactcccgttgtgatcgtagtgtacctgagtaaacagcggtgggagcatatagacccatccggtcgcttgtgcacgttttttggactaacaatgacagtatttgggctgtcgagcctctttatagcatcagcaatggcagtcgagagagctctggccattcgggctccccattggtacgcctcccatatgaaaacaagggccaccagggccgtgctgctgggcgtctggctcgccgtccttgcctttgccctgctgccggtgctgggtgttggccagtatacggtgcagtggccaggcacctggtgctttataagcacagggaggggcggaaacggcacaagctcctctcacaactggggtaatcttttcttcgcatcggctttcgcatttttgggacttctggcccttacagtgacatttagctgcaaccttgcgactataaaggcattggtgtcccgctgtagagccaaggcaactgcatcccaaagtagcgcccagtgggggcgaatcacaaccgagacagccatccagctcatgggaatcatgtgcgtgcttagcgtctgttggtctccactgttaattatgatgctgaaaatgatattcaaccagacaagcgtcgagcattgtaaaacgcacaccgaaaaacagaaagagtgtaactttttcctcatcgccgtgcggcttgccagtctaaaccagattctggatccatgggtttatttactcttacgcaagattttgctccgaaaattttgtcaggttgctaatgccgtgagtagctgctccaacgatggccaaaagggacagccaataagcctgtcgaacgagattatccagactgaggcaatgagaaagcgcagattgcgggagcaggcccctctcctccctacttcaaccgtgattgatcctagcaggttttgcgcacagccattccgctggtttctggatcttagttttcctgccatgtcgagtagccatccccagctgccactcaccttggctagctttaagctcctgagggagccttgttcagtgcaactgtcctag

SEQ ID NO: 236402 - DNA, 1173 bp, synthetic construct
  misc_feature 1..1173: note = Description of Artificial Sequence: Synthetic coding sequence
  source 1..1173: mol_type = other DNA
atgaaagaaacacgcggttatggaggagacgcaccgttctgcactagactcaatcacagctacactggtatgtgggctcctgagcgatccgccgaagctcggggtaacctgacacgaccacccggtagcggggaggattgtggctccgtctctgtggccttccctatcactatgcttctgacgggatttgttggcaatgctcttgcaatgctcttggtctctcgatcgtatcgcagacgggagagtaagcgcaagaagtcctttcttctgtgtataggatggcttgcgctgacggatctcgtggggcagctgctgaccactcccgtcgtaatcgttgtctatctatcaaagcagcgatgggagcacattgaccccagtgggagactatgtaccttcttcggcctgaccatgactgtgttcgggctgagctcactgtttattgcctctgccatggccgtcgagagagccttagccattcgggcaccacactggtatgcgagtcatatgaaaacaagagcaactcgcgcagtcttgctgggggtttggctggcggtgctggcatttgccctgctccctgtcctgggggtagggcagtacacggtgcaatggccaggtacctggtgctttatttctaccggacggggtggcaatggcaccagcagctcccacaactggggtaacttattttttgcttcagcttttgccttcttgggactgcttgccctgacagtgacgttttcatgtaacctggcgacaattaaagctttggtttccagatgccgcgctaaggcaacggcctcgcagtcatccgcacagtgggggcgaatcacaactgagacagcgatccagctgatggggatcatgtgcgtcttgtctgtgtgctggtcaccactgctcatcatgatgctaaagatgatttttaaccagacgtcagtcgagcattgcaaaacccataccgagaaacagaaggaatgcaacttttttctcatcgccgtgaggcttgccagtctgaatcagatcctcgatccgtgggtatacctgctgcttagaaaaatcctgttaaggaagttttgccagattcggtatcacacaaacaactacgcttcctccagtacctctctaccttgccaatgctccagcacccttatgtggagcgaccatctggaaaggtag

SEQ ID NO: 236403 - DNA, 1125 bp, synthetic construct
  misc_feature 1..1125: note = Description of Artificial Sequence: Synthetic coding sequence
  source 1..1125: mol_type = other DNA
atgaaagaaacccggggttatggaggggatgcgcctttttgcactcgcttaaatcactcctacacagggatgtgggcccctgaaagatctgctgaggcccgaggcaacctcacccgccctcctggctcgggcgaagattgcggctccgtgagtgtggccttcccaattacgatgttactcacaggattcgtcggtaacgctttagcaatgctgttagtttcccgcagctacagacgcagagaatcgaagaggaagaagtcatttctgctgtgcattggatggctggcattgactgacctggtcgggcagcttttgacaacccctgtagttatcgtggtgtatctgtcgaagcagagatgggaacatatcgatccctcaggacgcctatgcaccttttttggactaaccatgacagtgttcggtctgtcttctttattcattgcatctgctatggcagtggaaagggctttggccatccgcgctcctcactggtacgcaagccatatgaaaaccagagcgactagggcggtgttattaggcgtgtggttagctgtcctcgcttttgctctgctccccgtattaggggtcggccagtataccgtgcagtggcctggaacttggtgctttattagcacaggcagagggggtaacggcacatcgagcagccacaattggggcaacttattctttgcctccgccttcgcctttctgggattgctggctctcactgtgacattctcctgcaatctggcaactattaaggcactggtctctcggtgtcgggctaaggccaccgcctcacaaagctcagcccagtgggggagaatcaccaccgagacagccattcagctgatgggtatcatgtgtgtccttagcgtctgttggtcccctctgctgattatgatgctcaaaatgatctttaatcagaccagtgtagagcattgcaagacccacaccgagaaacagaaggaatgtaacttttttctgatcgccgttcggcttgccagtctgaaccagatcttggatccatgggtgtacctgcttctgagaaagatccttctgcgtaagttttgtcagatgcgtaagaggaggctccgggagcaggaggagttctggggaaattag

SEQ ID NO: 236404 - DNA, 1467 bp, synthetic construct
  misc_feature 1..1467: note = Description of Artificial Sequence: Synthetic coding sequence
  source 1..1467: mol_type = other DNA
atgtccacccccggagtaaattcttcggcaagtctgtcgcccgaccggcttaattccccagttactattcccgctgtgatgtttattttcggagtcgtcggcaacctggtagctattgtggtcctctgcaagtcaaggaaggagcagaaagagaccaccttttatactctggtctgcgggttagcggtcactgatctgctggggaccctcttagttagcccggtgacaatagcaacttacatgaagggacagtggccaggaggacagccgctgtgcgagtattcaacttttatcctcctgttcttctcgcttagtggtctcagtataatctgcgccatgtctgttgagagatacctggcaatcaaccatgcctacttctactcacattatgtcgataaaagactcgctggactaactctttttgctgtatatgcatctaatgtactattctgtgcccttccaaacatgggactcgggagcagccgtctgcagtaccctgatacctggtgcttcatcgactggacgaccaacgtaacggcccacgctgcatactcttacatgtatgctggattttcatcattcctgatcctggcaacagtgctatgcaacgtcctagtgtgtggcgcactccttaggatgcacagacagtttatgcggaggacctccctggggaccgagcagcaccatgctgccgcagccgctagcgttgcctctcggggtcatcctgcagccagtccagccttgccacggttgagcgattttaggagaagacggtccttccgaagaattgctggagcagaaatccagatggtgatattacttatcgcgacaagtctcgttgttcttatatgcagcatccccttagtcgtacgggtgttcgtgaaccagttgtaccagccttctctcgaacgcgaggtctctaagaaccctgacctacaagctattcgtattgcatctgtaaaccctattttggacccctggatttatattctgttaagaaaaaccgtgctatccaaggcgatcgaaaaaatcaaatgcctgttttgtagaattgggggatctcgaagagaaaggtccgggcagcactgttctgactcacagagaaccagtagcgccatgtcgggccactcccgttccttcatcagcagagagctgaaggaaatcagttcaaccagtcagacactgctcccagatctttccctccccgacctaagtgagaatggtctcggcggtcgcaatctgttgccaggcgtgcccggaatgggactggctcaggaagatacaacctcattaaggacactgaggatctccgagacgtccgattcatcccagggccaggatagtgaatcggtcctgttggtggatgaggccggtgggtcgggtagagctgggccagctccaaaaggatctagtctccaggtgactttcccgagtgagacgctcaatctttccgagaagtgcatctag

SEQ ID NO: 236405 - DNA, 459 bp, synthetic construct
  misc_feature 1..459: note = Description of Artificial Sequence: Synthetic coding sequence
  source 1..459: mol_type = other DNA
atgcccgctcatagcctggtcatgagtagtcccgctctgccagcgtttctgctctgtagcacactccttgtgattaagatgtacgtcgtggctattattactggccaggtccgtcttagaaaaaaggcatttgcaaatcccgaggacgccctacggcatggcggaccccaatactgtcgtagtgatcctgatgtggaacgctgtcttagggcgcaccgcaacgatatggaaactatttaccctttcctcttccttgggttcgtgtattctttcctcggccctaaccctttcgtggcatggatgcattttctcgtgtttttagtaggacgggtggctcataccgtcgcatatctcgggaaattaagggcccctattcgcagcgtgacatacacactcgctcaactgccctgtgcctccatggctctgcaaatattatgggaagcagctcgacacctgtag

SEQ ID NO: 236406 - DNA, 561 bp, synthetic construct
  misc_feature 1..561: note = Description of Artificial Sequence: Synthetic coding sequence
  source 1..561: mol_type = other DNA
atgaaagccgtgaatgaacagggaaaggaggtaaccgaattcggaaacaaatattggctcatgctaaacgaaaaggaggcacagcaagtttacgggggaaaggaggcaaggactgaggagatgaagtggcgtcagtgggcggatgactggctcgtgcacttgattagccccaatgtctacaggacccctaccgaagccctggcaagctttgactatattgtccgggaaggtaagttcggtgcagtggaaggagctgtggccaaatacatgggagcagctgccatgtacctgatctcaaagcgccttaaaagcagacatcgcctgcaagacaatgtgcgggaggatctgtacgaggccgctgataagtgggttgccgctgtgggtaaagacaggcctttcatggggggacagaagcccaacctggctgacctcgccgtttatggggtgctgcgggtgatggaaggtctggacgcttttgacgatctgatgcaacatacacacattcagccgtggtacctgcgggtggaacgggctatcaccgaggcttctccagcacattag

SEQ ID NO: 236407 - DNA, 1134 bp, synthetic construct
  misc_feature 1..1134: note = Description of Artificial Sequence: Synthetic coding sequence
  source 1..1134: mol_type = other DNA
atggatcctgcagctcgggtagtgcgagccctgtggcccggtggatgcgcccttgcctggcgtctcgggggtaggcctcagccgctgctccccacccagtctagggctggcttcgcaggtgctgctggaggtcctagtccagttgcagccgcaagaaaagggagcccaaggctgctgggcgctgcagccctagcgcttggaggggcacttggcctgtatcataccgctcggtggcaccttagagcgcaggacctccatgcagagcgctccgcagcacagttgagcctgtcctcgcggctccaactgactctttaccagtataagacatgcccattttgctcaaaagtgagggcgtttctcgacttccacgccctcccctatcaggtagttgaggtgaaccccgtgcggagagccgagattaagttttctagttacagaaaggtgcccatcttggtcgcgcaggaaggtgagagcagccagcagctgaatgatagcagcgtcatcatctccgctttaaagacgtatctggtatcaggtcagcccttagaagagatcatcacttactaccccgcaatgaaggcagtgaatgagcaaggaaaggaagtgactgagttcggtaacaagtattggttaatgctgaacgagaaagaggctcaacaggtgtatggcggaaaagaggctcggaccgaagaaatgaaatggagacaatgggcggacgattggttggtgcatctgatctctcccaacgtctaccgaacacctacagaggccttggcgtccttcgactatattgtcagagaagggaagttcggagccgtggaaggtgccgtggctaaatacatgggggcagctgcgatgtatctgatctcgaagcgcctgaagtctaggcataggcttcaggacaacgtccgcgaggacctgtacgaggcggcagataagtgggttgcagccgtaggcaaggatcggccttttatgggcggtcagaaacctaacctcgccgacctggcggtgtatggggttctccgggttatggaagggcttgacgcctttgatgatctcatgcagcacacccacattcaaccttggtatctccgcgtagagagggctatcacggaggctagccccgcacactag

SEQ ID NO: 236408 - DNA, 894 bp, synthetic construct
  misc_feature 1..894: note = Description of Artificial Sequence: Synthetic coding sequence
  source 1..894: mol_type = other DNA
atgagcatgaacaacagcaagcagctggtgtctcccgctgctgccctccttagtaatactacttgccagactgaaaatcgactctcagtattcttcagcgtgatcttcatgactgtgggtatcctgagcaatagtttagccatcgctatcctgatgaaagcctatcagcgcttccggcagaaatctaaggcatccttcctcctcctcgcgagcggactggtgataactgacttcttcggccacctcataaacggcgctatcgccgtcttcgtctatgcgtccgataaggagtggatcaggttcgatcaatcaaacgtgctgtgttccatctttgggatctgtatggtctttagcgggctttgtcctcttctgctcgggagcgtgatggccattgagcgctgtatcggcgtgactaaacccatttttcacagtactaagataacgagcaagcacgtaaagatgatgctgtctggcgtgtgcctgtttgccgtgttcatcgcattgctccctatcctgggtcatcgggactacaagatccaggcttcaaggacttggtgcttttataatacagaagatataaaggattgggaggatcggttttacctccttttattttctttcctgggactcttggctcttggagtatctttactgtgtaacgcaattactggcatcactcttctacgcgtcaagttcaagtctcagcagcacaggcagggaaggagccatcacttggaaatggtaattcaactcctggcaattatgtgcgtaagttgcatttgttggtcccccttccttgggtaccggatcatcctgaatgggaaggagaagtacaaggtatacgaagagcagagtgacttcttgcatcgactgcagtggcctaccttggagtag

SEQ ID NO: 236409 - DNA, 1080 bp, synthetic construct
  misc_feature 1..1080: note = Description of Artificial Sequence: Synthetic coding sequence
  source 1..1080: mol_type = other DNA
atgagtatgaacaacagcaaacagctagtctcaccagctgcagctctcttgtctaacaccacctgccaaactgagaaccgtctgagcgtgttcttcagtgtgatatttatgactgtcgggattctctccaactcccttgctatcgcgatcctgatgaaagcttaccagagattccggcagaagagtaaggcttctttccttttgctcgcaagcggactcgtaatcacagacttttttggacatctcattaacggtgcaatcgccgtctttgtgtatgcatccgataaggagtggattagattcgatcagagtaatgtcttatgctctatcttcgggatatgtatggtcttttccgggttatgtcccctactcctggggagtgtgatggcaatcgaaagatgcataggagtgactaaaccaatcttccactccaccaagatcacctctaagcacgtgaaaatgatgttaagcggcgtgtgcctgttcgcggtattcattgcccttttgcctatactcggccaccgggattataaaatacaggcctccagaacatggtgtttttataacaccgaggacattaaagactgggaggatcgattttacctgctattattcagcttcctgggactattggccctcggtgtgtctctgctctgtaatgctattacaggcattacactgctgagagtaaaatttaagagccagcaacaccgccaggggagatcccatcacttggagatggttatacagttgctggcaatcatgtgcgtaagttgtatttgttggtctcctttcttggtaactatggcgaacatcgggatcaatggtaatcacagcctcgagacttgcgagactactctgtttgctctaaggatggccacctggaaccaaatactggacccgtgggtttatatactgctgcgcaaggcagttctgaagaatctttacaagttggccagccagtgttgtggcgtgcatgttatttctttacatatttgggaattatcaagcattaaaaactcgctcaaagtcgccgcaatctccgaatcccctgtggccgaaaagagcgctagcacttag

SEQ ID NO: 236410 - DNA, 1080 bp, synthetic construct
  misc_feature 1..1080: note = Description of Artificial Sequence: Synthetic coding sequence
  source 1..1080: mol_type = other DNA
atgtccatgaataattctaaacagttagtcagtcctgccgcagccttactaagtaacactacatgccagaccgagaatcggctgagcgtctttttttccgtgatctttatgacagtggggatcctctccaattcactcgcaatagcgatcttaatgaaagcctaccaacgcttcaggcaaaaatcaaaagcatcttttctactgctggcaagcggattggttattaccgattttttcggccacttgatcaatggcgcaatcgctgtctttgtctacgcctccgacaaagaatggattagattcgaccagtcaaatgtactgtgcagcattttcggcatttgtatggtgttctctggcctgtgtccactgctgctcggctctgtgatggcgattgagcgttgtattggagtaacaaagcccattttccacagtacaaaaattacgagcaaacatgtgaaaatgatgctaagcggcgtgtgcctcttcgccgtattcatcgcgctgctcccaattttggggcaccgggactacaagatccaggcttctagaacttggtgtttctacaataccgaggacatcaaggactgggaggacagattttaccttctcctgttttcattcctggggctgctggccttgggcgtgagcctgctctgtaacgccatcaccggcattacactattacgggtcaagtttaaatcacagcagcacaggcaagggcgttcccaccaccttgaaatggtgatccagctcctagccatcatgtgtgtgagctgtatttgttggtcaccattcctcgtcacaatggctaatataggcatcaacggaaaccatagtcttgaaacctgcgagactacactgttcgcgctgcggatggccacatggaatcagatcttggatccctgggtttacatcctccttcggaaggccgtcctcaaaaatttatataagctcgcatcacagtgttgtggggtgcacgtgattagtctccatatttgggaattgtcaagcatcaaaaatagcctaaaggtcgccgctatcagcgaatcaccagttgccgagaaatccgcgtcaacctag

SEQ ID NO: 236411 - DNA, 2640 bp, synthetic construct
  misc_feature 1..2640: note = Description of Artificial Sequence: Synthetic coding sequence
  source 1..2640: mol_type = other DNA
atgggcagactggccagccgcccactgcttcttgcactgctttcgctcgccctttgtcgtggccgtgtggtgagggtgccaacagctaccctggttcgagtggtgggaaccgagctggtgatcccttgcaatgtgtcggactatgacggaccatccgagcagaattttgactggagctttagcagccttggctcttcttttgtcgagctcgcttcaacctgggaggtcggattccccgctcagttgtaccaagaacgactacaacgcggtgaaatcctgctcagacgcaccgccaacgacgcagtggagctgcacattaagaacgtccaaccttctgaccagggccactacaagtgctctacaccatctacagacgctaccgtgcaaggtaactacgaggatacagtgcaggtgaaggtgctggcagactctctccacgtggggcctagtgctagaccccctccatccctctcattgagggagggtgagccatttgaactgagatgtacagctgccagcgcctctccactgcacacccacctggcactcctctgggaggtgcacagagggcctgccaggcgttctgttctcgcattgactcacgagggcagattccacccaggccttggctacgagcaacgttatcattcaggagatgtccgcttagataccgtgggctctgatgcctatcgtttgtctgtctctagagcactctccgctgatcaagggtcttaccggtgcattgtcagcgagtggatcgccgagcagggtaattggcaggagattcaggagaaggcagtggaagtcgcaactgtcgtcatccagccctccgtgctgcgagccgctgtgccaaaaaacgtatcagtcgccgaagggaaagagctggaccttacttgcaacattacgacggacagagccgatgacgtccgtcccgaggtgacttggagcttctcgcgcatgcccgactctaccttacccggtagccgtgtgctcgcgagactcgacagggacagcctggtccactcctccccacacgtggccttatctcacgtagacgccagatcctaccacttattggtgagggatgtctccaaggaaaatagtggctactattactgtcacgtgtccctgtgggcaccagggcacaatagatcatggcataaggtcgccgaagccgtttcctctcctgctggcgtcggcgttacatggctggagccagactatcaagtttatcttaacgcgagtaaagtcccaggttttgctgatgacccaaccgagctcgcctgcagagtggtggacacgaagtctggggaggcgaatgtgcggttcaccgtgtcctggtattataggatgaaccgcagaagtgataacgttgtgactagcgaacttctggctgtcatggatggtgactggacgcttaagtacggcgaacggagcaaacagagggcacaggatggcgactttatcttctccaaagagcatactgataccttcaattttaggatacagcggaccacagaggaagaccgcggaaattattattgcgtcgtgagcgcgtggaccaaacagcgaaacaatagctgggtgaaatccaaggacgtcttttctaagccagtaaatattttctgggcacttgaggatagtgtactggtcgtaaaggctagacagcctaagccattttttgcggcaggcaacactttcgagatgacatgtaaagtgtcctctaagaatataaagagcccgaggtacagcgtgctaattatggcggaaaaaccagtaggggacttaagctccccaaacgaaactaagtacattattagcctggatcaggactccgtggttaaactggagaattggacggacgcatcgcgggttgatggtgtggtactggaaaaggttcaggaggatgagtttcgctacaggatgtatcagactcaggtctccgacgccggtttataccgctgcatggttacagcttggtctcctgtgcggggatccctgtggagagaggccgcaacctcattgtctaatccaatagagattgattttcagacctccggcccaattttcaatgcctcagtccattctgatactcctagcgtgatcagaggcgaccttattaagctcttctgcatcatcaccgtggagggtgcagccctagatcctgatgatatggccttcgatgtgtcctggtttgctgtccactcattcggtctggataaggctcctgtgctcctgtccagtctcgaccgaaaggggattgtgacaacctctcgcagagactggaagtctgacctaagcctggaaagagtgtcagttctagaattccttctccaagttcatgggtctgaagatcaagactttgggaattactattgcagcgtcacaccttgggtcaaaagtcccaccggctcgtggcagaaagaagcagagattcactcaaaaccggtgttcataactgttaagatggacgttctgaacgctttcaaatacccacttctgattggcgttgggctgagcaccgtcattggtctcctctcctgtttaattgggtactgcagttcccactggtgttgcaaaaaggaggtccaggaaacaagacgtgaacggaggaggctcatgtctatggaaatggactag

SEQ ID NO: 236412 - DNA, 2217 bp, synthetic construct
  misc_feature 1..2217: note = Description of Artificial Sequence: Synthetic coding sequence
  source 1..2217: mol_type = other DNA
tccggtgccgctggcgcagggagggggggaggaggcgaggccgctggaaaggaggaggagggggaacccttcgaactgcgctgtactgcagcatctgcttccccacttcatacccacctcgctctcctatgggaagtgcaccgtggtcctgctagaaggagtgtgttagcactcacccatgagggcaggtttcatcccggactcgggtacgaacaacgataccattccggagacgtcaggctcgacaccgtcgggagcgacgcttacagactgtctgtaagccgggctctctccgctgaccaaggatcttaccggtgtatcgtttctgagtggattgctgagcagggtaattggcaggaaatccaggagaaagctgtagaagtggctaccgtggtaatccaaccttctgtgctgagggccgcagttccaaagaacgtttcggtggctgaaggaaaagaactggatctaacatgcaatatcacaactgaccgggcagatgacgtgaggcccgaggtgacatggagctttagccgtatgcccgattcaacattaccagggtctagggtgttggccagactggaccgcgatagtctggtgcatagttctccccatgtggcccttagccacgtggacgcaagaagctatcacttgctggtgagagacgtgagcaaagaaaattctggttactactactgccatgttagtctgtgggccccaggacacaaccggagctggcataaggtggctgaagctgtctcatcacctgctggtgtgggcgtgacttggctcgaacctgactaccaggtatatctgaatgcctccaaagtgccaggcttcgctgatgacccgacagagctcgcctgtcgggttgtggacacaaagagcggggaagcaaatgtgcgattcacggtgtcctggtactaccgaatgaaccggagatcggacaatgtggtaactagcgagcttctcgccgtaatggacggagactggaccctgaaatatggggagcggtccaaacagcgggcacaggacggcgactttatcttttcaaaagagcacacagacactttcaattttcggattcagaggaccaccgaggaagaccgtggtaactactattgtgtggtgagcgcctggacgaaacagcggaataattcttgggtcaagtccaaggacgtgtttagtaagcccgtaaacatcttttgggcgcttgaggacagcgtcttggtggttaaggctagacagcctaaacctttcttcgccgcagggaacacctttgagatgacttgtaaggtgtcctctaagaatataaaatctccgagatatagtgtgctgattatggctgaaaagcctgtcggcgatctgagtagtcctaatgagacgaaatacatcatttccctcgaccaagatagcgtggtgaagttagagaactggactgatgcgtcccgggtggacggcgtggtgttagagaaagtccaggaggacgaatttcgctacagaatgtaccagacccaggtctctgacgccggactgtaccggtgcatggtgaccgcttggtcccctgttagaggatccctttggagggaggccgcaacctcgctgagcaatccaatcgagatcgattttcagaccagtgggccaatctttaacgccagtgtgcactctgacaccccaagcgtgatcaggggcgatctgattaagttgttttgcataatcacggtggagggcgcagctttggacccagacgatatggcttttgacgtctcatggtttgctgtgcacagctttggattagacaaagcccctgtcctgctttcaagcctcgaccgcaaaggaattgtgaccaccagtcggagggactggaagtccgatcttagcctggagagggtgtccgtcctggagttcctgcttcaggttcatgggtctgaggatcaggacttcgggaactactattgctctgtaactccatgggtcaagtcccctactggctcttggcaaaaggaggccgagatccattccaagcctgtgttcatcaccgttaaaatggatgttctcaatgccttcaaatacccactgctgatcggtgtgggcctgtcgacagtgattggtctgctgagctgcttaatcgggtattgctcttcccactggtgctgtaaaaaagaggtgcaagagacgcgtagagagcgacgaagactgatgtcgatggaaatggactag

SEQ ID NO: 236413 - DNA, 1161 bp, synthetic construct
  misc_feature 1..1161: note = Description of Artificial Sequence: Synthetic coding sequence
  source 1..1161: mol_type = other DNA
atggcagacagttgccgcaatttaacatatgtgagaggatctgtcgggccagccacctcgacactgatgtttgtcgcaggggtcgtgggtaacggcttggccctgggcatcctctcagcacgcaggccggctaggccgagcgcattcgcggtgctggtcactggtttggctgccaccgatttacttgggaccagcttcctttctcccgctgtcttcgtcgcttacgccaggaacagcagtctgcttgggttggccaggggagggcctgctctctgcgacgcttttgctttcgctatgacattcttcgggctcgcatccatgctgattctgttcgccatggccgttgaacgttgcctggctctgagtcacccttatctctacgcccagttggatgggcctcggtgcgcacggctggcattgcctgctatctacgccttttgcgtgctcttctgcgctctcccattgctcgggctgggtcagcaccagcagtattgcccgggtagctggtgcttcttgcgcatgagatgggcgcagccagggggagccgctttcagcctggcgtacgccggtctggtggctctcttagttgcagcaattttcctttgcaatggatccgtgacattgtcactgtgtaggatgtatcggcaacaaaaacgacatcagggctctctggggcctagaccgcgtaccggagaggacgaggtcgaccacctgatattgctcgccttgatgaccgttgtgatggcagtgtgcagcctgccattgacaatccggtgctttacacaggctgtggcgcctgacagctcatccgagatgggagacttgctggcctttcgcttctatgcctttaatcctattctggacccttgggtgtttatactttttaggaaagccgtgttccagagactcaagctgtgggtctgttgcctttgccttggaccggcacacggcgactcacaaacccccctgagtcaactggcttctggacggagagatccgcgtgctccctccgctcctgtgggcaaagaaggttcatgtgtgccgttatctgcctggggagagggacaagtagaaccgctacccccaacccagcagtcctcagggagtgctgtgggcaccagcagcaaggcagaagctagcgtggcttgttccctgtgttag

SEQ ID NO: 236414 - DNA, 1503 bp, synthetic construct
  misc_feature 1..1503: note = Description of Artificial Sequence: Synthetic coding sequence
  source 1..1503: mol_type = other DNA
atggcatgggccgcactgttagggttgctggccgctcttctcttacttctccttcttagcaggcgcaggacaagacgcccaggagagcctcccttagaccttgggtctattccctggctcggctacgcactggattttggaaaagacgcagcctcctttctgactagaatgaaagagaaacacggagatatcttcactatcctggtcggcggtcgatatgtcaccgtcctactggatccacattcttatgacgcagtcgtgtgggagccaaggactcgattagatttccacgcgtatgccatcttccttatggaaagaatcttcgacgttcagctcccccactatagtcccagcgatgaaaaagcacgcatgaaacttacccttctccaccgggagttgcaggctttgacagaagctatgtacacaaatttgcacgccgtgctgctgggtgacgccacggaggctggatcaggttggcatgagatgggcctgctcgatttttcttactcttttctcctacgcgctggttaccttaccctgtacggaatagaggccctgcctcgaacccacgaaagccaagcacaggacagagtccatagcgccgatgtattccataccttcagacagctggacagactgctgcctaagctggccagaggcagcttgagtgttggggacaaggatcatatgtgctctgtcaaaagtagactttggaaacttctcagccccgcacggctagccaggagggcccatagaagtaagtggttagagtcttacctgctgcatcttgaggaaatgggagtctccgaagaaatgcaggccagagcactggttcttcaactatgggccacacaaggcaacatggggcctgcagcattttggctgctcctgtttctgctgaagaaccctgaggccctagccgctgtgcgtggcgaactggaatcaatcctgtggcaagcggagcaaccagtgtcgcagaccaccacattaccacagaaggtgctggacagcacacccgttcttgactctgtgttatctgaatccctgcggctgaccgccgcacctttcatcacccgcgaagtggtggtggacttggccatgcctatggccgatggcagagagtttaacttgagacgcggagacaggctcctgctgtttccgttccttagccctcagcgtgaccccgagatttataccgatcccgaagtcttcaaatacaatagattccttaaccccgacggcagtgaaaagaaggacttctacaaagacggcaagcggctgaagaactacaacatgccttggggtgctggtcacaatcattgcctagggaggtcatacgccgtgaacagcattaagcagttcgtctttcttgttctggtccatctggacctggaattgatcaacgccgatgttgaaatccctgaattcgacctgtcaagatatgggttcggccttatgcagccggagcacgacgtgcccgttcggtaccggatccgaccatag

SEQ ID NO: 236415 - DNA, 408 bp, synthetic construct
  misc_feature 1..408: note = Description of Artificial Sequence: Synthetic coding sequence
  source 1..408: mol_type = other DNA
atgcgggcatttctcaggaaccagaagtatgaggacatgcataatatcatacacatactccaaattcgaaaactgcgccataggctgtcgaacttccctagactgccagggattctggcacctgagacagttctcctgccattctgctacaaagtgtttagaaagaaagaaaaggtgaagaggagccagaaagcaacagaattcattgactattctatagaacaatctcaccatgcaatcttaactcctttgcagacacacctcacaatgaaaggcagtagtatgaagtgttcctcactcagctcagaggcaattttgtttacactcacactgcagctgacgcagaccctcgggctggagtgttgcctgctttacttgtccaaaaccattcatccacagattatctag

SEQ ID NO: 236416 - DNA, 345 bp, synthetic construct
  misc_feature 1..345: note = Description of Artificial Sequence: Synthetic coding sequence
  source 1..345: mol_type = other DNA
atggcgggattagcccttcagcccggaaccgcgctgctttgttactcttgcaaggcgcaggtgtctaatgaggactgtttgcaggttgaaaactgcacccagctgggggaacagtgttggacagcaagaattcgagctgtgggactgctgactgtgatctcgaaaggatgctcattaaattgtgttgacgacagccaggattactacgttggcaaaaaaaacattacctgttgtgacaccgacttatgtaacgcaagtggcgcacatgctttacagcccgcagctgccatactcgctcttctgccagccctgggcctgctgctgtggggccctgggcagctctag

SEQ ID NO: 236417 - DNA, 714 bp, synthetic construct
  misc_feature 1..714: note = Description of Artificial Sequence: Synthetic coding sequence
  source 1..714: mol_type = other DNA
atgatggtgatggtggtggttattacctgcctgctctcgcattataagctctcggccagaagtttcatatcacggcacagccaaggcagaagacgggaggacgcgctgagctctgagggatgcctgtggccatccgaatccaccgtcagcgggaatggtattcctgaacctcaggtttatgccccaccacgtccgacagatcggctggctgtgcctcctttcgctcaacgagagcggttccatcgattccaacccacctacccatacctgcaacacgagattgacctgccgccaactatctcattgagtgacggggaagagcccccaccttaccagggcccttgtactcttcaattgcgtgaccctgagcaacagcttgagctgaatcgcgaatccgtcagggctcctccgaatcgcaccatctttgattccgatctgatggatagtgccaggcttggtggaccctgcccaccctcgtcgaactctggcatctctgctacttgttacggctcaggaggtcggatggaaggaccacccccaacttacagcgaggttatcggtcattatcctggatcctccttccagcatcagcagtcaagcgggccaccttcacttttggaggggacacgtttgcatcatacacacattgcacctctggagtccgctgccatttggagcaaggaaaaggacaagcagaaagggcaccctctgtag

SEQ ID NO: 236418 - DNA, 864 bp, synthetic construct
  misc_feature 1..864: note = Description of Artificial Sequence: Synthetic coding sequence
  source 1..864: mol_type = other DNA
atgcaccgcttaatgggcgtgaatagcaccgccgcagcagccgctgggcagccaaatgttagctgcacctgtaattgtaagagatctttgttccagtcaatggagattactgagcttgaattcgtccagatcatcatcatcgtggttgttatgatggttatggttgtggtgataacatgccttttgtcccactacaaactgtccgccaggtccttcatttcccggcactcccaggggaggaggcgtgaggatgccctgagtagcgaaggatgtctgtggccctccgagagtacagtctcaggcaatggcatccctgagcctcaggtttacgccccaccaaggcccaccgaccgcctggctgtgcctccttttgcgcagcgggagagatttcacagattccaacctacctacccctatctccaacacgaaattgacctgcctcccaccatctccctgtctgatggagaggaaccgccaccataccaaggcccttgtacactacagctgcgggaccctgaacaacagctggaactgaaccgggaatctgtacgggcaccaccaaatcgaaccatcttcgacagtgacctcatggacagtgctcgactgggtggcccatgcccaccatcttccaattccggtatatctgcaacatgctatggtagtgggggtcggatggaggggcctccccctacctactcagaagtcatcggccactatcccggaagttctttccagcaccagcagtcatccggcccaccttccctcctggaggggacaaggctgcatcacacccatattgcgccactggagtctgcagccatttggagcaaagagaaagataaacaaaaagggcaccccctgtag

SEQ ID NO: 236419 - DNA, 759 bp, synthetic construct
  misc_feature 1..759: note = Description of Artificial Sequence: Synthetic coding sequence
  source 1..759: mol_type = other DNA
atggctgagctcgagtttgtgcagatcattatcattgtggtagtgatgatggtgatggtggtcgtgatcacctgccttctctcacattacaaactgtcagccaggtcatttatctcaaggcactctcagggcaggagaagggaggatgctctgtcctctgaaggctgtttgtggccatccgaaagtacagtttccggaaacggtatccccgagccacaggtgtacgcgccacctagacccactgaccgccttgccgtgccgccattcgcccagcgcgaacgtttccatcggttccagcctacatatccctacctgcagcatgagattgatcttcctccaactattagcctaagcgacggagaagaaccaccgccttatcagggtccctgcacattgcagctgagagatcccgaacagcaactggagctgaatcgagagagtgtcagggcacctccaaacagaaccatttttgattccgatttgatggactcagccaggcttggagggccatgccccccatctagtaatagtgggattagcgccacctgttacggctccggcggacgaatggagggaccgcctcctacctacagcgaggtaatcgggcattatcccggtagcagcttccagcaccagcagtcttccgggccaccttcactgctcgagggaacacggctgcatcacactcacattgctcccctggaaagcgccgctatctggagtaaagaaaaggataaacagaagggacatccattatag

SEQ ID NO: 236420 - DNA, 714 bp, synthetic construct
  misc_feature 1..714: note = Description of Artificial Sequence: Synthetic coding sequence
  source 1..714: mol_type = other DNA
atgatggtgatggtcgtcgtgataacctgcttgctgagtcattacaagctgtcggcgcgaagttttattagtcggcactcccaaggccgtcgaagagaggatgcgttaagctcagaaggatgtctttggcccagtgagtctacggtgagtggtaatggcattcccgaaccccaggtatatgcccctccgcgtcctacagataggctggcggtgcccccattcgcacagcgagagcggttccataggtttcagcctacatatccctaccttcagcatgaaatcgatctcccgcctaccatcagtttatctgacggagaggaacctcccccatatcagggtccgtgtacactccaactgcgagacccagagcaacagctggagctgaatcgagagtccgtgcgcgcacctccaaacagaaccatctttgacagcgacttgatggatagtgcgaggttaggtgggccatgcccgcctagttcaaacagcggcatttctgccacgtgttacggtagtggcggacgtatggagggcccacccccaacatactcagaggttataggtcattacccaggctcatcttttcagcatcaacaaagttcagggccaccaagcctccttgaaggaacacgactgcaccatacccatattgctcctctggaaagtgcggcaatctggtctaaggagaaggataagcagaaaggtcaccctctgtag

SEQ ID NO: 236421 - DNA, 714 bp, synthetic construct
  misc_feature 1..714: note = Description of Artificial Sequence: Synthetic coding sequence
  source 1..714: mol_type = other DNA
atgatggtcatggtggtcgtgatcacctgtctgttgagtcattacaagctgtcggctagatccttcatctccagacatagtcagggtcgtcgcagggaagacgcgctgtcaagcgaaggatgtttgtggccatcagagagtacagtgtctgggaacggtatccccgagccacaggtgtacgcaccccctaggcccaccgatagactagctgtgccaccctttgcccaaagggagcgcttccataggttccagccgacatacccgtatcttcaacacgaaatcgacctgcctccaactataagcctctcagacggagaggaacctcccccataccaaggtccttgcactctccaacttagggaccccgagcagcagctggagctcaacagggaaagcgttcgagccccaccaaaccgcactatatttgactcagatcttatggattcggccagacttggcggaccgtgtcctcctagctcgaactctgggatatctgctacctgttacggttctgggggacggatggaaggacctccaccaacctacagtgaagtgattggtcattaccctggatcctctttccaacaccaacagtccagcggtccacccagcctcttagagggcacgaggctgcatcatactcatatcgcacccctcgagtccgcagctatctggagtaaggagaaagataagcaaaagggtcatcctctttag

SEQ ID NO: 236422 - DNA, 684 bp, synthetic construct
  misc_feature 1..684: note = Description of Artificial Sequence: Synthetic coding sequence
  source 1..684: mol_type = other DNA
atgcaccgcctgatgggcgtaaactctacggcagccgctgcggctggacagcctaatgtcagctgcacttgcaactgcaaacgctctcttttccagtccatggaaatcagttgtcatgggtttccggtgtgtaaaagtcaccagcatcaggagtggaagagcctgtgttggtctctgcgtagccccggaggcgcatcatctatcactgggttcgggagtatgaaggtgaccaacccggcaatgaatttacctgagtgccagtggctgcggatccagaaggccgaactcgaattcgtccagattatcatcatcgtggtcgtcatgatggtgatggtggtagtgataacatgtctattgtcccattacaaactgagtgcccgtagctttattagccgccactcccagggccgaagaagggaagacgcgctcagcagcgaggggtgcctgtggccctccgaatctactgtatcagggaacggaatcccagagcctcaggtgtatgccccacctcggcctaccgatcgcctagccgttccaccgttcgcccagcgtgaaagattccacagattccaacctacgtacccttatctccagcacgaaatcgacttgcccccaacaatcagtctgtctgatggcgaggaacccccaccatatcaaggcccatgcacgctgcaactcagatag

SEQ ID NO: 236423 - DNA, 627 bp, synthetic construct
  misc_feature 1..627: note = Description of Artificial Sequence: Synthetic coding sequence
  source 1..627: mol_type = other DNA
atgccagctattcctgcacacggggctgaactggagttcgtacaaattattatcattgtggtagtcatgatggtaatggttgtcgtgatcacttgcctgcttagccactataaactctccgctagaagcttcatctcgcggcactcgcagggtcggcgacgcgaagacgccttgtcgagcgaaggatgtctgtggccatctgagagcaccgtaagtggcaacggcattccggagccgcaggtttatgcgccaccccgtccgacagataggctggccgtgcctcctttcgcgcagagagagcgttttcaccggtttcaacctacctacccttaccttcaacacgaaatcgatcttcctcctacaatttccctgagcgatggggaggaacctcccccttaccaaggaccatgcactctgcagctgcgggatccagaacagcagctcgaacttaacagggagtctgttcgagcccctccaaataggacgatctttgacagcgacctcatggatagtgctaggttggggggtccttgccccccaagctccaatagtggaatcagtgctacctgttacgggtctggtggccgaatggaggggccaccacctacttattctgaggttatctag

SEQ ID NO: 236424 - DNA, 156 bp, synthetic construct
  misc_feature 1..156: note = Description of Artificial Sequence: Synthetic coding sequence
  source 1..156: mol_type = other DNA
atggctcgttaccgttgttgtcgtagccaaagccgaagcagatattatagacagcggcagcgtagcagacgaagacggcgtagatcatgccaaacccgaagacgagccatgcggtgttgcagaccaaggtatcgacccaggtgccggaggcactag

SEQ ID NO: 236425 - DNA, 309 bp, synthetic construct
  misc_feature 1..309: note = Description of Artificial Sequence: Synthetic coding sequence
  source 1..309: mol_type = other DNA
atggtgcggtacagggtgagatcactgtccgagaggtcccatgaagtgtatagacaacagctgcacggacaagaacagggacatcatgggcaagaggagcagggattatcaccggagcatgttgaagtgtacgaaagaactcatggccaatcacactaccgtagacgccattgttcccggcgacgtctccatcgaatacatcgccgacaacatcgcagctgtcggcgtcgcaaacgacggtcctgccggcacagaagaagacacagaagaggctgtagaacaaggaagcggacctgtcgcagacactag

SEQ ID NO: 236426 - DNA, 423 bp, synthetic construct
  misc_feature 1..423: note = Description of Artificial Sequence: Synthetic coding sequence
  source 1..423: mol_type = other DNA
atggtccgataccgcgttcgatccctgagcgagaggagccatgaagtgtaccggcagcagctccatggacaggagcaggggcatcacgggcaagaagagcaggggttgagccctgagcatgtggaggtatacgagaggacgcacggccagagccattatagaaggcgtcattgttcgagaagacggttgcaccgcattcacaggcgacaacaccgttcctgccgaagaagaaaacggcgaagttgtcgccataggaggagacaccgaagggagagcttgggagatcccttgaaccagaatttcctctcccaaaaagccgcagagcctggcagagaacacgccgagggcaccaagcttccaggccctctcactccttcgtggaagctacgtaagagccgccctaaacatcaggtgcgaccctag

SEQ ID NO: 236427 - DNA, 657 bp, synthetic construct
  misc_feature 1..657: note = Description of Artificial Sequence: Synthetic coding sequence
  source 1..657: mol_type = other DNA
taattggctctcctgcttgccagggcaggtctgcgcaagcccgagagccaggaggctgcgccactgtccgggccttgcggcaggagagtcattaccagtagaattgtcgggggagaagatgccgaactgggccgttggccttggcaggggagtctgcgtctctgggattcccacgtgtgcggcgtgtcactcctgtcccataggtgggccctgacagccgcacattgctttgaaaccgacctgagtgatccaagcggctggatggtgcaattcggccagctcacgtcaatgccatcattttggagcctgcaggcatactacacaagatattttgtgtctaatatatacctgtccccccgatatctcggtaatagcccttacgacatagcattagtaaaactgtctgcccctgtgacctatacgaaacatatacagccaatctgtttgcaggcgtcaacattcgagttcgagaaccggaccgactgctgggtgactgggtggggctacatcaaagaggacgagggaagctccggacgacatcacaaacagctatatgtccaacctcctcttccccaggtccagttcccccagggacacctctggaggcacgggctgtgctggcagtgcccgagacgggagggttgccttctgcgatag

SEQ ID NO: 236428 - DNA, 744 bp, synthetic construct
  misc_feature 1..744: note = Description of Artificial Sequence: Synthetic coding sequence
  source 1..744: mol_type = other DNA
atgaacccattgcttattctcacgttcgttgcggctgctttggcagcacctttcgacgacgatgataagatcgtaggcggatacaactgtgaagaaaattcagtgccgtaccaggtgagtttgaactcaggttatcacttttgcggcggatctcttatcaacgagcagtgggtggtgagcgcaggccattgttacaagtcccgtatacaagtcaggctgggtgaacataatatcgaagtgcttgagggcaacgaacaattcattaatgcagcaaagatcatacggcatccacagtacgatcgaaaaactcttaataacgacattatgctcataaaactgagttccagagccgtgattaatgcccgagtgagcaccatttcactgcccactgcccctcccgcaacgggaaccaagtgcctgatttccggctgggggaacactgcatcttcgggggctgactaccccgacgagcttcagtgcctagacgcccctgtgttaagtcaggccaaatgcgaagccagctaccctggcaagatcacatctaacatgttctgcgtgggatttttagaaggcggaaaggactcctgtcagggcgacagtggcggtcctgttgtgtgcaacgggcagctacagggtgtcgtttcctggggagatggttgtgctcagaaaaataagccaggcgtctataccaaagtctacaactacgttaagtggataaagaataccatcgcagcgaattcttag

SEQ ID NO: 236429 - DNA, 714 bp, synthetic construct
  misc_feature 1..714: note = Description of Artificial Sequence: Synthetic coding sequence
  source 1..714: mol_type = other DNA
atgaatccgctcctaatcttaaccttcgttgcggctgccctggccgcacccttcgatgatgatgacaaaatcgtggggggatataactgtgaagagaactccgttccttatcaagtcagcctgaacagcgggtatcacttctgtggcggaagcctgattaacgaacaatgggtcgtgtctgcaggccactgttacaagtcacggatccaggtgaggctgggcgaacacaacattaacgccgcaaagatcatcagacacccccaatatgacaggaaaacactgaacaatgacatcatgctcatcaaactctccagccgtgccgttatcaacgcgcgagtatccacaattagcttgccaacagcgccaccggctactggaacaaaatgcctgatatctggttgggggaacacagctagctctggtgctgattatcctgacgagctccaatgcctggacgcccctgttctgagccaggccaagtgcgaggcttcctaccctggcaagatcacttctaacatgttctgcgtgggatttcttgagggcggaaaggacagctgccaaggggatagcggaggcccagtcgtgtgcaacgggcagctgcagggagtcgtgtcttggggcgacggttgcgcccaaaagaacaaaccaggagtgtatactaaggtgtataactatgtcaaatggattaagaacacaatcgccgctaattcctag

SEQ ID NO: 236430 - DNA, 2628 bp, synthetic construct
  misc_feature 1..2628: note = Description of Artificial Sequence: Synthetic coding sequence
  source 1..2628: mol_type = other DNA
atgactctggcgcgtttcgttctcgccctgatgcttggcgctctgccggaagtagttggattcgacagcgttttgaatgattccttacatcattcccaccgacactctcccccagcaggccctcattatccatattacctacccacgcagcagcgcccaccacggacaagaccaccacctcctctgcctcggttcccaagacccccacgcgcactccccgcacagcgccctcacgctctgcaggccggtcacactcctcggccacacccctggggctgccccgctggagagccgtgggttagtgtcacagactttggggctccgtgcttacgttgggccgaggtccccccattcttggagaggtcccccccagcatcctgggcccagctccgaggacaaagacacaatttctgtcggagcccagatggagcaggcagaccctggtgcttttacggcgatgccaggggaaaggtggactggggatactgcgattgcagacacgggagcgtccggctgaggggaggaaagaatgagttcgagggcacagttgaagtatatgcctcaggcgtatgggggacggtgtgctcctcacattgggatgattcagatgcaagcgttatatgccaccaactgcagcttggaggcaaaggcattgctaagcagacgcccttttccggtttgggacttattccaatctattggtcaaatgtccgctgtagaggtgacgaggaaaatattctgctgtgcgagaaagatatctggcagggcggagtctgcccccagaaaatggccgcagccgtgacctgctccttttcccatggacccacattcccaattatcaggctcgctgggggaagctcagtccatgaaggtcgggttgaactataccacgccggacaatggggtactgtgtgcgatgatcagtgggacgacgccgatgctgaggtgatctgccgccagctgggtctctccggtatcgctaaggcctggcatcaagcttacttcggggaaggaagtggcccagtaatgcttgacgaagtccggtgcaccggaaacgaactgtctatcgaacagtgtcccaagtccagttggggcgagcacaactgtgggcacaaagaggatgccggtgtgtcatgcactccgctgaccgatggcgtgatccgactagccggtggtaaaggaagtcatgagggcaggctggaggtatactatcgtggacagtggggaactgtgtgcgatgacggctggaccgaattgaatacatatgttgtatgccgccagctcggctttaagtatgggaagcaggcctctgctaaccacttcgaggaatcaactggccctatttggctggatgatgtgagctgcagtggtaaagaaaccagattcttacagtgcagccggcgacaatgggggagacacgactgctcacatagggaagatgtatcaattgcttgctaccccggtggggaaggacacagattatctcttggattccctgttagactgatggatggggaaaacaagaaagagggcagagtggaagtcttcataaatggccaatggggcactatatgcgatgacggctggaccgacaaggacgcagctgttatttgtagacagttgggatacaaggggccagccagagcaagaaccatggcctattttggtgagggtaaaggccctatccatgtggataacgtcaagtgcaccggcaacgagcgcagtcttgcggactgcatcaagcaggatattggtcggcacaattgtaggcactcagaggacgccggagtcatttgcgattacttcggtaaaaaagcatcaggcaactctaacaaggaatctctgtcctcagtgtgtggactccgtctgctgcaccgacgacagaagaggattatagggggaaagaatagtcttcggggagggtggccttggcaggtctctctaagactgaagagttcacatggagatggcaggctcctgtgtggtgccactttgttgtcctcctgttgggttctgacagcagcacactgcttcaagcgctatggcaactcaaccaggagttacgcagtgagggtcggcgattatcacaccctggtcccagaggagtttgaagaggaaataggagtgcagcaaattgttatccatagagaatataggcccgaccgttctgactatgatattgctctggtccgactccagggccctgaggagcagtgtgctaggttctccagccacgtacttccagcatgcctacccttgtggagagagaggccccagaagacagcaagcaactgttatatcactgggtggggcgacactggcagagcctattcacggacgctacagcaggcagctattccactgttgcctaagcgtttctgcgaagaacgatacaaaggaagatttactggaaggatgttatgtgctggtaatttacacgagcacaaacgggtagactcctgtcagggcgattccggtggtcccctgatgtgtgaaagacccggagaatcctgggtggtatatggcgtcacctcctgggggtatggatgcggcgtaaaggattctccgggtgtgtacaccaaagttagcgctttcgtgccatggattaaaagcgtcaccaaactgtag

SEQ ID NO: 236431 - DNA, 489 bp, synthetic construct
  misc_feature 1..489: note = Description of Artificial Sequence: Synthetic coding sequence
  source 1..489: mol_type = other DNA
atgaagggatttactgcaacgttattcctgtggacactgatcttccccagctgcagcggcggtgggggtggcaaagcctggccaacacacgttgtctgtagcgactcgggcctcgaagtgctgtatcagtcttgtgatccactgcaggatttcggtttttctgtcgagaagtgttccaagcagctaaagtctaacatcaacataaggttcgggatcatactgcgagaagacattaaagaactgttcctcgatttagccctaatgtcccagggatctagcgtccttaacttcagctatcccatatgtgaagctgcattgcctaaatttagcttctgtggcaggaggaaaggggagcagatctactacgccggaccagtcaataatccagagtttactataccgcagggtgaatatcaggtgctgctggagctgtatacggaaaaacggtcgaccgtggcatgcgctaacgctactattatgtgcagctag

SEQ ID NO: 236432 - DNA, 822 bp, synthetic construct
  misc_feature 1..822: note = Description of Artificial Sequence: Synthetic coding sequence
  source 1..822: mol_type = other DNA
atggcagtgtggttagctcagtggcttggcccactgctcctcgtatcactttgggggctgctggcgccagcatccctattgagaaggctcggagaacacattcagcagttccaggaatcttccgcacagggcttggggctgagtctgggacccggagctgccgctttacctaaggtaggctggctggagcagctcttggacccctttaacgtatcggacaggcggagctttctgcagagatactgggttaacgaccagcattgggtggggcaggacgggccaatcttcctccacctgggcggagagggtagtcttggcccaggcagtgtgatgagagggcaccccgcagcactggcccctgcctggggagctctggttatctctttggagcaccggttttatggcctgtcaataccagcaggaggcctggaaatggcccaactccgattcctatcctcacgactggcgctcgccgacgtggtgtccgccagacttgctctgtctcggctatttaacatatccagttcttcgccttggatctgctttggcggatcatacgccggttcactggctgcatgggctagattgaagtttccccacttaattttcgcttccgtggcaagttctgcacccgtgcgggctgtactggacttctctgaatacaatgatatcgtcctgcactcactcgggcagaagtgcctaagcttttcacgggctgagacggtggcccaactgcggagtactgagccacagcttagcggcgtgggtgacagacagtggctgtaccagacttgcacagaatttggattttacattacttag

SEQ ID NO: 236433 - DNA, 501 bp, synthetic construct
  misc_feature 1..501: note = Description of Artificial Sequence: Synthetic coding sequence
  source 1..501: mol_type = other DNA
atggccgtctggctcgcgcagtggctgggtccgctcttgttagtttctctctggggacttctggcaccggcatctcttctaagacgattaggcgagcatatccagcagttccaggagagcagcgcacagggactgggtctgagtctgggccctggggcagctgcactgcccaaggtaggctggctggaacagctgttggatccttttaacgtcagtgatcggagatctttcttgcagcggtattgggtgaacgaccagcattgggttgggcaggatggacctatctttttgcaccttggcggagaggggtctctggggcctgggtctgttatgagaggccatccagcagcactcgccccagcctggggcgctttagttatctcattggagcaccgcttctatggtctctcaatccccgcagggggtcttgagatggctcaactgcggttcctttctagccgccttgcgctgtcatgcactgcttgggctcgctcagtgtag

SEQ ID NO: 236434 - DNA, 498 bp, synthetic construct
  misc_feature 1..498: note = Description of Artificial Sequence: Synthetic coding sequence
  source 1..498: mol_type = other DNA
tgagtgatgagagggcatcctgccgcactcgcccctgcctggggcgcactagttatatcacttgagcatcggttttacggcctatctattccagcaggcggactggaaatggcacagctgcggttcttgtcttccaggcttgcgcttgccgacgtggtaagcgctcggctggccctgtcacgcctgtttaatatcagtagctcctccccttggatctgctttgggggatcctacgctgggagtttggcagcctgggcaagactgaaattcccccacctcatttttgcttccgtggctagttctgcacctgtgcgtgccgtgctggatttctctgagtataacgacatcgtcctgcattctcttggtcaaaaatgcttatcctttagccgagctgaaactgtggcgcaactgaggagcaccgagccacagctctcaggcgtgggcgaccgacagtggctctaccagacctgtaccgaatttggcttttacgtgacctag

SEQ ID NO: 236435 - DNA, 945 bp, synthetic construct
  misc_feature 1..945: note = Description of Artificial Sequence: Synthetic coding sequence
  source 1..945: mol_type = other DNA
atgggagcacgcggagcactgctgctggccctgcttctggccagagctgggctcagaaaacctgaatcccaggaagcagctcccctgagtggaccttgtggcaggagagtgattacatccagaattgttggaggggaggatgcggaactcggccgatggccatggcaaggatctctgagattatgggactcccacgtgtgtggggtcagccttctgagtcaccgctgggccttaactgcagctcattgcttcgagacatattctgatctttctgacccctccggatggatggtgcagtttggacagctgacgtctatgccttcgttttggagcctgcaggcctactatacccggtacttcgtcagcaacatatatctgagcccccgatacctgggcaatagtccatacgatatcgctttggtgaaattgagcgcacctgttacctacacgaagcatatccagccaatctgcttgcaggccagtacatttgagtttgagaataggaccgattgctgggtgactggctggggatacatcaaagaggacgaggcgcttccatccccacacaccttacaggaagttcaggtcgcgatcattaacaactcaatgtgcaatcatctcttcttaaagtactcctttcgtaaggacattttcggagatatggtatgcgccggtaacgcgcagggaggcaaggatgcgtgcttcggggactctggtggaccacttgcgtgcaataagaacgggctgtggtatcagattggggtggtatcctggggggtaggctgtgggaggcctaatagacctggggtgtataccaacattagccaccactttgaatggattcagaagctgatggcccagtctggtatgtcacaacctgaccccagctggcctctgctgttttttcctctactttgggccctcccactattagggccagtttag

SEQ ID NO: 236436 - DNA, 903 bp, synthetic construct
  misc_feature 1..903: note = Description of Artificial Sequence: Synthetic coding sequence
  source 1..903: mol_type = other DNA
atgggtgcccgaggagcattgttgttggccttgttactcgcacgcgctggactgcggaagccagaatcacaagaagccgcaccccttagcggcccatgtggacggcgagttattaccagcaggatcgtgggaggcgaggatgccgaactcggtcgttggccatggcagggctctctaagattatgggatagccatgtgtgtggagtgagcctgctgtcacatagatgggccctaaccgccgctcactgcttcgagacctacagtgacctgtcagatcccagcgggtggatggtccagtttggacagctcacttcaatgcccagcttctggagtctgcaagcatattacacaaggtactttgtgtcgaatatctacctctccccacggtatctggggaacagcccctacgacatcgctcttgtgaaactttccgctccagtgacatataccaagcatatccagcccatttgccttcaggcttccacatttgagtttgaaaaccgaaccgattgctgggtgaccggctggggctacatcaaggaagacgaagctttacccagtccccataccctacaggaggtgcaggtggcaattataaacaatagtatgtgtaatcaccttttcttaaagtactcgttcaggaaagacatcttcggcgatatgggggactccggtggacctttggcatgcaacaagaacggcctgtggtaccagattggtgtcgtgtcctggggagtgggatgcggtcggcctaataggcccggagtctatacgaacatttcccaccacttcgaatggatacagaagttgatggcacaatctggtatgtcccagccagatccctcttggcctcttttgttcttcccccttctttgggcattgccactccttggcccagtctag

SEQ ID NO: 236437 - DNA, 939 bp, synthetic construct
  misc_feature 1..939: note = Description of Artificial Sequence: Synthetic coding sequence
  source 1..939: mol_type = other DNA
atgggggctaggggtgctctcctgttggccctattattggcgagggccggtctgagaaaacctgagtcccaagaagccgcacccttgagtggaccatgtggcagaagggtgatcacctcccggatagtgggcggtgaggacgcagaactggggcgatggccttggcagggcagtttgaggctgtgggacagccatgtatgtggggtctctctgctctcacaccgttgggctctcactgccgcacactgctttgagaccgaccttagcgatccaagtgggtggatggtgcagttcggtcagttaaccagcatgcccagcttctggtctctgcaagcctattacactaggtacttcgtgtctaatatctacctgtcaccgaggtacctcggcaacagtccttacgatatagcactcgtcaagctgagcgcacccgttacatacactaaacatattcagccaatctgtttacaagcctctacctttgaatttgagaatagaaccgactgttgggttactgggtggggttatattaaggaagatgaagccctgccaagcccgcacaccttacaggaagtgcaggtcgccatcattaacaactcgatgtgtaaccatctgttcttaaagtattcttttaggaaggacatatttggcgatatggtttgcgccggaaacgctcaggggggaaaagacgcttgtttcggagacagtggcggaccgcttgcttgcaacaagaatggcctgtggtatcagattggcgtggtcagttggggagtgggatgtgggagacccaacagacctggcgtatacaccaatattagccaccacttcgagtggattcagaagctgatggctcagtccggcatgagccagccggacccctcttggcctctgctattctttcccttgctgtgggcactccctttgctgggtcctgtttag

SEQ ID NO: 236438 - DNA, 954 bp, synthetic construct
  misc_feature 1..954: note = Description of Artificial Sequence: Synthetic coding sequence
  source 1..954: mol_type = other DNA
atggttgtcagtggggctcctcccgcacttggaggtggctgtctgggcacattcacaagtctactgctgttggcctccaccgcaatcttgaatgctgcgcgaattccggtgccacccgcttgtggcaaaccgcagcaactcaacagggtcgtggggggagaggattccaccgactccgaatggccgtggatcgtcagcatccagaagaacggaacacatcactgtgctggatctctattaacgtctcgctgggtcatcaccgctgcccactgttttaaggataatttgaacaagccctacctctttagtgttctacttggagcttggcagttaggaaacccaggatccagatctcagaaggtcggtgtggcctgggtcgaacctcacccggtgtatagctggaaggaaggtgcctgcgccgatatcgcactagtgaggctggagaggtctatccagtttagcgagagagtccttccaatttgcctaccagatgctagcatccacttaccgccaaatacacactgttggatcagtggctggggatcaattcaggacggcgtgccactgcctcatccgcagactctgcaaaaactaaaagtcccgattatcgacagtgaggtttgtagccatctgtattggcgaggcgcaggtcagggccctattactgaggacatgctgtgcgctggatacctggaaggcgagagagatgcttgcctcggtgattctggcggaccactgatgtgccaggtggacggggcttggctgctggccggaatcatatcttggggggagggctgcgccgaacggaatcgccctggggtgtacattagcctctccgcacatcggagctgggtggagaaaatcgtgcagggcgtacaattgcgcggacgagctcagggcggaggcgctcttcgcgctcctagccagggcagtggcgctgccgctcggtcttag

SEQ ID NO: 236439 - DNA, 786 bp, synthetic construct
  misc_feature 1..786: note = Description of Artificial Sequence: Synthetic coding sequence
  source 1..786: mol_type = other DNA
atgcatatgcgggagactagcgggttcactctcaaaaaaggacggtcagcccctttggtgttccatccccctgatgcactcatcgctgtgcctttcgatgacgatgacaagattgtgggtggatacacgtgcgaggagaacagtctgccttatcaggtcagtctgaactccggctcacatttctgcggtggcagtttaatttccgagcagtgggtggtgagtgctgcacattgttacaagacaaggattcaggtgcggctgggcgagcataatattaaggtgctcgagggtaacgaacagtttatcaatgctgcgaaaattatccgccatccgaaatacaatcgcgataccttggacaatgacataatgttgatcaagttgagttctccagcagtcattaatgctagagtatccacaatttccctgcccaccactccacccgctgcaggtactgaatgcctgatttctgggtgggggaatactcttagcttcggggctgactaccccgatgaattgaagtgtctggacgcccctgtcctcacacaggccgaatgtaaggctagctaccctggaaagatcaccaatagcatgttttgtgtgggcttcctggagggtggcaaggactcctgtcaaagggacagcggcggacctgtcgtgtgcaacggccagctccagggcgtggtttcttgggggcacggatgtgcgtggaaaaaccggcctggcgtgtacactaaggtttacaactacgtggactggatcaaagataccatcgcggctaactcctag

SEQ ID NO: 236440 - DNA, 915 bp, synthetic construct
  misc_feature 1..915: note = Description of Artificial Sequence: Synthetic coding sequence
  source 1..915: mol_type = other DNA
atgtgtggcccagatgaccggtgccctgcccgatggccaggccctggcagggccgtaaaatgtggtaaggggctggctgcggcaagacctgggcgagtcgaacgcggaggggcacaacggggaggagccggtttggagttacaccccctgctcggcggtcgcacatggagagctgctagggacgccgatggttgcgaggcattgggtacggtggcggtccctttcgatgacgatgacaaaatcgtaggcggatatacctgtgaagaaaactctctgccgtaccaagtgagcctcaatagtggcagccacttttgtggtgggtccctcatatctgagcagtgggtggtttcagctgcgcactgttataagaccaggatacaagtgcgcctgggcgagcataatatcaaagtactcgagggcaacgaacagtttataaatgcagctaagataataaggcatccaaagtataacagagacacattggataacgacattatgctcattaagctgagttcccccgcagtcataaacgccagggtctcgaccatttcgttgcctactaccccaccagctgccggtaccgagtgtctgattagtggttggggcaataccttgtctttcggcgctgactatccagatgagctaaaatgtctggacgcccctgtactgacccaggctgaatgtaaagcctcttatcccggaaaaattactaatagtatgttttgtgtcggattcctggaaggcggtaaggattcctgtcagcgcgattcaggagggcctgtagtgtgtaacggtcagctccaaggtgttgttagttggggacacgggtgtgcgtggaaaaacagaccaggggtctataccaaggtctacaattatgttgattggatcaaagataccattgctgccaattcttag

SEQ ID NO: 236441 - DNA, 744 bp, synthetic construct
  misc_feature 1..744: note = Description of Artificial Sequence: Synthetic coding sequence
  source 1..744: mol_type = other DNA
atgaacccttttctgattttggccttcgtcggcgcagcagttgccgtgccattcgacgacgacgataagatcgtaggcggttacacttgcgaggaaaacagtcttccgtaccaagtttccctgaattccggtagccatttttgcgggggttctctgatcagtgaacagtgggtggttagcgctgcccattgctacaaaaccagaattcaggtcagactgggcgagcacaatatcaaggtactggagggaaacgagcagttcataaacgccgctaagatcatacgccaccctaaatataaccgagacacactcgataacgacatcatgcttatcaagctgagtagcccggctgtgatcaacgcccgagttagcacgatctctctgcctactaccccgccagccgcagggactgaatgcctgatttcgggatgggggaacactctctcatttggagccgactacccggatgagctgaagtgcttagacgctcctgtcttgacccaggctgaatgcaaggccagctatcctgggaaaataaccaattccatgttctgcgtgggtttcctagagggtgggaaagattcctgtcagcgggacagtggtgggccagtggtgtgtaatggccagctgcaaggcgtggttagctggggccacggctgtgcctggaagaatcgacccggagtatacaccaaagtctacaactatgtcgattggattaaggacaccatcgcggctaattcatag

SEQ ID NO: 236442 - DNA, 723 bp, synthetic construct
  misc_feature 1..723: note = Description of Artificial Sequence: Synthetic coding sequence
  source 1..723: mol_type = other DNA
atgggtcctgcaggtgaggttgctgtgccttttgacgacgacgacaaaatagtcggcggttacacctgcgaagaaaactctctaccctaccaggtgtccttaaactccgggagccacttctgcgggggaagcctcatcagcgagcagtgggtcgtatctgccgctcactgctacaagactagaattcaggtgcgcctgggggagcataatattaaggttttggaaggaaatgagcagttcatcaacgccgctaagatcataaggcacccaaaatacaatcgcgacacactagataacgacatcatgttgattaagttgagcagccctgctgtaatcaatgctagggtgagtacgatctcgctgccaactacaccccctgcagccggaactgagtgtcttataagcgggtggggcaacactttatctttcggggcagactacccagacgagctgaaatgtctcgatgcccctgtactaactcaggcagaatgtaaggcttcctacccgggtaagatcacaaatagtatgttctgtgtgggcttccttgaggggggaaaggattcctgccagagagacagcggcggacctgttgtgtgtaatgggcagctccaaggagtcgtgtcctggggccacggatgtgcctggaagaataggccgggagtgtacactaaggtctacaattatgtggattggatcaaggacaccattgcagcgaattcatag

SEQ ID NO: 236443 - DNA, 537 bp, synthetic construct
  misc_feature 1..537: note = Description of Artificial Sequence: Synthetic coding sequence
  source 1..537: mol_type = other DNA
atgcgggagactagcggctttaccctgaagaaagggaggagcgcaccattggtgttccatccccctgatgcactgatcgcagtgcccttcgacgacgacgacaagattgtgggcggttatacttgtgaggagaactctctcccttatcaagtgagcttaaacagtgggagtcatttctgtggcggaagtctgatctctgagcagtgggtggtaagtgctgcccattgctataaaactaggatacaggtccggctcggcgaacacaacattaaagttctcgaaggcaatgaacaattcattaacgctgccaaaatcataaggcatccaaagtacaatcgcgacacactggataacgacatcatgctgatcaagctctcgtctcccgctgttattaacgccagagttagcactatcagcctgcctaccacacctcccgcagctggcacggagtgcttgatcagcggttggggaaacaccctcagcttcggcgcagactatcccgacgaattgaaatgcctggacgccccagtgctgtag

SEQ ID NO: 236444 - DNA, 843 bp, synthetic construct
  misc_feature 1..843: note = Description of Artificial Sequence: Synthetic coding sequence
  source 1..843: mol_type = other DNA
atgaggggagtttcctgtcttcaagtgttgttacttctggtgttgggcgctgccggaactcagggccgaaagagcgctgcgtgtgggcaacccagaatgtctagcaggatcgtgggtggacgcgacgggagggacggtgagtggccctggcaggcctctatccagcatcgcggtgcacatgtgtgcggtgggtctctcatcgctccgcagtgggtgttgaccgccgctcattgttttccaaggcgcgcactaccagccgaataccgggtcagactcggagcgttgagactcggttcgacatcccctaggacactgtcggtgccagtacgcagagtactgctcccaccagattactcagaagatggcgcaagaggagatctggctttgctgcaactgaggagaccggtacctttgtcagccagggtccagcccgtgtgcctgccagtcccgggagctcggcctcccccaggaacaccctgtcgcgtcactggttgggggagtttgagacctggtgtacctttaccagagtggagacccctccaaggagtgcgtgtaccacttcttgattctcgtacctgcgatgggctgtaccacgttggtgccgatgtcccgcaagccgagaggatagtactgcccggatcactctgcgcaggatacccccagggccataaggacgcctgtcaaggagactcagggggtccactcacatgtttgcagtccggcagttgggtcctggtcggagtcgtaagctgggggaaggggtgtgcgttgccaaacagacccggagtctacacttcagtggctacctacagcccatggatacaggccagggtgtctttctag

SEQ ID NO: 236445 - DNA, 1032 bp, synthetic construct
  misc_feature 1..1032: note = Description of Artificial Sequence: Synthetic coding sequence
  source 1..1032: mol_type = other DNA
atggctcaaaagggggtcctggggcctggacagctgggagcagtagccattttactttatctgggcctgctgagatccgggactggggcagagggtgccgaagctccttgtggggtggcaccacaggctaggatcaccggagggtcctccgctgtcgcaggccagtggccctggcaggtgtctattacttatgagggcgtgcacgtgtgcgggggttctttggtgtccgaacaatgggtccttagtgccgctcattgcttcccatctgaacaccataaagaagcctacgaagtaaagttgggagcgcaccagttggacagctattctgaggacgctaaagtgagtaccctaaaagatataatacctcacccctcctatcttcaggaggggagccaaggcgatatagcactgctgcaattaagccgccctatcacatttagccggtatatcaggcccatttgccttcccgcagctaatgcaagctttcctaacggactacactgcacagttactgggtggggccatgtggcacctagcgtgagtctgctcactcccaagccactgcagcaactggaagttccattgattagtagggagacctgcaactgtctgtataacatcgatgccaaacccgaagaaccccattttgtgcaggaggacatggtgtgcgcgggatatgtggaggggggaaaagatgcatgtcagggcgactctgggggtccactgtcttgtcccgtcgagggcttatggtatctcacgggtatagtttcttggggcgatgcctgcggggcacggaaccggcctggcgtatacacactggctagctcctatgcatcttggattcaatcgaaagtgacggaactccagccacgcgtcgtcccgcagacgcaagagagtcaaccagattcaaacctgtgcgggtcacatttagcatttagttctgcccctgctcaaggtctcctcagacctatcttgttcctgcccctgggtcttgcactcggccttctgtccccatggctgagtgagcactag

SEQ ID NO: 236446 - DNA, 504 bp, synthetic construct
  misc_feature 1..504: note = Description of Artificial Sequence: Synthetic coding sequence
  source 1..504: mol_type = other DNA
atggcccagaaaggggtgctcggtcccggacagttaggcgcagtcgcaatcctactgtatctgggactgctccgtagcggtacgggcaaagaaggagcagcggctccctgtggcgtcgcccctcaggcacgcattacaggcggtagctccgccgtggccggtcagtggccctggcaagtgtctatcactttctctagatatatcagacctatctgcctcccagcagctaacgcctcatttcctaacgggcttcattgcacagtgaccggctgggggcatgtagctcccagcgtcagtctgcttacacccaaacctctacagcagctcgaagtgcctctgatttcacgggagacgtgtaattgtctctacaacatagatgctaagcccgaggaacctcacttcgtccaagaggatatggtctgtgctggctacgtagagggcgctctgttgcgggtcaccctgggtgctcacagtccagctctgtggcgggtgagtgggacctag

SEQ ID NO: 236447 - DNA, 1197 bp, synthetic construct
  misc_feature 1..1197: note = Description of Artificial Sequence: Synthetic coding sequence
  source 1..1197: mol_type = other DNA
atggagctggaagagggtaaagcaggctcaggcttaaggcagtactatctgagtaagattgaagagttgcagctcatagttaacgacaaatctcagaatctccggaggctccaggcccagaggaatgaacttaatgccaaagttagactcttgcgggaggaactgcaactgttgcaggagcaaggctcgtacgtcggggaggtcgtgagagccatggacaagaagaaagtgctggtgaaggttcatccggaaggcaagtttgttgtggacgttgataaaaacattgatattaacgatgttaccccaaactgccgcgtcgctctgcgcaacgattcgtacaccctgcataagatcctgcctaataaggtggacccactggtgagtctgatgatggtggaaaaagtgcctgacagtacctacgaaatgattggcggacttgacaagcagattaaggagatcaaggaagtgattgagctgccggtcaaacaccctgaactgttcgaagccctgggaatcgctcaaccgaaaggggtgttgctgtatggaccacctggcacaggcaagacattgttggcaagggcagtagcccatcatactgattgcacattcatccgggtgtccgggagtgagctggtacaaaagttcatcggtgaaggggctagaatggtccgcgaactgtttgtcatggctcgagagcacgccccttcaattatctttatggatgaaattgacagtatcggtagttcacgtctcgaggggggatctggcggagacagtgaagtgcagcggaccatgctcgagttgctcaatcaactggacggattcgaagccacaaaaaacataaaggtgatcatggcaactaacagaatcgatatcctagatagtgcacttctaagacccggtaggattgatcgtaaaattgaatttcccccacccaatgaggaggctagactggatatcctcaagatccactcacgcaaaatgaacctgacaagggggataaacctgcggaagattgccgagttaatgcctggcgctagcggagccgaggttaagggcgtgtgtaccgaggcaggaatgtatgccctccgggaaaggagggtgcacgtgacacaagaggattttgagatggcggtggctaaggtgatgcagaaagatagtgagaaaaacatgtctatcaagaaactatggaagtag

SEQ ID NO: 236448 - DNA, 765 bp, synthetic construct
  misc_feature 1..765: note = Description of Artificial Sequence: Synthetic coding sequence
  source 1..765: mol_type = other DNA
atggcctccctcctgaaagtggatcaggaagttaaactgaaggttgatagttttcgggagagaatcaccagcgaggctgaggacctggtagctaattttttccctaagaaattactggagttagatagtttccttaaggaacccattctcaacattcatgacctgactcagattcactctgatatgaatttgccggtcccggaccctatcctgttgaccaactcacacgacggattggatggccctacatataagaaacgtcgactggatgagtgtgaggaggcattccagggcaccaaagtctttgtgatgcctaacggcatgctgaaaagcaatcagcaactcgtggatataattgagaaggtgaagcctgagatccgtcttctaatcgagaaatgtaatactgtcaaaatgtgggtccagctgctgatcccgagaatcgaagacggcaataacttcggcgtatccattcaggaggaaacagtggccgagctgaggactgtcgaatctgaagccgcaagctatctggatcagatcagccgttactacatcacaagggcaaagttagtgtctaagatagcaaaatacccacacgtggaagattatcgacgaaccgttacagaaatcgacgaaaaggaatacatttctctgcggctcatcatcagtgagttgaggaaccagtatgtcaccctccatgacatgatcctcaaaaacatcgagaaaatcaagcggcctcggtccagcaacgctgaaaccctttactag

SEQ ID NO: 236449 - DNA, 1323 bp, synthetic construct
  misc_feature 1..1323: note = Description of Artificial Sequence: Synthetic coding sequence
  source 1..1323: mol_type = other DNA
atggggcagagccagtctggtggtcacgggccaggaggcggtaagaaggatgacaaagacaaaaaaaagaagtatgagccccctgtaccaaccagggttggcaaaaaaaagaaaaaaactaaaggacccgatgccgcatccaagctgcctcttgtaaccccgcacacccagtgccgcctgaagctgctcaaactggaacgcattaaagattatcttctgatggaagaagagtttattcgtaaccaggagcaaatgaagcccctggaggagaagcaagaagaagaacgaagcaaagttgacgacttaagggggacgcctatgtcagtgggcaccctcgaggaaatcattgacgacaatcacgcaatagtctcaaccagtgtcggatccgagcactatgtgagcattctgtcctttgttgataaggacctattagagcctgggtgctctgttctgctcaatcataaggtgcacgccgttataggtgtcctcatggatgacaccgatcctctggtgacagtgatgaaggtcgaaaaagccccacaggagacttatgcagatatcggaggacttgacaaccaaatccaggagattaaggagtccgtagagctgcctctgacacatcctgagtactacgaagagatggggatcaaacctccaaagggcgtaatcttgtacggaccgccagggaccggtaaaacgttgctggccaaggctgtagccaaccagacctctgctacatttctcagagttgtgggctctgagctcatccagaaatatctgggggacggtcctaagcttgtcagagaattattcagggtggctgaagagcatgctccaagtatcgtctttatcgacgagatagacgccatcggcactaaaaggtacgactccaattccggaggagaacgagagatccaaaggaccatgttggagctgctgaaccagctcgacggatttgactccaggggggacgtgaaagtgattatggcaactaatcggatcgaaaccctggaccccgctctgatccgccctggtagaatcgataggaagattgaatttcctcttcctgatgagaagacaaaaaagagaatcttccagatccatacgagccggatgacattagccgacgatgtgaccctggatgacctcattatggcaaaagatgatctttccggcgctgacatcaaagccatatgtacagaggcaggcctcatggcgctgagagaacggcgaatgaaggtgaccaatgaggattttaaaaaatccaaggagaacgtgctttataagaaacaggagggaacgcctgaggggctgtacctttag

SEQ ID NO: 236450 - DNA, 1104 bp, synthetic construct
  misc_feature 1..1104: note = Description of Artificial Sequence: Synthetic coding sequence
  source 1..1104: mol_type = other DNA
atggaggaggaattcatcaggaaccaggagcagatgaagcctctagaggagaagcaggaggaggaaagaagcaaggtcgacgatctccgagggactccaatgagcgtagggaccctggaagagatcatagacgacaaccacgctattgtttccacaagtgtgggaagcgagcactatgtgagcatcttatcctttgtcgataaggatctgttggaacccggttgtagcgtgctattgaaccacaaagtgcatgcggtcatcggtgtgcttatggacgataccgaccctctggtaaccgtgatgaaggtcgagaaggccccacaggaaacgtacgcagatatcgggggactggacaatcagatacaggaaatcaaagagagcgtcgagcttccacttacccatcccgaatattacgaggagatgggcatcaaacctcccaaaggggttatcctctatgggcctcccggaaccgggaagactcttttagctaaggcagtagcaaaccagaccagcgcaacatttttgcgagtggtcggttcggagttgattcagaagtatcttggcgacgggcctaaactggtcagagaactttttcgagtcgctgaggagcatgccccttcaatcgttttcatcgacgagattgatgctatcggaacaaagcgctacgactccaactctgggggagagcgagaaattcagagaactatgctggagttactaaaccagctggatggattcgacagtcgaggggatgtaaaggtcatcatggccacaaaccggatagaaactctggacccggctctcatacgtccaggacgtattgatcgcaagatagaattccccctgccagacgaaaagaccaagaagcgaatcttccagatacataccagccgcatgaccctcgccgatgacgttacattggatgacctgatcatggctaaggatgacttaagtggggcagatataaaagcaatctgcaccgaggcaggcctgatggccctgcgcgagaggcggatgaaagtgaccaatgaagacttcaaaaagagcaaggagaacgttctgtacaaaaagcaggagggcacaccggaaggcctctatctttag

SEQ ID NO: 236451 - DNA, 1302 bp, synthetic construct
  misc_feature 1..1302: note = Description of Artificial Sequence: Synthetic coding sequence
  source 1..1302: mol_type = other DNA
atgcctgattaccttggcgcagatcagagaaagactaaggaagacgaaaaagatgacaagcctatccgtgccctcgacgagggggacattgcactgttgaagacctatggccagtctacttactcgcgacagatcaagcaggtggaagacgacattcagcaactgctcaagaaaattaacgagctcaccgggatcaaagaatccgacaccggcctggcgcctcctgccctctgggatttggcggcagacaaacagaccctgcaatcagagcaacccctgcaggtcgctcggtgtacaaagattatcaatgcggacagtgaggaccccaagtacattatcaatgtgaaacagttcgcaaaattcgtggtcgacctgtccgatcaagtagcaccaacagacattgaggagggcatgcgcgtaggtgtggataggaacaagtaccagatccacatcccactgcctcctaaaatcgatcccacagttaccatgatgcaggtagaagagaagccggacgtgacttatagtgacgtgggagggtgcaaagagcagatcgagaaacttagggaggtcgtggaaacccccttgctgcatccagagagatttgtgaacctggggatcgaacctcctaaaggcgttctcctattcggccctcccggaactggaaaaacactctgcgccagggccgtcgcgaatagaacagacgcctgtttcattagagtgattggatcagaacttgttcagaaatacgtgggagaaggcgctagaatggtgcgggaactctttgagatggctagaacgaaaaaagcgtgtctcattttcttcgacgagatcgatgctatcggcggtgctagattcgatgacggtgcagggggagataacgaggtacagcgtaccatgctggaattgatcaaccagttagacggctttgacccacgcggaaacattaaggtattaatggccactaatcggcctgatactcttgacccagccctgatgcgacctggcagactagacagaaagatcgagttttcattgcccgacttagaagggagaacacacatctttaagattcatgcacgctccatgtcagttgaaagagacatacgcttcgaactgctcgcccgtctgtgccctaatagcactggcgcagagatccgttcagtgtgcacggaagccggaatgttcgccattagagctcgcaggaagattgcaactgaaaaagactttctggaagctgtgaacaaagtgatcaaatcctacgctaaattcagtgcaacaccgcgttatatgacgtacaattag

SEQ ID NO: 236452 - DNA, 393 bp, synthetic construct
  misc_feature 1..393: note = Description of Artificial Sequence: Synthetic coding sequence
  source 1..393: mol_type = other DNA
atgcctgattacctgggggctgatcagaggaaaactaaggaggacgagaaagatgataaacctatccgcgctctagacgagggcgatattgcgttactcaagacttatggccagtcaacctacagtcggcagattaagcaggttgaagatgacatccagcagcttctcaagaagattaacgaactgactggaataaaagagtccgacacagggcttgcccctcctgccttgtgggacctggccgctgacaaacagacattgcaaagtgagcagccacttcaggtcgccagatgcacgaaaatcatcaatgccgatagtgaggatccaaagtacataatcaacgtgaagcagtttgccaaattcgtagtggaccttagcgatcaggtagcatag

SEQ ID NO: 236453 - DNA, 1302 bp, synthetic construct
  misc_feature 1..1302: note = Description of Artificial Sequence: Synthetic coding sequence
  source 1..1302: mol_type = other DNA
atgcctgattacttaggagccgatcagcggaagactaaggaagacgagaaagacgacaagccaattcgcgcactcgacgaaggagacatcgcccttctgaaaacatatggtcaatctacttacagccgccagataaaacaggtggaggacgacattcagcagctcctcaaaaagataaatgagctcacaggaatcaaggaatccgacactgggctggctcctcctgccctgtgggaccttgcagccgacaagcaaacccttcaaagtgaacagcctcttcaggtcgcacgctgcactaaaataatcaacgctgattcagaagaccccaagtacatcatcaatgtgaaacagtttgctaaattcgtcgttgatctgtctgaccaggtagcgcctaccgacattgaagaaggaatgcgggtgggggttgatcggaacaagtaccagatccacatccccctcccacccaagatcgatcccacggttactatgatgcaggtggaagaaaaacctgatgtaacgtattccgacgtggggggatgtaaggagcagatcgagaaattgcgagaggtggtcgagacaccgctgctgcatcccgagcggtttgtaaacctcggcatcgaaccccctaagggagtacttctgttcggcccacctggaactggaaaaacattgtgcgctagggcagtggccaacagaacagacgcttgttttatccgcgtgatcggcagcgaactggtgcagaaatacgtcggggagggggctcggatggtaagggaactgtttgagatggcaaggacaaaaaaagcttgtctgatcttttttgacgagatcgacgctatcggcggagcacgctttgacgacggcgcagggggtgacaacgaagtccagagaacaatgttagagctgattaaccaactggatggtttcgatccgcgaggtaacattaaagtattaatggcaacaaatagaccggacactctggaccctgcgctgatgcgaccaggtagactagaccgaaaaatcgaattcagcctacccgacctggaggggcgaacgcatatcttcaagatccacgcacggagtatgtcagttgagagagacattaggttcgagctgctggctcggctgtgtcccaacagtactggcgcagagattaggagtgtctgcacagaggccggtatgtttgcaattcgcgcacgcagaaagattgcaacagaaaaagatttcctcgaggcagtgaacaaagtgataaagtcctacgctaagttcagtgccacccctcggtacatgacctacaattag

SEQ ID NO: 236454 - DNA, 393 bp, synthetic construct
  misc_feature 1..393: note = Description of Artificial Sequence: Synthetic coding sequence
  source 1..393: mol_type = other DNA
atgcctgactacttgggggcagatcagcgcaagacaaaagaagacgagaaagacgacaagccaataagggccctagacgaaggggatatcgcgctgctgaagacatacggacaatccacatactccaggcaaatcaaacaagtggaggatgacatacagcagctgctaaaaaagatcaatgaattaacagggatcaaggagtcagacacagggctagccccacctgcactttgggacttggctgccgacaaacagacacttcagtccgagcagccacttcaggtcgcccgatgtacaaagataatcaatgcagactctgaagaccccaagtatatcatcaacgtcaagcaattcgcaaagttcgtcgtggacctttctgatcaggtggcatag

SEQ ID NO: 236455 - DNA, 891 bp, synthetic construct
  misc_feature 1..891: note = Description of Artificial Sequence: Synthetic coding sequence
  source 1..891: mol_type = other DNA
atgagggtgggtgttgatagaaataagtaccagattcacattcctttgccacccaaaattgaccctactgtgacaatgatgcaggtggaagaaaagccagatgttacatactcagacgttggagggtgcaaagaacagattgagaaactccgcgaagtcgtggaaacaccgctgctgcacccagaacgatttgttaaccttggtatcgaaccacccaagggagtacttttgttcggtccccctgggactggcaaaacactgtgcgccagagctgtggcgaaccggaccgatgcgtgcttcatcagggtaatcggctcagaactcgtgcaaaagtacgttggagagggcgctcggatggtccgcgaactttttgagatggcgcgaaccaagaaagcttgtctgatcttttttgacgaaatcgacgcgataggcggtgcgcgatttgacgacggggctgggggagacaacgaagtgcaaagaaccatgttggagcttattaatcagctggatggcttcgacccgcgaggtaatatcaaagtgctaatggccactaaccggcctgacaccctggacccagctcttatgcggccaggccgactggatcgaaagatcgaatttagtctccctgacctcgaggggaggacacatatatttaaaattcatgccaggagcatgtcagtcgagagagatattaggttcgagctcctagcaagactttgtccgaattccaccggtgccgaaataaggtcagtgtgcacagaggcaggcatgtttgctattagagcgagaaggaagatcgccacggaaaaagacttccttgaggccgtgaacaaggttatcaagagctacgctaaattcagtgccacacctaggtacatgacatataattag

SEQ ID NO: 236456 - DNA, 1320 bp, synthetic construct
  misc_feature 1..1320: note = Description of Artificial Sequence: Synthetic coding sequence
  source 1..1320: mol_type = other DNA
atgaacttgctcccgaacatcgagagtcctgtaacacggcaggagaaaatggccacggtttgggatgaggccgagcaggatggcattggggaagaagtattgaagatgagtactgaggaaattatccaacgcaccagattgctggacagcgagatcaagatcatgaagagtgaggtgctccgcgtgacacacgaactgcaggctatgaaagataaaattaaagagaactctgagaagattaaggtgaataagactctcccatatttggtgagcaacgtgatagaactgctggacgtggatcccaatgaccaggaggaagacggcgcaaatatagacctggactcgcagcgaaagggaaagtgcgccgtgattaagactagcaccagacagacctattttctgccagtaatcggcctggtggacgcggaaaaactcaaacctggagacctggttggagtcaataaggattcctacttgatactggaaacattacctacagaatatgactcccgcgtaaaggccatggaggtggatgagcggcctactgaacaatacagcgacataggcggactggacaagcagatccaggaactggtggaggcgattgtgctgccaatgaatcacaaggagaaatttgagaacctgggtatacagccccctaagggagtattgatgtatggtccacccggaacaggcaagaccctccttgcaagagcttgcgctgcccaaaccaaggccacgtttctgaaactggcaggcccacagctggttcagatgtttattggggacggggctaagctggtgagagacgcatttgcactcgccaaagaaaaggctccgagtattatctttattgatgaactggatgcaataggcacaaaacggtttgactccgagaaggccggagacagggaagtccagaggacaatgctggaactgctgaatcagctagacgggtttcagccaaacacccaggtgaaggtaatcgccgctactaaccgggtggatattctggatcccgcacttcttagatcgggtagattagaccggaaaatcgagttccccatgccaaatgaggaggcacgtgccaggattatgcagatccacagtcggaaaatgaacgtctcacctgacgtcaactatgaagagttagctcgttgcaccgatgattttaacggtgctcagtgcaaggcggtatgcgtcgaggcaggcatgattgcccttcgaaggggcgcaacagaactaacacatgaggactatatggaaggaatcctggaggtacaggcaaaaaagaaggccaatctgcagtattacgcgtag

SEQ ID NO: 236457 - DNA, 1257 bp, synthetic construct
  misc_feature 1..1257: note = Description of Artificial Sequence: Synthetic coding sequence
  source 1..1257: mol_type = other DNA
atggaggagatagggattctggttgagaaggcacaggatgagatccccgctttatcggtgagtcggccacagaccggcctgtcattcctgggacctgaacccgaagacttagaagatctgtactccagatataaaaagctccagcaggagctggaattcctcgaagtgcaggaggagtatattaaggacgaacagaaaaatttgaagaaagagttcttgcacgcccaggaggaggtgaagagaatccagtctattcctcttgtgatcgggcaattcttggaggccgtcgatcagaacactgctattgtcgggagtaccactggctcaaattactacgtccgcatcctcagtacgatagatagagaattactgaaaccaaatgcttctgtagccttgcacaagcactcgaacgctctcgttgatgtgttgccccctgaggcggactcttccatcatgatgcttacatctgaccaaaaaccagacgtgatgtatgctgacatcggcggaatggacatacagaaacaagaggtgcgcgaggcagtggaactacctctcacacactttgagctttacaagcagattggaatcgatccacctagaggtgtgttaatgtacggtcctccgggttgtggcaaaaccatgctggctaaagctgtggctcaccataccaccgccgcttttatcagagtcgtgggatctgaatttgttcaaaaatatcttggagaggggcctcgcatggtgagagacgtttttaggttagccaaggaaaacgccccagccataatctttatcgacgagatcgacgctattgccaccaagcgctttgatgctcaaactggggcagacagggaagtgcagcggatcttactggagctgctcaaccagatggatgggtttgatcaaaatgtcaacgtgaaggttatcatggctaccaatagagcggataccctggatccagctcttttgagacctggcagactggaccgcaagattgaattccctctccccgacaggcgacagaagagacttatcttcagtaccattactagtaaaatgaatctgtcggaagaggtcgaccttgaggactacgtcgccaggcctgacaaaatttcaggcgctgatatcaacagcatttgccaggagtccggcatgcttgccgtaagagagaaccgctatatcgtcctggcaaaggattttgaaaaagcctataagacggtaatcaaaaaagacgagcaagaacacgaattttacaaatag

SEQ ID NO: 236458 - DNA, 1164 bp, synthetic construct
  misc_feature 1..1164: note = Description of Artificial Sequence: Synthetic coding sequence
  source 1..1164: mol_type = other DNA
atggaagaaattggcattctggtggaaaaggcccaggatgagatccccgcactcagcgtgagccggcctcagaccgggcttagcttcctgggacccgagcccgaagatttggaagacctctattctcgatataaagaagaggtgaagcgcattcaatctatcccactggtgatcggccagttcttagaagccgttgaccagaacacggccattgtggggagtacaaccggtagcaactattacgtgagaatcttatctaccattgatcgggagttgctgaagcccaacgcatcagtggcacttcataagcattctaacgcactggtggacgtgctgccccctgaggctgattcatctattatgatgctcactagtgatcaaaagcccgacgtgatgtacgccgacattggtgggatggatattcagaaacaagaggtgagggaagccgtggagctgcctctaacgcattttgaattgtacaaacaaatcggcatcgaccctcccaggggtgtcttgatgtacggccctcccggttgtggaaaaacaatgctggccaaagctgttgcgcaccatacgacagcagctttcatccgagtggtaggcagcgaattcgttcagaagtatctcggagaaggacctcgtatggttagagacgtgtttcggctggccaaagagaacgccccagctataatatttatcgatgagattgatgcaatagccacaaagagattcgacgcccaaacaggcgcagaccgggaggttcaaagaattctcttagagttgcttaatcagatggatggtttcgatcaaaatgttaatgtgaaggtgatcatggccactaatagagcagataccctggaccccgcattgctgagacccggaagactggatcggaagatcgaatttcccctgccagatcggagacagaagagattaatctttagcacgattacttcaaagatgaatctttccgaagaggttgatctggaagattatgtggctcggccagacaaaatttctggcgctgacataaattctatctgccaggagtccggcatgcttgcagtccgggaaaacaggtatattgtgcttgccaaggacttcgaaaaggcttataaaaccgtaattaagaaagacgagcaggagcacgaattttacaaatag

SEQ ID NO: 236459 - DNA, 1221 bp, synthetic construct
  misc_feature 1..1221: note = Description of Artificial Sequence: Synthetic coding sequence
  source 1..1221: mol_type = other DNA
atggccttggacgggcctgagcagatggagttggaggaggggaaggcagggtcaggtctccgccagtattatctctccaagattgaggaactccagttaatcgtgaatgataagtcccagaacttgagacgattacaggcacagcggaacgagctgaatgcaaaagtcaggttgttacgggaggaattgcagctgttgcaggagcaggggagttatgtgggggaagtggtgagggccatggataagaagaaggtgctcgtgaaagtgcatccggaaggtaaattcgtggtagacgtggacaaaaacatcgacattaacgacgtaactcctaattgccgagtggccctcaggaacgattcttacactctccataagatactgcccaacaaggttgatccactggtgagcttgatgatggtagaaaaagttccagattcgacgtacgagatgattgggggtcttgacaaacaaataaaggagatcaaggaggttattgaactgccagtgaaacacccagaacttttcgaagccctgggaatcgcacagcctaagggcgtgctcctctatgggccacccggtaccggaaagacgctcctggcgagagccgtagcccaccacacagattgcacctttatccgcgttagcggcagcgaactggtgcaaaagttcataggtgagggagcgcgaatggtccgggaattgtttgtaatggccagggagcacgctcctagcattatcttcatggacgagattgactctataggctcttcaaggctagaagggggtagcggtggcgattcagaagtgcagaggactatgcttgagctgctgaatcagctggacggatttgaggccaccaagaatataaaggtaatcatggccaccaatcgcattgacatccttgattctgccctgcttcgcccagggcgtattgatcgcaaaattgagtttccccctcccaatgaggaggcacggctggatatcctcaagattcacagtcgtaagatgaatctgacacgcggtattaacctgcgtaagattgcagagctgatgccaggtgcgtctggagccgaagtcaaaggtgtatgtaccgaggcagggatgtatgcactgcgggaacgccgtgttcatgtgactcaggaggactttgagatggccgtcgcaaaggtgatgcagaaggactctgagaaaaatatgtccatcaagaagctatggaaatag

SEQ ID NO: 236460 - DNA, 1197 bp, synthetic construct
  misc_feature 1..1197: note = Description of Artificial Sequence: Synthetic coding sequence
  source 1..1197: mol_type = other DNA
atggagttggaggagggtaaggctggttccggcctgcgacagtactatctcagtaagattgaggagcttcagttgattgtgaatgataaatcacagaacctgcggagactgcaggctcagaggaatgaactcaatgctaaagtccggcttctgcgggaagaacttcaactcctacaggagcaggggtcctacgttggagaggtggtcagagccatggataagaagaaagtgctggttaaagttcatcctgagggtaaattcgtagtggatgtagacaaaaacatcgacattaatgacgtgacgcctaattgcagagtagccctgcgcaacgacagttatacgctgcataagattctccccaacaaagttgatcctctggtcagtctgatgatggtggagaaagtcccggattctacttacgaaatgataggtgggctcgataagcagatcaaggagataaaggaagtcattgagctgcctgtcaaacaccccgagctttttgaggcgcttggaatcgctcaaccgaagggcgtactgctatacggaccccctggcacagggaaaacactgcttgcccgtgcagtagcccatcacacagactgcacgtttataagggtgtcgggttccgagctggtgcaaaaatttattggcgagggggcaagaatggttcgcgaactatttgtcatggctcgggagcatgccccatcgataatctttatggacgagattgactctatcgggagctctcggttagagggaggcagtggcggtgactcggaggtacagcgcacaatgttggaacttctgaaccagctcgacggatttgaggctacaaaaaatatcaaagtgattatggcaaccaacagaatcgatatcttggatagcgccctcctccgcccaggacggattgaccgcaaaatcgagtttcctccaccaaacgaggaggctcggttggatattttgaaaatccactcgaggaagatgaacctgacaagagggatcaacctcaggaagattgcagagcttatgcctggcgcttccggagccgaggtcaagggggtatgtactgaggcagggatgtatgccctacgtgagaggcgtgtgcatgtgactcaggaagacttcgaaatggctgtagcaaaggtgatgcagaaggatagcgaaaaaaacatgagcattaagaagctttggaagtag

SEQ ID NO: 236461 - DNA, 1212 bp, synthetic construct
  misc_feature 1..1212: note = Description of Artificial Sequence: Synthetic coding sequence
  source 1..1212: mol_type = other DNA
atggccataccaggaatcccctacgagcggagactgctcattatggccgatccccgtgataaagcactccaggactaccggaaaaaattacttgagcacaaagagatcgacggccgactgaaagaactccgggagcagctcaaagagctaaccaaacagtatgaaaagagtgagaatgacctgaaggccctccagtctgtggggcagatcgtgggagaggttctgaagcaactcaccgaggaaaagttcatcgttaaggctaccaacggccctaggtatgtagtgggctgtcggagacagttggacaagagtaagttgaaaccagggacaagagtggcactggacatgaccactctcactataatgagatatctcccaagagaggtcgaccccctggtatataatatgagccacgaagaccctgggaatgtgtcctatagtgagatcggtggtctttctgaacagattcgtgagctcagggaggtgattgaacttccactgaccaatcctgagctattccagcgggtgggcattatcccgcctaagggttgcttgctttatggaccaccaggtacaggcaagaccctgcttgcacgtgccgtagcatcacaactggattgtaacttcctcaaagtggtatccagttccattgtagacaagtatattggagagagcgcacggctgattcgggagatgttcaattatgctcgagatcatcagccctgtatcatcttcatggacgaaattgatgctattggcggacggagattttcggaaggaactagcgcagatagagaaattcagagaactctgatggaacttctcaatcaaatggacggcttcgatactctacatcgcgtgaaaatgattatggctactaaccggcctgacaccctggatcccgctctgctgcggcctggacgcctcgatcgcaaaatacatattgatttgcccaacgaacaggccagactggacatcctgaagattcatgccggaccaattaccaaacatggagaaattgattacgaagccattgttaagctcagtgatggatttaacggcgctgacttacgcaacgtgtgtacagaggctggcatgttcgcaattcgagccgaccatgattttgtcgtccaagaagatttcatgaaggcagtccgcaaggtggcggacagcaagaaactcgagtctaagctggattacaaacccgtgtag

SEQ ID NO: 236462 - DNA, 933 bp, synthetic construct
  misc_feature 1..933: note = Description of Artificial Sequence: Synthetic coding sequence
  source 1..933: mol_type = other DNA
atggataggctactgcgactcggcggaggtatgccaggactgggccagggtccgcctacagatgccccagcggtcgacactgccgaacaggtgtacatctccagcctcgcccttttgaagatgctgaagcacggcagagccggagtgccgatggaagtcatgggtttaatgctgggtgaattcgtggatgactacactgtgcgagtgatagatgtattcgccatgcctcagtctggcaccggggtttccgttgaagctgtcgatcctgtatttcaagcaaaaatgctggacatgctcaaacagacaggacgtccagagatggtggtcggatggtatcactcacatcccggattcgggtgttggctgtcaggtgtcgatattaatacccagcagagtttcgaggcgctatctgagagagccgtggccgttgttgtcgaccctatacagtcagtcaagggcaaagtcgttatagatgcctttcggctcataaatgccaatatgatggtgctgggtcatgagccgagacagaccacttctaacttgggacacctcaataaaccatcgattcaggccttaattcatgggcttaatagacactactacagtataacaattaactacaggaaaaacgagttggagcagaagatgctgctgaacctgcacaagaagtcctggatggaaggccttacccttcaggactactcagaacattgtaagcataacgagtcagtggttaaggagatgttggagctggccaagaattataacaaggcagtcgaggaagaagacaaaatgacgcctgagcaactggcaatcaaaaatgtcggcaaacaggacccaaagagacacttagaagagcacgtggacgtgctgatgacctcgaacattgttcagtgccttgccgctatgctcgataccgttgtgtttaagtag

SEQ ID NO: 236463 - DNA, 255 bp, synthetic construct
  misc_feature 1..255: note = Description of Artificial Sequence: Synthetic coding sequence
  source 1..255: mol_type = other DNA
atggaccgactgctgaggctcggtggaggcatgcctggattgggccaaggcccaccgacagacgccccagccgtcgacacggccgagcaggtctatattagctctcttgcactcttgaagatgttaaaacacggcagagcaggtgtgcctatggaagtcatgggcttaatgttgggagaatttgtcgacgactatacagtgcgagtcattgatgtctttgcaatgccccagtctgggaccggagtgtctgtgtag

SEQ ID NO: 236464 - DNA, 2727 bp, synthetic construct
  misc_feature 1..2727: note = Description of Artificial Sequence: Synthetic coding sequence
  source 1..2727: mol_type = other DNA
atggaagaagggggtcgcgacaaggccccagtccagccccagcaaagccccgctgcagccccaggaggaacggatgagaaaccatcaggtaaggaacgtagagatgcgggagacaaggacaaggagcaggagctgagcgaagaggataagcaactacaggacgaactagagatgcttgtcgaaaggctgggagaaaaggacacatccctgtatcggcctgcccttgaggagttaagaagacagatcagatcaagtaccacctccatgacctcagtgcctaagccactgaaattcctgcgtccccactatggtaaactgaaggagatctatgagaatatggctcctggggagaataagcgtttcgccgcagacatcatctcagtccttgccatgacaatgtctggagaaagagaatgcctcaagtatagactggtcgggtctcaggaggagctagcctcctggggccatgagtacgttcgacatttagccggagaagtggcaaaggaatggcaggaactcgatgacgcggaaaaagtgcagagggaacctctgctgacactggtgaaggagatcgtcccctacaatatggctcacaatgcagaacatgaagcctgcgatctcctcatggaaattgagcaggtcgacatgctggagaaggacatcgatgaaaacgcctacgccaaggtctgcttatatctaactagttgtgtaaattatgtgcccgagcctgaaaattccgctctactcagatgcgccctcggagtctttagaaaattctcgcgtttcccagaggcgctacgattagccttgatgctaaatgacatggaactggtcgaagatatatttacgagctgtaaagacgtagtcgtccagaagcagatggcttttatgctcggcagacacggggtgttcctcgagttatcagaggacgtggaggagtatgaagaccttaccgaaataatgagcaacgtgcaactgaacagcaatttccttgcgctagccagggagttagatatcatggagcctaaagtgcccgatgacatatataagacccatcttgagaataatagattcggcggatccggatcccaagttgactccgctcgaatgaacctggctagctcttttgtcaacggatttgtaaacgccgcattcggccaagacaagctcctcactgacgacggaaacaaatggctgtacaaaaacaaggaccatggaatgctgagcgctgccgcttccctgggtatgattctcctgtgggatgtcgacggaggtctgacacaaatagataagtatttatacagtagcgaggattatattaagagcggcgcattgctggcctgtggcatcgtgaatagcggcgtccggaacgagtgcgaccctgcactcgccctactttccgactatgtcttacataattcgaacacaatgagattgggctccattttcggactggggttggcatatgctggctccaacagagaagatgttcttacgctgcttctgcctgtgatgggggattcgaaaagctctatggaagttgcaggcgtcacggctctggcctgtggaatgatcgccgtcggatcctgcaacggggatgttactagcaccattcttcagactatcatggaaaagtctgaaactgagctgaaagacacctacgcacggtggctgcctctggggctaggcctcaaccacctcggaaaaggggaggctatcgaagccattctggcagcccttgaagtcgtcagcgaaccattcagatccttcgcgaatacccttgtagacgtttgtgcttatgccggatccgggaatgtgttgaaggtgcagcagttactgcatatatgctctgagcatttcgattccaaagaaaaagaggaggacaaagataagaaggagaagaaggacaaggacaaaaaggaggccccagctgatatgggggcacatcagggagtcgctgtgctgggtatagctctgatcgcgatgggagaagagatcggggctgaaatggccctgaggacatttggccacctgctgcgatatggagagcccacactgagacgcgcagtgcccttagcactggctttgatctccgtgagcaatcctaggcttaacatcctggatactctgtccaagttctctcatgacgctgatccggaggtgtcgtataactcgatatttgctatggggatggtgggttcaggaaccaacaacgcgagactcgccgctatgctcagacagctggctcagtaccatgcgaaagacccaaacaatctgttcatggtgcgtctggctcaagggctcacccatctcggaaaaggcacactgacgctgtgcccttatcattccgaccgacagttgatgtctcaggtggcagtcgccggtttgttgaccgtcctggtcagtttcctcgacgtacgaaacattattcttggtaagtcccactacgtcctctacggtctggttgccgctatgcagcccaggatgctggtgacattcgacgaagagctgcggccactgccagtatccgtccgcgtggggcaagctgtagatgtcgtgggacaggctgggaagcctaagaccattaccggctttcaaacacacacaactccagtcttgctggcccatggtgaacgggcagaactcgctacggaggaatttctgcctgtgacccctatcctggaaggctttgtaatccttcggaagaacccgaactacgatttatag

SEQ ID NO: 236465 - DNA, 1743 bp, synthetic construct
  misc_feature 1..1743: note = Description of Artificial Sequence: Synthetic coding sequence
  source 1..1743: mol_type = other DNA
cagtgcacagcacagcagcaactactcggcttgagtagcggggctggccatcacggtgcccagctcatgctacagaaccctcccagagagcagcaagtgtggggccagtggctcagcggcggtctgtgcccacatgagcctgggctgctcttttgcgagtggttgtgtgagtgtagtttttgggacaaactgctcactgatgacggaaacaagtggctgtataaaaacaaagaccatggcatgctctccgccgctgcttcactaggtatgatcctgctgtgggatgtcgacggtgggttgactcagatcgacaagtacctttattcaagcgaagattatatcaagagcggcgcacttctggcttgtggcattgtgaatagcggcgtccgaaatgaatgcgacccagctctggccttactgagcgactacgtgctccataattcaaataccatgagactggggtctatctttggccttggcctggcatatgcgggttcgaaccgtgaggacgtgctcaccctgctgctgccagtgatgggagactctaaaagttctatggaggtggcaggagtcacagcactcgcctgtggaatgatagctgtgggttcttgcaacggggatgttaccagtactattttacagaccatcatggaaaaatcagagaccgagctgaaagacacatacgccaggtggctgccacttggtctcggcctgaaccatctgggaaagggagaagccatcgaagccatcttagctgccctcgaagtggtgtctgagcccttcagatccttcgcgaacaccctggtagacgtatgtgcctacgccggtagcggaaacgtactcaaggtgcagcagcttctgcacatttgctcagaacacttcgactccaaggagaaggaggaggacaaggacaaaaaggagaaaaaagataaagacaagaaggaagctcccgctgacatgggggctcatcagggggtagccgtgctgggcccactgctgctctggggcagacggctggtgcagcgctggcattatgagccctatcaccagcttcgatacggagaacctactctccggagagcagtgcctcttgcactggctttgatctcagtatccaaccctcgccttaatatcctggataccttgagcaaatttagccacgacgccgacccggaagtcagctacaactcaatattcgccatggggatggtaggcagcggcaccaacaatgctagactggccgcaatgctgaggcagctggcccaataccacgccaaagacccgaataatctgttcatggtgcgcttggcccaggggctcacacacctgggaaaaggtacacttactttatgcccttaccatagtgatcggcagctgatgtctcaggttgccgtggccggactgcttaccgtactggtgtcttttctagatgtgcgcaacataattctaggaaagagccactacgtgctctacggtctcgtggccgctatgcagcccaggatgctagttacatttgatgaagagctaagacccttgcctgtgagcgtcagggtaggacaggcagtggatgtcgtgggccaagccggaaaacccaagactatcaccggtttccagactcatactacccctgtactcctcgctcatggcgaacgcgcagaattggcaaccgaggaatttctgcccgtgactcccattcttgagggcttcgtattcggcaggactccaatcatgataagtaaatag

SEQ ID NO: 236466 - DNA, 2703 bp, synthetic construct
  misc_feature 1..2703: note = Description of Artificial Sequence: Synthetic coding sequence
  source 1..2703: mol_type = other DNA
atggaagaagggggtagggacaaggccccagtgcagccccagcagagccccgcagccgctcctggtggcacagatgaaaagccttcaggcaaagacaaagaacaggaactttcggaggaggataagcagctgcaggacgagctggagatgctggttgaaaggctcggcgagaaggacacctccctgtacaggccggctctggaggaactgcgcaggcaaatccggtctagcacgacatcaatgacctcggtgcctaagccccttaaatttctgaggccgcactatggtaaattgaaagagatatacgaaaacatggcacctggagaaaacaagcggtttgctgccgacataatcagtgtgctggccatgaccatgagcggtgaacgagagtgcctcaaataccggctcgtcggtagtcaggaggaattagcgtcttgggggcacgaatacgttagacaccttgccggtgaggtggctaaagagtggcaggaactagacgacgccgaaaaggtgcaaagagaacctttgctcacgctcgtaaaagagattgtgccttacaatatggcacacaacgccgaacacgaggcttgtgacctccttatggagattgaacaggtggatatgttagaaaaagacattgacgaaaacgcttacgccaaagtgtgtctctacctgacaagctgtgtgaactatgttcccgagcccgagaactcagcccttctcagatgcgccctcggtgttttcaggaaatttagcaggttccctgaggctttgcggcttgcactgatgctaaatgatatggaactggtagaagacattttcacaagttgcaaggacgtcgtggtgcagaaacagatggcattcatgttaggaagacacggcgtcttcctggaattatccgaagacgtcgaggaatacgaagatctgacagaaataatgtctaatgtgcagctgaactctaactttctggctttggctagggaactggatattatggagccaaaggttccagatgatatctataagactcatttagaaaataatcggttcggcggaagcggtagtcaggtagactcagcccgaatgaaccttgccagttcatttgtgaacggttttgtcaacgctgcttttgggcaggacaaattactgactgatgatggcaacaagtggttgtacaagaacaaagaccatggcatgctgagtgcagccgcttcattgggcatgattttgctatgggatgtggacggtggccttacccaaattgataagtatttatactccagcgaagactatatcaagtccggcgcactgcttgcatgtggaatcgtcaactctggtgtaagaaatgagtgtgaccctgccctggctctgctgtctgactacgtgctccacaattcgaacaccatgcggctgggtagtatatttggtctgggactggcttacgccggtagcaatagagaagatgtcttgactctgctgctgcccgtcatgggcgacagtaaatccagcatggaagtggcgggtgtaaccgccctggcctgtggtatgatcgctgtcggatcatgtaatggtgatgtgacatcaaccatactgcaaaccattatggaaaaaagcgagaccgaactgaaggacacttatgccagatggctcccgctgggcctcggactgaaccatctggggaaaggcgaggccatagaagcaattctggccgctctggaggttgtaagcgaacctttcagatcattcgctaacactctggtcgatgtatgtgcctacgcgggaagtggaaacgtgctgaaagtacagcaacttctccacatctgctccgaacacttcgatagtaaagaaaaggaggaggataaggataagaaggagaagaaggataaagataagaaagaggccccagccgatatgggcgcacatcagggcgttgccgtgctgggtattgccctgatagccatgggagaggagattggtgcagagatggccctcagaactttcgggcacttgctgagatacggtgagcctacacttagaagggccgtacccctcgctctagcactcatttcggtgtctaatccgcgtctcaatattctggacaccctcagcaaattttcccatgatgccgatcctgaggtgagttacaactcaatatttgctatggggatggtgggctctgggaccaacaatgcacgcctggcagccatgctgaggcagctggcacaataccacgctaaagacccaaataacctgtttatggtaaggttagctcaaggactgacccacttggggaaagggacccttaccctctgcccataccattccgaccgccagctaatgtcacaggtggccgtggcgggtttactgacagtgcttgtcagtttcctcgacgtgcgtaatatcatactcggtaagtctcattacgtgctctacgggctggtggctgccatgcagcccagaatgttggttacctttgacgaggagttgcgccctttgcctgtgtccgtacgggtgggccaggccgtggacgtagtgggccaggctggtaaacccaaaaccattactggctttcagacacacactacgccggttcttttagcccacggtgaaagagccgagctggccaccgaagagttcctgcccgtgacacccattctggaggggttcgtgatcctccgcaagaatccaaactatgatctgtag

SEQ ID NO: 236467 - DNA, 552 bp, synthetic construct
  misc_feature 1..552: note = Description of Artificial Sequence: Synthetic coding sequence
  source 1..552: mol_type = other DNA
atggatgcaagcccatcccccttcagcctgcctaaaaaactcaatgaactttctgcgaggaggggttctgatgaactgctgagctccggaatcatcaacggcccattcacgatgaactcatctaccccttccacggccaacggtaatgactctaaaaagtttaagagagatagaccaccctgcagcccttcgcgtgtgctccatttgagaaaaataccctgcgatgttacagaggctgagatcatctctctgggcctgccctttggaaaggtgactaaccttctaatgctgaagggcaaaagtcaagcattcctggaaatggcttccgaagaggccgctgtcacgatggtgaactattacaccccaatcacacctcacttacgtagccagcctgtttacatccagtactctaaccaccgcgagctgaagaccgacaacctgcctaaccaggcaagggcgcaggccgcactacaggctgtttcagccgtccagtcaggcagtcttgccctgtccggtggtccttcaaacgagggaaccgtcctccccggatag

SEQ ID NO: 236468 - DNA, 474 bp, synthetic construct
  misc_feature 1..474: note = Description of Artificial Sequence: Synthetic coding sequence
  source 1..474: mol_type = other DNA
atggtaactagtcttgcctacacgcatcatggaaggcaatacttagcccaggagggcgtgatcgaccagattagcaacatcattgtgggagcagactcagatccgttcagcagtttctaccttccagggttcgttaagttcttcggaaatctggctgtcatggacagcccacagcagatctgcgaaagatatcccatttttgtcgaaaaggtctttgaaatgatcgagtcacaggaccccactatgattggtgtagccgttgatacagttggtatcctcggctctaatgtagagggtaaacaggttcttcagaagaccggatggtatgatctggccctgttcagagatatcttgatctttgatcggggaagtatctgtaagtttatctgctggtgggtgaactatatcgtagagacaatcctgtgggtcgctgtcctgctcactatgacattatatagctgcctgaagatatag

SEQ ID NO: 236469 - DNA, 1386 bp, synthetic construct
  misc_feature 1..1386: note = Description of Artificial Sequence: Synthetic coding sequence
  source 1..1386: mol_type = other DNA
atggcagcccaggctttggccctcttgagggaggttgccagattggaggcgccattggaggagctgagagcgctgcatagtgtgctacaagccgtcccacttaacgagctgcgccaacaggctgccgagctgcgtctgggcccactttttagccttcttaacgagaaccacagagaaaaaacgacgctatgcgtgtctatcctggaaaggctactgcaagcaatggagccagtgcatgtggcacggaatctgagagttgacttgcagcggggattgattcatcctgatgacagcgttaagattcttaccctatcgcagataggccgaatcgtggagaattccgacgccgtgacagaaatccttaataacgctgagttattgaaacagattgtctattgtatcggtggggagaatctgtctgtggctaaagctctcattatagagatctcctcagtgagcccagaatcccttaattactgtaccacttcaggtctggtaactcaactgctacgggagctcacgggggaggatgttctcgtgcgggcaacctgcatagaaatggtgacgtcacttgcttatacgcatcacggacgacagtacctcgcccaggagggggtcattgatcagattagcaatatcatcgtaggcgctgacagcgaccctttctcgtccttttacttgcccggatttgtgaagtttttcggcaatcttgccgtgatggactcccctcagcagatctgcgagcgctatcccatttttgtggagaaagtgtttgagatgattgagagccaagatcctaccatgatcggagtggctgtcgataccgtggggattctgggctccaatgtggagggcaagcaggtcctacagaagactggtacccgctttgaacgtctcttgatgagaatcggacatcagagcaaaaatgcaccagtcgagctgaaaatacggtgtctggatgccatttctagcctcctgtatctgccgcctgagcagcagactgatgatctcctgaggatgactgagagctggttcagcagtttgtcacgagatccattggagctgttccggggaatctcaagccaaccgtttcccgaactgcactgtgcggctcttaaggtgtttaccgctatcgcaaatcaaccatgggctcagaagctgatgttcaacagcccaggcttcgtcgagtacgtagttgaccgcagtgtggagcacgacaaggcgtcaaaggatgcaaaatatgagttagttaaagccctggcgaattctaaaaccatcgcagaaatctttggtaatcctaattatttgcggctgaggacttacctgagcgaaggcccatactatgtcaaacccgtctctacaacagctgtggagggagccgagtag

SEQ ID NO: 236470 - DNA, 294 bp, synthetic construct
  misc_feature 1..294: note = Description of Artificial Sequence: Synthetic coding sequence
  source 1..294: mol_type = other DNA
atgcgtataggccaccaatccaaaaatgccccagtcgagcttaaaatcagatgtttggacgccatttccagtctgctatatctccccccagagcaacaaacagacgacttgctgagaatgacggaaagttggtttagcagcctctcacgggacccgttggagctctttcgcggaatcagctcacagcctttccccgagttgcactgtgctgccctgaaagtctttaccggacggaaacacttacacctggaagagctggtgggagggaatcaggtaaagaacacagtggagtag

SEQ ID NO: 236471 - DNA, 510 bp, synthetic construct
  misc_feature 1..510: note = Description of Artificial Sequence: Synthetic coding sequence
  source 1..510: mol_type = other DNA
atgatttgcctggtgctgacaatctttgccaatctctttcctgcagcttgcacgggtgctcacgagcgtacctttctggctgttaagccagatggggtgcagaggcgcctggtgggtgagatcgtcagacggtttgagcggaaaggatttaaactagtggccttgaagttggtacaggcttccgaagagctgcttcgggagcactacgccgaactgagagagcgcccattctacgggaggctggtaaaatacatggcaagtggaccagtagttgccatggtgtggcaagggctcgatgttgtgcgcacttcacgggctttaataggtgccaccaatcctgcagatgctcctccgggtacgataaggggcgatttctgcatcgaggtggggaagaaccttattcatgggtccgactctgttgagagcgcccgtcgagagatagcattatggtttcgagctgacgaactcctatgttgggaggactccgcaggccactggctgtacgagtag

SEQ ID NO: 236472 - DNA, 744 bp, synthetic construct
  misc_feature 1..744: note = Description of Artificial Sequence: Synthetic coding sequence
  source 1..744: mol_type = other DNA
atgtatggcatgtttaaaaaagtgaacgccagagagcgcatcgttgggtggtaccacacgggacccaagttgcacaagaatgacatcgctataaatgaactgatgaagcgctattgccctaacagcgtattggtcattatcgacgtgaagcctaaagaccttggcttgccaacagaggcttacatctccgtggaggaagtgcacgacgatggtaccccaacttctaagacctttgagcatgtgaccagcgagattggcgctgaggaggccgaggaggtgggagtagagcacttgttgagagatattaaggatacaaccgtcggcacactgtctcaacgcatcacaaatcaggtccacggcttaaagggactgaacagtaaattactagatatccgttcctacctcgaaaaagtggcaactgggaagttacccatcaatcatcaaattatttatcagctgcaggatgttttcaacctcctgccagatgtatccctacaggaattcgttaaggcattttacctgaaaaccaatgatcagatggtagtggtgtatctggctagtctcatccgatcagtagtagccctccacaacctgattaacaacaagatcgcgaacagagacgccgaaaagaaagaaggacaggaaaaagaggagtccaaaaaagaccgaaaagaagacaaagagaaagacaaggacaaagagaaaagcgatgtcaagaaagaggagaagaaggagaaaaagtag

SEQ ID NO: 236473 - DNA, 624 bp, synthetic construct
  misc_feature 1..624: note = Description of Artificial Sequence: Synthetic coding sequence
  source 1..624: mol_type = other DNA
atgtcagatgaagaagccagacaaagcggagggagtagccaggccggtgtggtgaccgtgtctgacgtacaggaactgatgaggagaaaggaggaaatcgaagcccagatcaaagctaattacgacgtcctcgaatctcagaagggaattggaatgaatgagcccctagtcgactgcgagggttaccctagatctgacgtagatctctatcaggtgaggactgctcgtcataacattatttgtctgcaaaacgaccacaaggccgtcatgaagcaggttgaggaagcgcttcaccagctccacgccagagacaaggagaagcaggcccgtgacatggccgaagcacacaaggaggccatgtccagaaagttgggtcagagtgagagccagggtcctccccgagcttttgcaaaggtgaactcgatctctcctggtagccccgctagtatcgcagggcttcaggtggacgacgagatcgtggaatttggcagtgttaacacacaaaatttccaaagccttcacaacatcggctctgtagtgcagcattccgagggggcacttgccccaacaatcctgctttcagtctcaatgaacttaacaacccccggaacaagtagtcgatag

SEQ ID NO: 236474 - DNA, 672 bp, synthetic construct
  misc_feature 1..672: note = Description of Artificial Sequence: Synthetic coding sequence
  source 1..672: mol_type = other DNA
atgtcagatgaggaggccagacaatcaggaggctcatcgcaggcaggggtggttaccgtgtccgatgtgcaggagctgatgcggaggaaggaggagattgaggctcagataaaagccaattacgacgttctcgaaagccagaaagggattggaatgaatgaacccttagtggattgtgagggctatcctaggtcagacgtggacttgtatcaagtgcgaactgcccgacataacatcatctgcctacagaacgaccacaaagcggtgatgaagcaggtggaggaagcactgcatcaactccatgcaagagataaagaaaagcaggccagagacatggctgaggcccataaagaggccatgtccaggaaactcggccagtcagagagtcaggggcctccccgagctttcgcgaaggtgaactctattagtccgggaagtcctgcctccatagcaggtctccaagtggacgatgaaatcgtcgagttcggctccgtcaacacacaaaatttccagtccctccataatattggatcagtcgtgcaacattccgagggtaaacccttgaatgtcaccgtgatccgcaggggagaaaagcatcagctccgcctggtgcccacaagatgggctgggaaagggttactaggttgtaatataatcccactgcaacggtag

SEQ ID NO: 236475 - DNA, 411 bp, synthetic construct
  misc_feature 1..411: note = Description of Artificial Sequence: Synthetic coding sequence
  source 1..411: mol_type = other DNA
atgctgctgaaactgaaggagaaagcttccctgacgctcgctgtcggtactcttccgttcccgagtcagttcaacttcgtgcccccagggagaatgtgtcgtgtagccggttggggacggaccggagtgcttaagcctggatcagacacgctgcaggaagtaaaactgcggctgatggatccacaggcatgtagtcatttcagggacttcgaccataacctgcagctctgcgtagggaacccgcgaaagaccaagagtgcatttaaaggcgactccggtggccctctcctttgtgcaggcgttgcccaggggatcgtgtcatacggacgtagcgatgcaaagcctccagccgtctttacacgcatatcccactacagaccatggattaatcagattctgcaggctaactag

SEQ ID NO: 236476 - DNA, 753 bp, synthetic construct
  misc_feature 1..753: note = Description of Artificial Sequence: Synthetic coding sequence
  source 1..753: mol_type = other DNA
atggccatgcttcgtgttcaacccgaggcacaagctaaggtggacgtcttccgcgaggatctgtgtaccaaaactgaaaacctgctgggatcctatttcccaaaaaagatttctgaattggacgccttcctgaaggagccagcccttaacgaagccaatcttagcaatcttaaggcccctctggacatacctgtccccgaccctgtgaaggaaaaggagaaagaggaaaggaagaaacaacaggaaaaagaggataaagatgagaaaaagaagggtgaggatgaggacaaaggcccaccctgtggtcctgttaattgcaacgaaaaaattgtggtcctcctccagaggcttaagccagaaattaaggacgttatcgaacagcttaacctggtgacgacctggctgcagctccagattcccaggatcgaggacggcaataactttggagtcgctgtgcaagaaaaagtgttcgagttgatgactagcctccatacaaagctggaaggatttcatacccaaatttcgaagtatttttcagaacggggagacgcggttacaaaagccgctaagcaaccacatgtgggggactatagacagctcgtgcacgaactcgatgaagccgaatatagggacatcaggctcatggtgatggagatccgtaacgcttatgtcaggagacagggccaggggagaggaggtcagcggcagctaagccaggctacccatagcctgacccttcaagccaggggctag

SEQ ID NO: 236477 - DNA, 627 bp, synthetic construct
  misc_feature 1..627: note = Description of Artificial Sequence: Synthetic coding sequence
  source 1..627: mol_type = other DNA
atgggtgaagtcgagatatctgctcttgcatatgttaagatgtgcctgcacgccgcaagatatccacacgctgcggtgaatggactattcttggctcccgcaccacgttctggggaatgcctatgccttacggactgcgtgcctctcttccattcccatctcgcccttagcgtgatgctcgaggttgcactcaaccaggtcgacgtgtggggagcccaggcgggactggtggtagcaggttactaccacgctaacgccgcagtgaacgaccagagccccggacctttagccctcaagattgccggacgcattgccgagtttttcccggatgctgtcctgatcatgctcgacaaccagaaactggtgcctcagcctcgggttccccctgtgattgtgctcgaaaaccagggtctaagatgggtccccaaggataaaaacttggtcatgtggagagactgggaggagagtcgccaaatggtcggcgcacttctggaggatagagctcatcagcatctggtggactttgattgccacctcgacgacatccgacaggactggacgaatcaaagacttaatacccagataacccagtgggtcggtcccactaacggcaatggaaacgcctag

SEQ ID NO: 236478 - DNA, 804 bp, synthetic construct
  misc_feature 1..804: note = Description of Artificial Sequence: Synthetic coding sequence
  source 1..804: mol_type = other DNA
atggcatctctgttaaaagtggaccaggaggtgaaactaaaggtggactcttttagggaaaggattactagcgaggctgaagatttggtagcaaacttcttccctaaaaagctcctggagctggactcttttcttaaagagccgattctcaacatccacgacttaacgcagatccactctgatatgaacttgcctgttcctgatcccatcctgctgaccaatagccacgatggcctggatggtcccacttacaagaagcgtcgcttagacgagtgcgaggaggcttttcagggaacaaaagtgttcgtgatgccgaatgggatgctcaaatctaatcaacagctggttgacattatcgagaaggtcaaacctgagatcagacttctgatcgaaaagtgcaatacacctagcggaaaagggcctcatatatgtttcgacctgcaggtgaaaatgtgggttcagcttctgattccgcgaatcgaggacggcaacaattttggggtttcaatccaggaagagacagttgcggagctgcgcactgtggagtctgaggctgcatcgtatctcgaccagatctctagatactatataactcgcgcaaagctggtctccaagatcgccaagtatccacatgtcgaggactatcgacgaaccgttacagaaattgacgaaaaggagtacatctcgctgaggctgatcatctccgagctccgaaatcagtacgtcaccttgcacgatatgattctgaaaaatatcgagaagatcaagagacccaggtcctctaatgctgaaacattgtactag

SEQ ID NO: 236479 - DNA, 765 bp, synthetic construct
  misc_feature 1..765: note = Description of Artificial Sequence: Synthetic coding sequence
  source 1..765: mol_type = other DNA
atggctagtctgcttaaagtagaccaggaggtaaagttaaaagtggatagcttccgcgaacgtattacttccgaagcagaggatctggtggccaatttctttccaaaaaaactcctggaacttgattcctttctgaaagagcctatcctgaacatacatgatttaacccagatccatagtgacatgaatttaccagtgcccgatcctattttgttgacgaattcgcacgatggcctggacggcccaacttacaagaaaagacggctggacgagtgcgaagaggctttccaggggaccaaggtttttgtcatgcctaatgggatgcttaagagcaatcagcagttggttgatatcatcgaaaaagtcaagccagagatccgtcttctcattgagaagtgcaatacagtcaagatgtgggtgcagctgctcatcccacggatcgaggacggcaacaacttcggagtgtccatacaggaagagaccgtagcggagctgcgcaccgttgaatccgaagccgcttcttaccttgaccagatctcgaggtactatattacacgcgcaaagttggtgtctaagattgcgaaataccctcacgtggaggactatcgccgaaccgtgacagaaatcgacgagaaagagtacatcagcttgcgactgattatcagcgagctgagaaatcaatatgtcaccctgcatgacatgatccttaagaatattgagaagatcaaaaggccacggtcttccaatgccgaaactctgtactag

SEQ ID NO: 236480 - DNA, 48 bp, synthetic construct
  misc_feature 1..48: note = Description of Artificial Sequence: Synthetic coding sequence
  source 1..48: mol_type = other DNA
atggcatccctgctcaaggtggaccaggaagtgaaattaaagctgtag

SEQ ID NO: 236481 - DNA, 393 bp, synthetic construct
  misc_feature 1..393: note = Description of Artificial Sequence: Synthetic coding sequence
  source 1..393: mol_type = other DNA
atggcatccctgctgaaggtggaccaggaggtaaagctgaaagtagattcttttagggagcgtatcacctcggaggccgaagatctcgtggcgaacttctttccaaaaaaactgctggagctggactcctttctcaaagaaccaattcttaatatccatgacttgacacagatccactccgacatgaacctccctgttcctgatccaatactacttacgaatagccatgacggactggacggacccacatataagaaaagacggctggatgaatgcgaggaggcatttcagggacaaaatgtgggaactgcacctgattcccaggacaggaggtggaagcagctgtggggcgtgcactcagggggaaactcgtgtagggctaaaaattgttag

SEQ ID NO: 236482 - DNA, 582 bp, synthetic construct
  misc_feature 1..582: note = Description of Artificial Sequence: Synthetic coding sequence
  source 1..582: mol_type = other DNA
atgaacttacctgtgcctgatccaatactcctaactaattcccatgatgggctcgatggtccaacatataagaaaaggagattggacgaatgcgaagaagcttttcaggggacaaaagtcttcgtgatgccaaatggaatgttgaaaagtaaccaacagctcgtggacattattgaaaaagtgaaaccagaaatccgtttactaatcgagaagtgtaacaccgtgaagatgtgggtgcagctcctgattccccgtatcgaagacgggaacaacttcggcgtgagtattcaggaggaaacagtggccgaattgcgcaccgtggagtctgaagctgcaagttacttggaccagatatccaggtactacatcacaagagctaagctagtctctaaaattgcgaagtatccccatgttgaggactatagaagaaccgttaccgagatcgatgaaaaggagtatatatctctgcggttgatcatttcggaacttaggaatcagtacgtcacactgcatgatatgatactgaaaaatatcgagaagataaagaggcctagatctagcaacgccgaaacactgtattag

SEQ ID NO: 236483 - DNA, 5531 bp, synthetic construct
  misc_feature 1..5531: note = Description of Artificial Sequence: Synthetic coding sequence
  source 1..5531: mol_type = other DNA
atggagcccgctgaaagggctggggtgggcgaacctccagaacctgggggacggccagagcccggtccacgcggtttcgtgccccagaaggagattgtttacaacaagcttttgccttatgcagaaaggctggatgctgagtccgatctacagctcgcgcagatcaaatgtaacttggggagggctgttcagctgcaggagctgtggcctggcggattattctggactcggaagctgagcacctacatccgactgtatggaaggaagttctctaaagaggaccatgtgctgttcatcaagctgctctatgaactcgtgtcaattccaaagcttgaaatctcaatgatgcagggctttgcccgtctactgataaacctgttaaaaaagaaggagttactttccagagccgacctggagctaccctggcgtcctctgtacgacatggtggagcgcattttatactctaaaacagagcatctaggactcaattggttccctaattctgtagaaaacattctgaaaactcttgtgaaatcatgccgtccctattttcctgccgatgccacagctgaaatgctggaagagtggagacccctgatgtgcccatttgacgttactatgcagaaggctattacgtacttcgagatctttttgcccacctcactgccgcctgagttacaccataagggcttcaaactctggttcgatgaacttattggactgtgggtatctgttcagaaccttccacagtgggaggggcagctggttaatctgttcgcccgactggctacagataatatcggctatattgactgggatccatatgtgccaaagattttcacccgaattctgcgaagcctgaatctgcctgtaggcagctctcaggttctcgtgccgcgattcctgactaatgcctacgacatagggcatgccgtcatatggattacagccatgatggggggaccatccaagttagtgcagaagcacctcgccggacttttcaattctattactagtttttaccatccctcaaacaatgggagatggctgaataagctcatgaaattgctgcagaggctgccaaatagtgtcgtaagaaggttgcaccgcgagaggtacaagaagccctcatggctgacccctgtgcccgattctcataagctcactgaccaagacgttacagacttcgtacagtgtatcattcagcccgtgctactagccatgttctcgaaaaccggctccctggaggcagcacaggctctccagaacctggcattgatgcggcctgaactggtgattcctccagtgctcgagcggacctatcccgcattagaaactctgaccgagccacaccaactgaccgccaccctgagctgcgtcataggcgttgctaggtccctcgtgagtggcggacgctggtttcctgaagggccaactcacatgctcccattactcatgcgtgcgctgccaggtgtggaccctaatgatttctctaagtgcatgatcaccttccagttcatcgctacgtttagtacattggtacccctggttgattgttcctccgtgttacaggagcggaatgacctcacagaggttgagcgcgagttatgctccgccaccgccgagttcgaagactttgtcctccaattcatggatcgctgcttcgggcttatcgagagttccaccctcgaacaaacacgtgaagagactgaaacggaaaaaatgacccacctcgaatccctggtggagctcggattatctagcactttctcaactatcttgacccagtgctccaaggagatatttatggttgccctccagaaggtgtttaacttctccacctctcacatttttgaaacaagagtcgcagggcgaatggtagcagatatgtgtagagcggctgtcaaatgctgtccggaggaatcactgaaactgttcgtgccccactgttgcagtgtaattacccagttaaccatgaacgatgatgtactgaatgatgaggaactcgacaaagaactgctatggaacctacagttgctcagtgaaataacaagagttgacggcagaaagctgctgctgtaccgggagcagctcgtgaaaatcctccagaggacactgcacctcacctgtaaacaagggtatactttgagttgcaatctgttgcatcacctgctaaggtctactaccctcatttacccgactgaatattgctccgtccctgggggtttcgacaagccaccaagtgagtacttccccatcaaggactggggcaaaccgggtgacctgtggaatctggggatccagtggcacgtaccatcatctgaagaagtcagcttcgctttctatctgctggactcattccttcagcctgagctggtcaagctccagcattgcggcgatgggaagctcgaaatgagccgggatgatatcttgcaatccttaaccatagtgcacaactgtcttatagggagtggcaatcttctccccccattaaagggggagcctgtcaccaacttggtgcctagcatggtcagcctggaggagacaaaactgtacacgggtctggaatacgacctcagccgcgagaatcatcgagaggtgatcgctaccgtgattcgcaagctgctgaaccatatcctggataattcagaggacgatacgaaaagtctgttcctcataataaaaattatcggagacctcctccagtttcaaggctcccacaaacacgagtttgatagccgctggaaatccttcaaccttgttaaaaagtccatggagaaccgtttgcacggcaaaaaacagcacataagagcgcttctgatagaccgggttatgctacagcacgagcttagaaccttgaccgtcgaggggtgtgaatacaaaaagattcatcaggacatgatcagggatctgctacgcttatccaccagcagctactcacaggtcaggaacaaagcacagcaaacgttttttgccgctttgggagcctataatttctgctgtagggacataattccgctcgtacttgaatttctccgacccgaccgccaaggggtgacacagcagcagtttaaaggagcgttatactgtctcttgggcaatcactccggagtgtgtctggcaaatctccacgactgggactgtatcgtacagacatggcccgcaatcgtcagcagcggcttatctcaagccatgagtctggaaaaaccttcgatcgtgcggctctttgacgacctggcagagaagattcacaggcagtacgagactatcgggcttgactttacaattccgaagagttgcgtagaaatcgctgaactacttcagcagtcaaagaatccaagtattaaccagatactgctctctcccgagaaaattaaagagggcataaagaggcagcaagaaaaaaatgcggatgctctgcggaactacgagaatcttgtagacactctactggacggagttgaacagagaaacctcccgtggaagtttgaacatatcggcatagggttgctctcattgttgttaagggacgatcgtgttttacccctgagagccattagattctttgtcgagaatctgaaccatgacgcaatcgtcgtgagaaagatggccatttctgccgtggctggaatcctgaagcagctcaaacggacgcacaagaagctcaccatcaatccgtgtgaaataagtggctgtcccaaaccaacgcaaataatcgccggagatagaccagataaccattggctacactatgactctaagacaatcccacgtaccaaaaaagagtgggaaagtagttgtttcgtcgagaaaacccattgggggtactatacatggcctaagaacatggtcgtgtacgcaggcgttgaggagcaacctaaacttgggagatctcgagaggatatgactgaggctgagcagatcatcttcgaccacttttcggatcccaagttcgttgaacagctgataacattcttgagtctggaggacagaaagggaaaagacaagtttaaccctcggaggttctgcttatttaaaggcatattcagaaactttgacgacgcgtttctccctgttctgaaaccacatctcgagcatctggttgccgatagtcatgaaagcacacagcggtgtgtggcagagattattgctggattaattagaggatcaaaacattggacattcgagaaagttgagaagctgtgggagctgttgtgccctcttctgcgtacagcattgtcgaatattactgtggagacctacaacgactggggcgcatgcattgccacctcttgcgagtccagggaccccaggaaactccactggctgttcgagttgcttctggagagccccctgtctggtgaaggcggatccttcgttgacgcatgccgcctctacgtgctgcaaggcggtttggcccagcaggaatggagagtccccgagttgctccacaggctgttaaagtacctcgagcccaagttgacccaagtgtacaagaacgttagggaacggataggcagcgtgctgacctacatcttcatgattgatgtttctctgccgaatacgacccctactataagtccgcatgtgcccgagttcaccgctaggattttagaaaaactgaaacctctgatggatgtcgacgaggagattcagaaccacgtaatggaagaaaacgggatcggggaggaggacgaacgcactcagggaataaagttgctgaagacaattctgaagtggctgatggcaagtgccggaagatccttcagcacagccgttactgaacagctacagctgctgccactcttctttaagatagcccctgtcgagaacgacaactcttacgatgagttaaaacgagacgctaagctatgtcttagccttatgagccaaggcctcctttacccccaccaagtgccgctcgtgctccaggttctcaagcagactgctaggtcatctagttggcatgccagatacacagtgcttacttatctacagaccatggtgttctacaacttattcattttcctgaacaacgaagatgcagtgaaagacatccgttggctggttatttctctcttggaggacgaacagctcgaagtccgcgagatggcggctaccactctttctggcctgttgcagtgtaatttcctgaccatggatagccctatgcaaattcatttcgaacagctctgtaagacgaaattgccaaaaaagagaaaacgggatcctggttccgtgggcgataccatcccatcagcggaacttgtaaaaaggcatgcgggtgtgctgggactcggcgcatgtgtgctctcttccccttacgatgtacctacttggatgcctcagctcctgatgaatttgtctgcccatttgaatgatccacaacctattgaaatgactgtgaaaaagaccttatcgaatttcaggcgcacccaccacgataactggcaggaacacaagcaacagtttacagacgaccagttgctcgtactgacggatctcctcgtcagcccttgttactacgccta

SEQ ID NO: 236484 - DNA, 2964 bp, synthetic construct
  misc_feature 1..2964: note = Description of Artificial Sequence: Synthetic coding sequence
  source 1..2964: mol_type = other DNA
atgggagagaacctcgcaaaaaagattatgttttttctgctgacgattaaactgatcctaaatcacatccttgacaacagcgaggatgatacaaaatctctgttcctgatcataaaaataataggggacctccttcagttccaaggatcccataagcatgagttcgactctcggtggaaatcgtttaatctcgtgaagaaatccatggagaacaggctgcacggtaagaaacagcatatcagagccctactgatagaccgcgttatgctgcagcacgagctccgcacattgaccgtcgaaggctgtgagtataaaaagattcatcaagatatgattcgcgatctgttgcggctctctacttccagttattctcaggttagaaacaaggcacaacagacattctttgccgctcttggggcatataacttctgttgtagagacattatcccactcgtgctggagttcttaaggccggaccggcagggagtgacgcaacagcagttcaagggagccctgtactgcctccttggtaaccattccggtgtgtgcctagccaatctgcacgactgggactgcattgtccagacctggcccgctattgtatcgagcggcctgtcccaggccatgtctctcgaaaagccgtctatcgtccgccttttcgacgacttggccgaaaagattcaccgccagtatgaaacaattgggctagatttcacaatccctaagtcatgtgtagagatagctgaactgctgcaacagtctaaaaacccatcaattaaccagatcttgctgtctcccgaaaagatcaaagagggaatcaagaggcaacaggaaaagaacgccgacgccctacggaattacgagaatctggtggacactttgctcgatggtgtcgaacaacgcaacttgccctggaaattcgagcatatcggcatcggcttactcagtctactgctccgggacgacagagtgctgccactgcgcgcaatccggttcttcgttgaaaacctgaaccacgatgccattgtcgtgcggaaaatggccatatcagcagtggctggaatcctgaaacagctgaaaaggacgcacaaaaaattgacgatcaatccctgcgaaatttctggatgccctaaacccactcagataattgcaggcgatcggccagataatcactggctgcattatgatagtaaaacgattccacggacaaaaaaagagtgggaatcctcctgcttcgtggaaaagacacattgggggtactacacatggcccaagaacatggtcgtgtatgcgggagttgaagagcagccaaagctaggtcgatccagagaagatatgacagaggccgagcagataatcttcgatcatttctcggatcctaaattcgttgagcagctcattacattcctctccttggaagaccgaaaagggaaggacaaatttaatccgagacgcttctgccttttcaaagggatcttccgcaactttgacgatgcgttcctgcctgttttgaagccacatttggaacatctggtggccgatagtcatgagagcactcagagatgcgtggctgagatcattgccggattgatacgcggatccaaacactggacatttgaaaaagttgagaagctgtgggagttactctgtccactcctcagaacagccctgtctaatatcacagtcgagacatacaacgactggggcgcttgtattgccacgtcttgcgagagtagggatcctcgcaaactgcattggttgtttgagctactcctggagtcgccattaagcggcgagggagggagtttcgtggatgcctgtcggctctatgtgctgcaaggtggcctggcgcagcaagagtggcgagtgccggaactgctgcaccgtctgctgaagtatctggagcccaagttgacacaggtttataaaaatgtacgtgaacggatcggctcagtcctgacatacatctttatgatcgacgtgagtcttcctaacaccacacctactattagccctcacgtgcccgaatttacagcccgaatcttagagaaactaaagccgctgatggatgtggacgaggagatccagaatcacgtgatggaagagaatggtataggagaggaggacgagcgcactcagggcattaagctccttaagactatcctaaaatggttaatggctagcgctggccgatcctttagcaccgccgttacagagcaattacagcttctgcctttattctttaagatagcccctgtggagaatgataactcctacgatgaactgaaaagggacgccaagctgtgtctgagcctaatgtcccaaggtctcctgtatccacaccaggtgcctttggtgttgcaggtgctgaagcagacagcaaggtcctcatcatggcacgcgaggtacactgttttaacgtacctgcagactatggtgttctacaacttgtttatcttcttaaataatgaggacgctgtgaaagatatcagatggctagtgatttcactgcttgaagatgagcagttggaagtgcgcgaaatggccgctacaacactgtcagggctgctgcaatgtaactttttaacaatggatagccctatgcagatacattttgaacagttgtgcaagacgaagctccccaagaaacgcaagagggatccaggtagtgtaggcgatacaatcccttcggcagagctggtgaagcgccacgccggagtgcttggtctgggcgcatgcgttttgagcagcccatacgacgtccctacttggatgccccaactgttaatgaacttatcagcacacctcaacgaccctcagcccatagagatgactgtgaaaaaaaccttgtctaatttcagaaggacacaccatgacaactggcaagaacacaaacaacagttcaccgatgatcagttgcttgttttgaccgacttacttgtgtccccttgttattatgcttag

SEQ ID NO: 236485 - DNA, 867 bp, synthetic construct
  misc_feature 1..867: note = Description of Artificial Sequence: Synthetic coding sequence
  source 1..867: mol_type = other DNA
atggctgccacgttttttggggaggtcgtcaaagccccttgcagggccggtacagaagacgaggaggaggaagaagaaggccgacgtgaaacgcccgaggaccgtgaagtgaggttgcagctcgccagaaagcgtgaagtacgcctgctgcggagacagacgaagacatcactggaagtaagcttgctcgagaaatatccatgctccaagttcataatagcaattgggaataatgccgtggcttttttatccagttttgtcatgaactctggtgtgtgggaggaggtaggatgtgccaaattgtggaatgagtggtgtagaactacagacacgacccacttatctagcactgaagctttctgcgtcttctaccatctgaagtcaaaccctagtgtcttcctgtgccagtgctcttgctacgtcgccgaggatcagcagtaccaatggctcgagaaggtgttcggtagctgcccacgcaaaaacatgcagataacaatcttgacttgccgccacgtgacagattataagacgtctgagtctacaggatccctccctagccccttcctaagggcccttaaaacacaaaactttaaggatagtgcttgctgtccactgcttgagcaaccaaacatcgtacacgaccttcccgcagccgtgttgtcctattgtcaggtctggaagatacctgccattttatacctctgctacaccgacgtcatgaaactggatctcattactgtggaagcattcaagccgatattgtcgacaaggtctctgaagggtctggtgaagaatattccacagtctacagagattttaaaaaagctgatgacgaccaatgaaatccaaagcaatatttacacatag

SEQ ID NO: 236486 - DNA, 804 bp, synthetic construct
  misc_feature 1..804: note = Description of Artificial Sequence: Synthetic coding sequence
  source 1..804: mol_type = other DNA
atggcagcaactttcttcggggaagtggtcaaagccccatgcagggccggaaccgaggacgaagaagaggaggaggagggccgaagagaaacccccgaagaccgggaagttcgactacaactcgccaggaagcgagaggttagactgttgcgtaggcaaaccaaaactagtcttgaagtgagccttctggagaagtacccctgtagcaagttcattatcgccattggtaataatgctgttgcctttcttagctcatttgtgatgaatagtggagtatgggaagaggtgggttgcgccaagttgtggaatgaatggtgccggaccacagacactacccatctctccagcacagaggccttctgcgtattttaccacttgaaaagtaaccctagcgtgtttgggtcctgtccccgtaaaaatatgcaaatcaccatcttgacttgccgacacgtgactgactataaaacttctgaatccaccggaagcctacccagcccctttttgcgtgctctgaaaacccaaaactttaaggattctgcttgttgtcccttgcttgagcagccaaacattgtgcatgatctgcccgcagccgtcctgtcttactgtcaggtgtggaagattcccgcaatcctgtacttgtgctacacagacgttatgaagttagatttaattacagtcgaagcctttaaacccatcttgagcactcggtctttgaagggacttgtgaaaaatatccctcagagtacggagatccttaagaagctcatgacaactaacgagatccagtccaatatctatacgtag

SEQ ID NO: 236487 - DNA, 795 bp, synthetic construct
  misc_feature 1..795: note = Description of Artificial Sequence: Synthetic coding sequence
  source 1..795: mol_type = other DNA
atgtttgtaccctgcggtgaaagcgcaccggacctggctgggttcactttattgatgccggcagtatctgttggcaacgttgggcaactggctatggacctcattatctcaacgctcaatatgagcaaaatcggttatttttatacagattgcttagtgcctatggtgggcaataatccttatgcaactaccgaaggaaactctaccgaacttagcattaatgctgaagtctactcgctgcccagccgcaagctcgttgctttgcagctgagatctattttcatcaaatacaagagcaaacccttctgtgaaaagctgttgagttgggtcaaatcttcggggtgtgccagagtcatagtcctctcctcttctcactcctatcagaggaatgatctccagctccgctcgacgccatttagatatttgctgacacctagcatgcagaagtcagtccagaataagatcaagtccctgaattgggaggaaatggagaaatcaagatgcatccctgaaatagacgacagtgagttttgtatccgtatcccagggggaggaatcacaaagactctgtacgatgaatcctgcagtaaggagatccaaatggctgtgctgctcaagtttgtgtccgagggcgacaacattcccgatgcccttggcctggtggaatatctgaatgaatggttgcaaattcttaagccactctccgacgaccccaccgtgagcgcctcccggtggaaaataccttcttcctggcgcctgctgttcggttctggtcttccaccggctctgttttag

SEQ ID NO: 236488 - DNA, 459 bp, synthetic construct
  misc_feature 1..459: note = Description of Artificial Sequence: Synthetic coding sequence
  source 1..459: mol_type = other DNA
atgccggctgtgagcgttggtaacgtgggccagctggccatggacctcatcatttccaccctcaatatgtctaaaatcggctacttctacactgactgcctggttcccatggtgggtaacaacccatacgcaaccacagaagggaatagcaccgagctatcaatcaacgcagaagtgtactcgctgccgtccagaaagctggtggcactgcagcttcggagtatttttattaaatacaaatcaaagccattctgcgagaaactcctgagttgggttaagagttccggatgtgcaagagtgatcgttctgtcctcttcccactcttatcagagaaacgaccttcaactgagaagtacaccctttaggtatctgttgactccttctatgcagaaatcagttcagaataagatcaagagcctgaactgggaggagatggagaagggcgctttcctgaagtag

SEQ ID NO: 236489 - DNA, 792 bp, synthetic construct
  misc_feature 1..792: note = Description of Artificial Sequence: Synthetic coding sequence
  source 1..792: mol_type = other DNA
atgttcagaaaccagtatgataacgacgttaccgtctggtcaccccagggcaggattcaccagatcgaatatgccatggaggccgtgaaacagggcagtgcaactgtcggtttaaagagcaagacacatgccgtgctggtggcgctcaagagagcccagtctgagcttgccgcacaccagaaaaagatcctccacgtcgataatcacattgggatcagcattgctgggctgactgcagacgccaggctgctctgcaatttcatgaggcaggagtgcctcgattctcgtttcgtgttcgataggccgctgccggtcagcaggctggtgtctctcattgggtcaaagactcagattcctacgcagaggtatggacggaggccctacggggtcggcctactgatcgccggatacgacgacatgggaccccatatctttcagacctgtccttccgctaattactttgactgtcgcgctatgagtataggggctagaagccagtctgctaggacctacctggaacgtcatatgagcgaatttatggagtgcaatctgaatgaacttgttaaacacgggctccgggctctgcgggagactctgcctgctgagcaggatctgaccaccaaaaatgtgtcaataggaattgtaggcaaggatttagagtttaccatatatgacgatgacgatgtgagcccctttttggaagggcttgaggaacgaccacagagaaaagcccagcctgctcaacccgctgatgagccagctgaaaaagccgacgaaccaatggagcactag

SEQ ID NO: 236490 - DNA, 792 bp, synthetic construct
  misc_feature 1..792: note = Description of Artificial Sequence: Synthetic coding sequence
  source 1..792: mol_type = other DNA
atgttcagaaatcagtatgacaacgatgtgaccgtatggagtccacagggaagaatccatcagattgagtacgctatggaggccgtcaagcaggggtcagcgacagttggattaaagtcaaagacacatgctgttctagtggctctgaaaagggcccaaagcgagctcgctgcacatcagaagaagatcctgcacgtggataaccacatcggtatttctatcgcaggacttaccgctgacgcacgcttattatgtaattttatgcggcaagaatgtttggattcccgtttcgtttttgatcgtccgctccccgtatccaggcttgtatctttgatcgggtccaagacgcaaatcccaacccaacgctatggtcgcagaccttacggcgtgggcctcctcattgccggatatgatgacatgggccctcatatcttccagacttgtccttcagctaattatttcgactgcagagccatgtccattggggctaggagccagtctgccaggacttatctggaaaggcacatgagtgaattcatggagtgtaatctgaacgagttggttaagcatggactgagagctttgcgggaaactcttcccgcagagcaagatctgactactaagaacgtttccatcggaatagtcggcaaggacctggagttcacgatctatgacgacgacgacgtgtcaccattcctggaagggctggaagagaggcctcagcggaaagctcagccggcacaacctgccgacgagcccgctgaaaaggccgacgagcccatggagcactag

SEQ ID NO: 236491 - DNA, 810 bp, synthetic construct
  misc_feature 1..810: note = Description of Artificial Sequence: Synthetic coding sequence
  source 1..810: mol_type = other DNA
atgcaattgtctaaggtaaaattccgaaaccagtacgacaacgatgttactgtctggtccccgcagggtcggatccaccaaatcgagtacgcaatggaggcagtcaagcagggctctgctaccgtcggtctcaaatctaaaacgcatgccgtgctcgtagctttgaagcgggctcagtcagagctcgccgcacatcagaaaaaaattctccatgtcgataatcacatcggtattagtatcgccggactgaccgcggacgctagactcctctgcaattttatgcgccaggaatgcctcgatagtcggtttgtattcgacaggccgctaccggtcagccggttggtgtccctgatcggctcaaaaacgcagatacctacccagcgatatgggagaagaccatacggtgtgggacttttgatagccggttatgacgatatggggccacacatatttcaaacatgtcccagcgccaactactttgactgtcgggcaatgtccatcggagcgagaagccaatctgcacgcacttatttggagcggcacatgagcgaattcatggaatgtaatttaaacgagctagtgaagcacggccttagggccctcagagaaactctgcccgctgaacaggatctcacaactaagaatgtctccatcggaattgttggtaaagatctggaattcaccatttatgatgacgacgatgtgagtccttttttggaagggctggaggaacgaccccaaaggaaagcacagcccgctcaaccagcagacgagccagcagagaaggcggatgagcccatggagcattag

SEQ ID NO: 236492 - DNA, 495 bp, synthetic construct
  misc_feature 1..495: note = Description of Artificial Sequence: Synthetic coding sequence
  source 1..495: mol_type = other DNA
atgttcaggaaccaatatgataatgatgtcaccgtgtggagcccgcagggacgaatccaccagatcgagtacgcaatggaagcagtgaaacagggcagtgccactgtaggcctcaagtccaaaacacacgcagtgttagtggctctgaaaagggcacagtcagaactagcagcccaccaaaagaagattttgcacgtggataaccatattggtatatctatcgcgggattgactgcggatgccaggctgctgtgcaatttcatgagacaggaatgtctggattctcggtttgtgttcgataggccactcccagtcagccggctggttagcctgattggctctagcatcctgttcatgatatgggctctcaccttctcaaagccagtccacctgcttactattcttactgccgagccttgccctttggagcctgtaccaaatcagctggtgctaacgtggagggacatctgtcttaacctgtggtctgttatctag

SEQ ID NO: 236493 - DNA, 1014 bp, synthetic construct
  misc_feature 1..1014: note = Description of Artificial Sequence: Synthetic coding sequence
  source 1..1014: mol_type = other DNA
atggatcaaaatgagcactctcactgggggcctcacgctaaaggccagtgtgcctcgcggtcagagctccgaatcatcttggtagggaagactggaactggtaagtcggccgctggtaactcaatactgcggaagcaagcttttgagagcaagttgggatcccagaccttaacaaagacctgttctaagtcacaagggtcttggggtaacagggaaattgtgataatcgatacaccggacatgttctcatggaaggaccactgcgaggcactctataaagaggtccaacggtgctacctgcttagcgcaccagggccacacgtgctgctgttggtcacccagttgggcaggtataccagccaggatcagcaggccgctcagcgcgtcaaggaaatttttggcgaggatgcaatggggcacacaatagtccttttcacccacaaggaggacctgaacggcggatccctcatggattatatgcacgacagtgataataaagccctcagcaaactcgtagccgcatgtggcggtcggatctgcgcctttaataacagggcagaggggtctaaccaggacgatcaggtaaaagaacttatggactgtatagaagaccttttgatggagaagaatggagatcattataccaacggcctctacagtttgatccaacgctccaaatgcggcccagtcggttccgacgaacgggtcaaggaatttaagcagagcctgataaagtacatggagactcagagatcttacacagccctcgcggaagcaaactgtttgaagggggctctcatcaagactcagttgtgtgttctgttttgtatccaactgtttttaagacttatcatcctctggctctgtattctgcatagcatgtgtaacctcttctgttgcttgctcttctccatgtgtaacctgttttgctccctgttgtttattatacctaaaaagcttatgatctttcttcgaaccgtcattagactcgaaaggaaaactccaaggctctag

SEQ ID NO: 236494 - DNA, 300 bp, synthetic construct
  misc_feature 1..300: note = Description of Artificial Sequence: Synthetic coding sequence
  source 1..300: mol_type = other DNA
atgggacctgattaccgggttttggtgcaccgtgctagaaaacttgcccagcagtactacctggtctaccaggaacctattcctacggcccaactcgtgcagcgcgtcgctagcgtcatgcaggagtatacccagtctgggggagtgcgaccatttggcgtgagcctgctgatctgtggctggaatgagggtagaccttacttgtttcagagcgacccaagcggcgcttacttcgcctggaaggcaactgccatgggaaagaattatgtcaacggcaaaaccttcttggagaagcggtag

SEQ ID NO: 236495 - DNA, 465 bp, synthetic construct
  misc_feature 1..465: note = Description of Artificial Sequence: Synthetic coding sequence
  source 1..465: mol_type = other DNA
atgctgtattgcgaagcggagtcccctcccaccgttgagaaggtaaaacccgcacgggagaactccgagacggatctggaaattgagggtgagcacgggcacctgggtgcagtccgagcagcaagtccccagaagcttgaaaaaagtggcttccaagagctctcttcccacagcttccctgagagcgcccttcgcatggcttgtgggggaaacgtggctgaaagacccgcacgtttttgtttggaatcctcaagtggactggcgggtgaaagctcttgcagcttcccaagactgagccccgcttccggtgcagtcccctcgaggcgacttgtgaagagtggtataaatacgcagacaaggttcagtaatctgttaaacgtttccacctggggtatcctctgtaatctttgtaatagtcccaggagtttcccgaagaagggctccaccgagcgggagcacctctag

SEQ ID NO: 236496 - DNA, 747 bp, synthetic construct
  misc_feature 1..747: note = Description of Artificial Sequence: Synthetic coding sequence
  source 1..747: mol_type = other DNA
atgagctctatcggtacaggctatgatctgtcagcctctaccttcagccctgatgggagagtgttccaggtcgaatatgccatgaaagccgtggagaactcatccacggccatcgggatacgctgcaaggatggggttgtctttggagtggagaagttggtgctgtcgaaactgtatgaagaggggagcaacaagcggctttttaacgtagatcggcatgttggaatggcggtcgccggtctgcttgccgacgccaggagtctggctgatattgctcgcgaggaggccagcaactttagaagcaacttcggctataacatcccactgaagcacctggcagacagggttgcaatgtatgtgcacgcttatacgctgtacagtgcagtgcgtccctttggctgtagcgtaaacgacggagcccaattatatatgatcgatccttccggcgtctcctatggatactggggttgcgctattgggaaagccaggcaagcagccaagaccgagatcgagaagctccagatgaaagagatgacctgcagagatatcgtaaaggaagtagccaagatcatatatatcgtgcacgacgaggtcaaggataaggcgttcgagctcgaactgtcctgggtcggggaactgaccaacggcaggcacgaaatcgtccccaaagacattcgcgaggaggccgagaaatacgctaaggagagcctgaaggaggaagatgagtctgatgacgataacatgtag

SEQ ID NO: 236497 - DNA, 786 bp, synthetic construct
  misc_feature 1..786: note = Description of Artificial Sequence: Synthetic coding sequence
  source 1..786: mol_type = other DNA
atgtcacgaagatacgattctcgcacaacaatcttcagtccggaaggtaggctctatcaggtggagtatgccatggaagcgatcggccacgctgggacttgcctgggaatcctggccaatgacggagttctgctggctgccgagcgccgaaacatccataaacttctggacgaagtcttttttagcgagaagatttacaaactcaacgaggatatggcatgctccgtagctggaataacttcagatgccaatgtgctcaccaacgaactgcgactgatcgcgcagcgctacctgctccagtaccaggagcctataccttgtgaacagctggttacagctttgtgtgatatcaaacaagcgtacacacagtttggcggaaaaaggccctttggcgtttcccttctttatataggttgggacaaacactacggcttccaactgtatcagagcgacccttccggaaattatgggggatggaaagctacatgcattggcaataacagcgcagctgccgtcagtatgctgaagcaagattataaggagggagagatgaccctaaagagtgctctggccctcgctatcaaggtactcaataagacaatggacgtcagcaaactgtctgcagagaaggtcgagattgccactctcacccgagagaacggtaagaccgtgattcgcgtgctaaaacaaaaggaagtggaacagcttatcaaaaagcacgaagaagaggaggccaaggcagagcgagagaaaaaggagaaagaacagaaggaaaaagacaagtag

SEQ ID NO: 236498 - DNA, 573 bp, synthetic construct
  misc_feature 1..573: note = Description of Artificial Sequence: Synthetic coding sequence
  source 1..573: mol_type = other DNA
atggcatgctccgtggccggaataacttctgatgccaacgtgctcacaaatgagctgaggctcatcgctcagcgctatttactgcagtaccaggaaccgatcccatgcgagcagctggtgacagcactatgtgacattaagcaggcctacacacagttcggcggaaaacgtccatttggggtaagtctcctctacattgggtgggacaagcactacgggtttcaactataccagtccgatccttccgggaactatgggggatggaaggccacttgcatcggcaacaattccgcagcggctgtgagtatgttgaagcaagattataaagagggagagatgaccctgaagtctgcactcgccctggccatcaaggtactaaacaagaccatggacgtgtccaagctttcagccgagaaagtggagatcgccacactgacaagggagaatgggaagaccgtgattcgggtgctgaagcagaaggaggtggaacaattgatcaagaagcacgaggaagaggaggctaaggccgaaagagaaaagaaagagaaagaacaaaaggaaaaggacaagtag

SEQ ID NO: 236499 - DNA, 786 bp, synthetic construct
  misc_feature 1..786: note = Description of Artificial Sequence: Synthetic coding sequence
  source 1..786: mol_type = other DNA
atgtcacggagatacgactcccgcaccaccatatttagccctgaagggaggctgtaccaggtcgagtacgctatggaagccattgggcatgcgggaacatgtttaggcattctagccaacgacggtgtcctgttagccgctgaaaggcgtaatatccacaagttgttagatgaagtgttttttagtgagaagatttacaagctgaatgaagacatggcttgtagcgtagcgggaataactagcgatgcaaatgttctgaccaacgaattgagactgatcgcacagcgctatctgcttcagtatcaggaacctatcccctgcgaacagctggtgacagccctttgcgacattaaacaagcctatacccagtttgggggaaagagaccatttggagtcagtctcctgtacatcggctgggacaaacactatggcttccaattatatcagagtgatccctctggaaactacggtggatggaaggccacttgtatcggaaacaacagtgccgcagccgtctccatgctcaagcaggattataaggagggcgagatgacacttaagtccgccctagctctagcgatcaaagtcctgaataagaccatggatgttagcaagttgtcagctgaaaaagtagaaatcgccacactcaccagagagaacggcaagacagttatacgcgtcctaaaacagaaggaggttgaacagttgattaaaaaacacgaggaggaggaggccaaagcggaaagagaaaagaaagaaaaggagcagaaagaaaaggataaatag

SEQ ID NO: 236500 - DNA, 666 bp, synthetic construct
  misc_feature 1..666: note = Description of Artificial Sequence: Synthetic coding sequence
  source 1..666: mol_type = other DNA
atgtccaggaggtatgacagccgcactaccattttttctccggaggggagactataccaagtggaatacgctatggaggctataggacacgcaggcacttgcctcggcatacttgctaatgatggtgtgctgctggcagcggaaaggagaaatatacataaacttctcgacgaggtcttcttcagcgaaaagatctacaagctgaatgaggatatggcgtgtagtgtggctggtatcacctcagacgctaacgtgcttacaaacgagctgcgcctgattgcacagaggtacttactgcagtatcaggagccaatcccatgtgaacaattggtgacagccctgtgtgatatcaaacaggcttatactcagtttggaggcaaacgaccgtttggagttagcctgttgtacattggatgggataaacactacggctttcagctgtaccagtcagaccctagcggaaactacgggggatggaaggcaacttgtatcgggaataactcggcggctgctgtctctatgctgaaacaggattacaaggaaggtgagatgaccctgaagtccgccttagcgctcgcgattaaagtattgaacaagaccatggatgtgtccaagctgagcgccgagaaggtagagatcgccactttgactagggaaaatggatag

SEQ ID NO: 236501 - DNA, 630 bp, synthetic construct
  misc_feature 1..630: note = Description of Artificial Sequence: Synthetic coding sequence
  source 1..630: mol_type = other DNA
atgagcaggcgctatgattcaagaacaaccatcttctcgcctgaagggagactttaccaggtcgagtacgctatggaagcgatcgggcatgcgggaacttgtcttggaatcctggcaaacgacggcgtgctgttggccgctgagcggaggaacatccacaaattactggacgaagtattttttagtgagaagatatacaagcttaacgaagatatggcctgttccgtcgctgggatcacatcagatgcaaacgtgctaactaatgaactgcgcctcatcgcgcagagatacctgttgcagtatcaggagcccataccctgtgaacaactagtgacagcgctatgcgacatcaaacaggcttatacccagtttggaggcaaacgcccatttggggtctcccttctctatattggttgggacaaacattacggatttcaactgtaccagagcgaccctagtggaaattacggcggatggaaggctacttgcattgggaacaactctgctgccgctgtgtcgatgctgaagcaagactataaggaaggggagatgaccctgaagtcggcactcgcactggcaatcaaagtgcttaataaaaccatggacgtctctaaattgtcggcagagtag

SEQ ID NO: 236502 - DNA, 693 bp, synthetic construct
  misc_feature 1..693: note = Description of Artificial Sequence: Synthetic coding sequence
  source 1..693: mol_type = other DNA
atgtcccgtcgctatgacagccggacgactatcttcagcccagaggcagaacggaggaatatccataagttactcgacgaggttttctttagcgagaaaatttataaactgaacgaggacatggcatgttctgtggccggtattacctcagatgccaatgttctgacgaatgaactcagactcattgcacaacgctatctcctgcagtaccaggagccgattccatgcgagcagctggtcaccgcactgtgcgatatcaaacaggcttacacccagttcgggggaaaaaggccttttggagtgtcgctgctgtacattggatgggacaaacattacggcttccaactgtatcaaagcgatccttccggcaattatggtggatggaaggctacgtgtattgggaataattcagccgctgccgtttccatgcttaagcaggattataaggaaggggagatgaccctgaagtcagctcttgctctggcaataaaagtcctgaataaaactatggacgtgtctaagctctcagctgagaaagtggagatcgccaccctaactcgtgaaaacggtaagactgtaattcgagtgcttaaacagaaggaggtggagcagctgatcaagaaacacgaggaggaagaggccaaggcggaacgagaaaaaaaggaaaaagagcagaaagagaaagataaatag

SEQ ID NO: 236503 - DNA, 711 bp, synthetic construct
  misc_feature 1..711: note = Description of Artificial Sequence: Synthetic coding sequence
  source 1..711: mol_type = other DNA
atgagccgcagatatgactccaggaccaccatctttagtccagaaggtaggttataccaggtggagtacgccatggaggcgattgggcatgccggtacatgtctcggtatcttggctaatgatggtgtactgctcgccgcagaacgcaggaatatccataagctacttgatgaagtgtttttttctgagaagatctacaaactaaatgaggacatggcctgtagcgtcgctgggatcacttctgacgccaatgtactgactaacgagctgaggttgattgcacagcgttacctactgcaataccaggagccaataccttgcgagcagctcgttaccgctctgtgcgacatcaagcaagcatacacacagttcggaggaaagcggccattcggtgtgagtctcctctacattgggtgggacaagcattatggtttccaactgtatcaatctgatccatcagggaattacggaggctggaaggccacttgtattggcaacaactcagcggctgcagtcagcatgttgaagcaggactacaaggaaggcgagatgacccttaagtccgccctggccctggctattaaggtgctgaataagactatggatgtatccaagctcagtgctgagaaagtggaaattgccactcttacaagggaaaacgggaagactgtaatacgcgtcctgaaacagaaggaggtggaacagttatag

SEQ ID NO: 236504 - DNA, 726 bp, synthetic construct
  misc_feature 1..726: note = Description of Artificial Sequence: Synthetic coding sequence
  source 1..726: mol_type = other DNA
atgtttctgaccagaagcgagtacgacagaggagtgaatacattctctccagaggggcgattgtttcaggtagaatatgccatcgaggccattaaactggggagcactgctattggaattcagactagcgagggggtgtgtcttgccgtggaaaaaagaatcacatctccactgatggaacctagcagtatcgagaagatcgtggagatcgacgctcatataggctgcgccatgagcgggcttatagcagacgccaagactttgatcgataaagccagggtggagacccagaatcactggttcacctacaacgaaactatgactgtggaaagcgttacccaggccgttagcaatctggccctgcaatttggcgaggaggacgccgatccgggtgctatgagtcgacctttcggggtagcactacttttcgggggagtggacgagaagggtccacagctgtttcatatggacccctctgggacattcgtgcagtgcgacgcaagggccattggttccgcgagcgagggagcacaaagctctctgcaggaggtgtatcataagtcaatgacactgaaagaagcaattaaatccagcttgattatcctcaaacaggtgatggaggaaaaactgaatgccaccaacattgagctggctactgtacaacccggacaaaacttccatatgtttacgaaagaggaactagaagaagtcattaaggacatttag

SEQ ID NO: 236505 - DNA, 552 bp, synthetic construct
  misc_feature 1..552: note = Description of Artificial Sequence: Synthetic coding sequence
  source 1..552: mol_type = other DNA
atggagccgtcaagtattgaaaagattgtggaaatagatgcccatatcggttgtgccatgtctgggctgattgcagacgccaaaacattaatcgacaaggccagggtggaaactcagaatcattggtttacctacaatgagaccatgacggtagaatctgtaactcaggcagtttctaacttagccctgcagttcggcgaggaggatgccgacccaggggcaatgagcaggccttttggcgtcgcccttctgttcggtggagtcgatgagaaaggaccccagctgttccacatggatccgtctgggaccttcgtccagtgtgacgctagagccatcggttccgcgagcgaaggagctcagtccagccttcaggaagtctaccacaagagcatgacgttgaaagaagccataaagagcagcctaatcatactgaagcaggttatggaagagaagttaaacgcaacaaatatcgaactggcaacagtccagcctggacagaactttcatatgttcacgaaggaagagctggaggaggtcatcaaggacatttag

SEQ ID NO: 236506 - DNA, 741 bp, synthetic construct
  misc_feature 1..741: note = Description of Artificial Sequence: Synthetic coding sequence
  source 1..741: mol_type = other DNA
atgagcagaggtagttccgcaggatttgacagacacatcacgatcttttctcccgaggggaggctttatcaggttgaatacgcattcaaggcaattaaccaagggggactcacctcggttgcagtgcggggtaaagactgcgccgttattgtgactcagaagaaagttccagacaaactgctggattccagcacagtgactcatctatttaaaattaccgagaatatagggtgcgtaatgaccggcatgacggcagattcgcgatcgcaagttcagagggcgcgatacgaggccgcaaattggaagtataagtacgggtatgagatccccgtggatatgttatgtaagcgcatcgccgatataagtcaggtgtacacccagaacgccgagatgcggcctctgggttgctgcatgatcctcataggtatcgatgaggagcaagggccacaggtttacaaatgtgatccggcagggtactactgcgggttcaaggccacagctgctggcgtgaaacaaactgagtccacgtccttcttggaaaagaaagtgaagaaaaagttcgattggaccttcgaacaaacagttgagacagccatcacctgcctgtcgaccgtgctgagtatcgactttaagccctcagaaatcgaggtaggcgtcgttaccgtcgagaatcctaaatttcgaatccttactgaagcagagatagacgcccatctcgtggccttagcggagagggactag

SEQ ID NO: 236507 - DNA, 684 bp, synthetic construct
  misc_feature 1..684: note = Description of Artificial Sequence: Synthetic coding sequence
  source 1..684: mol_type = other DNA
atggccggactgagaagggagtacgcctttaaagccattaaccagggaggcttgacctccgtggctgtgagaggcaaggactgcgcggtgattgtaacccaaaaaaaagtgcctgacaagcttttagactcttctactgtgactcatctgttcaagatcaccgaaaacatcggttgtgtcatgactggcatgaccgctgatagcagatcccaggttcagcgtgccaggtatgaagccgcaaattggaagtacaaatacggatacgaaattccagtggacatgctctgcaagcgtatagccgacattagccaggtgtacacacagaacgccgagatgcgccctctcggctgctgcatgatcctcattgggatcgatgaggagcagggacctcaggtgtataaatgtgatccagctgggtactactgtggttttaaggcaaccgctgccggagtaaagcagaccgagagcaccagttttctggaaaaaaaggttaagaaaaaatttgattggacattcgaacagaccgtcgagactgctattacctgtcttagtacagttctgagtatcgacttcaaaccatcagaaatcgaggtaggagtcgtaacagtggagaaccccaagttcagaattctcacagaggccgagattgacgcccatctggtggccctcgccgagcgggattag

SEQ ID NO: 236508 - DNA, 759 bp, synthetic construct
  misc_feature 1..759: note = Description of Artificial Sequence: Synthetic coding sequence
  source 1..759: mol_type = other DNA
atgagccgtggctcttcagctgggtttgaccgccatattactatattttctcccgagggcagattgtaccaggtggaatacgccttcaaggctattaaccaaggaggtttaacaagcgtggccgtgcggggaaaggactgcgcagtgatcgttacacagaagaaggtgcccgacaagctgctggattcttctaccgtgactcaccttttcaagattaccgagaatatcggttgtgtaatgaccggcatgactgccgacagccggtctcaggttcagcgagctaggtacgaagccgctaactggaagtacaagtacggatacgagatcccagttgacatgctctgtaagcgtattgcggatatatcccaggtttacactcagaatgccgagatgcgtccacttggctgttggtcttttttgttcctcggtatgattctgatcgggattgacgaagagcagggaccccaggtgtacaagtgtgatccagccggttattattgtggattcaaggccacagcagctggcgtgaagcagaccgagtctacatctttcttagagaagaaagtgaagaagaagtttgactggacattcgagcagaccgtggaaacagctattacatgtctttccactgttctttccattgatttcaagccctctgagattgaggtgggggtcgtgacagtagagaatcctaaatttaggatactcacagaggctgaaattgatgctcatctggtggccctggccgagagggattag

SEQ ID NO: 236509 - DNA, 324 bp, synthetic construct
  misc_feature 1..324: note = Description of Artificial Sequence: Synthetic coding sequence
  source 1..324: mol_type = other DNA
atgtcccggggtagctcagctggcttcgaccggcatatcaccatcttcagtccagagggcaggctgtaccaggtggagtacgctttcaaggcgattaatcagggtggcctcacgtccgtagctgtccggggaaaagattgtgcagtgatagtcacccagaaaaaggttcccgacaagcttctcgatagctccactgtgacacaccttttcaagattaccgaaaacattggctgtgtcatgacagggatgaccgtatctctttgtaggcctggctgttctgcctcatgggtgcaggcaattttggtgcctcagccaccccgatag

SEQ ID NO: 236510 - DNA, 447 bp, synthetic construct
  misc_feature 1..447: note = Description of Artificial Sequence: Synthetic coding sequence
  source 1..447: mol_type = other DNA
atgtccaggggatcctccgccggattcgatagacacatcaccatctttagcccggaaggcaggctgtatcaagtagagtacgcattcaaggctatcaatcagggtggactgacttcagtcgccgttcgaggtaaggattgcgcagtgattgtcacacagaaaaaggtgcccgataaattgctggattcaagtacggtaacacacctattcaaaattacagaaaatatcggttgcgttatgacagggatgacagctgattcccgttcacaagtgcagcgtgcacgctacgaagctgccaactggaaatacaagtatggatacgagataccggtggatatgctttgcaagcgaatcgcggacatttcacaagtctatacccagaacgcggagatgagaccactagggtgttactgcaattatatgccggtgtactgctccataaattag

SEQ ID NO: 236511 - DNA, 504 bp, synthetic construct
  misc_feature 1..504: note = Description of Artificial Sequence: Synthetic coding sequence
  source 1..504: mol_type = other DNA
atgacaggcatgaccgcggatagtaggtcacaggtacagcgggcaaggtacgaggccgctaattggaagtacaaatacgggtatgagatccctgtggatatgctttgcaagcggatagccgatatctcccaagtgtacacacaaaacgcggaaatgcgtcccctgggctgttgtatgatactcattgggattgacgaagagcagggacctcaggtctataagtgtgaccctgcaggctactactgtggatttaaagctacagcagcaggggtgaagcaaacagaatcaacttctttccttgagaagaaagttaagaaaaaatttgactggacttttgagcagaccgtggagacagccattacctgcctgagcaccgtcctgtcgatcgacttcaaaccctccgagatagaagtgggagtggtcactgttgaaaacccaaagttcaggatcctaactgaagccgaaatcgatgcccacttagtcgcactggccgaacgagactag

SEQ ID NO: 236512 - DNA, 612 bp, synthetic construct
  misc_feature 1..612: note = Description of Artificial Sequence: Synthetic coding sequence
  source 1..612: mol_type = other DNA
atgagtcgagggtcatccgccggatttgatcggcacattacaattttttctcccgaagggcgactgtaccaggtggaatatgcatttaaagccatcaaccaggggggattaacttctgttgctgttcggggaaaagactgcgcggtgatcgtgacccagaaaaaggttcctgataagctgctggacagctccaccgtgactcacctgtttaaaatcactgagaacatcgggtgtgtcatgactggtatgaccgctgactcgcgctcccaggtccagcgcgctaggtacgaagcggctaattggaagtataagtatggatatgagatccccgtggatatgctgtgcaagcgaatcgctgacatctcccaagtatacactcagaacgccgagatgcgacctctcggatgctgcatgattcttatcggaattgatgaggagcaaggaccacaggtgtataaatgcgaccccgctggctattactgcggattcaaggccacggctgctggcgtgaaacagaccgaatctacttccttcctcgagaagaaggtaaaaaagaagttcgactggacgttcgagcagaccgtggaagattcctatcgaagccgcgattag

SEQ ID NO: 236513 - DNA, 450 bp, synthetic construct
  misc_feature 1..450: note = Description of Artificial Sequence: Synthetic coding sequence
  source 1..450: mol_type = other DNA
atgtcttacgaccgcgctattacagtgttcagtcctgacggccacctcttccaggtggagtatgcgcaggaggctgttaagaagggaagtacagctgtgggtgtcaggggcagagatattgttgtcctcggcgtcgagaagaagtccgtcgctaagctccaagacgaacgcacagtacggaaaatatgcgccttggatgacaatgtttgtatggcgttcgctggtctgactgctgacgctaggattgtcatcaatcgggcacgtgtcgaatgccaatcgcacaggctgaccgtagaggatcctgtcacagtggagtatatcaccagatacatcgcatctttgaaacaagtcggcgcatgtcccttagcctgctcgcctctagccgcaggtcaaagccgcttgaggcacgggggttcctgccacgtgacatccggagagtcagaaaattag

SEQ ID NO: 236514 - DNA, 537 bp, synthetic construct
  misc_feature 1..537: note = Description of Artificial Sequence: Synthetic coding sequence
  source 1..537: mol_type = other DNA
atggcgttcgcaggtctcactgccgatgcaaggatagtgatcaacagagctcgcgtggagtgccaatcacaccgtctgactgttgaggacccagtcaccgtggagtatatcacaagatatattgcctccttgaagcagagatacacacaatcgaacgggcgtagaccattcggcatatccgctcttatcgttggatttgatttcgacggtacacccaggctctatcagacagatccaagcggcacttatcacgcatggaaggcaaacgccataggtcgaggagccaaaagtgttcgggagttccttgaaaagaactacacagatgaggcaatagagacagacgatttgacaatcaagctcgttataaaggcactgctggaagtagtgcagagcgggggaaaaaacatagaactggctgtgatgagacgcgaccagtcgctcaaaattttgaatccagaggaaattgagaaatacgtggcagagattgaaaaggaaaaggaggaaaacgaaaagaaaaagcaaaaaaaagcgagttag

SEQ ID NO: 236515 - DNA, 747 bp, synthetic construct
  misc_feature 1..747: note = Description of Artificial Sequence: Synthetic coding sequence
  source 1..747: mol_type = other DNA
atgtcatatgatagagccattaccgtgttttccccagacgggcatttattccaggttgagtacgcccaagaggccgtaaaaaaaggaagcaccgcagtgggcgttcgaggccgtgacatcgtggtcctcggggtagaaaagaagtccgttgccaagctccaggatgaacgcaccgtacgaaagatatgcgctcttgatgataacgtgtgcatggcctttgcgggtctcactgccgatgctagaattgttataaacagagcaagagtagagtgccagtcacatcggctaactgtagaggaccccgtgactgtagaatacatcaccaggtatattgccagcctgaaacagcgctacactcagtccaacggaaggcggccttttggtatctcggcccttatcgtgggctttgatttcgacggtacaccacgactgtaccagacagacccgagcgggacctaccacgcgtggaaggctaatgcaatcgggaggggggctaaatcagtccgcgagtttctcgagaaaaattataccgacgaagcaattgaaactgatgaccttacaatcaagctcgttataaaggctctcttggaagtagtccagagtggtggtaaaaatatcgaacttgccgtgatgcggagagaccagtcactgaagatattaaatccagaggaaatcgagaaatacgtggctgaaatagaaaaagagaaggaggagaatgagaagaaaaagcagaagaaagcatcctag

SEQ ID NO: 236516 - DNA, 564 bp, synthetic construct
  misc_feature 1..564: note = Description of Artificial Sequence: Synthetic coding sequence
  source 1..564: mol_type = other DNA
tgactgaccgccgacgctcgaattgtgataaaccgggctagggtggaatgccagtctcatcggctgaccgtcgaagaccctgtaactgtcgagtacattacaaggtatattgctagcctaaagcagcggtatacccagtccaacggcaggagacctttcggcatctcagcgttaatagtcgggttcgatttcgacggaacccccaggttgtaccagactgatcccagtggcacttaccacgcatggaaagcgaacgctatcggtcgaggggctaagtccgtcagggaattccttgagaaaaattatactgatgaagctattgaaactgatgaccttacaatcaagttggtaataaaagccctgttagaggggaaggtcgtaaatgcacccgttttttgtcccttcaaagtagtccagtctggtggaaagaatattgagctggctgtgatgcgcagggaccagtcgctgaagatcctgaatcccgaggaaattgagaaatacgtggccgaaatcgagaaggaaaaagaagagaatgagaaaaaaaagcaaaagaaggcgtcttag

SEQ ID NO: 236517 - DNA, 726 bp, synthetic construct
  misc_feature 1..726: note = Description of Artificial Sequence: Synthetic coding sequence
  source 1..726: mol_type = other DNA
atgctaagctcaaccgctatgtactctgccccaggcagggacttgggcatggagccccatcgggctgccggacctttacagctgcggttctctccgtacgtgttcaacggcggtactatcctagctatcgcgggtgaggacttcgccatcgttgccagcgacaccagactctccgagggcttttccattcacacacgcgattctccaaagtgttataaactgacagacaagacagtaatagggtgcagtggcttccatggagattgtcttaccctgacgaaaataattgaggctagattgaagatgtataaacactccaataacaaagccatgaccacaggcgcaattgccgcaatgctcagcacaattctctacagtcggaggttcttcccatactatgtgtataacattattggtgggcttgatgaagaaggtaagggagctgtgtactcatttgatcccgtgggttcataccagagagactcgtttaaagccggaggtagcgcctctgctatgctccaacctctgctcgataaccaggttggctttaaaaatatgcagaacgtggagcacgtgcctctgtcgctcgatcgggcaatgaggttggtcaaggacgtctttatctcagcggctgagcgcgatgtgtataccggcgacgcactgaggatctgcatcgttaccaaggaaggaattagggaggagaccgtgtcattgcggaaggactag

SEQ ID NO: 236518 - DNA, 591 bp, synthetic construct
  misc_feature 1..591: note = Description of Artificial Sequence: Synthetic coding sequence
  source 1..591: mol_type = other DNA
cggagatcccgggctatgttgtcttccaccgccatgtactcagcaccgggtcgtgacctcgggatggagcctcaccgcgctgccggtcccctgcagctgagattttcgccatatgtttttaacggcggaaccatcctggccatcgctggagaggactttgctatagtcgccagcgatactcgcctgtctgaaggcttttccatccataccagagacagtccaaagtgctacaaactgacagataagacggtgatcggatgttcagggtttcacggagattgcttaaccctgactaagattatagaggctagactgaaaatgtataaacactctaataataaagccatgacgacgggcgctattgcggctatgctatcaactatcctctactccagaaggttcttcccatattatgtctacaacatcattggcggtctggatgaggagggtaagggagcggtgtactcatttgacccagtgggaagctaccagcgcgacagtttcaaggccggaggctccgcatcagccatgctccagcctttgctggacaatcagtatataagcagcaacagcgtgagcctgtgtgtgtag

SEQ ID NO: 236519 - DNA, 822 bp, synthetic construct
  misc_feature 1..822: note = Description of Artificial Sequence: Synthetic coding sequence
  source 1..822: mol_type = other DNA
atgttgaaacctgctctggaaccccgtgggggtttttcttttgaaaactgtcagaggaacgcatctcttgaacgcgtgttgcctgggctgaaggtgccacatgctagaaagaccggcactacaatcgcagggctcgtctttcaagatggggtgattctgggtgcagacacccgggcaacaaacgattccgtcgttgcggataagtcctgtgagaaaatccacttcatagccccaaagatctactgttgcggagctggcgtggcagctgatgctgaaatgaccactcgaatggtggcatccaagatggagttgcatgccctgtcaactggacgcgaaccacgggtcgccacggtcacccgcattttgcggcagaccctttttcgctaccaaggccacgtgggtgcttcccttatcgttgggggagtggacctcactgggccacaactgtacggggtccacccacacgggagctactcaagactgcccttcacagctcttgggtccggtcaagacgccgcattggcggtccttgaagacagattccaaccgaatatgacactagaggccgctcagggtctgctggtcgaagcagtcactgccggaatacttggcgatttagggagcgggggaaacgtggacgcatgtgtgattacgaaaactggtgccaagctcttgagaactctgagcagtcctaccgaaccagtcaagcggagcggacgctatcatttcgtgccgggaaccaccgctgtattgacccaaactgtcaaacccctgacgctggaactggttgaggagaccgttcaggcgatggaggtggagtag

SEQ ID NO: 236520 - DNA, 903 bp, synthetic construct
  misc_feature 1..903: note = Description of Artificial Sequence: Synthetic coding sequence
  source 1..903: mol_type = other DNA
atggcgcttcaggatgtgtgtaaatggcagtcccccgacacgcaggggccttcgccacatctgccgagagccggaggatgggccgtaccaagaggctgtgatccacaaacattcctgcaaatccatggcccacggctggcccacgggaccacaaccctcgcttttcgcttccgccatggggtcatcgcggctgctgacacccgatccagctgcggcagttacgtcgcatgccccgcatcttgtaaggtgatcccagtacatcaacatttgctcggtacaacgtccgggacctccgctgactgcgctacttggtaccgggtgcttcaaagggaattgcgcctcagggagcttcgagaagggcagcttccttctgtagcttcggcagctaaactcctgagtgccatgatgtctcaataccgaggactcgacttgtgcgtcgctactgctctctgtggctgggaccgcagcgggccagagctgttttacgtgtattctgacggcacaagactgcagggagacatctttagcgtgggcagcgggagtccatatgcctatggagtgctcgaccggggttacaggtatgatatgtctactcaggaggcgtatgcactggccagatgcgctgttgctcatgcaactcaccgagatgcctatagcggcggttcggtggacctcttccacgttcgggaaagtggatgggagcatgtgtccaggtcagatgcatgtgtgctgtacgtagaactccaaaagctccttgaacctgagcccgaagaagacgctagccatgcacacccagaaccagcaaccgctcatagagccgctgaggatcgggagctcagtgtcggtcccggtgaagttaccccaggggattcaagaatgccagccggaaccgaaaccgtgtag

SEQ ID NO: 236521 - DNA, 606 bp, synthetic construct
  misc_feature 1..606: note = Description of Artificial Sequence: Synthetic coding sequence
  source 1..606: mol_type = other DNA
atggagtatctgatcggcattcaggggcctgattatgtcctggtcgcctcggacagggtcgctgcaagtaatattgtccagatgaaggatgaccatgacaagatgtttaagatgtctgaaaagatcctgctgctatgcgtgggcgaagccggtgacactgtacaatttgcggaatatatccaaaagaatgtccaactgtacaaaatgagaaatggctacgaactgtctcccaccgcagccgctaatttcaccagacggaatctggccgactgcctacggtcccgtaccccttatcacgtgaacctcctccttgcagggtacgacgaacatgagggacccgctctgtattacatggattacctcgctgcattggcaaaagctccctttgcagcccatggatacggagcttttctcaccctctcgatccttgatagatactatacacccacaatcagtcgggaacgtgcggtggaactgttgcggaagtgtcttgaggagctccagaagaggtttatcttaaatttgcccaccttttctgtgagaatcatagacaagaacggtattcatgacctggataacatatccttccccaaacaaggctcatag

SEQ ID NO: 236522 - DNA, 468 bp, synthetic construct
  misc_feature 1..468: note = Description of Artificial Sequence: Synthetic coding sequence
  source 1..468: mol_type = other DNA
atggctagtctgaaatgctcaacggtggtgtgtgtcatctgtctggaaaagccgaagtataggtgtcctgcctgcagagtgccttactgcagcgtggtgtgttttcgaaagcacaaagagcagtgcaatcctgagacacggccagtggagaagaagatcaggtctgctcttcctaccaagacagtcaagcccgtggaaaataaggacgacgatgatagcatcgccgacttcctaaacagcgatgaggaagaagatcgcgtgtcactacagaatctgaagaatttaggcgaatccgcaaccttaagatctcttctcctgaaccctcacctcagacaactgatggtgaatttagatcagggagaggataaggcaaaattgatgagagcctacatgcaggagccgctttttgttgaatttgccgattgctgtctgggaatcgttgagccttctcagaatgaggaaagttag

SEQ ID NO: 236523 - DNA, 795 bp, synthetic construct
  misc_feature 1..795: note = Description of Artificial Sequence: Synthetic coding sequence
  source 1..795: mol_type = other DNA
atggaggcatttctgggctccaggtccgggctatgggctgggggaccagcccctggccagttttataggattccttcaaccccggactctttcatggaccctgcctcagcactatatagggggccaattacaagaacgcagaaccctatggtgacgggaaccagtgtcttgggcgtcaagtttgaaggtggtgtagtgatagctgccgacatgctgggatcttacggctctctggctcgatttcgcaacattagcaggatcatgcgcgttaataattctaccatgctcggagcctctggcgactatgcagatttccagtatctcaaacaagtgctcggccaaatggttatcgatgaggaactgctgggagacggccactcctatagcccaagggcaattcatagctggctaacccgtgcaatgtacagcagacgcagtaaaatgaatcctctgtggaacaccatggttatcggcggttacgctgacggtgagtctttcctaggctatgtggacatgctgggagtggcctatgaggcgccttcacttgcaactggatatggggcttatctggctcagccactcttacgcgaagtcctggagaaacaaccggtgctgtcccagaccgaggcccgtgacctcgtagagaggtgtatgagagtgctttattatagggacgcacgctcctataatcgcttccagatcgcaaccgttaccgaaaagggggtggagatagaaggcccactctccactgaaacgaactgggacatagctcacatgattagtggcttcgaatag

SEQ ID NO: 236524 - DNA, 792 bp, synthetic construct
  misc_feature 1..792: note = Description of Artificial Sequence: Synthetic coding sequence
  source 1..792: mol_type = other DNA
atggccctggcctcagtgctcgaacggccactgcccgttaatcagagggggttttttggactgggcggaagggccgacttgctcgatctgggccctggaagtttgtcagatggcctttcccttgcagccccagggtggggtgtccccgaagagccaggtatcgaaatgctacatggaacaaccacacttgcttttaaatttcgacacggagtaatcgtggccgcagactctcgcgcaactgctggagcctatattgcttcccagacagtaaagaaggtgattgagatcaacccatatctgttaggcaccatggctgggggtgcagcagactgctccttctgggaaaggctgttggcacgacagtgtcggatctatgagctgaggaataaggaacgaatttccgttgccgctgcatctaagctgctcgctaacatggtgtatcaatacaaaggcatgggacttagtatggggaccatgatatgcggttgggataagcgcggtcctggtctctattatgttgactccgaagggaaccggatctctggagcaactttctccgtggggtcaggctcggtttatgcttatggcgtaatggatagaggttattcctacgatctggaggtggagcaggcctacgatttggccagacgagcaatttatcaggctacgtaccgagatgcctattcgggcggagcagtaaacctgtatcacgtgcgagaagatgggtggattagggtgagttcagataacgtcgcagatctgcacgaaaagtacagtggaagcacaccctag

SEQ ID NO: 236525 - DNA, 483 bp, synthetic construct
  misc_feature 1..483: note = Description of Artificial Sequence: Synthetic coding sequence
  source 1..483: mol_type = other DNA
atggctggcggagcagctgactgttccttttgggagcgcttactcgctcgtcagtgccggatttacgaattacggaataaggagcgaatttctgttgccgcagcctctaagctgctggccaatatggtctatcagtataagggaatgggattgtctatggggacaatgatatgtggctgggacaagcgcggtcctggtctgtattacgtcgattcagagggcaaccgcatctcaggggctacgttctcagttgggagtgggtctgtgtacgcctatggtgtgatggaccgtgggtatagttatgatctggaggtggaacaggcttacgacctagctaggagggcgatatatcaggccacatatagagacgcttactcagggggagccgtcaacttatatcatgtgagagaggatggatggatacgagtcagctcagataatgtcgccgacctacatgagaaatattcaggaagtaccccctag

SEQ ID NO: 236526 - DNA, 612 bp, synthetic construct
  misc_feature 1..612: note = Description of Artificial Sequence: Synthetic coding sequence
  source 1..612: mol_type = other DNA
atggccctggcgtcagtgctcgagagacccctccccgtcaatcagcgcggattcttcggccttggagggagagctgatttgttggatctgggcccaggatctctgagtgatggactgtccctggcagctcctggctggggagtgcctgaggagccaggaatcgagatgttgcacggcacaacaaccttggcattcaaatttcgacacggagttattgtcgctgccgactcaagagcaactgccggagcatatatcgctagtcagaccgtaaaaaaggtcatcgagataaatccataccttctcgggaccatggccggtggagctgccgattgctctttttgggaacggcttctcgcgaggcagtgccgcatttacgaacttcgtaacaaggagcgaatctccgtggccgctgcctcaaaactgttagccaacatggtataccagtataaagggatggggctgtctatgggaaccatgatatgcggatgggataagcggggacccgtgtctgaggtcctctgcttaaaacccaagtccttcggcatgtacctcttctgcggatgcgctgagagaattggcaacatggcaaggcctttgttaagggggcagtag

SEQ ID NO: 236527 - DNA, 834 bp, synthetic construct
  misc_feature 1..834: note = Description of Artificial Sequence: Synthetic coding sequence
  source 1..834: mol_type = other DNA
atggccgcagtgagcgtctatgctcctccagtgggcggattttcgtttgataactgtcggcgtaacgctgttttggaggctgattttgctaagaggggttacaaacttcctaaggtccggaagactggcacaaccatcgccggagtggtgtataaggatggtattgtccttggcgcagatactcgagctaccgagggcatggtggtggccgataagaattgctcaaagatccactttatctctcctaacatttactgctgtggggctggcacagccgctgatactgacatgacaacccagttaatctcgtcaaacctcgagcttcattcactgagcaccggccgactgcctcgggtggtgactgccaataggatgttgaagcagatgctgttcagataccaagggtacatcggggctgcactcgtcctcggaggtgtcgatgtcactgggccacacctatacagcatttatccacacgggagtacagacaaactgccatacgtcacgatgggctctggatctttagccgctatggcagtattcgaagacaagttccgaccggacatggaagaggaagaggctaaaaatctggtctcagaagccatcgctgccggaatctttaatgacctcggatccggatcaaatatcgacctgtgcgtgattagcaaaaataaactcgacttcttgcgcccttacacagtccctaataaaaaaggcaccaggctgggtaggtacagatgtgaaaaaggaactacagctgtccttaccgagaaaatcactccattagaaatcgaagtgctggaggagacggtccagacaatggacactagttag

SEQ ID NO: 236528 - DNA, 633 bp, synthetic construct
  misc_feature 1..633: note = Description of Artificial Sequence: Synthetic coding sequence
  source 1..633: mol_type = other DNA
atggccgcagtgagcgtttacgctcccccagtgggagggttttcattcgataactgccggaggaatgccgtgcttgaggccgactttgccaaaagggggtacaagctgccaaaagtgagaaaaactggtaccacgattgcgggagtcgtgtacaaagacgggattgtgctcggcgcagatacccgggcaacagaggggatggtggttgcggacaagaactgtagtaagattcactttattagcccaaatatttattgctgcggggcaggaacggccgctgacaccgacatgaccacccagctcatcagctctaacctggaactccactccctctccactggcagattgccacgggtagttaccgcaaacagaatgctcaagcagatgcttttcaggtatcagggctatataggggctgccctcgtgctgggaggcgtggacgtaactggtccacatttgtactcaatctacccccacggatctacggacaagctgccgtatgtaacaatggtacattgcgaggaggagttgttcactgaaaacctgttcttcatcaggcaagcagaagtggtatcggaagaggcctggggcccatcattcgctatcagcctagctgtatttctggtcgcctag

SEQ ID NO: 236529 - DNA, 429 bp, synthetic construct
  misc_feature 1..429: note = Description of Artificial Sequence: Synthetic coding sequence
  source 1..429: mol_type = other DNA
atggccgcagtgtcagtgtacgcaccccctgtcggcggattcagttttgataactgccgcaggaacgccgtcctggaggccgatttcgccaaacgaggctacaagctccctaaagtaaggaaaaccgggaccacgatagccggagttgtgtataaagatggaattgttctgggcgctgacactagagcaacagagggcatggtggtggcggataagaactgttccaagattcatttcatttcccccaacatttactgctgcggcgcagggacagcggctgacactgatatgactacccagcttataagcagcaacctggagctgcattccttgagcactgggagactacctcgggtggtgacggccaaccggatgcttaagcagatgctctttcgtttttggctgctcggtagtaatggttgcatatag

SEQ ID NO: 236530 - DNA, 819 bp, synthetic construct
  misc_feature 1..819: note = Description of Artificial Sequence: Synthetic coding sequence
  source 1..819: mol_type = other DNA
atgctgatcggaaccccaactccaagggacacaacccccagctcctggctcacatctagccttttggtggaggccgctcctctggatgataccacactgcccacaccagtgagctcaggatgtcccggtctcgaaccaactgagtttttccagtctctagggggagatggtgaacggaacgtacagatcgagatggcccacgggactacgaccctagccttcaagttccagcacggtgtgattgccgcagtggacagtcgggcttctgccggtagctatatttccgccttacgggtgaacaaagtgatagagataaacccctacttacttggcaccatgagtgggtgtgctgccgattgtcagtactgggaaagactccttgctaaggagtgtaggctgtattatcttcggaacggggaaagaattagcgtaagcgcagcatcaaagctcctgagcaatatgatgtgccagtaccgagggatgggcttgtctatggggtcaatgatctgcgggtgggataagaaaggccctgggctctactatgttgacgaacacggcacacgcctctccggaaacatgttctctactggtagcggcaacacttacgcttacggtgtgatggacagcggttatagacctaacctctctcccgaagaagcctatgacctaggtcggcgtgctattgcctatgctacgcacagggacagctatagtggaggtgtagtcaacatgtaccatatgaaagaagacgggtgggtcaaagtggaatcaactgatgtcagcgacttgctgcatcaataccgcgaggcaaatcagtag

SEQ ID NO: 236531 - DNA, 831 bp, synthetic construct
  misc_feature 1..831: note = Description of Artificial Sequence: Synthetic coding sequence
  source 1..831: mol_type = other DNA
atggcgctgctcgatgtgtgtggtgctcctagggggcagagacctgaatctgccctgcctgtagctgggagtggcagacgatctgatcctggccattacagtttttcgatgcgatcaccggagctggctttgccacgaggaatgcagcctaccgaattctttcagtcactggggggagatggagagaggaatgtccagattgagatggcccacggcacaaccaccctcgcgtttaaatttcagcatggagttattgccgctgtcgattcacgggcttctgcgggaagctacatcagcgccttaagagtcaacaaagtaatcgaaataaacccatatctgctgggaacaatgtccggatgcgccgcagattgtcagtactgggagaggttgctcgcaaaagaatgtagattgtactatctgaggaatggcgaaagaatctccgtctccgcagcctctaagctactgagtaatatgatgtgccagtatagggggatgggcctgtctatgggttccatgatttgcggatgggacaaaaagggacccggtctgtactacgtggatgaacatgggacccgcctgtccggaaacatgttttcgactggttctggtaacacctacgcctatggagtgatggacagcgggtatagacctaatctgtcccctgaagaggcctacgacctgggtagaagggcgatcgcctatgccactcaccgggattcatacagcggaggggtcgtgaatatgtaccacatgaaagaggacggctgggtcaaggttgagtccactgacgtgtcagaccttctccatcaatatcgtgaagctaatcagtag

SEQ ID NO: 236532 - DNA, 831 bp, synthetic construct
  misc_feature 1..831: note = Description of Artificial Sequence: Synthetic coding sequence
  source 1..831: mol_type = other DNA
atggcactcctggacgtgtgtggggcacccagggggcagcggccagaaagtgccctgcctgtggccggtagtggaaggcgatcagacccaggccattatagcttttcaatgcgatcgccagagctggccctccccagagggatgcagcctactgaattttttcagagcttgggcggtgatggtgagaggaatgttcagatcgaaatggcacacggcacaactacattggcctttaagttccagcacggtgtaatcgccgctgtagattcccgggctagtgccggttcttatattagcgcgcttagagtgaataaagtgatcgagattaatccctacttgctgggtactatgagcggctgcgcagcagactgtcagtattgggaacggctcctggccaaggagtgcagactatattatctcaggaacggggaaagaatctccgtgagtgctgcctccaagttgctttctaatatgatgtgccagtaccgcggaatgggcctcagcatgggcagcatgatttgcggctgggacaaaaagggccctgggctttactatgtggacgaacacggcaccaggctgtctgggaatatgttttccactggctccgggaatacttacgcttacggggtgatggacagtggttatcgtccaaacctctcacccgaggaggcttacgacttgggacggagagcaattgcatacgccacccaccgtgattcttatagcggaggagttgttaacatgtaccacatgaaggaagatgggtgggtgaaagttgagtctacagacgtatcggacctgctgcatcagtatcgtgaggccaaccagtag

SEQ ID NO: 236533 - DNA, 819 bp, synthetic construct
  misc_feature 1..819: note = Description of Artificial Sequence: Synthetic coding sequence
  source 1..819: mol_type = other DNA
atgcttattggtacgcccactcccagagacactaccccttcctcatggctcacttcaagcctgttggtcgaggcagcaccgctggatgacaccacgctgccgactccggtttctagcggctgtccgggacttgagcccactgaattcttccagagtctggggggtgatggagagcgcaacgtgcaaatcgagatggctcacggcacaaccacactggccttcaaatttcagcacggtgtcatcgccgctgttgactcccgcgctagtgctgggagctatatctctgccctccgggttaacaaagtcatcgagatcaatccatatctcctaggcactatgtccggttgtgctgcagattgtcagtactgggaacggcttttagcaaaagagtgcagactgtattacttgcgtaacggtgaacggataagcgtatccgctgccagtaaacttctgagtaacatgatgtgtcaatatcgtggcatgggactttccatgggttctatgatctgtggctgggacaagaaaggacccggactctactatgtagacgagcacggaacaaggctttcgggtaatatgttttctaccgggtccggaaatacttatgcctatggggtgatggactccgggtataggcccaatctgagtcctgaggaggcatatgatctggggagaagggctatcgcgtacgccacacatcgtgattcttactctggaggcgttgttaatatgtatcatatgaaggaggacggctgggtcaaagttgaatctactgacgtgtctgatctgcttcaccaatatcgggaagccaaccagtag

SEQ ID NO: 236534 - DNA, 759 bp, synthetic construct
  misc_feature 1..759: note = Description of Artificial Sequence: Synthetic coding sequence
  source 1..759: mol_type = other DNA
atggcactccttgatgtttgcggcgcaccgaggggacagaggcccgaatctgccctacctgttgccggtagcgggagaagaagcgaccctggccattactcattctcaatgcggtcacccgagctcgccctgccacggggaatgcagcccaccgaattcttccaatctcttgggggtgacggagaacggaatgttcagatcgaaatggcacatggtacaacgacccttgcctttaagttccagcacggcgttatcgctgcagtcgactctcgtgcttccgccggaagttatataaactgtcagtattgggagagactattagcaaaggaatgcaggctgtactatctcaggaatggcgaacgcatcagcgtgtccgctgccagcaagctgctgagtaatatgatgtgccagtaccggggtatgggtctgagcatgggatccatgatctgtggctgggacaaaaagggacccggattgtactatgtggatgaacacgggacccggctcagcggtaacatgttctcaaccggctccggcaacacatacgcgtatggcgttatggactcaggctataggccaaatctctctccagaagaggcttacgaccttggtaggcgagcaatcgcctatgccacccacagagactcgtattcaggtggagtggtgaatatgtaccatatgaaggaggatggctgggttaaggtagaatccaccgatgtttccgacctcctccatcagtaccgcgaagctaaccagtag

SEQ ID NO: 236535 - DNA, 759 bp, synthetic construct
  misc_feature 1..759: note = Description of Artificial Sequence: Synthetic coding sequence
  source 1..759: mol_type = other DNA
atggcactcctcgacgtctgcggtgctccccgtggccaaaggcccgagagcgcactcccggttgcaggtagcggtcgcaggtctgaccccggtcactacagtttttcaatgcggtctccagaacttgcattaccaagggggatgcaacctactgagttttttcaaagtctgggcggtgacggggaaagaaatgtgcagatcgaaatggctcatgggacaaccacgctggcctttaagtttcagcacggtgtgatcgccgctgttgacagcagggcatcagcaggcagctatataaattgccagtactgggagcggctcctcgcgaaagaatgtagattgtattacctgaggaacggcgagcgcatctctgtgagcgccgcttccaagttgctcagcaatatgatgtgtcagtacagggggatggggttatcaatgggcagtatgatctgcggctgggataaaaaagggccaggactgtactacgttgacgagcatggtaccaggctatcaggcaatatgttctccactggctccggcaatacttacgcctacggagttatggactcaggctatagacccaacctcagtcccgaagaggcatatgacctaggacggagggccatagcttacgccacacatcgcgacagctactctgggggtgtggtgaacatgtaccacatgaaggaggacggctgggttaaagttgagtccactgatgtgagtgatctgctgcatcagtaccgcgaagcaaaccagtag

SEQ ID NO: 236536 - DNA, 819 bp, synthetic construct
  misc_feature 1..819: note = Description of Artificial Sequence: Synthetic coding sequence
  source 1..819: mol_type = other DNA
atgcttatcggtacgccaacccccagggatacaaccccatcttcctggctgacttcctcccttttggtggaggcggcaccacttgacgacaccaccctgcctacacccgtgtcaagtgggtgtccgggtcttgaacccactgagttcttccagtccctgggcggtgatggagagcgcaatgtccagatagaaatggcgcatggaacaacaactctcgcctttaagttccaacacggagtgatcgccgctgtagatagcagggcttccgctggctcctacattagtgcattgcgagtgaacaaggtgatcgaaataaacccgtacttgctgggcacaatgagcgggtgcgccgctgactgtcagtactgggagcgtttattggctaaagagtgtagactgtactacttacggaatggcgagagaattagcgtttcagctgccagtaaactgcttagcaacatgatgtgtcagtacagaggcatgggcctgagcatgggtagtatgatctgcggatgggataagaagggacctggattatattatgtggatgaacacgggacacgcctgtctggcaacatgtttagtaccggtagcggtaatacatacgcttacggagttatggactctggttacaggccgaacctctcacccgaggaggcctacgatttgggcaggcgcgctatcgcttacgctacacatagagatagctatagcggtggggtggtgaacatgtatcacatgaaagaggacggctgggtgaaagtggaaagtacggacgtgtccgatctcctgcaccagtatcgagaggccaatcaatag

SEQ ID NO: 236537 - DNA, 819 bp, synthetic construct
  misc_feature 1..819: note = Description of Artificial Sequence: Synthetic coding sequence
  source 1..819: mol_type = other DNA
atgctgatagggacacctacacctcgagacacgactccttcttcatggttgactagctctctactcgtggaagcggcacccctcgatgatactactctcccaacccctgtgagcagcggatgtccgggattggagccaactgagtttttccagagcctcgggggagatggggagcgcaacgtccagattgagatggcccacggaaccaccaccttagcatttaagtttcagcacggagtcatagctgcagtggacagtcgtgctagcgcgggaagctatatttccgcccttagagtgaacaaggtcatcgaaattaatccatacttgctaggcacgatgtccggatgtgccgctgactgtcagtactgggagaggctgctggcaaaagaatgtcggctctattacctgagaaatggagagagaataagtgtcagtgccgctagcaagctgttaagcaacatgatgtgccaatacagaggcatgggtctgtcaatgggctccatgatctgtggctgggacaagaagggccctggcctctactacgtggacgagcacggcactaggctctctggcaacatgttctccacaggcagcggaaacacttacgcctacggtgtaatggattcagggtacaggcccaacctttctcccgaagaggcttacgatctgggaaggcgagccattgcctatgcaacccaccgagattcctatagcggaggtgtggtgaatatgtaccatatgaaggaggatgggtgggtgaaggtggagtccacagacgtctccgatctactccaccaatacagagaagcgaaccagtag

SEQ ID NO: 236538 - DNA, 831 bp, synthetic construct
  misc_feature 1..831: note = Description of Artificial Sequence: Synthetic coding sequence
  source 1..831: mol_type = other DNA
atggctctattagatgtctgcggtgcacctcggggtcagagaccagaatccgctctgccggtcgcgggttccggccgaagatcggaccctggccactacagcttctcaatgcgttcccccgaactcgctttgcccaggggcatgcagcccactgagttctttcagtccctcggcggtgatggcgagaggaacgtgcagatcgagatggcccacggcaccaccacactcgcttttaagtttcagcatggtgtgattgccgctgtagattcacgggcaagtgctggtagctatatcagcgcactcagggtcaacaaggtaatcgaaatcaatccctatttgttaggaactatgtctgggtgcgccgcagattgccagtattgggaaagactgctagcgaaagagtgtaggctctattacttgagaaatggcgagaggatctccgtatcagcagcatctaaactcttgagtaacatgatgtgtcaataccggggaatggggttaagtatggggagtatgatctgtggttgggacaagaaaggcccaggtctctactacgtagacgagcatgggacccgcttgtccgggaatatgttttctacaggctctggaaatacctatgcctacggtgtgatggatagcggataccgacctaacctctcccccgaggaggcctacgacctcggcaggcgggcaatcgcttacgccacccacagggattcatattccggcggtgtcgtaaatatgtatcacatgaaggaagacggttgggtaaaggtagaatctactgacgtttcagacctcctgcatcagtatcgggaggccaatcagtag

SEQ ID NO: 236539 - DNA, 759 bp, synthetic construct
  misc_feature 1..759: note = Description of Artificial Sequence: Synthetic coding sequence
  source 1..759: mol_type = other DNA
atggccttactcgacgtgtgcggggctccgagaggtcagcgaccagaatctgccctgcccgtggccggatcagggagaagaagcgatcccggacactattcatttagtatgcgctcaccggagctagctttgcccagggggatgcaacctaccgagttcttccagagcctcggtggtgacggagaacggaatgtacagatcgagatggctcacggaacaacgactctggcatttaaattccagcacggagttattgctgctgtagactccagggcctcggcgggttcttatattaactgccaatattgggagcggttactggccaaagagtgtcgcctttactatcttcggaatggtgagcgcattagcgtgtctgctgcatcaaaactcctgtccaatatgatgtgtcagtatagggggatggggctgtccatgggctcgatgatctgtgggtgggacaaaaagggccctggcctgtattacgtggacgagcatggcacccgcttgagcggaaacatgttttctacaggaagtgggaacacatacgcttacggcgttatggattcaggataccggcctaatttgtcacctgaggaagcatacgatcttggcaggcgtgccatcgcgtacgccacacaccgggactcctattctggcggagtggtgaatatgtaccacatgaaggaggacggctgggtgaaagtggagtccactgacgtgtcggatctgttgcaccaatatcgcgaagccaaccagtag

SEQ ID NO: 236540 - DNA, 759 bp, synthetic construct
  misc_feature 1..759: note = Description of Artificial Sequence: Synthetic coding sequence
  source 1..759: mol_type = other DNA
atggcactccttgacgtctgtggagcccctcgcggacagagacccgaatcggctctccccgtcgccggtagtggcaggagatcggacccaggccactactcatttagtatgcgcagtcctgagctcgccctccctcgaggcatgcagcccactgaattcttccagtctctgggtggggatggggagcggaatgttcagatcgaaatggcccatggaacaacaactcttgcatttaaatttcagcatggtgtcatcgccgctgtggatagccgcgcatcggctgggagctatataaactgccagtattgggagagattgctcgcaaaggagtgtcgcctgtactatctgcgcaatggcgaacggattagcgttagtgccgcatctaagttactgagtaatatgatgtgtcagtacagaggcatggggctcagtatgggatccatgatttgcggttgggataaaaagggaccaggcctgtactacgtcgacgaacacggcacaaggctgtctggaaacatgttttccacaggatccggcaacacgtacgcatatggcgtcatggactctggatatcgcccaaatttgagccccgaagaagcctacgacctgggtaggagagcaattgcgtacgcaacccatcgagacagctatagtggaggagtggtgaacatgtaccatatgaaggaagacggttgggtgaaggttgagtctaccgacgtgtcagacctgcttcatcagtacagagaggctaaccagtag

SEQ ID NO: 236541 - DNA, 831 bp, synthetic construct
  misc_feature 1..831: note = Description of Artificial Sequence: Synthetic coding sequence
  source 1..831: mol_type = other DNA
atggccctgctcgacgtatgcggtgctccgagaggtcagaggcccgagtccgccttaccggtcgccggttcaggtcggcgttctgatccagggcattactctttttctatgcgttcccctgagctggctttgcctcgcggtatgcagcctaccgagttcttccagtctctcgggggtgacggggaaagaaacgtccagatcgagatggcccacgggacaacgacactggcattcaagttccaacacggggtaattgctgccgtggactcccgagcctcagccggaagctatattagcgccttgcgggtgaacaaagtgattgaaatcaacccctatctgttgggcaccatgtcaggttgcgcagccgattgtcagtactgggaaaggttgctggccaaggagtgtcgcctctactacctgcggaacggggagcgcattagtgtctccgcggcttctaaactgctgagtaacatgatgtgccagtaccgcggaatggggctgtccatgggttcgatgatatgcgggtgggacaaaaaggggccagggctttattatgttgatgaacacggtacaaggctgtcaggtaatatgtttagcacaggaagcggaaatacgtacgcctacggggtaatggattcaggctacaggccgaacctgtcaccagaagaggcctacgacctggggagaagggccatagcctacgccactcacagggactcatacagtggcggagtggtgaacatgtaccacatgaaagaagatggctgggttaaagtagagtctacagacgttagcgacctgcttcatcagtatagggaagcaaaccaatag

SEQ ID NO: 236542 - DNA, 819 bp, synthetic construct
  misc_feature 1..819: note = Description of Artificial Sequence: Synthetic coding sequence
  source 1..819: mol_type = other DNA
atgctaattggcactcctacccctagggataccaccccatctagttggttaacctctagcctcttggtcgaggcagccccactcgatgacaccaccctcccaacccccgtgtcatcagggtgcccagggctcgaacctactgaattttttcagtctctgggcggagacggcgaacgcaatgtccagattgagatggcacacggcaccaccacacttgcctttaaattccagcacggtgtgattgccgctgtggacagtcgggctagcgctgggtcatatatatcagcactgagagtaaacaaggtaatcgagatcaacccatacttgctgggcacaatgtcaggctgcgctgctgactgtcagtactgggagaggctcctggctaaagagtgtcgtctctattacctgaggaacggagagcggatctcagtgagcgcggcaagtaagctgttgagcaatatgatgtgtcagtaccgcggaatgggcttgtctatgggttctatgatatgtgggtgggataagaaaggccctggattatactacgtagacgagcatggcacccgcctcagcggaaatatgttttcgactggtagtgggaatacttatgcttatggggtgatggattcaggataccggcctaatttgagcccagaggaagcctatgacttggggaggagggccatcgcttatgccactcaccgtgattcttatagcggtggcgtggtaaacatgtatcacatgaaagaggatggatgggtgaaggttgaatccactgacgtatctgacttactacaccagtaccgggaagccaatcagtag

SEQ ID NO: 236543 - DNA, 819 bp, synthetic construct
  misc_feature 1..819: note = Description of Artificial Sequence: Synthetic coding sequence
  source 1..819: mol_type = other DNA
atgttaataggtacgccaacacccagggacaccactccctcctcttggctcacatcttccctgctcgtggaagctgccccactggatgacacgactctgcctaccccggtgagtagtggatgcccaggtctggagcccaccgagtttttccaatctctaggtggtgacggagagcgaaatgtgcagattgagatggcccacggcactaccaccctcgccttcaaattccagcacggtgtcatagcagctgtcgattcaagagcttccgctggctcttacatctccgcactgagagtcaacaaggtgatcgagatcaacccatatttgctcggaaccatgtccggatgtgccgcagattgccagtactgggagcgcctgcttgcaaaggagtgccggctgtactacttgcgaaacggggagcgtataagcgtcagcgccgctagcaagctcttgagtaatatgatgtgtcaataccgcggaatggggctgtccatggggtcaatgatttgtggctgggacaagaagggtccagggctatactacgtggatgagcatggaactaggctatccggaaatatgttctccactgggtccggcaatacatacgcctacggtgttatggattccgggtacaggccaaacctgtccccagaggaggcctacgacttgggtaggcgcgcaatcgcgtatgctacgcaccgagattcatactccggtggggtcgtgaacatgtaccacatgaaggaggacgggtgggtcaaggtagaatctactgatgtgtccgacttgctacaccagtatcgtgaggctaatcagtag

SEQ ID NO: 236544 - DNA, 831 bp, synthetic construct
  misc_feature 1..831: note = Description of Artificial Sequence: Synthetic coding sequence
  source 1..831: mol_type = other DNA
atggccctcctggacgtctgtggagcccctcggggacaacggccagaatccgcacttcctgtggccggttcgggaagacggtcggatccaggacattactctttcagtatgcgatctcccgagctggccttacccagaggcatgcagcccacagaattttttcaatcacttgggggtgatggtgagcgcaacgtgcagattgaaatggcgcatggtacgactacactagctttcaaattccaacatggagtgatagccgctgttgattcacgcgcttccgcgggaagctatatctcagcgttgagagtaaataaggtgatcgagatcaacccatatttattgggaaccatgagcggctgcgcagctgattgtcaatactgggagagattattggctaaggaatgcaggttatattatcttagaaacggagaaaggattagtgtcagcgcagctagcaagctcctctctaatatgatgtgtcaatatagaggcatgggcctgagtatgggatcgatgatttgcggctgggacaagaagggcccagggctttactacgtcgacgagcatggaaccagactctctggtaatatgtttagcaccggatcagggaatacgtacgcatacggggtcatggactccggttacaggccaaacctgtcccccgaggaggcctatgatctcggtcgacgcgcaattgcatacgccacccaccgggatagttacagtggcggagtcgtcaacatgtatcacatgaaagaagacgggtgggtgaaggtggaatctacggatgttagcgacttactgcaccagtaccgtgaggccaaccagtag

SEQ ID NO: 236545 - DNA, 819 bp, synthetic construct
  misc_feature 1..819: note = Description of Artificial Sequence: Synthetic coding sequence
  source 1..819: mol_type = other DNA
atgctcattgggacgccaacccctcgcgacactacacccagcagttggttgacttcaagcttgttggtcgaagctgcgcctctggatgataccactctgccaactccagtttcaagcggctgtcctggcctggaacccacggagttctttcagagcctcggcggagatggcgagcgcaacgtgcagattgaaatggcccacggcacaaccacattggcatttaaatttcagcacggcgtgattgccgcagtcgatagccgggcatcagcagggtcctacatcagtgccctccgagttaacaaagtgatcgagattaatccctacctgctcggtaccatgtctggctgcgctgcagattgtcagtattgggaacgactccttgctaaggaatgccgattgtactacttgcgaaacggcgagaggatttcagtgtccgcagcaagtaaactgctgagcaatatgatgtgtcagtatcggggtatggggctgagcatggggtccatgatttgtggctgggataagaaaggcccaggcctctactacgtggatgagcacggcacaaggctgtcggggaatatgttcagcactgggagtgggaacacatacgcgtatggagtgatggattccggttacagacccaaccttagcccggaagaagcctacgacttggggagaagggcaatcgcctacgccacccacagggattcatacagtgggggagtggtaaacatgtatcatatgaaagaggacggctgggtgaaggtcgagtcgactgatgtgtccgatctgcttcaccagtacagggaggctaaccagtag

SEQ ID NO: 236546 - DNA, 831 bp, synthetic construct
  misc_feature 1..831: note = Description of Artificial Sequence: Synthetic coding sequence
  source 1..831: mol_type = other DNA
atggctctgctcgatgtatgtggtgctcccagaggccaaagacctgagtctgctctccccgttgcagggagcgggaggcggagcgaccctggccattatagcttttctatgaggagtcccgaactggccctgcctcggggaatgaaaccaacagaattctttcaaagtttgggaggagacggggagcgaaatgtccagattgagatggctcacggcacaacaaccctggctttcaaatttcagcatggcgtgatagctgccgttgactctcgcgcttccgccggatcctacatcagcgccctgcgggtgaataaagtgatagagatcaatccatacctgctcggaacaatgagtggttgcgctgcggactgccagtactgggagagactgctggccaaagagtgccggttgtactacctgaggaatggagagagaattagcgtaagcgccgcttccaaactcctgtcaaatatgatgtgtcagtacagaggcatgggtctctctatggggtctatgatctgtggatgggacaagaagggccctggtctctactacgtcgacgagcatggtacgcggctgtcaggaaacatgtttagcacaggcagcggtaatacatacgcctatggagtcatggacagcggctaccgcccaaatttatctccagaggaggcttatgatctcgggaggcgggctatcgcatatgcaacacatcgggacagctacagcggaggagttgtcaatatgtaccacatgaaagaggatggatgggtgaaagttgaatccacagatgtttctgaccttcttcatcaataccgcgaagccaaccaatag

SEQ ID NO: 236547 - DNA, 759 bp, synthetic construct
  misc_feature 1..759: note = Description of Artificial Sequence: Synthetic coding sequence
  source 1..759: mol_type = other DNA
atggccctcctggatgtctgcggcgcaccacgtggtcaacggcctgaatcagcattgcccgtggccggttctggccgtcgctctgacccgggtcattactcattctctatgcggagccctgagttggctctgcccaggggcatgcagcccactgaattcttccagagtcttggaggtgatggtgagagaaacgtgcagatcgagatggctcacggtactacaacattagctttcaagtttcagcacggcgtgattgccgctgtcgactcccgcgctagtgcgggtagttacataaattgccagtactgggaaaggctgctcgcaaaagagtgtcgactctattacttaaggaacggggaacgtatctctgtttctgcagcatcaaagttgctctccaatatgatgtgccaatacaggggcatgggcctttccatgggctcaatgatctgtggctgggacaaaaaaggaccaggtctctattatgtggacgagcatggaacgcgactttccggcaacatgttctccacaggatccgggaacacttatgcttatggggtaatggattctggatataggccaaatctcagcccagaggaagcttacgacttagggcgaagggcaatagcttatgctacgcaccgagactcatactccggcggtgtggtgaacatgtatcacatgaaagaggacgggtgggtcaaagtcgagagtacagacgtgagcgacctgctgcaccagtacagggaagccaatcagtag

SEQ ID NO: 236548 - DNA, 759 bp, synthetic construct
  misc_feature 1..759: note = Description of Artificial Sequence: Synthetic coding sequence
  source 1..759: mol_type = other DNA
atggcactgttggatgtgtgcggcgctccacgtggccagcggcctgaaagcgctctgccggtcgcaggaagcgggagacgctccgaccctggccactacagcttctctatgaggtcacctgaactcgccctgcccagaggcatgcaaccgaccgagtttttccagtctctagggggagatggagagagaaatgtccagattgaaatggctcacggaacaaccactttggcctttaaatttcagcatggagtgattgcagctgttgatagtcgggcaagtgctggctcctacattaactgccagtactgggagaggttactggctaaggaatgtcgactgtactacctgcgcaatggagaacgtatctcagtgtcagccgcttccaagctcttgtcaaatatgatgtgccagtacagaggcatggggctgagtatgggaagcatgatctgcggttgggacaaaaagggcccaggcttgtattatgtcgacgaacacggtactcgcctgagtggaaacatgtttagtactggaagtggcaatacgtatgcctatggggtgatggacagcggatatcgtcctaatctcagcccagaggaagcctatgacctgggcaggagggcaatagcttatgccacccatcgcgattcatacagtgggggtgtggtgaacatgtatcacatgaaggaggacggctgggtgaaggtggaaagcactgacgtttctgatttactgcaccagtacagagaggccaaccagtag

SEQ ID NO: 236549 - DNA, 759 bp, synthetic construct
  misc_feature 1..759: note = Description of Artificial Sequence: Synthetic coding sequence
  source 1..759: mol_type = other DNA
atggcccttctggacgtttgcggggcaccacgtgggcagaggcccgagtcagccttgccggtggccggtagtggtaggagatcggatccaggacactacagcttctcaatgcgcagtccagagcttgctctgccacgaggcatgaagcccactgaattcttccagtcccttggtggtgacggtgagaggaacgtccagatcgagatggcccacggcacaacaacccttgcttttaagtttcagcacggagtgatcgctgccgtagactctcgagccagtgctggcagctacattaattgccagtactgggagcgactgctggcaaaagagtgccgcttgtattatctgcgtaatggggaacggatctccgtgtcagcagcatctaaattactctcaaatatgatgtgtcagtaccgaggtatggggctttccatgggaagcatgatatgcgggtgggacaagaagggccctggattgtattatgttgatgaacatggtacccggctctcaggaaacatgtttagtacaggaagtgggaacacatatgcctacggcgttatggacagcggctaccggcctaacttatcccctgaggaggcatacgacctgggtcgtagagcaatagcctacgctactcatcgcgacagctatagcggcggtgtggtaaatatgtatcatatgaaggaagacggctgggtcaaagtcgagtcaaccgatgtaagcgatcttctccatcagtatcgcgaagccaatcagtag

SEQ ID NO: 236550 - DNA, 819 bp, synthetic construct
  misc_feature 1..819: note = Description of Artificial Sequence: Synthetic coding sequence
  source 1..819: mol_type = other DNA
atgctgattgggacaccaactccgagagacactacacctagcagttggctgacgagctctctgttggtggaggccgctcctttggatgacacgactctcccaacgcccgtgagcagtggatgccctggtctggaaccaaccgagtttttccaaagcctcggaggggatggagagaggaacgtgcagattgagatggcccacggtaccactacgctggccttcaagtttcagcatggagtaatcgctgccgttgattcccgcgcaagtgcagggtcctatatcagtgcactgagagtaaacaaagtgattgagatcaacccctatttgcttggaacaatgtccggttgtgcagcagactgtcaatactgggagcggctccttgcgaaggaatgcaggctgtactatctgcgaaatggcgagagaatttctgtgagcgctgcgtcaaagctgctcagcaacatgatgtgccaatatcgaggaatgggcctgtcaatgggatccatgatctgcggatgggacaaaaaaggccctgggctatactatgttgatgaacacggaacaagattgtccggcaacatgtttagcaccggtagcggtaatacgtacgcctatggtgtcatggacagtggctataggcccaatctgagtcccgaggaagcttatgatctgggtcgaagagctattgcctacgctacacatcgggattcatacagcgggggagtcgtgaacatgtaccacatgaaggaggacgggtgggtcaaggttgaaagcaccgatgtgagcgacctgctgcatcagtatcgagaggctaaccagtag

SEQ ID NO: 236551 - DNA, 831 bp, synthetic construct
  misc_feature 1..831: note = Description of Artificial Sequence: Synthetic coding sequence
  source 1..831: mol_type = other DNA
atggcactgttagatgtatgcggagcaccaagaggacagcggccagagagcgcgcttccagttgccggaagcgggaggcggagtgaccccggacactattcatttagtatgagatccccagaacttgccctgccgcgtggcatgcagcccacggaattctttcagtcactcggcggtgatggggagagaaatgtgcaaattgagatggcccatggcaccaccacactagcctttaagttccagcacggagttatcgccgctgttgactcccgcgcatctgccggaagctacatcagcgctctaagagtcaataaagtgatagagatcaacccctatctgctgggcacaatgagtgggtgcgcagccgactgccaatattgggagagactcctagctaaagagtgtaggttatactacctcaggaatggtgagcgtatatctgtgagcgctgcaagcaagttgctgtcaaacatgatgtgtcagtatcgaggcatgggcctgagcatgggtagcatgatctgcggttgggataagaagggacccggactgtactacgtggatgaacacggcactcggctttcaggaaatatgttttccacgggctccgggaatacctatgcatacggcgttatggattcagggtacagacccaatctgtcccccgaagaggcctacgacctggggcgaagggcgatcgcctacgccactcaccgtgattcttactctggcggagtggtgaacatgtaccacatgaaggaggatggctgggtgaaagtcgagagtaccgacgttagtgatctgttgcatcaatacagggaagccaaccagtag

SEQ ID NO: 236552 - DNA, 831 bp, synthetic construct
  misc_feature 1..831: note = Description of Artificial Sequence: Synthetic coding sequence
  source 1..831: mol_type = other DNA
atggctcttttggacgtttgcggagctccccgaggtcagaggccggagtctgctctacccgtcgcgggatctggacgaagaagcgacccgggacactattccttttccatgaggagtccagagctggcattgccccgagggatgcagccaacagagtttttccagagtttagggggagatggcgaacgaaacgttcagatcgaaatggcacatgggacaactaccttggcttttaagtttcagcacggggttatcgccgcagtggatagccgggctagtgcaggttcctacatctctgccctgcgcgtgaacaaggtgattgagatcaatccatatctgctgggtactatgagcggatgcgccgctgattgccagtattgggagcgactactggcaaaagagtgtagactgtactatcttcgtaatggcgagagaatatccgttagtgcagccagcaagctgctgtccaacatgatgtgccagtatagagggatgggcctctccatgggcagcatgatttgcggttgggataagaagggtcccggtctgtattacgttgatgagcatggaacccggctcagtggaaacatgttcagcactggatccggaaacacatatgcatacggggtaatggactcagggtaccggccaaacctgtctccggaggaagcttatgatctggggcgaagagcaattgcctacgccactcatagagatagctattctggcggagttgtcaatatgtaccacatgaaagaagacgggtgggtcaaagtcgaatcgaccgatgtgtctgacttgttacaccaataccgcgaagccaaccagtag

SEQ ID NO: 236553 - DNA, 759 bp, synthetic construct
  misc_feature 1..759: note = Description of Artificial Sequence: Synthetic coding sequence
  source 1..759: mol_type = other DNA
atggctctcctcgacgtttgtggagcaccaagaggacagcgcccagagtctgccctaccagtcgcaggttctggcaggaggagcgaccctgggcactactccttcagcatgagatcgcctgaactcgcccttccacgcggaatgcagccaacagagttctttcagtcattggggggagatggggagcggaatgtccagatcgagatggcccacggaacgaccaccctcgcgtttaagttccagcacggagtgatcgcagccgtcgattcccgcgcatctgctgggtcttacataaattgccagtactgggagcgtttgctcgccaaggagtgcagactttattacctgcgtaacggtgagaggatcagcgtgtcagccgcttcgaagctgctcagcaatatgatgtgccagtacagagggatgggtctcagcatgggttcaatgatctgtggctgggacaagaagggaccgggtctgtactatgtcgacgagcacggcaccaggctgtctggaaacatgttcagcactggctccggaaatacatacgcttacggcgtaatggattcaggctatcgtcccaatctgtctcccgaagaagcgtatgacctcgggagaagggccatagcatatgctactcatcgagactcgtattccggcggtgtcgttaatatgtaccatatgaaggaggacggatgggtaaaggtagaatctacggatgtctccgacctgctgcaccaataccgggaagccaatcaatag

SEQ ID NO: 236554 - DNA, 831 bp, synthetic construct
  misc_feature 1..831: note = Description of Artificial Sequence: Synthetic coding sequence
  source 1..831: mol_type = other DNA
atggccctcctagacgtctgtggcgcacctcggggtcagagaccagagtccgctctgccagtagcaggaagtgggcgaaggagcgatccaggacattactccttctccatgcgctctcctgaactcgctctcccacgtgggatgcagcccacggagttctttcagagtctggggggtgacggggagaggaatgtgcagattgagatggcacacggcaccaccacgcttgcctttaagtttcagcatggggttattgcagcggtggacagtcgcgcatctgcgggttcatacatatctgccctcagggtcaataaagtaatcgagattaatccgtacctcctcggcaccatgagcggttgcgccgctgactgccaatactgggaacgtctcctggctaaagagtgtcggctgtattatttgaggaacggggagcgtattagcgtcagtgcggcatctaagttgctctctaacatgatgtgccaatacaggggaatgggattgagcatgggatccatgatatgcgggtgggacaaaaaaggacccggactttattacgttgatgagcatggtactcgcttaagcggaaacatgttctccaccgggagcggcaatacatacgcctatggagttatggactcgggctatagacccaatctcagtcccgaggaggcatacgacttagggcgtcgtgcgatcgcctatgccactcacagagatagctattcaggcggtgtcgttaatatgtatcacatgaaggaagacggttgggtgaaagtagagtctaccgatgtatcagatctactgcatcagtaccgcgaggctaaccagtag

SEQ ID NO: 236555 - DNA, 660 bp, synthetic construct
  misc_feature 1..660: note = Description of Artificial Sequence: Synthetic coding sequence
  source 1..660: mol_type = other DNA
atgctgcgagcaggagcacctactggcgaccttccgagagccggagaagtccacactggaaccactatcatggctgtggaattcgatggcggtgtggtgatgggcagtgactcgcgtgtgagtgcaggcgaagctgtggtcaatcgggtgtttgataagttatctccattgcacgagcgaatatactgtgccctgagcgggagtgcggcagatgcccaagccgtagcagacatggccgcttatcagttagagcttcatgggattgagttagaagagcctcctctggtgctcgcagcagccaatgtcgtacggaatatctcttataagtatcgcgaggacctgagcgctcatcttatggtcgcgggatgggaccagagagaagggggtcaggtttatgggacactgggcggaatgctgacgaggcagccctttgctataggtggcagtgggtccactttcatatatggatatgtggatgcagcatataagcctgggatgagccccgaggaatgtcggagattcacgacagatgcgattgctctggcaatgtcgcgcgatggaagcagcggtggagtgatttatctcgttacaatcaccgccgcaggagtggaccaccgggttattttgggtaacgagctgcccaagttttatgacgaatag

SEQ ID NO: 236556 - DNA, 660 bp, synthetic construct
  misc_feature 1..660: note = Description of Artificial Sequence: Synthetic coding sequence
  source 1..660: mol_type = other DNA
atgctccgtgctggggcacctactggcgacctccctcgcgctggcgaagtacacactgggactactatcatggctgtggagtttgatggcggtgtggtgatgggctctgatagccgggtctctgctggcgaggccgtggtgaaccgagtgttcgataaactgagtccacttcatgaaaggatatattgcgcactgtctgggtccgccgctgatgctcaggctgtcgcagacatggccgcatatcagctggaactgcacggcatcgagcttgaagaaccgccactggtcctggcagcagccaatgtggtgcggaacatctcgtacaagtatagagaagacttgtcagcccatcttatggttgcaggctgggaccagcgcgagggtggccaagtatatgggactctcggtggaatgttgaccagacagccatttgctatcggcggttctggaagcactttcatctacggttacgtagacgcagcgtacaagcccggtatgtcaccagaagaatgtagaaggttcaccactgacgccatcgcgctggccatgtccagggacgggtcctcaggcggtgtaatatatttggtcaccataaccgctgcgggtgtcgatcaccgcgtgattctcggaaatgaactacccaaattctacgacgaatag

SEQ ID NO: 236557 - DNA, 660 bp, synthetic construct
  misc_feature 1..660: note = Description of Artificial Sequence: Synthetic coding sequence
  source 1..660: mol_type = other DNA
atgttacgagctggcgcaccaaccggagacctcccgagagcaggagaggtacacaccggaactaccatcatggccgtcgagttcgatggtggcgtcgtcatggggtccgacagtcgcgtgtcagcaggagaagctgtagttaatcgggtatttgacaaactgagccctctgcacgagcgtatctactgcgcgctctccggtagcgccgctgatgcacaagctgttgctgatatggctgcctaccagctcgaactgcacggaatcgagcttgaagagcctcctttagtcttggccgctgctaacgtagtaagaaatatctcttacaaatatcgggaggacctgtcagcacatttaatggtagctggttgggaccagcgagagggcggacaggtatatggtaccctcggaggcatgctgacacgccagccatttgcaatcggtgggtccgggagcacctttatctacggatacgtggatgcagcctacaagccagggatgagtcccgaggaatgtcggaggttcaccacagacgccatcgctctggccatgagccgcgatggatcttctggtggcgtgatctacctggttaccatcaccgccgctggagtagaccacagagtaatactcggaaatgaactgcctaaattctacgacgaatag

SEQ ID NO: 236558 - DNA, 591 bp, synthetic construct
  misc_feature 1..591: note = Description of Artificial Sequence: Synthetic coding sequence
  source 1..591: mol_type = other DNA
atggcagtggagtttgatggaggagtagtcatgggctccgacagcagagtgagtgctggtgaggcggtagtgaacagggtgttcgataagttgagccctttgcacgagcgcatctactgcgccttaagcgggtcagcagccgacgcacaagcagtagctgacatggccgcttaccagctggaattgcacgggatcgagctcgaagaacctcctcttgtgctcgctgctgccaatgttgtgcggaacattagctataagtacagagaggacctgagtgcccacctcatggttgccggatgggaccagcgggaaggcggacaggtttacgggactctgggaggcatgttaacacgtcagccatttgccattggaggcagtggaagcacgttcatttacggttacgtagatgcggcatacaagccgggtatgagcccggaggagtgccgccgatttacgactgacgcaatcgcgctggccatgagccgggacggtagttctggaggagttatctatctggttacaatcactgccgctggcgtcgatcaccgggtgattctggggaacgagctaccgaagttctacgacgagtag

SEQ ID NO: 236559 - DNA, 537 bp, synthetic construct
  misc_feature 1..537: note = Description of Artificial Sequence: Synthetic coding sequence
  source 1..537: mol_type = other DNA
atgcttcgggctggtgctcccaccggcgacttacccagggcgggtgaggtccatacagggacaacaataatggctgtggagttcgacggcggagtggtgatgggaagcgattctcgtgtatcggctgggatcgaactggaagaaccgcctttggtactggccgcagcaaacgtcgtgcggaacatttcttataaatatagagaagacctgagtgctcatctgatggtggccggatgggaccaaagggagggaggtcaggtgtatggcacgttgggagggatgctaaccaggcagcctttcgccataggaggatcaggctctacatttatatacggctacgtggacgcagcttacaaacccggtatgtctcccgaggagtgtagaaggttcaccacggacgctacttcgacaaagcgaagggtctgtgggtatttcctgaggacccagaagcgcgagaatcaaaaccagagggtccacgagtacatgtgtacaggggagagaagtttaagttctagccccctgctgtcctgctcctag

SEQ ID NO: 236560 - DNA, 591 bp, synthetic construct
  misc_feature 1..591: note = Description of Artificial Sequence: Synthetic coding sequence
  source 1..591: mol_type = other DNA
atggccgtagagttcgacggaggagttgtgatggggtctgacagccgggtgagcgccggtgaggccgtcgtcaatcgtgtgtttgacaaactgagccccctgcacgaacggatatactgtgccctcagcggctccgccgctgatgcccaggccgttgcagacatggcggcttatcaactggaactgcacggcatagaacttgaagagcccccactggtgctggccgctgcgaacgtggtgcgcaacatctcttacaagtatcgcgaggacttgtccgctcacttgatggtcgcgggatgggatcagagggagggcggacaggtttacggcaccctcggtgggatgcttacacgccaacctttcgcgattgggggatccggatctaccttcatctatgggtatgtggatgcggcatacaagccagggatgtccccagaagagtgtcgaagatttacgaccgatgctattgccctcgcaatgtcacgagatggctctagtggcggagtcatctatctggtaacaatcaccgccgctggcgttgaccacagagtgatcctgggaaacgagctgcctaaattttacgatgagtag

SEQ ID NO: 236561 - DNA, 537 bp, synthetic construct
  misc_feature 1..537: note = Description of Artificial Sequence: Synthetic coding sequence
  source 1..537: mol_type = other DNA
atgttacgtgccggtgcccctactggagacctccctagagctggagaggtccacaccggcaccactataatggcagtcgagtttgacggtggagtggtaatgggctcagatagcagggtcagcgcaggaattgaattggaggagcctcccctggtcttggcagctgctaatgtagtaaggaacatcagctataaatatagagaggacctaagcgcccacttgatggtcgctggctgggatcaacgggaagggggtcaggtctacgggaccctgggaggaatgctgactcggcagccgtttgcaatcgggggttcaggctccactttcatttatggttacgtggacgctgcttacaagcctggcatgtcccccgaggaatgtaggcgcttcacaacagatgctacttctaccaagcgtagagtctgtggatatttcctgcgcacacagaaaagagaaaatcagaaccaacgcgtgcacgagtacatgtgtaccggggaacgctctctgagttctagtcctctgttgtcttgttcttag

SEQ ID NO: 236562 - DNA, 591 bp, synthetic construct
  misc_feature 1..591: note = Description of Artificial Sequence: Synthetic coding sequence
  source 1..591: mol_type = other DNA
atggccgtggagtttgacgggggagttgtcatgggatctgactcgagggtcagtgcaggcgaggctgttgttaatagagtgttcgataagttatcccccctgcacgagcggatctattgcgccctgtctgggtccgcggctgacgcacaggctgtggcagatatggccgcataccaactggagctccacggcatcgaactggaggaaccgcctctcgtacttgccgctgcaaatgtagtgcgcaatatcagttataagtacagagaggacctgagcgcccacctgatggtggccggatgggaccagcgggagggcggtcaggtgtacggaacgctgggcggtatgctgactcgacagcccttcgccattggcggatccggctctacctttatatacggttacgtggacgccgcatataagccaggtatgtcccccgaagaatgtcgcagattcacaacagacgccattgccctggccatgagcagggacggatcgtcaggcggagtgatataccttgtcacaatcacagcagcaggcgtcgaccacagagttatattgggaaacgagctcccgaagttctacgacgagtag

SEQ ID NO: 236563 - DNA, 537 bp, synthetic construct
  misc_feature 1..537: note = Description of Artificial Sequence: Synthetic coding sequence
  source 1..537: mol_type = other DNA
atgctcagagccggagcccctaccggcgatctgccacgtgcgggagaggtgcacaccggtaccactataatggctgtagaattcgacgggggagtggtcatgggctctgactccagggtcagtgccggtattgagttggaggaaccacctttagtactggccgctgccaatgttgttcggaatataagttacaagtatcgcgaagacctcagtgctcaccttatggttgccggatgggatcagcgggagggtggccaagtctatggaaccctcggtggcatgcttacaagacagccattcgctatcggcggaagcggatccacattcatatacggatatgtcgatgctgcatataagcctgggatgtcccccgaggaatgccgccgtttcactacagatgcaacgtccacaaagcgaagggtctgcggctacttcctgaggacccagaaacgtgagaaccagaaccaacgggttcacgaatatatgtgtaccggcgaaagatcactttcttctagcccgctcctttcctgctcatag

SEQ ID NO: 236564 - DNA, 396 bp, synthetic construct
  misc_feature 1..396: note = Description of Artificial Sequence: Synthetic coding sequence
  source 1..396: mol_type = other DNA
atggccgttgaatttgacgggggtgtggttatgggaagcgacagcagagtgagcgcgggtgaggcagtggtgaacagagttttcgacaaactgtcacccctacatgagaggatatactgtgcacttagcggctctgccgctgatgcccaggcggttgccgacatggcggcttaccaactcgagctccacggcatcgagctggaggaacctcctctggtgcttgccgcagcgaacgtggtgcgcaacatatcctacaaatacagagaggatctgtctgcccacttgatggtggcaggatgggaccagagagagggtggtcaggtatacggaacattggggggaatgctgacacggcagccttttgccattgggggatcgggtagcacttttatctag

SEQ ID NO: 236565 - DNA, 396 bp, synthetic construct
  misc_feature 1..396: note = Description of Artificial Sequence: Synthetic coding sequence
  source 1..396: mol_type = other DNA
atggctgtggagttcgatggtggggtggttatgggctcagacagccgcgtgtccgctggagaagcagtggtcaacagggtatttgataaattgagcccactgcacgaaaggatctattgcgccctcagcgggagcgcggcagacgctcaggcggtagcggacatggctgcctatcagctcgagcttcacggcattgagttagaagagcctcccctggtactggccgcagctaatgtggttcggaatatatcctataaatatcgggaagacctctctgctcatcttatggtcgctggatgggaccagagggagggcggacaggtgtatgggaccctaggcggaatgctcacaagacagccttttgccataggcggatctggcagcactttcatctag

SEQ ID NO: 236566 - DNA, 396 bp, synthetic construct
  misc_feature 1..396: note = Description of Artificial Sequence: Synthetic coding sequence
  source 1..396: mol_type = other DNA
atggccgtggagttcgatggtggcgtggtcatgggaagtgactccagggtatcagccggagaagccgtcgtcaaccgggtgttcgacaagctgtctcccctgcatgagagaatctattgcgcattaagtggttccgctgccgatgcacaagccgtggctgacatggcagcctaccagcttgagctccacggcatcgagttagaagagccaccccttgttctcgccgcagctaacgtggtccggaacatctcatacaaataccgagaagatctctcagcccacctcatggtcgctggctgggaccagagagaaggcggtcaagtttatggcacactcggcggtatgctaactcgccagccatttgcaattggcggtagtgggtcaacatttatttag

SEQ ID NO: 236567 - DNA, 396 bp, synthetic construct
  misc_feature 1..396: note = Description of Artificial Sequence: Synthetic coding sequence
  source 1..396: mol_type = other DNA
atggcagtagaatttgacggcggagtggtcatgggatcagatagtcgagtgtccgcaggagaggctgtggttaatagagtgttcgacaaattgagccccctgcatgaacggatatactgcgccctcagtgggtccgcagctgacgctcaagccgtagccgacatggcggcatatcagcttgagctgcatgggatagagctcgaggagccccctttggtattggctgctgctaatgtggtaagaaatatcagctacaagtaccgggaagatctttccgcccacctgatggtggccggatgggatcagcgcgagggcggtcaggtctacggaacactaggaggcatgctgacccggcagcctttcgcaatcgggggttctggaagtacttttatttag

SEQ ID NO: 236568 - DNA, 537 bp, synthetic construct
  misc_feature 1..537: note = Description of Artificial Sequence: Synthetic coding sequence
  source 1..537: mol_type = other DNA
atgttaagagcaggcgcacccacaggcgatctgcccagggccggagaggtgcacactgggactacgattatggcagttgagtttgatggaggggtagttatgggatctgactctcgggtgtctgcaggcattgagcttgaagaaccccctcttgtgctcgcagccgctaatgtggtacgaaacatcagttacaagtatcgagaagatttgtcagctcacctcatggtggccggatgggatcagcgagagggaggacaggtatacggtactcttggcggaatgctcacgagacagcctttcgcaatcggtggctcggggtctacctttatttacggttacgtggacgcggcatacaagccaggcatgagtccagaggagtgcagaagatttaccacagacgccacatctacgaagcgccgagtgtgtggctattttcttaggacgcagaaaagggagaaccagaatcaaagggtgcatgagtatatgtgcacttctgagcgctcactgtcttcctcccctttactgtcatgttcctag

SEQ ID NO: 236569 - DNA, 396 bp, synthetic construct
  misc_feature 1..396: note = Description of Artificial Sequence: Synthetic coding sequence
  source 1..396: mol_type = other DNA
atggccgtcgagtttgacggaggtgttgtgatgggaagcgatagccgggtgagcgcaggggaagccgttgtaaacagagtgtttgacaaactgtctcctctgcatgagcacatttattgcgcattgtccggttctgccgcagacgctcaggcagtagcagatatggcagcctatcagttagaactgcatggcatcgagttggaagagcctcccttggtgcttgccgctgctaatgtggttaggaacatttcatataaatatcgagaagacctgagtgctcatctcatggtcgccggatgggaccaaagagaggggggtcaggtttacggaacgctgggcggaatgcttactagacagccatttgcgattggaggaagcggctctactttcatctag

SEQ ID NO: 236570 - DNA, 591 bp, synthetic construct
  misc_feature 1..591: note = Description of Artificial Sequence: Synthetic coding sequence
  source 1..591: mol_type = other DNA
atggcagtcgagttcgacggcggagtcgtgatgggctccgacagccgggttagcgctggagaagctgtggtcaatagggtgtttgataagctgagcccccttcacgaaaggatatattgcgctttgagcgggagtgccgctgacgctcaggccgttgccgacatggctgcatatcagcttgagctgcatggcatcgaactggaggaaccgccactggtgctggccgctgccaatgtcgtcagaaatattagttacaagtaccgcgaggacctctcagcacatctaatggtcgctgggtgggaccagagagaaggtggtcaggtgtacggaacactgggcggtatgctgacaagacagccattcgcaatcggcggatccggatctacattcatctatggatatgttgacgcagcctacaaaccgggtatgtccccagaagagtgtcgcagatttaccaccgatgctatcgctctggcaatgtccagggatggaagttccggaggcgtcatatatctggtgaccattaccgcagcgggtgtagatcacagggtcatcctcgggaacgagttacctaagttttatgatgagtag

SEQ ID NO: 236571 - DNA, 660 bp, synthetic construct
  misc_feature 1..660: note = Description of Artificial Sequence: Synthetic coding sequence
  source 1..660: mol_type = other DNA
atgctccgcgcaggggctccaaccggtgatttaccacgcgctggggaggtccacactgggacgaccatcatggccgtcgaatttgacgggggtgtcgtgatgggttccgacagcagagtttccgccggagaggctgttgtgaatcgcgtttttgataaactctcacctcttcacgaacgcatctactgtgccctcagcggaagcgcggcagacgcacaagctgtggccgatatggccgcttatcaactggagctgcacggaattgagttggaagaaccgcctctagtccttgccgcagcaaacgtcgtgaggaatatcagttataagtaccgagaggacctgtcagcacacttaatggtcgctggctgggatcagagggagggcggtcaagtatatgggaccctcggcggtatgctcaccaggcagcccttcgccatcggaggctcggggtccactttcatctacggctacgtagacgcagcctacaagcccggaatgagtccagaggaatgtaggcgattcacaactgatgctatagccctcgcaatgtcccgggatggctcatcaggcggagtcatctacttggtgaccataacagccgcaggggtggatcacagggtgattctgggtaacgaactccctaagttctacgatgagtag

SEQ ID NO: 236572 - DNA, 591 bp, synthetic construct
  misc_feature 1..591: note = Description of Artificial Sequence: Synthetic coding sequence
  source 1..591: mol_type = other DNA
atggccgtggaattcgacggaggtgtggttatgggatcggactcacgggtaagcgccggagaagcagtcgtgaatcgagtgttcgataaactcagtccgcttcatgaacatatttactgcgcactgtccgggtccgctgccgacgctcaggccgtggcggacatggcggcatatcaactggaattgcacggcatcgagctggaggaaccgccactggtgttagccgctgccaatgtcgtaagaaatatatcttacaaatatcgggaggacctttctgcccacctgatggttgctgggtgggatcaaagagaggggggacaggtgtacggaactctgggcggaatgctcacaaggcagcccttcgctattggcggaagcggaagcaccttcatttacggttacgtggacgcagcctataaaccagggatgtcgccggaagaatgcaggaggttcaccacagacgccatcgctctggctatgagccgagatggaagtagcggcggtgtaatctacctggtaaccataaccgccgctggcgtcgatcacagagtcatcctgggcaatgagctacctaaattttacgatgagtag

SEQ ID NO: 236573 - DNA, 537 bp, synthetic construct
  misc_feature 1..537: note = Description of Artificial Sequence: Synthetic coding sequence
  source 1..537: mol_type = other DNA
atgttgagagcgggtgctccgaccggagatcttccaagggctggtgaagttcataccggtacaactattatggcagtcgaatttgatgggggagtggtgatgggatcagatagccgggttagcgccggtattgagcttgaagagccccctctggtgttagcggctgccaatgtggtgcgcaacattagctacaagtacagggaagacctgtcagcccatctgatggtggctgggtgggatcaacgcgagggagggcaggtttatggaaccttgggcggaatgcttacccggcaacccttcgctatcggaggttcaggttctacattcatctacggttacgtggacgccgcatacaaacctgggatgagccccgaagaatgtagaaggttcactaccgacgcaacctctaccaaaaggagggtctgtggatatttcctgagaacccagaaacgagagaatcagaatcagcgcgtgcacgagtatatgtgtacatcggaaaggtctttgtcctcatcacctttactaagctgctcctag

SEQ ID NO: 236574 - DNA, 537 bp, synthetic construct
  misc_feature 1..537: note = Description of Artificial Sequence: Synthetic coding sequence
  source 1..537: mol_type = other DNA
atgttaagggcaggtgcccctacaggggatctccctagggcgggagaggtacacaccggaaccaccatcatggcagtcgaattcgacgggggagtggtgatggggtcagattcccgggtctcagccggtatcgagcttgaagagccccctttggtcttggctgccgctaacgtggtcagaaatatcagctacaaataccgcgaggacctcagtgcccatctcatggtcgccggatgggaccagagagaaggaggtcaggtatacgggaccctcggtgggatgctgacacggcagccgttcgcaatcgggggtagcggctccacatttatctatggatacgtggatgctgcttacaagcctgggatgtcacctgaggagtgtcggagattcacgacagacgctacaagcaccaaacgaagggtgtgtgggtactttttgcgaacccagaaacgtgagaatcaaaatcagcgcgtccatgagtatatgtgtacaagcgagaggtctttgagtagtagtcctttgctcagctgttcttag

SEQ ID NO: 236575 - DNA, 660 bp, synthetic construct
  misc_feature 1..660: note = Description of Artificial Sequence: Synthetic coding sequence
  source 1..660: mol_type = other DNA
atgctgcgcgcaggcgctcccactggagacctccccagagccggtgaggtgcatacaggcactacaattatggctgtggagtttgatgggggagttgtgatgggatccgactcaagagtgagcgctggcgaagccgtggtgaatagagtatttgataagctgtctccccttcatgagcacatctattgcgccctatctggttcagcagctgacgcccaggccgtggctgatatggccgcataccagctcgagctccacggcatcgaacttgaggagccgccactggtgctggctgctgctaacgtggtgcgcaacatcagttacaagtatcgcgaggacctgagcgctcatttaatggtcgccggatgggatcaacgcgagggcggtcaggtgtatggaacactaggaggcatgctcactcgccagcctttcgcgatcggaggtagtgggtcaactttcatctacgggtacgttgacgctgcttacaaacccggaatgtctcctgaggaatgcagacgatttaccaccgatgccatcgcccttgccatgagccgcgacggctcatccggaggggtgatttacttagttaccattactgctgccggagttgatcatcgcgtcattttgggcaatgagttgcccaaattttacgacgaatag

SEQ ID NO: 236576 - DNA, 591 bp, synthetic construct
  misc_feature 1..591: note = Description of Artificial Sequence: Synthetic coding sequence
  source 1..591: mol_type = other DNA
atggcggtagagttcgatggaggcgtcgtcatgggatctgatagcagagtgagcgcgggagaggccgttgtgaaccgcgtgttcgataaattgtcacctctgcacgagcacatctattgtgcgctgtccgggagcgcagcagatgctcaagccgttgccgacatggccgcataccagttagagctgcatggaattgagcttgaggagccacccttggttctagctgctgccaacgtggtgagaaacatcagttataaatatcgggaggatttatctgcgcacctgatggtggccggttgggaccagagagaagggggacaggtgtacggcacactcggcggtatgttgacccggcagcccttcgctattgggggaagtggatctacattcatatatggttatgtggacgctgcctacaagccaggtatgagcccagaggaatgcagacgatttacaaccgacgccatcgccctcgcaatgtctagagacggatcaagcggcggtgttatttatctggtgactattaccgcggcaggagtggaccatagggttatcctcggaaacgagctgccgaagttttatgatgaatag

SEQ ID NO: 236577 - DNA, 660 bp, synthetic construct
  misc_feature 1..660: note = Description of Artificial Sequence: Synthetic coding sequence
  source 1..660: mol_type = other DNA
atgttacgcgcaggggcacctaccggtgacctcccacgcgcaggagaggtgcataccggaacaacaattatggccgtggaatttgacggcggagtggtaatgggatccgactcccgcgtatccgccggagaagccgtcgtcaaccgagtcttcgataagctcagccccctacatgagcacatctactgtgctctgtccgggtccgccgctgacgcccaggctgtagccgacatggccgcttatcaacttgagctgcacggcatcgaactggaggaacctccactggtcttggcagccgctaatgttgtccggaacatcagctacaaatatagagaagatctgagcgcccacctgatggtggctggttgggatcaacgggagggcggacaggtttatggcacactagggggtatgctgacccgtcagccctttgctatcggaggcagtggaagtactttcatctacggctatgtcgatgctgcctacaaacctggcatgagtcctgaggagtgcaggcgtttcactaccgatgctattgccctggccatgtctagagatggttcctccggcggagttatatatttagtaaccataacggccgctggcgtggaccaccgcgtaattctgggaaacgagctccctaagttttatgatgaatag

SEQ ID NO: 236578 - DNA, 396 bp, synthetic construct
  misc_feature 1..396: note = Description of Artificial Sequence: Synthetic coding sequence
  source 1..396: mol_type = other DNA
atggccgttgaatttgacggtggtgtggtgatgggaagcgacagccgcgtcagcgctggggaggccgtagtgaaccgggtgttcgataaactatctccactccatgaacgaatttactgtgccctatcgggcagcgctgcagatgcccaggctgtggctgatatggcagcttatcagctggagctccacggaattgagctggaggagccacctctggtattagccgctgccaacgttgtgcgtaacattagctacaaatatagagaggacttatccgcccacctcatggtcgcgggatgggaccagcgtgagggtgggcaagtttatgggacactcggaggaatgctgacgagacagccctttgcaattggcggatccggttctacatttatctag

SEQ ID NO: 236579 - DNA, 396 bp, synthetic construct
  misc_feature 1..396: note = Description of Artificial Sequence: Synthetic coding sequence
  source 1..396: mol_type = other DNA
atggctgtagaattcgacgggggtgtagtgatggggagcgattctcgggtcagtgctggcgaggcggtggtcaaccgcgtctttgacaagttgagtcctctgcacgagcatatctattgtgctctctctgggagcgccgctgacgcacaggctgtggccgacatggccgcttatcagctcgaactgcatggcatcgagcttgaggagccaccactagtgttggcagcagccaacgtggtgcggaatatctcatacaagtatagggaggacctgtcagcacatctgatggtcgctggctgggatcagagggaaggcggacaggtttatggcacgcttggcggtatgctaactcgccaaccatttgccatcggaggctcaggatctacattcatctag

SEQ ID NO: 236580 - DNA, 591 bp, synthetic construct
  misc_feature 1..591: note = Description of Artificial Sequence: Synthetic coding sequence
  source 1..591: mol_type = other DNA
atggccgtggagttcgacgggggtgtagtgatgggcagtgactcccgggtgagcgccggtgaagcggtcgtgaacagagtgttcgacaagctatcgccgctgcatgagcatatttactgcgcgctgtccggctcagccgcagatgctcaagctgttgctgacatggccgcataccagcttgaactgcatgggattgagctggaggagcccccactggtactagccgctgcaaacgtggttagaaacatttcctataaatatagggaggatttatcagctcatctgatggttgccggatgggatcagcgcgaaggcggacaagtatacgggacgttagggggaatgttaaccagacagccatttgctatcggcggtagcggcagtacctttatctacggctatgtagacgcagcttataagccaggaatgagtcctgaggaatgcaggcgctttacaaccgacgccatcgctctagctatgtcacgggacggcagctccgggggtgtaatttacctggtcactataacagccgctggagtcgaccatagggttatcttgggaaatgaactacccaagttctatgacgagtag

SEQ ID NO: 236581 - DNA, 660 bp, synthetic construct
  misc_feature 1..660: note = Description of Artificial Sequence: Synthetic coding sequence
  source 1..660: mol_type = other DNA
atgctccgggcaggtgcccctacaggagacctgccacgcgcaggcgaagtgcatacaggcacaacaatcatggccgtcgagttcgacggcggagtggtcatgggctcggattctcgggtgagcgcgggagaggccgtagtcaatagagtgtttgataagctgtctccgctacatgagagaatctactgtgcactgtctggctcagccgcagacgcacaggcagtggctgacatggcagcctatcagcttgagttacacggcattgaactggaggaacctccacttgtcttagccgctgccaatgtggtccgcaatataagttacaaatatcgcgaggatctcagcgcccacctcatggtggccggatgggatcagcgggagggtggccaggtttatggaacactgggagggatgttaacgcgccagccttttgctatcgggggatctggctccaccttcatatatggatatgtggacgccgcatataagcctgggatgagtcccgaggagtgccggaggtttaccacagatgcaattgcgctcgctatgagcagagacggatcctccggaggtgtgatttacctggtcactattacagccgctggagtggatcatagagtcatccttggaaatgaactgcctaagttctacgatgaatag

SEQ ID NO: 236582 - DNA, 537 bp, synthetic construct
  misc_feature 1..537: note = Description of Artificial Sequence: Synthetic coding sequence
  source 1..537: mol_type = other DNA
atgctcagggctggggcacccaccggcgacctccctcgggcaggagaggttcacaccggcactaccattatggctgtcgagttcgatggcggtgtggtcatgggaagtgatagtagagtatccgccggtatcgagcttgaggagcctcccctggtgctagctgccgctaatgtggtccgtaacatttcctataagtacagagaagacctcagcgcccaccttatggtcgccggttgggatcaaagggaggggggtcaggtctacggcacactagggggaatgttgacaagacagccattcgctatcggaggctctggctccactttcatctatggctatgtggacgccgcatataaaccgggaatgtcccctgaagaatgcaggcggtttaccacggatgcaaccagtacaaaacggcgagtctgcggctacttcctgcgcactcagaagcgggagaaccagaatcagcgcgtgcatgaatacatgtgcaccggcgaacgatctctgtccagttctccattgctgagctgctcttag

SEQ ID NO: 236583 - DNA, 537 bp, synthetic construct
  misc_feature 1..537: note = Description of Artificial Sequence: Synthetic coding sequence
  source 1..537: mol_type = other DNA
atgttgagagcaggtgcacctacaggtgatctgcccagggctggagaggtacacactggtacaacaattatggccgtcgagtttgacggaggcgtggttatgggatcagactcaagagtgtcagcaggcatcgagctggaagaacccccactcgtgctggcagctgctaacgtggtacggaacatttcttataaatacagagaggatctaagcgctcacctgatggtagctggatgggatcagcgtgaaggaggtcaggtgtatggaaccctagggggtatgctgactcgtcagccgttcgctatcggcggatcagggtccacctttatttatggctacgtggatgccgcatataaacctggcatgtctcccgaggagtgtcgacggtttacaacggacgcgacaagtaccaagcggcgtgtttgcggctattttcttagaacccagaagcgggaaaatcagaatcagagagtccatgaatacatgtgcaccggggagcgatccttgagttcaagccccttgctgagttgctcttag

SEQ ID NO: 236584 - DNA, 591 bp, synthetic construct
  misc_feature 1..591: note = Description of Artificial Sequence: Synthetic coding sequence
  source 1..591: mol_type = other DNA
atggccgttgagttcgatggcggagtcgtgatgggctcggactcaagggtgtccgctggggaggccgtcgtgaatcgggtgttcgataaattgtccccgttacatgaaaggatctattgtgccctgtctggctccgccgctgatgcacaggcggttgccgatatggcggcttatcagctggaattacatggcattgaactagaggagccaccacttgtgcttgcagcggcaaacgttgtgcgtaatattagttacaaatacagagaggatctatctgcccacctgatggtcgccggatgggatcagagggagggcggacaagtttacggaaccctgggcggaatgctgaccaggcagcccttcgccatcggcggatcaggatcaacctttatctacggttacgtcgatgccgcttacaaacccggaatgtcaccagaggaatgtcgtagattcacaacagacgccatcgccctcgccatgagccgggacggcagttctggaggtgtcatttatctggtgaccatcactgcagctggagtcgatcacagggtcatcctgggaaacgagctcccaaaattttacgacgagtag

SEQ ID NO: 236585 - DNA, 660 bp, synthetic construct
  misc_feature 1..660: note = Description of Artificial Sequence: Synthetic coding sequence
  source 1..660: mol_type = other DNA
atgctgcgcgctggtgccccaaccggcgaccttcccagagctggcgaggtacacaccgggaccacaattatggccgttgaattcgacgggggtgtggtcatgggcagtgacagcagggtatctgccggagaagcagtggtaaatcgcgtgtttgacaagctgtccccactacacgaacacatatattgcgcccttagtggtagtgcggcagatgcacaggcagtggccgatatggctgcataccaactagagctgcatggtatcgaattggaagaaccccctctggttctcgctgcagcaaacgtggtgcgcaatatctcgtacaaatatcgcgaagatttatccgcccacctcatggtcgccggatgggaccagagggagggagggcaggtgtatggcacactaggtggcatgctgactaggcagccattcgctatcggtggatcgggtagtactttcatctacggttacgtggatgccgcttacaaacccggaatgagcccagaggagtgtcgaaggtttactaccgatgccatagccctggctatgtcccgggatgggtcctcaggcggagtcatctaccttgtaaccatcacggccgcaggcgtggaccatcgtgtgatcctgggcaatgaactgcctaagttttatgacgaatag

SEQ ID NO: 236586 - DNA, 465 bp, synthetic construct
  misc_feature 1..465: note = Description of Artificial Sequence: Synthetic coding sequence
  source 1..465: mol_type = other DNA
atgcttagagccggtgctccgacaggggatctgcctagggctggagaggtacacactggaaccactattatggcggtcgagtttgatggtggtgtggtgatgggatccgactctcgtgtgagcgcgggtatcgagctggaggagccaccgcttgtcctggcagcagctaatgtggtgcgtaacatttcctacaagtatagggaggacctgtctgctcatctcatggtcgccggatgggaccagcgagagggtggtcaggtgtacggtactctgggcggaatgctgactaggcaaccattcgccatcgggggtagtggctcaacctttatctacgggtacgtcgatgcggcttataaaccgggtatgagtcctgaagaatgcaggcgattcactaccgacggaaaccagccgagtggacgagtccctggcgaaggttttgaaacgtgggaggggtcccggctgtag

SEQ ID NO: 236587 - DNA, 396 bp, synthetic construct
  misc_feature 1..396: note = Description of Artificial Sequence: Synthetic coding sequence
  source 1..396: mol_type = other DNA
atggccgtggagtttgacggcggtgtggtgatgggatcggattctcgcgtgagcgctggcgaggcggtggtcaaccgggtgtttgataagctgagtcctctccatgagcatatatattgcgctttgagcggttctgctgcggacgctcaggctgtggctgacatggcagcgtaccagctggagctgcatgggattgagctggaggaacctcctcttgtgctggcggctgcaaatgtcgtaaggaacatctcatataaatatcgggaagatttgtcagcacatctgatggtagccggatgggatcagcgggaagggggtcaggtgtacggcaccctaggagggatgttgacaaggcaaccatttgcaattggaggttccggaagtacctttatttag

SEQ ID NO: 236588 - DNA, 465 bp, synthetic construct
  misc_feature 1..465: note = Description of Artificial Sequence: Synthetic coding sequence
  source 1..465: mol_type = other DNA
atgctgagggctggggcaccaactggagacctgccccgtgccggtgaagtccataccggcacaacaattatggctgtggaatttgatgggggtgtggtaatgggctctgactctcgggtgtccgcaggcatcgagctggaagagcccccactcgtgctggcagccgcaaacgtcgtgagaaacatttcctacaagtaccgcgaagatctgtctgcccacttaatggtagcaggctgggaccagagagagggcggacaggtgtacggtaccctgggcggtatgctcaccaggcagccttttgccattggtggcagtggatctacctttatttacggatatgtggatgctgcttacaaaccagggatgagtcctgaagaatgcagaagattcaccactgatgggaatcagccaagcggcagagtgccaggcgaagggttcgagacttgggagggctcccggctgtag

SEQ ID NO: 236589 - DNA, 465 bp, synthetic construct
  misc_feature 1..465: note = Description of Artificial Sequence: Synthetic coding sequence
  source 1..465: mol_type = other DNA
atgctgcgggctggtgcacctacgggagacctgcctagggccggagaagtccataccggtacaactataatggctgtcgagtttgatggcggagtggtgatgggctctgattccagggttagcgcgggaattgagcttgaggaaccccctctcgtcttagcggctgctaacgtcgtgaggaatatttcttataaataccgggaggatctgtctgcccacctcatggttgccggatgggaccaaagggaaggaggacaagtgtacggtacccttggtggcatgttaacacgtcagccattcgccattggagggtctggttctactttcatctacggctacgttgatgctgcatataaacctggtatgagccccgaggaatgcaggcgattcacaacggacggaaaccagccctctggcagagttcctggagagggctttgaaacgtgggagggctcccgattgtag

SEQ ID NO: 236590 - DNA, 465 bp, synthetic construct
  misc_feature 1..465: note = Description of Artificial Sequence: Synthetic coding sequence
  source 1..465: mol_type = other DNA
atgcttcgcgcaggagcaccaacgggagatcttcctagggccggtgaggtccacacaggtaccactatcatggctgtcgagtttgacggcggagtagtaatggggagcgattccagggtaagtgccggaatagagctggaagaaccaccactcgttctggcggcagccaatgttgttaggaatatttcatataagtaccgggaggatctgtctgcccacttgatggtggcaggctgggaccagcgggagggaggtcaagtgtatggcaccttaggtggtatgctgacccggcaaccctttgccatagggggttccggcagcactttcatttacgggtacgttgatgctgcttataagccgggaatgagccctgaggagtgtcgccgattcaccacagatggcaaccaaccctcaggcagggtgccaggtgaggggttcgaaacctgggagggatctagactgtag

SEQ ID NO: 236591 - DNA, 465 bp, synthetic construct
  misc_feature 1..465: note = Description of Artificial Sequence: Synthetic coding sequence
  source 1..465: mol_type = other DNA
atgctgagagccggtgcaccaaccggcgatctcccacgggctggtgaagtgcacacgggcactacaatcatggctgtggaatttgatgggggagtcgtgatggggtcagatagccgggtaagtgcgggaatagagctcgaggaacctccactcgtcctggccgctgcaaacgttgtgcgcaatatttcatacaagtatagagaggacctctctgctcaccttatggtggcaggatgggaccagcgggaagggggacaggtctacggcacgcttggtggaatgctgacacggcaaccatttgccattggcggaagcgggagtacatttatatatgggtacgtggacgccgcttacaaacccggaatgtcccccgaggaatgccgaaggtttacaacagatggtaatcagcctagtggacgggtgcctggcgaaggttttgagacctgggagggctctcggctttag

SEQ ID NO: 236592 - DNA, 465 bp, synthetic construct
  misc_feature 1..465: note = Description of Artificial Sequence: Synthetic coding sequence
  source 1..465: mol_type = other DNA
atgcttcgggcaggcgctcctacaggtgatctccctcgcgcaggcgaggtccacaccggtaccacgattatggccgtggagttcgatgggggagtcgtgatgggctccgactcaagagtcagtgccggaatcgagctggaagagcctcccctggtgctggccgctgcaaatgtagtgcgaaatatcagctataaataccgcgaggacctgagtgcacatctcatggtggccggttgggaccagcgcgaaggaggccaggtttacggcacacttgggggtatgcttacgcgtcagccgttcgcaattgggggtagtggatcgacgttcatctacgggtatgtggatgcggcatataaacccggaatgtctccagaagaatgcagacggttcaccacagacggtaatcagcccagcggacgcgtccctggtgaagggttcgagacttgggagggctcaaggctgtag

SEQ ID NO: 236593 - DNA, 465 bp, synthetic construct
  misc_feature 1..465: note = Description of Artificial Sequence: Synthetic coding sequence
  source 1..465: mol_type = other DNA
atgctgcgggctggagctcctaccggcgacttaccaagagctggagaagtgcacactggaaccactatcatggcagtcgagttcgatgggggtgtggtgatgggatcagatagcagagtgagcgccggaatcgaattggaggagccccctttggtgctggccgcagccaatgtggtgcgcaatattagctacaagtaccgagaagatctcagtgctcacctgatggtagcgggttgggatcagagggagggcggacaggtgtacgggactctgggtggcatgctgactcgccagccattcgccatcggtggttctggatctacattcatttacggttatgtagacgcggcatataaaccaggtatgagccctgaggagtgtcgcaggttcaccaccgacggcaaccaaccgtccggaagagtgccaggggagggttttgagacatgggaaggatcccggttgtag

SEQ ID NO: 236594 - DNA, 465 bp, synthetic construct
  misc_feature 1..465: note = Description of Artificial Sequence: Synthetic coding sequence
  source 1..465: mol_type = other DNA
atgttacgggctggcgcaccaaccggagatctacccagagctggcgaggtgcacacaggtacaactatcatggcagtcgaattcgatggaggtgtggtgatggggagcgattcccgcgtcagcgccggtattgaactggaggaacctcctctcgtcctggcagcggctaacgtggtacggaacataagctacaaataccgcgaggacctgagcgcacatctgatggtggccggatgggatcagcgggagggtggccaggtgtatggaacccttgggggaatgttaacacggcaacccttcgcaatcggcggaagtggcagcacgttcatttacgggtacgttgacgcagcatacaagcctggaatgtcaccagaggaatgtcggaggtttaccacagacggaaaccagcctagtggtcgagtgcctggcgaaggctttgagacgtgggagggttcacgcctatag

SEQ ID NO: 236595 - DNA, 426 bp, synthetic construct
  misc_feature 1..426: note = Description of Artificial Sequence: Synthetic coding sequence
  source 1..426: mol_type = other DNA
atgaatgcccgtgggttgggctctgagctgaaggactccatcccggtaactgagttgagcgcctctggccctttcgagtcacacgatttgcttagaaagggattctcctgtgtgaagaacgaacttctcccatcacacccattggagctctctgagaaaaactttcagctgaaccaagacaaaatgaactttagtacactacgcaacattcaagggttgtttgccccacttaagcttcagatggaattcaaggcagtacagcaggttcagaggttaccctttctgtcctcctctaatctgagcctggatgtcctccggggaaacgacgaaactatcggatttgaagacatcctaaacgatccaagtcagagcgaggttatgggcgaaccacaccttatggtcgagtacaaactcggactactgtag

SEQ ID NO: 236596 - DNA, 471 bp, synthetic construct
  misc_feature 1..471: note = Description of Artificial Sequence: Synthetic coding sequence
  source 1..471: mol_type = other DNA
atgccaatggccggactcttgaagggactggtcaggcagcttgaacggttttccgttcagcaacaagcttctaagatgccccctaagggcaaatcaggctccggtaaggcaggcaagggtggagcagccagcggatccgacagcgccgacaaaaaagctcagggccctaagggcggaggtaatgccgtaaaggtgaggcacattctctgcgagaaacacggcaagatcatggaagcaatggagaaacttaaaagcggcatgcgatttaacgaggtagccgcacagtattctgaggacaaggcaagacagggcggagatctgggatggatgacgcggggatccatggtgggcccatttcaggaggcagctttcgctttaccagtcagtgggatggacaagccagtgtttaccgaccctcctgttaagactaagttcggttaccacataataatggtggaaggacgtaagtag

SEQ ID NO: 236597 - DNA, 402 bp, synthetic construct
  misc_feature 1..402: note = Description of Artificial Sequence: Synthetic coding sequence
  source 1..402: mol_type = other DNA
atgccaatggccggtttgctgaaaggcttagtgaggcaactcgagaggttttcagttcagcaacaagccagtaaaatgcctccaaaaggaaaaagcggcagcgggaaagccggaaagggaggcgctgcctctggatccgactccgctgacaaaaaggcgcagggcccaaaaggcggtggcaatgctgtgaaagtcagacacatcctgtgcgaaaagcacggaaagattatggaggctatggagaaactgaagtctggcatgcggttcaatgaggtggctgcacagtactccgaggataaagcacgacagggcattcctagtctgcagcagcacgccggacatcatagagatctgagaagtactctaatctcgctggtgagctacttgcagaccaccccctag

SEQ ID NO: 236598 - DNA, 1062 bp, synthetic construct
  misc_feature 1..1062: note = Description of Artificial Sequence: Synthetic coding sequence
  source 1..1062: mol_type = other DNA
atggcggctgccgaagctgcgaactgcattatggaggtgtcctgtggccaggctgagagctcagaaaaaccaaacgcagaggacatgacttcgaaggactattactttgacagctatgcccacttcgggatccacgaagagatgctgaaagacgaggtgagaacactgacctaccgtaacagtatgtttcataacaggcacctctttaaagacaaggtggtcctcgacgtcgggagtgggacaggtatattatgtatgttcgccgcaaaggcgggtgccaggaaggtcatcggcatcgaatgcagctcgatcagtgattacgccgtcaaaatcgtcaaggccaataagctagatcacgtcgtgaccataattaagggtaaggtcgaagaggtggagcttccagttgaaaaggtcgacataattatctcggagtggatgggctactgtttgttctacgagtcgatgctgaacactgtgctctatgctcgagacaaatggttggcccctgatggcctgatcttccctgaccgcgctacgctgtatgtgaccgctatagaggacagacagtataaagactacaagatccactggtgggagaatgtttacgggtttgatatgtcatgcattaaggacgtggccattaaggagccactggtggatgtcgtcgatcccaaacagttagtcacaaatgcttgcttgattaaagaggtcgacatatataccgtgaaagtggaagacctcaccttcactagtccattctgcctccaggtgaaaagaaacgattacgttcacgccctggttgcttacttcaacatcgagttcactcggtgccacaagcggaccggattcagcacctcccctgaaagtccttacacccattggaagcagacggtgttctacatggaggattacctgaccgtaaaaacaggtgaggagatatttggaaccatagggatgaggcccaacgccaaaaacaatcgggacctggacttcaccattgacctggactttaagggacaattgtgcgagctgtcctgctctacagattaccgtatgaggtag

SEQ ID NO: 236599 - DNA, 882 bp, synthetic construct
  misc_feature 1..882: note = Description of Artificial Sequence: Synthetic coding sequence
  source 1..882: mol_type = other DNA
atggttggcgttgctgaggtttcctgcgggcaggccgagtccagcgaaaaaccaaacgccgaggatatgacatctaaagattattattttgacagctacgcacactttgggattcacgaggaaatgctaaaagatgaagtacgaacgctgacctaccgaaattccatgttccataatagacatctattcaaggacaaagttgtcctggatgtcggctcaggaactgggatcctgtgcatgtttgcagcaaaagctggcgctaggaaggttatcggaattgaatgctcctcgataagtgattacgctgtgaagatagtgaaggccaataaactggaccacgtggtgaccatcattaaagggaaggtagaggaggtggagttacccgtcgaaaaggtagatattattatcagtgagtggatggggtattgcttattctacgaatccatgttgaataccgtcctgtacgcaagggataaatggctggctcctgatgggctgattttccccgaccgggcaaccctttacgttactgcgattgaggacagacagtataaagactacaaaattcactggtgggaaaacgtctacgggttcgacatgtcttgtatcaaagacgtggccattaaggagccactggtggacgttgtcgatccaaagcaattagtgaccaacgcttgtctgatcaaggtcagggggtgggcatggccaggcgctccttgggtcgaaacaaaggagcgtccctcccccggtccaggcatgggcttgtgggggccagaatgctggcctgaggtctcggagccagacttacccgcaaggggaggcgctagagggcctggcaaaacccttcgtcccctgaacatattcgtgagcgcagctgtgtag

SEQ ID NO: 236600 - DNA, 1116 bp, synthetic construct
  misc_feature 1..1116: note = Description of Artificial Sequence: Synthetic coding sequence
  source 1..1116: mol_type = other DNA
atggctgcagcagaggccgctaactgtataatggaaaacttcgtcgctaccctcgccaatggcatgtccctgcagcccccactcgaagaagtcagctgcggtcaagcagagagttccgagaaaccaaatgccgaagacatgacgtcaaaggactactatttcgatagctacgcccactttggcatccatgaggaaatgctgaaagacgaagtaaggaccttgacatatagaaacagcatgttccacaaccgccacctttttaaagacaaggtggtgttggacgtggggagtggcactggcatcttgtgtatgtttgcagccaaagccggtgccaggaaggttattggcatcgagtgctcaagcatctcagactatgctgtgaaaattgttaaggccaacaagctggaccatgtggtgactatcataaaggggaaagtggaggaagtcgagctccccgtagagaaagtggacattattatctccgaatggatgggctactgcctgttttatgagagcatgctcaatacagttctctatgccagagataagtggcttgcacccgatgggctgatctttccagatcgggcaactctgtacgtgactgccattgaagaccggcagtacaaagactataagattcattggtgggaaaatgtctatggcttcgatatgtcatgcattaaagacgtggccattaaagaacccttggtggatgtggttgatcccaagcagctcgtgaccaacgcctgcctcataaaggaggttgatatctatacagtgaaagtggaagacctcacatttacctcccccttctgtttacaagtcaagcgtaatgactatgttcacgccttagttgcttacttcaatatcgaatttacaaggtgccataagagaaccggcttcagcacatcacccgaaagcccatacacccactggaaacagaccgtcttttatatggaggattatctgacagtcaaaaccggggaggaaatctttggcacaatcggcatgcgccctaatgctaagaataacagagatctcgatttcaccatcgatctcgacttcaagggtcagttgtgtgaattatcatgctcaacagactacagaatgaggtag

SEQ ID NO: 236601 - DNA, 483 bp, synthetic construct
  misc_feature 1..483: note = Description of Artificial Sequence: Synthetic coding sequence
  source 1..483: mol_type = other DNA
atgacaagcaaagattactactttgacagttatgcgcacttcgggattcacgaagagatgctaaaagatgaggtgcggaccctgacgtaccggaactcaatgttccacaatagacatctcttcaaggataaagtcgttttggatgtgggatcgggcactggaatcctgtgtatgttcgctgcaaaagccggagccaggaaggtgattggcatcgagtgcagcagtattagcgactacgctgttaaaatagttaaggctaataagttagaccatgttgttactatcatcaaaggcaaagtggaagaagtcgaattgcctgtcgagaaggtggatatcatcatttctgaatggatgggttattgccttttttacgagagcatgctaaatacagtactttatgccagagataaatggcttgctcctgatggcttgatctttcctgatagggccaccctgtatgttacggccattgaggatcgctag

SEQ ID NO: 236602 - DNA, 618 bp, synthetic construct
  misc_feature 1..618: note = Description of Artificial Sequence: Synthetic coding sequence
  source 1..618: mol_type = other DNA
atgaccagcaaagattattatttcgatagttatgctcacttcggcatccacgaggaaatgctaaaagacgaggtgaggaccctcacgtacaggaactcaatgttccacaacagacatctgtttaaagataaagtcgtcctcgacgtcgggtccgggacgggtatcctgtgtatgttcgcggcaaaggcaggtgcgcgtaaagtcatcggtattgagtgcagttcaataagcgactatgctgttaagatcgtgaaggccaataagctcgatcatgtggtgactattattaaaggtaaggtcgaggaagtggagctgcccgtggagaaggtggatatcattatttctgagtggatgggatactgtttgttttatgaatcaatgctgaatacagtcctctatgcgagggataagtggctagcccctgacggattgatattccctgatcgggctactctctacgtcaccgctatcgaagaccggcagtacaaggactataaaattcactggtgggagaacgtgtacggatttgatatgtcttgcattaaagatgtcgcaatcaaagaaccgttggtcgatgtggtcgatccaaaacagctcgtcacaaatgcctgcctgtag

SEQ ID NO: 236603 - DNA, 483 bp, synthetic construct
  misc_feature 1..483: note = Description of Artificial Sequence: Synthetic coding sequence
  source 1..483: mol_type = other DNA
atgaccagcaaagattattacttcgacagctatgcacactttggaattcatgaggaaatgttgaaggacgaggtgaggacccttacttaccgcaactcaatgttccacaataggcacctttttaaggataaggttgtcctcgacgtcggcagcggcaccggcatactttgcatgttcgctgccaaagctggggctcgcaaagtcataggcatcgagtgcagcagcatctctgattacgcggttaaaatcgtgaaagccaataagctggatcacgtggtgacaattataaagggaaaggtggaggaggtcgagttgcctgtagagaaggttgatattattatcagcgagtggatggggtactgcctgttctacgagagcatgttaaacacggtgctttatgcgagggataaatggctggcaccagatggactgatctttcctgacagagctactctctatgtgacagcaattgaagatcgctag

SEQ ID NO: 236604 - DNA, 630 bp, synthetic construct
  misc_feature 1..630: note = Description of Artificial Sequence: Synthetic coding sequence
  source 1..630: mol_type = other DNA
atgacatccaaggactactatttcgactcatatgcccactttggcatacacgaggagatgttaaaagacgaagtgaggactctcacctacaggaactccatgtttcacaatagacacctttttaaagataaggtggtgctggacgttggatccggtactggaattttgtgcatgttcgccgctaaggccggagcaagaaaggtgattgggatagaatgctcctccatctccgactatgcagtgaagatcgtaaaagccaataagctcgaccatgttgttacaatcattaaggggaaggtggaagaggtcgagctaccagtcgagaaggttgatattatcatttctgaatggatggggtattgtctcttttacgaatccatgcttaacaccgtgctgtatgccagagataagtggctggccccagatggcctgatctttccggaccgggcaaccctgtacgttacagccattgaggaccgccagtataaggattataagattcattggtgggagaatgtctatggttttgatatgagctgcattaaggatgtggccataaaagaaccactggtggacgtggtcgacccgaagcagctggttaccaacgcctgcttgatcaaagttagatag

SEQ ID NO: 236605 - DNA, 687 bp, synthetic construct
  misc_feature 1..687: note = Description of Artificial Sequence: Synthetic coding sequence
  source 1..687: mol_type = other DNA
atggcaacttccggagactgcccacggagtgaaagtcagggggaagagccagcggagtgctccgaggcgggactcctccaggagggagttcaaccggaagagttcgtggcaattgctgattacgctgcaaccgacgaaacacagttgagctttttacgcggagagaagattctgatcctgcggcagacaacggcagactggtggtggggagagagggcagggtgctgcggctatattcccgcaaatcatgttggaaagcacgttgacgaatacgaccctgaggacacctggcaggacgaggagtattttgggtcttacggcaccctgaaactgcatctcgagatgttggcagatcaacccagaacaaccaaataccacagcgtgatattgcagaacaaggaatctctgacagacaaggtcattcttgacgtcgggtgcggaaccgggataatcagcctgttctgcgctcactatgcccgtccacgtgccgtgtacgccgtggaagcatccgaaatggcccagcatactgggcagcttgtgctgcagaatggcttcgctgacataatcacggtgtaccaacagaaggttgaagatgtggtgctgcccgagaaagtggatgtgttggtgtcagagtggatggggacctgcttgttggtgggagagaaagtgtttcccatatggaggtag

SEQ ID NO: 236606 - DNA, 855 bp, synthetic construct
  misc_feature 1..855: note = Description of Artificial Sequence: Synthetic coding sequence
  source 1..855: mol_type = other DNA
atggcaacctcaggcgactgcccccgaagcgagtcccagggcgaggaaccggctgagtgctcagaggccggactgctccaggaaggggtccagcctgaagaatttgttgctatagctgattacgcagccacagatgagactcagctgtcgtttctccgtggcgagaagatactgattttacgacagacaactgcggattggtggtggggagaaagagccggttgctgtggctacattccggcaaaccacgtgggtaagcatgttgatgagtatgacccagaagacacatggcaggatgaagagtattttggctcttatggcacgttgaaattacacctcgaaatgcttgcagaccagccacggaccacgaaataccatagcgtcatcttacaaaataaggagtctctgaccgacaaagtgattctggatgtggggtgcggaaccggcattatttccctcttctgtgcccactacgcacgcccacgcgctgtgtatgccgttgaggcaagtgaaatggcgcagcacactggccaactggttcttcagaatggctttgcagatataataactgtgtaccaacagaaggtcgaggacgttgtcttgcctgagaaggtggacgtccttgtctctgaatggatgggaacatgtctgctagcagcccctctcttgtcatgtaggattctcccgtgtacgtgcgcctctggccctctgcacgtgctgttagcctgctgtctgcccctgccctgcacatgcgcatctgtcccgctccacgtacttctggcctgctgccttcccgtactaagagccccacagcccagtgggctgcatctcagttggccaattttcctgctgtag

SEQ ID NO: 236607 - DNA, 1302 bp, synthetic construct
  misc_feature 1..1302: note = Description of Artificial Sequence: Synthetic coding sequence
  source 1..1302: mol_type = other DNA
atggccacaagcggtgattgcccccgttccgagtcccagggcgaagagcccgctgagtgctctgaggcaggtctactccaagagggggtgcagccagaggaattcgtggccattgccgactacgcagcaactgacgaaacccagctgagctttcttaggggcgagaaaattctcattctgcggcagacaaccgccgattggtggtggggagagcgggctggttgctgtggctacatcccggctaatcacgttggcaaacatgttgatgagtatgatccagaggatacttggcaggatgaagaatattttggtagctatgggactttgaagcttcatctcgaaatgttagccgaccagcctcggactaccaagtatcattcggtgatactgcaaaacaaggagtcactgaccgacaaggtgattttagatgtggggtgcggcaccgggataataagtctgttctgcgcacattacgccaggccaagggccgtgtacgctgttgaggcaagcgagatggcacaacacaccggccagctggtgctgcaaaatgggttcgccgatataattaccgtgtatcagcagaaggtcgaggacgtggtattgcctgaaaaagtagacgtgctcgtcagcgaatggatgggaacctgcttgctgttcgaattcatgattgagtcaatcctctacgccagggacgcgtggcttaaggaggacggagtcatatggccaaccatggccgctctgcatctggtgccttgcagcgcagataaggattatcgctcaaaggtcttgttctgggacaatgcctacgagttcaacttgtctgcactcaagagtctcgctgtgaaggagtttttcagcaagcctaagtataaccatattctgaagcccgaggactgtctgtctgaaccctgcactatcctgcagctcgacatgcggaccgttcagatatcagatctcgagaccctgcgaggggagctaaggttcgacatccgtaaggcagggaccctgcatggtttcacagcttggttctctgtgcatttccaaagccttcaggagggccagccccctcaagtgttaagcacgggaccatttcaccccactactcattggaagcagaccctctttatgatggatgaccctgtgccagtgcatacaggcgacgtggtcacgggctcagtggtcctacagcgcaaccccgtgtggaggcgccatatgtcggtcgccctgagttgggccgttacttcacgtcaggatcccactagccagaaggtgggcgaaaaagtgttccctatctggaggtag

SEQ ID NO: 236608 - DNA, 486 bp, synthetic construct
  misc_feature 1..486: note = Description of Artificial Sequence: Synthetic coding sequence
  source 1..486: mol_type = other DNA
atgttggccgaccagccgaggaccacgaaataccacagtgttattctgcaaaacaaggagtcgctccggattaaatcatcctggacctgggcagtcggactgggaagttctgtgtcttctgttcacaccatgcggggacttgaacgagtttacgcggtggaggcttccgagatggcccagcatactggacaactggttctgcagaatggattcgctgatatcattactgtgtatcagcagaaggtcgaagacgtggtgctgcccgagaaggtcgatgtattagtgtccgaatggatgggaacttgccttcttttcgaatttatgattgagagtattctgtatgcaagggacgcatggctgaaagaaacaggaagctttggccctccttggctgcgttgtactctctgtcccgctgtcttaataagaattattgtagcaagatgctccagcgggacaactcggacttcatctacatccgccctctag

SEQ ID NO: 236609 - DNA, 1302 bp, synthetic construct
  misc_feature 1..1302: note = Description of Artificial Sequence: Synthetic coding sequence
  source 1..1302: mol_type = other DNA
atggcaacctccggggactgccctcgctcggagagccagggtgaggagccagcagagtgttccgaagccggacttctacaagaaggcgtacagcccgaggagtttgtggccattgcagactatgctgcaaccgacgagacccaattaagcttcctacggggtgagaaaatcctcatcctacgccagacaacagctgactggtggtggggcgaaagagcaggatgctgcggctacattcctgccaatcacgtgggtaagcatgtggatgagtacgatcccgaggacacttggcaggatgaggagtatttcggatcctacggaacattgaagctccatttggagatgctggcagaccagccacggaccaccaagtaccactcggttatacttcaaaacaaagagtctttaaccgataaggtgattctggatgtcggctgtgggactggcataataagccttttttgcgcacattacgcacggccaagggcagtttacgcagttgaggcctccgaaatggcccagcacacaggccagctcgtgctccagaacggattcgccgacatcatcaccgtgtaccagcagaaggtagaggatgtcgtgctgccagagaaggtggacgtgctcgtgtccgagtggatgggtacatgcctgctatttgaatttatgatagaatccatcctttacgcaagggacgcctggttaaaagaggacggcgtgatctggcctacaatggcggctctgcacttagtgccctgttccgcggataaggattatcgcagcaaggtgctgttttgggataatgcctatgagttcaaccttagcgctctgaagtcactggcggtaaaggaattttttagtaagccaaagtataatcacatcctcaagcccgaggactgtttgtcagagccctgcactatattgcagctcgacatgaggacggtccagattagtgacctggagactctcaggggcgaactccgatttgacatccggaaggccggtaccttacatggattcactgcgtggttttctgttcacttccagtctttgcaagaggggcagccgcctcaggtgctgtccacaggcccatttcaccccacaacgcactggaaacagacccttttcatgatggatgaccctgtgcctgtgcacaccggagacgttgtgaccggtagtgtggtcctgcagaggaatccagtctggaggcgccacatgtccgtggctctttcctgggccgtaactagcaggcaggacccaactagtcagaaagtcggggaaaaagtattccccatctggaggtag

SEQ ID NO: 236610 - DNA, 1302 bp, synthetic construct
  misc_feature 1..1302: note = Description of Artificial Sequence: Synthetic coding sequence
  source 1..1302: mol_type = other DNA
atggccaccagtggagactgcccccgttcagagtcccaaggtgaggaacctgctgaatgctctgaagctggactgctgcaggaaggggtacagcctgaggagttcgtggccattgcagattatgctgctacagacgaaacacagctgtctttcctgagaggagagaaaatcctcatcttaagacagactactgccgattggtggtggggcgaacgcgctggttgttgtggctatattccagcaaatcatgtgggaaaacatgttgacgaatatgacccagaggatacttggcaggatgaggagtattttggaagttacgggacactcaagcttcatcttgaaatgctggcggatcagcctcgtacaactaagtatcatagcgtaatcctgcagaacaaagagtcccttactgacaaagtgatacttgatgtcgggtgcgggactgggatcatttctctgttctgtgcacattacgcacggcctcgcgcagtttatgccgtggaggcttctgaaatggcccagcacactgggcagctggtcctccagaacggattcgcagatatcatcaccgtctatcagcagaaagtggaagatgtggttcttccagaaaaagtcgacgtccttgtaagcgaatggatggggacttgtctgctctttgagttcatgatcgaatcgattctatatgcaagagatgcgtggctaaaagaggacggcgtgatctggccaactatggccgcactgcatctggtgccttgctccgccgacaaagattataggtcaaaggtgcttttctgggataacgcctatgaattcaatcttagcgccctaaagagcctggctgtaaaggaatttttctccaagccgaagtacaatcacatcctgaagccagaagactgtctgtcagaaccctgcacgattctccaactcgatatgagaactgtccaaataagcgatcttgaaaccctccgcggtgagctccgctttgatatccgaaaagctggaaccctccacgggtttacggcctggtttagcgttcattttcagagcctgcaagagggacagccgccacaagttttgtctacgggcccatttcatccaaccacacactggaaacagactctcttcatgatggacgatcccgtgccagttcatacaggcgatgtagtgactgggagtgtcgtgctgcagcggaatcccgtgtggcggcgtcacatgtcagtcgctcttagctgggctgtcacctctcgtcaagacccgactagccagaaggttggtgaaaaagtttttccgatttggcgctag

SEQ ID NO: 236611 - DNA, 996 bp, synthetic construct
  misc_feature 1..996: note = Description of Artificial Sequence: Synthetic coding sequence
  source 1..996: mol_type = other DNA
atggccacaagtggagactgtcctaggtcagaatcccagggagaggagccagccgagtgctccgaggccggactgttgcaggagggcgttcagcctgaagagttcgtcgctattgccgactatgcagcaactgatgaaacacaactttctttcctgagaggggaaaagattctcattttaaggcagaccacggcagactggtggtggggcgaaagggccggatgttgcggctatattcctgcgaaccacgttggcaaacatgtggacgagtatgatcctgaggatacttggcaggacgaggaatactttggatcctacggaactctgaagctccatctcgaaatgctggctgatcagccacgaaccaccaaatatcattccgtaatcctgcagaacaaagagagtcttaccgacaaagtgatcctcgacgtgggatgtggtaccggcataatatcactgttctgcgcgcattatgctcggccaagagcggtctatgctgtggaagcaagcgaaatggcgcagcacactggtcagttggtgttgcagaacggctttgctgacattatcaccgtctaccaacagaaagtagaggacgttgtgctcccggaaaaggtggacgttcttgtctccgagtggatgggcacttgtttgttaactctgcggggtgaactcagattcgacatcaggaaggccggaactctccacggctttactgcctggttttctgtccattttcagagtctgcaggaaggccagccgcctcaagtcctgagcacagggccattccacccgacaacgcattggaaacagacactgtttatgatggacgacccggtcccagtgcacacaggcgacgtggtgactggtagtgtggttctacagcgaaatccagtctggaggagacacatgtctgtggctttgtcttgggcggttacctcacgccaggatcctacgagtcagaaagttggtgaaaaagtattccctatctggcggtag

SEQ ID NO: 236612 - DNA, 870 bp, synthetic construct
  misc_feature 1..870: note = Description of Artificial Sequence: Synthetic coding sequence
  source 1..870: mol_type = other DNA
atggcaacatctggcgactgtcctcgctccgaaagccagggggaggaacctgcagagtgttctgaggccggactgctgcaggaaggggtccagccagaggagtttgtagcgattgccgattatgccgcaaccgacgaaacacaactgagcttcttaagaggggagaagatcctgatactacgccagacaacagctgactggtggtggggtgaacgggcagggtgctgtggatacattccggcaaatcatgtagggaagcacgtcgatgagtacgatcctgaagatacgtggcaggacgaagagtactttgggtcctatggaacactgaaactgcacctcgagatgcttgcggatcagcctcggactacgaagtaccacagtgtcattttgcagaataaagagagcctgactgataaggtcatcctggacgtcggctgcggtaccgggattatctcgcttttctgtgcccattacgctcggcctagggccgtgtatgccgtggaagcaagcgaaatggcgcagcataccggccagctggttctgcagaatggtttcgcagacattatcaccgtgtaccagcagaaggtggaggatgtcgtcctgcccgaaaaggtggacgttttggtttctgagtggatgggcacctgtttgctgtttgaattcatgatcgaatctatattatacgccagagacgcttggctaaaagaagacggagtgatatggccaaccatggctgcgttgcacctggtaccctgttccgctgacaaagactacaggtctaaggtgttgttttgggacaatgcctacgaatttaatctgagtgcccttaagctggagaagaagagcagcccttctggggatgatagttag

SEQ ID NO: 236613 - DNA, 906 bp, synthetic construct
  misc_feature 1..906: note = Description of Artificial Sequence: Synthetic coding sequence
  source 1..906: mol_type = other DNA
atggccacctctggtgactgtcctcgttcggaatcccagggggaagagccagcagagtgctctgaagccggtctccttcaggagggcgtacagcccgaagaattcgtggccatcgccgactacgcggctacggatgagacccaactaagcttcctgcgcggagagaaaatcctgatactgcgccagaccactgcggattggtggtggggggagcgcgcagggtgctgcgggtacattcccgctaatcacgtggggaagcacgtcgacgagtacgatccggaagacacctggcaggatgaagaatactttggctcatatggtactttaaagctccatctggagatgttggccgaccagcccaggactacaaagtatcattccgttatcctccaaaacaaagaatcgctgaccgacaaggtgatccttgacgtcggttgtggaaccggaatcatttccctgttctgtgctcactacgctcggcctcgggcagtgtatgccgttgaggcaagcgagatggctcaacacactggacaactcgtgcttcagaatggctttgccgacataattactgtataccagcagaaagttgaagacgtggtgcttccagagaaggttgacgtcctggttagtgaatggatgggcacatgcttactgcatcacaccctggaagccgatgccgtacacgatgggagaccgtccccgtgcccctacagacgtcgaggacacggatttagctgtgtggctgaaaaaccgagcgtggagaaggctcatgtgtgcggtagcgagttaggttgccactttcagacccggcctcacatctctaaaagctggcggaagagtctgccccacctagaaatgaccgttgatgctctcttcgggaaacagtgtgcttacttggaagggtag

SEQ ID NO: 236614 - DNA, 951 bp, synthetic construct
  misc_feature 1..951: note = Description of Artificial Sequence: Synthetic coding sequence
  source 1..951: mol_type = other DNA
atgatcgctgaccgcgtccgcactgacgcgtatcgcctgggcattttacgcaactgggctgcgctgcgcggtaaaacggtcctggatgtgggcgcagggactggcattctgagcattttctgcgctcaagctggcgcaaggagggtctacgctgtggaagcctccgctatatggcagcaggcacgcgaggtggtgaggtttaacggcctcgaagaccgggtgcacgtgcttcctgggcctgtcgagactgtcgagctccccgaacaggtggatgccatagttagcgagtggatgggatacggtctcctgcacgaaagcatgcttagctccgtattacacgctagaactaagtggctgaaagagggtgggctgcttctcccggctagcgccgagttgttcattgctcccatctccgaccagatgcttgagtggaggcttggcttctggtcgcaggttaaacaacattacggtgtcgacatgtcgtgcctggaagggttcgccaccaggtgccttatgggccactctgagatcgttgtgcagggcctgtccggtgaggatgtgctggctcgtccacagaggttcgcccaactcgaactgtcgcgcgctggtcttgaacaggaactcgaagctggggtgggaggccgatttagatgcagctgttatggaagcgcgcctatgcacggatttgcaatttggttccaggtaactttcccgggaggtgagtcagaaaaaccgctggtgctctcgacgagccctttccatcccgcaacacactggaagcaggcacttctgtacctgaatgagcctgtccaggtggagcaggatacagacgtcagcggcgaaataactctcctccccagccgggataacccccgaaggctgcgggtcctcttgcgctacaaggtgggagatcaggaggaaaagacaaaggacttcgcaatggaagactag

SEQ ID NO: 236615 - DNA, 1128 bp, synthetic construct
  misc_feature 1..1128: note = Description of Artificial Sequence: Synthetic coding sequence
  source 1..1128: mol_type = other DNA
atgtctcaacctaaaaaaagaaaattggaatccgggggaggcggtgaggggggagaggggactgaggaggaagacggagctgaaagagaggccgcacttgaacgaccacggagaactaaacgcgaaagagaccagctgtactacgagtgctacagtgacgttagcgttcacgaggaaatgattgcagatcgcgtaagaacagatgcttatcggcttggtattctgaggaactgggcagctttaagaggcaaaaccgtgctggacgtgggtgccggtactggtatcctgtcgattttctgcgctcaagccggagccagacgcgtctatgccgtggaagccagcgcgatatggcagcaggcacgagaagtcgtacgcttcaacggactggaggacagagtccacgtcttaccagggcctgttgaaaccgtggagctgccggaacaggtggatgcaattgtgtctgagtggatgggatacggcttgcttcacgagtctatgttgtccagtgtcttacacgctcgtactaaatggctgaaagaagggggactcctccttccagccagtgccgaactgttcattgcccctatctccgaccagatgttggagtggaggctgggcttttggtctcaggttaaacagcattacggggtcgatatgtcttgtcttgaaggattcgccactcggtgtttgatgggtcactctgagattgtggtccagggcttaagcggagaggatgtcctggccaggcctcaacgttttgcccagctggagttgtcacgggctgggttagaacaggagctggaggcgggagtcgggggaagatttcgttgttcttgttacggctcagctccgatgcatggatttgctatctggtttcaggtgacgtttcctgggggtgagagcgagaagcctctggtgctgagtactagtcctttccaccccgctacccattggaagcaagcactgttgtatctgaacgagccagtgcaggtggagcaagatacggacgtgtctggagagatcactctacttccgagccgtgataaccctcgccgactgagggtgttattgcgatataaagtgggtgatcaggaggagaagaccaaagactttgcaatggaggattag

SEQ ID NO: 236616 - DNA, 936 bp, synthetic construct
  misc_feature 1..936: note = Description of Artificial Sequence: Synthetic coding sequence
  source 1..936: mol_type = other DNA
atggcaaggagtggcaggagaccttggtccgatccaggaggactgtcaggagctgtgcaacgggctgggggtccgggtgctaggcctgccggaacctcgggggactgcagagtggccggaacagggggatgccacagggaaagagtagacggcctccggacccccgctagggtccacgctgaattgcgaccgcctagagcaaatcaggtggccgagggaggcagatccagccccgcaggcctgcggcgagccctgcattctccacatcaaagacccgatgcaggcatggctccgggacttctcgagcccggagaagcagctctgtggtgcggccacgagctgcctggcggactgcgtcatgcactgagtcatggcccactgggcgacaggtgtgcaggaatagtacgcaggggacgcgcaggtcccgctgccgcactgtgcagtgccagggcattaccgaggcgactgggggctggggctggcggtcgcagtggtcgtgcactgcctctgcagctgctatggctgggagcccatgcttggctatgtcacctcgtgccaggggacctgccttggaggggagtcggcgaaactcccggtgctgttcatcttgcgttctcaccgggacactcgctggagactggggcaccactgcccgaacgagccggagcttctggtgcacgccacggacgctttcgcagggaccacgcagccgctctccccggacagccaccgtctccagctcgtgcagcagctttacagtccgggaggcccggtggtgaagatcagcgcctctgtcacggcggtcttagtgtagccttctccccgagttatctacctaagcagccagatcttcgtggtagaggagttgccagaagcgaggggaaggggcgaagtcatgtgcaagtggggggaatctcgcctcctttcccatcttag

SEQ ID NO: 236617 - DNA, 2532 bp, synthetic construct
  misc_feature 1..2532: note = Description of Artificial Sequence: Synthetic coding sequence
  source 1..2532: mol_type = other DNA
atggcgaagcctctgacagatagtgagaaaaggaaacagatatcggtgcggggactggcgggtctgggggacgtggccgaggtaagaaagtcctttaacagacacctgcactttacactggttaaggacaggaacgtcgctacaccacgcgactacttcttcgctttagcccacactgtaagagaccaccttgtgggtagatggatccggactcaacagcattactacgaaagagaccctaagagaatatattacctgagcctggagttctacatgggaaggaccctgcaaaacacaatggtaaaccttgggctgcagaatgcctgcgacgaggcgatttaccagttagggctggatctagaagaacttgaggaaatcgaggaagatgcaggcctaggcaatggcggtctgggacgcctggcagcctgctttctcgattcgatggcgaccttggggcttgccgcatacggctacggaatccgctacgagtttgggattttcaaccaaaagatagtgaatggctggcaggtggaagaggcagacgactggctgaggtacggcaatccatgggagaaggctcgccctgagtatatgctgcccgttcacttttatggcagagtggaacatacacctgacggggttaagtggctcgatactcaggtggtcctcgcaatgccatacgatactcccgtcccaggttataagaataacacagtgaacactatgcgcctgtggtccgccaaggcccctaacgactttaaactccaggactttaacgtgggcgattacatcgaggcagtgctcgaccggaatcttgccgagaacatttctagggtgctgtacccaaacgacaacttcttcgaaggcaaggaactgaggcttaaacaggaatacttcgtggtggccgctacgctccaggacattatccgacggttcaagtcaagtaaatttggttgtagagatcctgttagaacatgcttcgagacgttccccgataaagtagcaatacaactgaatgatactcatcctgcgcttagcatcccagagctcatgcgtatcctggtggacgtggaaaaggtcgattgggacaaggcatgggagatcacgaaaaagacatgtgcatatacaaatcataccgtattgcctgaggccctggaaagatggccagttagtatgttcgagaaactgctccccaggcacctcgaaatcatatacgcaatcaaccagagacacctcgaccacgtggcggctttgtttcccggagatgtcgaccgtctgagacgcatgtcagttattgaggagggagactgcaaaaggatcaatatggcccatctgtgtgtgataggttcccacgcggtaaacggagtggcaaggatccatagcgaaattgtaaagcagtcagtgttcaaggacttctacgagttggagcctgaaaagtttcaaaataaaactaacggtatcaccccaaggagatggctgctcctctgcaaccccggtctcgctgacacaattgttgagaagatcggcgaggagttcctgactgacctctcacagctgaagaagctgctcccattggtttcagacgaggtgtttattcgcgacgttgccaaggtgaagcaggagaataaattaaaattttcagcattcctggaaaaagagtataaggtgaagatcaacccgtctagcatgttcgacgtccacgtcaagaggatccatgaatacaagcgccaactcctcaactgtttgcacgtggtgacgctgtataatcgcataaagcgagacccagctaaagcctttgtcccacgaaccgtaatgattggcggtaaagccgctcctggttaccacatggccaagctaatcatcaagttggtcacaagcatcggggatgtagtgaatcacgatccagtggttggcgacaggctcaaagtgattttcctggaaaattatcgggtcagtctggccgagaaggtgatcccagcagccgatctgtcacagcaaatctcaaccgccggaacagaagcctcaggcacaggcaatatgaagttcatgctcaacggcgcactgacaataggcactatggatggcgcaaatgtcgaaatggcagaggaagccggagcagagaatttattcatattcggattgagagttgaagatgtggaggctttagacagaaaagggtacaatgccagagaatactatgatcacctgcccgaattgaaacaagccgtcgaccagatttccagcgggttcttttctcccaaagagcctgactgctttaaggatatagtgaatatgctaatgcaccatgatcgtttcaaggtgttcgcggattatgaagcctacatgcagtgccaggcccaagtggaccagttgtacagaaatcccaaagaatggacaaaaaaagtgatccggaatattgcttgtagtgggaaattcagctcagaccgcaccattactgagtacgccagggagatttggggcgtggaaccgagcgatctgcagatccctccgccaaacatacccagggattag

SEQ ID NO: 236618 - DNA, 717 bp, synthetic construct
  misc_feature 1..717: note = Description of Artificial Sequence: Synthetic coding sequence
  source 1..717: mol_type = other DNA
atgctcactaccttgctacccattcttctgctatctggatgggctttttgtagccaggacgcatccgacggtctgcaaaggttgcatatgttacaaatctcatatttccgagatccatatcacgtttggtatcaggggaacgcctccttgggaggccatcttacccatgtgctggaggggcctgatactaatactactatcatacagctgcagcccctgcaagagccagagagctgggccagaactcagagcggcctccagtcatacctcctccagttccacggcctggtccgcttagtgcaccaggaacgcacactagcattcccccttactattaggtgttttctgggctgcgagctccctccagaaggaagccgagcacacgttttcttcgaagtagccgtcaacggcagttccttcgtgtcttttcgaccagagcgcgctttgtggcaggcagacacccaagtcacaagcggagtggtgacctttacgctgcagcagctcaacgcttacaataggaccagatatgagctgagggaattcctagaagatacttgcgtgcagtacgtccagaaacacattagcgccgagaacaccaaggggtctcagaccagccggtcgtatacctccctcgtgctaggagtgctggtcggttctttcatcatcgccggagtcgctgtcggcattttcttgtgcaccggcggacggcgatgctag

SEQ ID NO: 236619 - DNA, 4551 bp, synthetic construct
  misc_feature 1..4551: note = Description of Artificial Sequence: Synthetic coding sequence
  source 1..4551: mol_type = other DNA
atggataaccaacaggacaaagcaattgtggcaagcgctaatggagagaatactctgattaacggcgtgaaggagaacgattccgaggatcaggacgtggcgatgaagagctttgctgctttagaagcggcagcgccaattcagccaacgccagttgctcagaaagagactttgatgtaccctcgcggactgcttcctcttccatcaaaaaaaccttgcatgcagtcaccacctagcccacttggcctgatcgaggctcccgaacatgcggctaatagcgcatcggtgaacgctatttccctgacttctgggattgctaaaggattaaacacctggtctctcccgaacgagtgtgaaaaggctccgttcgctatcatggagcctgccggtatgtcagccctgaatggtgactgtttaatgcagccgagtcggacctgcctggggtgctttatggaatccaaggatgcagtagaccctgagccaggaatcagcctgaaagtgggtgaccttaatcgagattatgaaacctgcgcagtgtcagatattggcattcagtgcattaacgccggagagaatatgaagtatggagagcagctgctatcagaccagttgcttgggttcccgctgcataaatcaagagccggagatcgaagagagaccgaaaaacctgacatcgatttagaagatcccgcacagaaaagttactatgaggcactcttgcttgacaagtgcaatactgaggaggctctactcgcgaactccaaccaggattggggttatttcgaaacattcatcagtgagtcaaaaatagagttgctagacttgtgcagcaaaaatgagctcagtgtaaacctgttctctgaagaggacgttgacaattatatgttcgatgacgatgagtcaaccctcggcagtgatgtgtgctcactgaagatcagatacgagtcgtttcaggacaatgtcagagataagactacactgctaatgcaagaagacgctcaattcaatttcttcccttctgtgttcaccacatgtcctaagcgtgaatccaaatccggagctctcaagcagtcctctgactttagccagtttaaggtccccgacgtgtcaattatctggggcgaagaggataagaatctggacaagaaaaaaggcaaagaagagggccaggaggataagggggtggagaagaaggatggcaaagataacggggagaagcctgccctcaacaagccctgtagtgggacagaagtcgagcagctaaagaatcccaagcagggccatttggcaaatagtctggagactagtgggagtttttcagacgactcatcctttatcgagattagctatgatgctatgggtgagattaaggattgcagtcggtacatggcccgtgacaccaactctggaagtagcagtagccagcagaattatgggttgcgcgctaaacgtaaagttagatacagcgaggactatctgtacgacgtggacagcttggagggggagaaggtgaacgagcggaaggagtggttacccgtaggctcaaaggaagaagatgacgatgaatggtgccccaaaaagcggagaaaagtgacaaggaaagaaccccctgtgatcataaagtatatcataataaaccgtttcaaaggtgagaaaaacatgttagtgaagctgggcaaagtcgatgcaagcgagaccaccgtgaatttgtcagaaaatcagctgaacaaatacgccaagctagccccattgaaaggattctggcagaagaagaaaaaacagaggaataccaatacggattccattaaaacaccgttcagccagaagcagtccttcgagcccggaagttttgaagtgtcctttttgccaccagctcggaaacgcaagtcaaaattgggcaatagacatcgtatccagagaatccctagcatcgagattagtgcctcatctaagcagattagtctgtgcaatgatcagcgtcacgcaagtaaccacaaggaggatggtggtttgaagggcaccctcaaatcagccccactcggcgctccttcctgcgctaatggctctcacctgaacgacattaccgggccagactctgtgaaagtcaaagcccaggacactgagttcaagggaccggaacggaaggtcctcaacaaaatcaaatttaagtccgaggcacgtctcaagtctaaaaaagttaaggctgctggccaggagtctaagcccatcgtgcaaatgagcccgctgctggagaaccagtctagtaaagctaacctcaagaatgaggtaataccaggaactagcaattccagtcgcctgtccgaatttcacgaggccaaggctgcaaagtcttcgacattcctgcctactacgtgcagtagcgaaatgccactctcgtctgctaatgtgacgaccaacattccggttatacctgggggttatctgcagactctgttggacgcctctgatctgagtaacaacactagtatctcttatttctctcaccattccccggaacagaacgaaggaagcctgactcagacggaaaaatctttcgtgcctctccagcccacccaagattgcgtgctgactagcagctctgatagcgaactccagcagtcaagtcacaatttcaaaatggagtcatcaaactaccgaaacgtgtggcccaacaaggcaacaagtggaactcaggagttcatggccgaggtgagccgagaaattgctccaacgcagtcttccgagttcggcgcttctcaggtggtatccatggaaaacaatctcacccctactacttacaatcctatttgtttaaattcgggaggatctaattgcaataaggtcctgtacgatagtatgcaggacacacagttgccaagcgatgacagctaccagctgtgccattttaacaacggtgagatctgttttccgttccagcagggtccagtgaacatggatgacggaagactcttcagttttgacagcatggcacctcttagcgtgtcctcttcaaactattgttcactcagcctcaagagctgtgagaaagatggcgatgacgatattactgatgacttcctcgctcattgtagtccgaagttggtgatacagcaaagcatagacgagattgctcctttgaaagaatcaacagacctgttggacatttctaatttcacgcctgacaagtttcgccatagtagcctctccgaaatgagtcctccagataccccttctctgtcaccccagataaccagatgcgagtctatgaaaacactgggcaccttgaagggctttcaggagggtgtgccaggtccgttagattcagtagaaaaaattaaatgggactgctcaaccctctccaggcaggtgcagatggaggatggattcaccttgaacaatcaccagtttcagttccatatgttcaacgacgaggatagcgtgtctctgcttcaaaaaaacccatgtttgtccacgttcaacgatccctccggccagattagcactaataacaaagtgtcaaagagccggaagaaatcaagtcccagtaaatctggggcaatgaaccagtccagctcccagaaaaacacaagaaagaagtccctcaaggggaacaataaggggattgaaaaacctcctgggaaaaatagtcggcaggtgcccaaatccactaaaaaggggaagtatatggccgctattaacggagagaagatgcagatcggtattggacgtggaggatcacagactaacaccattagcagtaccggtaagacgctggccgagtgcatccagcacggaggccctatggcatccatgaaaatgcccagccaaaaagggctgtcaggcgactgggctctgggaaaggaaagttcacccggatggagcgacatgtcaatgggcacaaacacaaattctcttctggatgatgatcaaagagagttccaggagccctcttatattctcagcaatatcgcatccggcatggctgatgtgcaacggttcatgatggcttctatcgagcctctgtgggagcccatggagcaccacggcgatcctaacattttctatagccctgagtccaactccctaaagctgaagactttgaagatcctggcaggaacaccgcaagagagcaaaaagaagatcaattccggctctcagggcgctactaagaaccatcgctcaattaagggagtgtccaaatcaaacggcaaaacagctatcggcgatcccggaagagctaacatgcctggttataacgaagactcaaggtctacgttttttgacaaaaaatattccaacatgagcacactgggcaacaatggcccaacccacaagaagctttacagacacaaaagttccagtaaagctctacgcgatgaaaagtgcaaaggaaaacacatggaacgtgagcaagtgcataaggatgagagcggcacagcctctttcgaaaagctacgggactccgactataacctgttgaaggcagagacaactttttgggttctccctgtgtttgaggaagaaacacgaatctttcaaaaggacatctac

SEQ ID NO: 236620 - DNA, 1008 bp, synthetic construct
  misc_feature 1..1008: note = Description of Artificial Sequence: Synthetic coding sequence
  source 1..1008: mol_type = other DNA
atgtgggccacactacctctgttatgcgctggggcttggttgctcggggttccagtatgtggtgctgccgagctgtgcgtgaattccttagagaaattccacttcaagtcatggatgtcaaagcacaggaaaacctatagtacggaagagtaccatcaccgcttgcagacatttgcttctaactggcgtaagatcaatgcccacaacaatggcaatcacaccttcaagatggccttgaaccagttctccgacatgtcattcgccgaaattaagcacaaatacctgtggtctgagccgcaaaattgttccgcaaccaaatccaactatctgcggggtacaggcccttacccacccagcgtagattggaggaagaaaggaaatttcgtcagccccgtgaagaatcagggcgcatgtggcagctgctggacattcagcaccaccggcgcattagaaagcgccatcgcaattgccacaggcaagatgttgtcactggccgagcagcaactcgtggattgtgcccaggactttaataaccacggatgccaggggggtctaccttcacaagcctttgaatatattctttataacaagggcattatgggcgaggatacctacccctaccaaggcaaggacggatactgcaagttccagccgggaaaagctatcggctttgtgaaagacgtcgccaacattaccatttatgatgaagaggctatggtggaggctgttgcactgtacaacccagtgagtttcgccttcgaggttacgcaggacttcatgatgtatagaacaggcatctacagctcaacaagctgccacaaaacgcccgataaagtgaatcacgccgtgctcgccgtaggatatggagagaagaatggcataccctattggattgtgaagaacagctggggccctcagtggggcatgaacggatacttcctcattgaacgcggaaagaatatgtgtggattggccgcatgcgcgtcctatcccatcccattagtgtag

SEQ ID NO: 236621 - DNA, 5655 bp, synthetic construct
  misc_feature 1..5655: note = Description of Artificial Sequence: Synthetic coding sequence
  source 1..5655: mol_type = other DNA
atgcactgcactaaccctgccctgatctttctgatagacgagcttagcccagagcagcacaatctatccttgtacagcatggaactggtgctaaagaagtcgaccgggcattctgctgctcaggtcgccctgacggaaacagcaccagggtctcagcattcatcgcctctgcacgttactgctcccccttcagccaccacatttgatacggcttttttcaaccagggtaagcagaccaagtctacggcggatcctagcatcttcgttgctacctatgtctcagtgacttcaaaggaggtcgcggtcaacgatgatgagatggacaatttcctgcctgacacccactggacaactcccaggatggtgagccctatccaatatatcaccgtgtctcctcctggcctgcctcgcgaggctctggagcctatgctcacgcccagtctgccaatggtaagcctgcaggacgaagaagttactagtgggtggcagaacacaacccgtcaaccggcagcatacgcggagtctgcaagccatttccatacatttaggtccgctttccgcactagtgagggcatcgtgcccaccccaggtaggaatttagttctgtatccgactgatgcttacagccatctctcaagtcgaaccttgcccgagattgtcgcttcgctgacagaaggggtggaaaccacgctgttcctcagctcacgttccctgatgcctcagccgttgggcgacgggatcactatccccctgccttccctgggcgaggtgagtcagccaccagaggaagtgtgggccacaagtgcagataggtacaccgatgtgacaacagtgctaagtcagtcgttggaggaaacaatctcccccagaacatacccaacggtaacggccagtcacgccgctctggcattttcccgcacccatagcccgttgttgtcaactccacttgccttcgcaagctccgcctcacctaccgacgtcagttctaacccattcttgccttccgactcctccaaaaccagcgaacttcattcaaatagcgccttgccagggcctgtcgacaacacccacatcctgagtccggtcagcagcttccgcccatacacctggtgtgcagcctgcaccgtcccatcaccccaacaggttctagcgacctccttaatggagaaggatgtaggctcgggggatggtgccgaaacactctgcatgactgtccttgaagagagctctatttccctgatgtcttcggtggtggctgatttttctgaatttgaggaggatcctcaggtgtttaatacactgttcccctcaagaccgattgtccccctgtctagtaggtcaatggagattagtgagacctcagttggcatctctgcagaggtcgacatgtcttcagtaacgacaacccaggtgcccccagcacacggtcgtttatccgtgccagcctccctggaccccacggctggctccctctctgttgccgaaacgcaagtgacaccgtcctccgtcacaacagcattcttcagcgtcatcacgtcaatcctgctcgactctagcttttcagtgatcgcaaataaaaacacgccctccctggcagttcgggatccttctgtgtttaccccttacagcttggtgccatccgtggaatcgagccttttttccgaccaggaacgcagttcgttcagcgagcacaagccgagaggcgcacttgatttcgcgagttcattcttttctacgcctcctcttgagctctcaggctccatctcctccccctccgaggctcctgcctccctgtccctgatgccgtccgatctatctccctttactagccagtcatttagcccactcgtagaaacctttaccctgtttgatagctccgacttgcagagcagccagctttcgttaccctcctctacaaacttggagttcagccaattacagcccagctctgaattgcccttaaacaccatcatgctgctgccaagccgctctgaagttagcccctggtcaagctttccgagcgactctctcgaatttgtggaagcttccacagtgtccctaacagactccgaagcccacttcactagtgcttttattgagactacgtcctacctagaatctagtctcatatcccatgagagcgccgtgaccgccctcgtccccccagggtctgagagctttgacatcctcactgccggtatccaagcgacaagcccgctcaccacagtgcataccacccccattctgacggagtcaagcctgttttcgacactcaccccgccagatgaccaaatatccgcccttgatgggcacgtgtctgttttggcttcgttcagtaaggccattcccacggggacagtacttatcactgatgcatacctcccatctggctcctcctttgtctccgaggccacccccttcccactgccaaccgagctaactgtcgtaggtccttcactcacgccaacagaggtgcctctgaatacttctacagaagtttctacaacttcaaccggtgccgctacaggcggaccgttggatagtacccttatgggggatgcagcttctcagtctcccccagaaagcagcgcagcccctcctctccccagtcttaggccggttaccgcgtttacattggaagccaccgtggatacaccaactctggcaacagcgaaaccgccttatgtgtgtgacatcactgttcctgacgcctacctcattaccacagtcctcgcgcgtagagcagtgcaggagtatatcatcactgcaataaaagaagtgctacggatacacttcaatagggcggtcgaactgaaggtgtatgaactttttacggactttacattcctggtcacatccggcccattcgtgtacaccgctatatcagtgataaacgttctgataaactcaaaactggtaagagatcagacccccctgatcctctctgtcaagccgagctttctcgtgccagagagtcgctttcaggtccaaacggtgctccaattcgtgccaccaagtgtcgacactgggttttgcaactttacgcagagaatagagaagggcctcatgaccgcattgttcgaggtgcgtaagcatcatcagggcacatacaacctgaccgtgcaaattctgaatataaccatttcctcgagtcgcgtcactccgagacgtggaccggtcaacatcatcttcgctgttaaaagtactcagggattcctgaatgggtcagaggtatctgagcttttaagaaatctcagcgtcgtagagttcagcttctacctcggctacccggtcctgcaaatcgccgaaccatttcagtatccccagttgaatctaagtcaactcctcaagtctagctgggtgagaaccgtgctgttgggcgtcatggagaagcagctccaaaacgaagtgtttcaggccgagatggagcgcaaactggctcagctgctcagtgaagtgtccactaggcgccgaatgtggaggcgggcaaccgtggccgctggcaactccgtggtgcaggttgtaaacgtgtctaggttggaaggagatgataatccggttcagctgatctactttgtcgaggatcaggatggggagaggttgtccgctgtgaagtcttctgatctgattaacaaaatggatttgcaaagagccgcaattattctcggctaccgtatccagggagtgatagcccagcctgtagatcgagttaagagaccatcccctgagtcacagtcaaataatttgtgggttattgttggggttgtgataccggttctcgtggtcatggttatagtggtcattctgtactggaaactgtgccgtaccgacaagctcgactttcagccagacactgttgcaaacatccaacaaaggcaaaagctgcaaatcccctctgtgaagggcttcgactttgccaagcagcacctcggtcagcataataaggatgacatacttattatacatgaaccggctccccttcctgggcctttaaaggaccacaccaccccaagcgagaacggggacgtgccaagtccaaaatctaagattccaagtaagaacgtgaggcacagagggcgtgtctctccgtctgatgccgattccaccgtatctgaagagagttcagagagagatgccggagacaagacacccggtgctgtcaacgacgggaggtcccacagggccccacagtccggcccaccactgccgtcctcaggcaatgagcagcacagctccgcatcaatcttcgagcatgtggatcgcatctcacggccaccagaggcttcccggagagtgccctcaaagatacagctaattgctatgcagcccatcccagcacccccagtccagcgcccaagccctgcagaccgcgtcgccgagagtaataaaatcaataaagagatacagacggccctaaggcataagtctgagattgaacatcatcgcaacaagatcaggttgagagcgaaacggagaggccattacgagttcccggtggtggacgatttgtctagcggcgataccaaagaacgacaccgcgtgtataggcgagcgcagatgcagatagataagattttggaccccacagcgtcagtgccatccgtgttcatagaacccaggaaaagcagccgcataaaaagaagccccaagcctaggcggaaacaccaggtcaacggatgtccagctgacgccgagaaagatcggttgattacaactgattcggatggaacctataggagaccacctggggtgcacaacagtgcctacataggctgcccgtccgaccctgacctgccggctgatgtccaaaccccgagttctgtggagctcggacgataccccgcactgccattcccggcaagtcagtatatccccccacaaccctctattgaggaggccaggcagactatgcactctctgttggatgacgccttcgcattagtcgcaccatcctcccagcccgcatccaccgccggtgttgggcctggggtaccaccgggactaccggctaattccacccccagccaggaggagcgacgtgccactcaatggggtagtttctactcccctgctcagacagctaacaacccttgtagccgttacgaggattatggtatgacccctccgacaggcccacttccacgacctggtttcggtccagggctgttgcagagcaccgaactggtgcccccagaccctcagcaacctcaggcctcggcagaagctcccttcgctgccaggggaatctattctgaggaaatgcccagtgttgcacgtccacgacccgtagggggaacaaccgggtcccagatccagcatcttactcaggtgggcattgcctctcgcattggggcacaaccagttgagataccacctagtagagggagccagtacggcggtcctgggtggccttcatacggcgaggatgaggccggacgcagagaggcggtaccccgaacttctggaagggaaccctctgccccttccggtaatcttccccaccgtggtttgcagggaccgggtttgggctacccaacttcatccacagaggaccttcagcccggtcacagtagtgcaagtcttattaaggccattagagaagagctgctcaggttgagtcagaagcagagtactgtacagaacttccattcttat

SEQ ID NO: 236622 - DNA, 1236 bp, synthetic construct
  misc_feature 1..1236: note = Description of Artificial Sequence: Synthetic coding sequence
  source 1..1236: mol_type = other DNA
atggaaactcccgaggtacctgtcggttctctgattgacttcggcccagaggcccctacaagctcccccctcgaggcacccccaccggtgttacaggacggcgatggctcactgggagacggcgcttcagaatcggaaaccactgaaagcgctgactcggagaatgatatgggcgagtccccctcccacccttcttgggaccaggaccggagatctagctcaaacgagtccttcagcagtaatcagtctacagaaagcacccaagacgaagagacactcgcattgagggactttatgcgcggatacgtggaaaaaattttttccggcggagaggacctggaccaggaggaaaaagcaaagtttggagaatactgctcatccgagaacggaaagggtagggaatggtttgcgaggtacgtttctgcccagcgatgcaatagtaaatgtgtgagcgaggcgactttctatcgcctggtgcagagtttcgctgtggtgctattcgaatgccaccagatggacgatttcggtcctgccaagaatctgatgactatgtgttttacctattaccacattgggaaaccccagcttctgcccccagagtctcgcgaaaaacccgctggatccattgattcctacttgaaatctgcgaactcatggcttgctgagaagaaagacatagctgaaagattactcaaaaacacaagcgcacggaccgagaacgttaaagggttttttggagggctcgagacgaagctcaagggtccactggccaggcggaacgaggaagacgagaacaaaccacaggaaaagaggccgagggctgtcactgcctattctcccgaagatgaaaaaaaaggagagaagatctatctttatacccatctcaagcagcagccgatctggcacactctgaggttctggaacgctgccttttttgacgccgtgcattgcgagaggacgaagcgcagcccaacgacccgaggcgatgctggcgaggaggaagaaaaaagggagaagtggtgccacatgacccaggaggaaagagatgattctctaagattcaatgaaaacattacattcggccagctgggcacatttacgcacaatatgctggcttttggtctgaataagaagttatgcaatgattttctaaagaagcaggccgtcattgggaaccttgatgaagaacagtataagttgctctccgaccatatcgagcagatggctacagagtag

SEQ ID NO: 236623 - DNA, 15018 bp, synthetic construct
  misc_feature 1..15018: note = Description of Artificial Sequence: Synthetic coding sequence
  source 1..15018: mol_type = other DNA
atggaccagcgaaaaaacgaatcaatagtgccttctattacacagctcgaggatttcctcacagaacacaacagcaatgtcgtatggctgctcgttgccacaatcctgagttgcggatggattatttacctcacctactacaattcccgtaatgtcggtctgattctgacactggtgctcaacagactctataagcatggctatatccatattggcagtttctccttctctgttctgagcgggaaggtcatggtgagagagatctattacatcaccgaagacatgagcatccgcattcaggatggcttcattatcttcaggtggtggaagatgtacaacccaaagcaaaaacagcatgaccctaaggcagaaacccgactctacattactgtgaatgactttgaatttcacgtgtataatcgatctgacctatacggtaggcttcaggagctgttcggtctggagcctactattatccccccaaagaaggacgacgataaaactcgcgagatcggacgcactagaactcagtctaagattgaaagggtgaaagtgaagaccgagtcgcaagatccgactagttcatggagatctctgatcccggttatcaaggtgaacgtcagtaccggtaggcttgcattcgggaaccactaccagccacagactctttgcatcaatttcgatgacgcatttctgacttacacaaccaaaccaccaagctcgcatcttgatcagtttatgcacattgtcaaaggaaagctcgaaaatgtgagagtgatgctcgtgcctagtccccgttacgtagggctgcagaacgatgagccacccaggctgatgggggaaggattcgtggtgatgcagagcaacgacgtggatatctactattatatggatgagccaggactggtgcccgaagagactgaggaaaacattgagggggagatgtctagcgaagactgcaagctacaggacctgcccccatgctggggcttagatatcgtctgcggcaaagggactgattttaattatggaccctgggccgaccgccagcgtgattgcctgtggaaattcttcttcccgccagattaccaggtcctgaaagtctctgaaatagcccaaccaggcaggccacgccagattctggcattcgagctcagaatgaacattatcgccgatgccacaattgacttgctgttcacaaagaatcgagaaaccaatgcggtacacgttaatgtcggggctggctcttacctggaaatcaatattccaatgactgttgaggagaatggatacacgcccgcaatcaagggccagttattgcacgtagacgcgaccacgagcatgcagtaccgcacactactggaggcggagatgttggccttccacatcaatgcctcatacccgagaatctggaacatgccacaaacctggcagtgcgagctggaggtgtataaagcgacatatcacttcatcttcgcccagaagaatttttttaccgacttaatacaggactggtcttcagattcacccccagacatcttctcattcgttccatatacatggaatttcaagatcatgttccatcagtttgaaatgatctgggcagctaatcagcataattggatcgattgctctactaagcagcaggagaatgtgtacctggccgcttgtggagagaccctgaatatcgacttttccctgccatttacagacttcgtgcctgccacttgtaacaccaaattctcattaaggggcgaggatgttgatctacacttgtttcttcccgactgtcatccatccaagtacagtctttttatgctcgtgaagaattgtcatccaaataagatgatccacgacacaggtatccccgctgaatgccagtccgggcaaaaaaccgtcaaaccaaaatggcggaatgttacccaggaaaagagcggatgggtggaatgttggaccgtgccttccgtcatgctgacaattgactacacatggcaccccatctatccgcagaaggcagatgagcaactcaaacaaagtctgagcgagatggaggaaactatgctatccgtcctgagacctagccagaaaacaagcgatagagtggtgagttcaccatccacaagcagtcggcctcccattgatccaagtgagctaccgccagacaagctccatgtggaaatggagctttcccctgatagtcaaattaccctgtacggcccactgcttaacgcctttttgtgcattaaggaaaactatttcggagaagacgatatgtacatggacttcgaggaggtgataagcagccctgtcctgtccctcagcacctcttcttcaagcggatggaccgccgtgggaatggagaacgacaagaaagagaacgaaggctctgccaagagcatacatccgctggctctgagaccatgggatattaccgtcctggtcaacttgtacaaagttcatggcagactcccagtccacgggaccaccgacggacctgaatgtccaactgccttcctggagagactgtgctttgaaatgaaaaagggctttagagagacaatgttacaacttatcctgtcacccctaaatgtattcgttagcgacaattaccagcagcgtcctccagtggatgaggtgttacgtgaagggcatattaacctgtccggattacaactccgggcacacgcaatgttttcagctgagggcttacctttaggatcagacagtttggagtatgcctggctgattgacgttcaggcaggaagcctgactgctaaggtgacggcaccccaattagcctgcttactggagtggggtcaaacttttgtgttccatgttgtgtgtcgagaatatgaactggagagacctaaatctgtgatcatttgtcagcacggtattgaccggcgtttttgtgagtctaagttatcctgtatcccaggtccctgccccacatcagatgatctgaaatacacaatgatccgactggccgtcgatggcgcagatatctacatcgtggaacatggctgcgctaccaacattaaaatgggagcaatcagagtcgcgaattgcaacttacataatcagtccgttggagagggaatctccgccgcaatccaggacttccaggtcagacagtacattgagcaattgaataactgcaggatcggattacagcccgctgtactgaggagggcgtattggctggaagccggatcagcgaatctgggcctgatcaccgttgacatcgccttggctgctgaccaccattctaagcatgaagctcagcgacactttctggagactcacgatgcgagaaccaagaggctgtggttcctctggcccgacgacatcctgaagaataaacgctgtcgaaataagtgtggatgcttagggggatgccgcttcttcggcggtaccgtgaccggtttagactttttcaagctggaagaactgactccgagctcctctagtgcctttagtagcacatctgcagagtctgatatgtactacggacagtcccttcttcagcctggggagtggattattaccaaagagattccaaagataattgacgggaatgtgaacgggatgaagagaaaagagtgggagaataagtctgtaggcattgaagtggaacgcaaaacacagcacctgagcctgcaggtgcctcttcggtctcactcatctagcagcagttccgaggaaaatagtagtagctcagcagcccagcctttgttggcgggagagaaagaaagcccgtcgagtgttgcggatgatcacctcgtccagaaggaattcctgcacggcaccaagagggatgacgggcaagcctctatcccaaccgagatttcaggcaactcacctgtatcacccaacacccaagacaagtcagtgggacagagcccacttagatctcccctgaaacgtcaggcgtcagtttgctcaaccaggcttggtagtactaagtctcttacggcagctttttatggcgacaaacagccagtgaccgtgggagtgcaattcagtagcgacgtttctcggagtgacgagaacgtgttggattcccccaaacagaggagatcatttggctcatttccttataccccaagtgccgacagcaattcattccatcagtaccggagtatggacagctccatgtcgatggcagatagcgaggcatacttttccgccgcagaagaatttgagccaataagttccgatgagggcccaggaacttatccgggtagaaagaaaaaaaaaaaacagactcaacagatcgattattctaggggctccatataccactctgtcgaaggcccactcactgggcacggggaatcaatccaggattctaggacactgcctttcaaaacacatccctcccaggctagtttcgtgagtgcactgggaggagaggacgacgtgatcgagcacttgtatattgtggagggagaaaagacagtcgagagcgagcagatcacgccacagcagccagtgatgaattgctatcagacttatctgacacaatttcaggtaataaactggagcgtgaaacaccccaccaacaagaggaccagcaaaagtagcctgcatcgaccgttggacttggatacaccaacctcagaggaatcctcttcttcctttgaacaacttagtgtgcctacctttaaggtcatcaagcagggcctcacagctaattctttattggaccgcggaatgcagttatctggatcaacttccaatacgccctatactccactcgagaagaaactcgccgacaatacggacgatgaaaccctcaccgaggagtggacactggaccagccggtttcccagaccagaaccaccgcaattgtggaggtcaaaggcaccgtggatatcgttcttacaccactcgtcgctgaagcattggacagatatattgaggctatggtccactgcgcatccacccggcacccggctgctatcgtagacgacctgcatgctaaggtcctccgggaggccgtgcaaaactctaagaccaccttcagtgaaaacctatcctctaagcaggacatacgcggaacaaagactgaacagtctacaatcggaacgacgaatcaagggcaggctcagacaaatctcacaatgaaacaggataatgtcaccatcaagggactgcagacaaacgtgagcatcccaaaagtcaacctatgcctcctccaggcaagcgttgaggaaagccctacaacagctcctagtagaagcgtcacccatgtgtcactggtggctctgtgtttcgaccggattgctacacaggttcgtatgaacaggggcgtcgtggaagagactagcaataatgcggaaccaggaagaacctctaacttcgatcggtacgtgcacgccacgaaaatgcagccccagtcaagtgggtcccttcggtccaacgccggtgcagaaaagggaaaggaaattgcggctaagctgaatatccatcgtgtccacggtcagcttcgaggattggataccacggatatcggtacctgcgccatcacggccatcccatttgaaaaaagcaaggtgctgttcacattagaagagctggacgaattcacattcgtcgacgagacagaccaacaggccgtccctgatgtgacccggattgggccttcccaggagaaatggggttggattatgtttgaatgtggcctggagaatctgacaatcaagggcggtcggcagtcgggggctgtcttgtataactcatttggaattatgggcaaagctagcgatacggagcgcggaggagtgctcaccagcaacaatagctcagactctcctactggttctggttacaacaccgatgtgtcagatgacaaccttccttgtgatcggacctcccccagctcagacctcaatggaaattcagtctcagacgaacaggatgagggcgtcgagtctgatgacctcaagaaggatctgccactgatgccccctccccctgacagttgttctatgaagttgacaattaaggaaatatggttttccttcgcggctcccaccaatgtacgtagccatacacatgcctttagccgccaactgaatctgctgtctactgccactccggcagtgggcgcatggctagtcccaatagatcagcttaaaagtagcttaaacaagctggagaccgaaggtaccctgcggatttgtgcggtcatggggtgtatcatgaccgaagcgctggaaaataaatccgttcatttcccgctccgctctaagtataatcggctcaccaaagtcgctcggttcctgcaagagaatccctcttgtttgctgtgtaatatccttcaccactacctgcaccaggccaattacagcatcattgatgacgccacgatgtccgatggactgccagccctggttaccctgaaaaagggactggtggcactcgcaaggcagtggatgaagttcatcgtggttacgccagcttttaagggggtgtccctccatcggcctgcacagccacttaagccacagattgcgatggaccatgaacacgaggacgggcttgggttagataatggcggagggctgcaaagcgatacatcagccgatggtgctgaatttgaatttgacgccgctacagtatcagagcacaccatgcttctcgagggcaccgctaaccgccctccgcctggcagtagcgggccagtgacaggcgcagagattatgcgcaagctgtcgaaaacccatacccactccgattcagcattgaagatcaaaggcatccacccctatcattctttaagctatacctccggcgacactgccactgacagccccgtccacgtggggcgagcaggcatgcctgtcaaggatagccctaggaaggagtccctgctttcctacctgacaggatcattcccctccttacataatctgctggagggcactccacagaggtcttctgctgccgtgaaaagctctagtctgacccgcaccggcaacaccgtggcgaccgacatgctgtcagaacacccattactttcagaaccctcaagcgtgagcttctacaactggatgtcaaacgccgtgggcaatagaggtagtgtgcttcaggagtctccggtcacaaaatcggggcacaactccctgcctacaggtgtcgcccctaatctacccacaattccaagtgcttccgacttcaacaccgtcctgtcttccgaccagaatacactggacggcacccattctcagcactccacgtcacaggatgatgtcgctggtgtggaagaagcaaaccaaggtttccctgctgtgcagctcgctgatgcccaagtggtgtttaaacccctgctgtcacacaccggcattcagtcccaggacactatgccattctgctatcgcatgtacttcggagagcacctgagtttctcaggcaccctggattgcctgagggcagacatagttgactcggatactgctaaagaaaggaagggtaaacgagctcggaggcagggacacgtcaacttacccccactggaatttaaaccggctttgatgctggggacattttcgatctccgcggtggttatggagaagtctgtgtgcacaccgcagaattccaccagcgcgctttctttccatgacttgtccaaacggtactacaatacatttcactgtaactttaccataagctgtcagagcatcagccagcatgtagacatggcattggtcagactcatccaccagtttagcaccatgatagacgacatcaaagcaacccagactgatattaaactgtcccgttacactgcgggttctgcatcccctaccccaacattcaagacccggaaacaccgggactttagatcatcggatttctcaagatctagccggggttctctgaacggcggaaaccgtgtgaacaatgctaaaaacaaacggacaaacaacgagaacaataaaaaagaatcacggaataagaactccctaggcaggtcggagcgtaggacctcgaaagtgtccagaaagggatctaaggacgtagtcgatcacatgaccatccatatggacgatagcgacagcattacagttagcgagcagagtgagccatccgccgagtgttggcagaacatgtataagctcctcaatttctactcccttattagtgaccccactggaatactggagaaaagctcagaaacattcgggcctgccggagtccgctccccaactgaaccgacttgcaaggtggtgtttgaaaacgagcaggacaactccagtctgactaaaactcagcgaaaacgatcgcttgtgacctctgagccacagcacgtcaccctcattgtgttcgggattgggatggtgaatcgcacccacctggaagccgacatcggaggtctgaccatggagtccgaattaaaacggatccacggatctttcacactcaaagagaagatgaaggacgttctacaccagaagatgactgagacttgcgccaccgcccacattggtggcgttaacattgtgctcctagaggggatcacacccaacattcagttagaagactttcccaccagccccaccagcacggcaaagcaggagtttctgacagttgtaaaatgttccatcgcaaagtcacaggccctgtattctgcccagagagggctgaaaacgaacaatgcggctgtctttaaagtcggcgcaatttcgatcaacatccctcaacacccagccaccctgcattcaatgatggtcagatctagtcatcagctcagtaaacagatctcagatctgatcagacagccctctaccgctccacagcccgtcaaggaggatatcgccacccctttacctagcgaaaagacccccaccagcgtcaatcagaccccagtcgagacgaatgaatttccccagctgccagagggcctggaaaagaaaccaatcgtgctgaagtttagcgctatgctcgacggaatcgctattggtgctgccctcctgccctctcttaaagctgaatacaaaatgggtcgcatgcgaagccacggcatgaccggtgcacagacacggttcaccttcgaactgcccaaccatcggctgagattcacgtctaaggtatccgccaccgatatgtctacaatccccccaagcgctagtcttaacttgccgcctgtgaccatgagcgggaaatacataatggaagagcacgacagctattccgaccaagtgtggtcgatcgacgaacttccctctaagcagggctattatctgcagggtaactacttgcgctgcgtagccgaggtgggatcgtttgagcataacctcactaccgatctgctgaaccatctggtgtttgtgcagaaagtatttatgaaggaggtgaatgaagtcatccagaaagtgtctggcggagaacagcctatcccactttggaacgagcacgacggaacagcagatggcgataagccgaaaatactgctttactccttaaacctgcaattcaagggcattcaggtcaccgcaactacaccaagcatgagagcagtaaggttcgagaccggcctcatcgaactggaactgtcgaatcgtcttcagactaaggctagtcctggaagctcctcttatctgaagctctttggcaagtgccaggtagacctaaacctagctttagggcagatcgtgaagcaccaggtatatgaggaggcaggctctgactttcatcaagtggcatacttcaaaactagaattggcttgcgcaacgccctcagggaggagatatcaggatcttccgatcgagaggccgttttgataactttgaatcggcctatcgtgtacgcacaacctgttgcctttgacagggctgttctcttttggctgaactacaaagccgcttatgataactggaacgaacagcggatggcgctgcataaggatatacacatggctaccaaagaagtggtggacatgctgccagggatccagcagacaagtgctcaagcctttggcacactcttcctccagctcacagtaaatgatcttggaatctgtctaccaatcaccaatacagctcagtcaaaccatactggagatttggatactgggagtgctttggtgctaacaatcgaatcaacattgattactgcatgttcttcggaatcattggtcagtaaggggcatttcaagaatttttgcattagatttgccgacgggttcgagacatcatgggatgactggaaaccagagatccacggagacctcgttatgaacgcttgcgtcgtccccgacggcacctacgaggtgtgcagcaggacaacgggtcaagccgcagccgaaagcagctccgctgggacatggacactgaacgtgctctggaaaatgtgtggtatcgatgtccatatggacccaaatattggcaagcgactgaacgctctcggtaataccttgaccactctgactggagaagaggacattgatgacatcgccgacctcaacagcgtgaacattgcggacctctcagacgaagatgaagtcgacacaatgtccccaactattcacacagaggcaacagactatcgcagacaggccgcttctgcctcacagccaggagagcttcggggtcgcaaaatcatgaaacgcattgttgacatacgcgagcttaacgagcaggcgaaggtgattgacgacctgaagaagctgggcgcttccgaggggactatcaaccaagagatacagcggtaccaacagctggaaagcgtggccgtgaatgacatccgcagagatgtccgcaaaaagttgaggcgctcctccatgagggccgctagtctgaaagacaaatggggcctgagctataaacccagctatagccgttccaagtcaatatcagccagtggtcggcctcccctgaagaggatggagcgggctagcagtagggtcggtgaaacagaggagctccctgagataagagtcgacgctgcctccccaggtccgagggtgactttcaacatccaggacacgtttccagaagaaacagaactggatctgctttcggtgaccatcgagggaccatcccattatagctccaattcagagggcagttgctcagtattctctagccctaagactcccggtggcttctcccctggaatccctttccaaaccgaggagggcaggagggatgatagcctgtcttcaacatccgaagattctgaaaaagacgagaaagatgaggaccacgagcgcgagcggttttatatttaccggaagccgtcccacacctcccgcaagaaagccaccgggttcgccgcagtccaccagctgtttaccgaaaggtggcccacgactcctgtgaacaggagtctgagcggcactgctactgagagaaacatcgactttgaactagacatccgagtggagattgactcaggtaagtgcgtgctccacccaaccacgctgctccaggagcacgatgatataagcctgcggagaagttatgaccggagcagcagatcactcgatcaggactccccaagcaagaagaagaaatttcaaaccaattacgccagtactacacacctaatgaccggcaagaaagtgccgtcttccttgcaaactaaaccatcagacctagaaaccacagtgttttacatccctggcgtggacgtcaaattgcactacaatagcaagacgcttaaaacagaatccccaaatgcgtcacggggtagctctttacccaggactctgtctaaggagagcaaattgtacggtatgaaggattccgccacgtccccccctagccctccactgccgtctactgtacagagtaaaaccaataccttactgccaccacagcctccacccatcccggcagcaaaaggaaaggggtcaggcggtgtcaagaccgctaagctctatgcatgggtagcactgcagtctttaccagaagaaatggtgatatctccttgccttctggactttttggagaaggcactcgagacgattcccattactcccgtagaacggaattacactgccgtatcctcccaggacgaagacatgggccattttgagattccggacccgatggaagaatcaacaacatctttagtgtcaagtagcactagtgcttattccagtttcccagtcgacgtagtcgtctatgtacgtgttcagccgagtcagattaaatttagttgccttcctgtctcgcgggtggaatgtatgctcaagctgccctctctggatctagtcttttcctctaacagaggcgaacttgagacgctcgggaccacctatccggcagaaacgctgtctcctggtggaaacgccacccagagtggtaccaaaacatcagcctcaaagactggaatccctggctcaagcgggctggggagtccgctgggaagaagtcgacattccagttcacagtccgaccttacaagctcctcatcctccagttctgggcttagcttcaccgcctgtatgagcgacttttctctatatgttttccacccatacggtgctgggaaacagaagaccgctgtatccgggttgaccccaggctctggcggtctgggtaatgtcgatgaagaacccacctctgtgaccgggagaaaagatagtctctctattaacctggagttcgtgaaggtgtccctgagtaggattagacgcagtggaggagccagcttctttgagagccagagcgtatcaaagagcgcatccaagatggacacaactctcattaatatcagcgccgtctgcgacatcgggtccgcctcgttcaaatatgatatgcgcaggttatccgagatcctcgcctttcctcgcgcttggtaccgccgaagtattgccagacggcttttcttgggggaccagacaatcaatttgcctacatccgggccaggaaccccagactcgattgagggcgtcagtcagcacctctccccagaaagtagccggaaggcgtactgtaaaacctgggagcagccatcccagtccgcctcttttacgcatatgcctcagagcccaaacgtgttcaatgaacatatgaccaattccaccatgagccccggaaccgtgggacagtccctgaaaagcccagccagtattcgctcccgttccgtgtccgattcttcagtgccacgacgtgactcgctgtctaagacttcaacgccatttaacaaaagtaataaagcggctagtcagcagggcacaccatgggagacactggtggtgtttgcaattaacctaaaacaactgaatgtgcagatgaatatgtcaaacgtcatgggcaatacaacctggactacaagcggacttaaaagccagggccgtctgagcgtgggttctaacagagatcgagagatttctatgtccgtcgggcttggcagaagtcagctggatagcaaggggggagtcgtcggaggcaccatcgatgtgaatgctctggagatggtggctcacatctccgaacaccctaatcagcagccgtcccacaagattcagatcaccatgggtagtaccgaggctcgcgttgattatatgggaagcagcatcttgatgggcattttttccaatgccgacctcaaacttcaggatgaatggaaggtaaatctgtataataccttggacagcagtattacagataaaagtgagatcttcgtgcatggggacctgaagtgggacatttttcaagtgatgatttctcggtcaaccacaccagatctgatcaaaataggaatgaagttgcaggagttttttactcaacagttcgacaccagcaagcgagcactatcgacttggggaccagtcccctatctgccgcctaagacaatgacatccaatctggagaaaagctcgcaggaacagctgcttgatgcagctcatcatagacactggcccggagtattgaaagtggtgtctggatgccacatttccctgtttcaaatccctcttcctgaggacggaatgcagttcggcggatccatgtcactgcatggcaatcacatgacgctggcttgtttccatggacccaatttccgaagcaagagttgggccctgtttcatttagaagagccaaatatcgcattctggacagaagctcagaagatctgggaggatggatcgtctgaccactccacatacatcgttcagaccctggactttcacctcggacataatacaatggtaaccaaaccctgcggggcactggagtcacccatggctacaattaccaaaatcaccagacgaaggcatgagaaccctcctcatggcgtagcaagtgtgaaggaatggttcaattatgtcaccgccacaaggaatgaggagctgaacctgctgcgtaatgtggacgccaacaataccgaaaacagcacaaccgtgaagaattcttccctgctgtctgggttcagaggtggtagctcttacaatcacgaaacagaaacaatcttcgcattgcctcgcatgcagctcgactttaaaagcattcacgtccaggaaccccaggagcctagtctccaggatgctagccttaagcccaaagttgagtgcagtgtcgtcactgaattcaccgatcacatctgcgttactatggacgctgagctgataatgttcctgcacgacctcgtgagcgcctatctgaaagagaaggaaaaagcaatctttcctccccgtattctttccacccggcctggtcagaagtctcccatcattattcacgatgacaattctagtgataaggacagggaagattccattacctatacgacagtggactggcgcgacttcatgtgcaatacctggcatctcgaacccactttgcgcctcattagctggactggccgaaagatcgaccctgtaggtgtcgactacatccttcaaaagctggggttccatcatgctcgtacaactatcccaaaatggctgcagcgcggtgttatggaccctctcgacaaagtgttaagtgtactcatcaagaaactgggcacagccttgcaggatgagaaagagaaaaaaggcaaggacaaggaagagcactaa

SEQ ID NO: 236624 - DNA, 1287 bp, synthetic construct
  misc_feature 1..1287: note = Description of Artificial Sequence: Synthetic coding sequence
  source 1..1287: mol_type = other DNA
atgggtggcctgttttctcggtggagaactaagccttcaacggtggaggtattagagtctatagacaaggagattcaggcgctggaggagttccgggagaaaaatcaacgactccagaagctatgggtcggcaggcttatcctatattcatcagtcctgtatcttttcacgtgtctgatcgtttacttgtggtatcttcccgacgagttcaccgccaggcttgctatgaccctgcccttctttgcatttcctctcattatttggtctatccggaccgtcattatcttctttttctcaaaacgaacagagcggaataacgaggcccttgatgatctgaaatcccagaggaaaaaaatccttgaagaggtcatggagaaagagacctacaaaactgcaaaactcattctcgagcgctttgacccagacagcaaaaaggccaaagaatgtgaaccaccgagcgctggggctgctgtgaccgcaaggcctggccaagagatcagacagcgcaccgccgctcaacggaacctgtcccccacgcctgcaagccctaatcagggtccccctcctcaggtgcccgtatcacctgggcctccaaaagatagtagcgcacccggtggaccacctgaaagaacggttaccccagcactctcgagtaacgtcctgcctaggcatcttgggtcgcctgccacatccgtgccaggcatgggactccaccctccagggcctcccctcgctaggcctatcttacctagagaacgcggtgccctggataggatcgtggagtacctcgttggggacgggccacaaaaccgctacgccttgatctgccagcagtgctttagccacaacgggatggctctcaaagaagagttcgagtatatcgcatttaggtgcgcttattgctttttcctgaatcctgctcgcaaaacgcgacctcaggcccctagactgccggagttttcctttgagaagcggcaggtcgttgaagggtcctcgtctgtgggaccactgccctctggttcggtactgagtagcgataatcagttcaacgaagaatccctggaacacgatgttttagatgataacacagagcagacagatgataaaatccctgccaccgaacagacgaatcaagtgatcgagaaggcaagcgattctgaggagcctgaggaaaaacaggaaaccgagaatgaggaggcctcagttatcgagactaactccacagtccctggggcagactctatccctgatcctgagctatcaggcgaatctctgacggccgaatag

SEQ ID NO: 236625 - DNA, 2718 bp, synthetic construct
  misc_feature 1..2718: note = Description of Artificial Sequence: Synthetic coding sequence
  source 1..2718: mol_type = other DNA
atggacagtaccgcttgtctcaagagcctattgctcaccgtctcacaatataaagcagttaagtccgaggctaacgccacgcagctgctgcgtcacctcgaggtcatcagcggtcagaaactgacgcggctctttacctccaaccagatcttgacctcagagtgcctgtcgtgtctcgtcgagctgctggaagatcctaacatcagcgcatcccttatcctttctattatagggctgcttagtcagctcgctgtggacattgagactcgcgattgtttacagaatacgtataatttaaactctgttcttgctggagtcgtgtgcaggtccagccataccgactccgtgtttctgcaatgtatacaactgctgcagaagctcacttataatgtcaagatcttctacagcggagcgaacattgacgagcttatcacgttcttgatcgaccatatccagtctagcgaggacgagctgaagatgccctgtctgggacttttggccaacttgtgcagacacaacctgagcgttcaaacgcacataaagactctgtcaaacgtcaagtcattttatcgcacattgatcaccttactcgcacattctagcttaacagtggtggtcttcgcgctttcaatcttgagctcactcacactgaacgaggaggttggggagaaacttttccatgccaggaacatccatcagaccttccaactgatattcaacattcttattaacggtgatggcacgctcacccgtaagtactcggtggacctcctgatggacctgctaaagaaccctaaaattgccgactatttgaccaggtacgaacatttctcatcttgcctgcatcaggtgcttggactactgaatgggaaagacccggactccagctctaaagtgctggagctgctgttggcattttgttcagttacccaactgcgccacatgctgacgcagatgatgttcgagcaatcccccccagggtcagcaacactcggatctcacacaaagtgtctggagccaacggttgctctcctgaggtggctgtctcagcccttggatggctcggagaactgctcagttttggctctcgagctgtttaaagaaatttttgaggacgtgatcgacgcagctaactgctcctcagctgatagattcgtaacacttctgctccccactatcctggatcaactccagtttactgagcagaatctcgacgaagcgttgacaagaaagaagtgtgaaagaattgcaaaagctattgaggtactactcaccctctgcggtgatgatacactgaaaatgcacatcgccaagatccttacaacagtaaaatgtacgacactgatagagcagcagttcacgtacgggaaaatcgacctcggcttcgggaccaaggtcgccgattcagagctgtgtaagctggctgcagacgttatcctgaagactctcgacctcattaataaactcaaacctctcgtccccggtatggaggtgtccttttataaaattcttcaggaccccagactgattacccccctggcctttgcgctgacgtcagataatagggaacaggttcagtcggggctcagaattctactggaggctgccccactccctgattttcccgctctagtgctgggagagagcatcgcagccaacaatgcttacagacagcaggaaaccgaacatatccccaggaagatgccctggcagtcttctaatcacagctttcctaccagtattaaatgtctgacaccccatctgaaagacggagtgcccggactgaatatcgaggaactgatcgagaagctgcaatcaggaatggttgtgaaagaccaaatatgcgacgtcaggattagcgacattatggatgtttacgagatgaaactgagtactctggcatctaaggaatcacgcctgcaagatcttctcgagactaaagcgttagctctagcacaggcagatcgattaatcgcccagcacaggtgccagaggacgcaggctgagacggaagccaggacgctcgcaagcatgctgcgcgaagtagaacggaagaacgaagagttgtccgtgctccttaaagcccagcaagttgagagcgagcgggcacagagtgacatagaacacttgtttcagcacaatagaaagctagaaagtgtcgccgaggaacacgaaattctgacgaaatcttacatggagttgctgcagaggaacgagtccaccgagaaaaagaacaaggatctccagatcacctgtgactccctgaacaagcagattgaaacagttaagaaacttaatgaaagcctcaaggaacagaatgagaagagcattgcccaactgattgagaaagaggaacaaagaaaagaggtgcagaaccagctggtcgatagggaacacaaactggccaaccttcatcagaagaccaaagttcaagaagaaaaaataaagaccctgcagaaagaaagagaggacaaagaggaaacgatcgacatccttcgtaaggagctgtcaaggaccgaacagattcgtaaggagttgtcaataaaggcatccagcctggaggtccagaaagcccaactggaaggacgtctcgaggagaaggaatcgctggtgaagctgcagcaggaggagctcaacaagcattctcacatgattgccatgattcacagcctctctgggggaaaaatcaaccccgaaacagtaaatctctcaatttag

SEQ ID NO: 236626 - DNA, 2370 bp, synthetic construct
  misc_feature 1..2370: note = Description of Artificial Sequence: Synthetic coding sequence
  source 1..2370: mol_type = other DNA
atgctggagggaaactatcaggtaatgttaaaatctggcacaaacattctgtactggcgaaccacagggattctcatgggcagtaaggctgtgaagccagtactagttaagaatatcaccatagaaggggttgcctacaccagcgaatgctttccatgtaaacccggaaccttctcaaacaaacccggtagcttcaactgccaggtgtgcccacgcaacacttactctgagaagggcgcaaaggagtgcattaggtgcaaggatgattcacagttcagcgaagagggcagcagcgagtgcactgaaaggcccccatgtactacgaaggattactttcaaatacacaccccttgtgatgaagaaggaaagacacaaatcatgtacaagtggatagaacccaagatatgccgcgaggatctgaccgacgccatccgcttgcctccatctggtgagaaaaaagattgtcctccatgcaatccaggattctacaataatggcagtagctcctgtcacccatgtcccccaggtacattttccgacggaactaaggagtgcagaccgtgtcccgctgggacggaacccgcacttggattcgagtacaaatggtggaatgttctgcctggaaacatgaaaacctcttgtttcaacgttggaaacagcaaatgcgatggcatgaacgggtgggaagtcgctggagaccatatccaatctggcgctggagggtccgataacgactatctgatcctgaacctgcacatccccggattcaaacctcccacatcaatgacaggggctacgggcagcgagctgggcagaataaccttcgtgtttgaaaccctctgctccgccgattgtgtcctttacttcatggttgacatcaatagaaaatctaccaacgtcgtggaatcttggggtggcaccaaagagaaacaggcatacacacacattatctttaagaacgctacctttacttttacctgggcgtttcagcgcaccaatcaggggcaagataacagacgattcataaacgacatggtaaagatatattcgatcaccgccacaaatgccgtagacggggtcgccagttcttgcagagcatgcgctctgggctctgagcaatctgggtcatcatgcgtgccatgtccacccggacattatattgaaaaggagaccaaccaatgtaaagagtgtccccctgacacgtatttatcaatacatcaggtatacggtaaggaagcctgcatcccctgtgggccagggtccaagaataaccaggaccattcggtttgctattctgactgtttcttttatcacgaaaaggaaaaccagtctctccactacgactttagcaacctctcttcagttggcagcttaatgaatggtccctccttcactagcaagggcacaaaatatttccatttttttaacatatcactgtgcgggcatgaaggcaaaaagatggcactgtgtaccaataacatcaccgactttacagttaaggagatagtggctgggtccgatgattatactaatctcgtcggcgcattcgtgtgccagagtaccataattccatcagaatcaaaagggttccgggcagcactgtcatctcagtcaatcatactggcagatacattcattggcgtgacagtggagacaaccctcaagaacattaatatcaaagaggacatgtttccagtccctacaagtcaaatcccggacgtgcattttttttataaaagttctacggctacaacaagttgtatcaatgggcgttctactgctgtgaagatgcggtgtaaccctaccaagtctggcgctggcgtcattagcgtgccaagtaaatgcccagccggtacatgcgatggctgtacgttttacttcctttgggaaagcgcagaagcatgtcctctgtgtactgaacacgatttccacgagatagaaggcgcatgcaaacggggtttccaagagacactttatgtctggaatgagccaaaatggtgcatcaagggcattagcctccccgagaagaaacttgccacctgtgagaccgtcgacttctggctgaaagtaggtgcaggggtgggcgcatttacggccgttttgctggtagccttgacttgctacttctggaagaagaatcaaaagctggaatataagtattccaagcttgtaatgaccacgaactcaaaagagtgtgagctgcctgctgccgacagctgtgccatcatggaaggcgaggataacgaggaggaagtagtgtactctaataaacagtctctcctgggtaagctcaaaagcctggctacgaaggaaaaggaggaccactttgagtccgttcaacttaaaacctctcgttcgcccaatatttag

SEQ ID NO: 236627 - DNA, 336 bp, synthetic construct
  misc_feature 1..336: note = Description of Artificial Sequence: Synthetic coding sequence
  source 1..336: mol_type = other DNA
atggtgcgaaccaaggctgatagcgtgccagggacctaccgcaaggttgtcgccgctagagctccgcgtaaagtccttgggtctagcacatcagccactaacagtacgtctgttagcagccggaaagctgagaacaagtatgccggaggaaacccagtgtgcgtaagacccacacctaaatggcagaagggcattggtgagttctttaggttgtcaccaaaggattcagagaaagagaatcagatcccagaggaggccggttcttctgggctgggcaaagccaagaggaaggcttgcccattgcaaccagatcacacaaacgatgagaaggagtag

SEQ ID NO: 236628 - DNA, 2772 bp, synthetic construct
  misc_feature 1..2772: note = Description of Artificial Sequence: Synthetic coding sequence
  source 1..2772: mol_type = other DNA
atgagccaatttaagcgacagcgcataaacccattacccggaggaaggaacttttcaggtactgccagtacctctttactgggcccaccgccagggcttctgacccctccggtagctactgagctcagccaaaatgcgcgacacttacagggaggcgaaaagcagcgtgtgttcacaggtatcgtcacaagcctccacgattactttggagttgtcgatgaagaggtattctttcagttgagcgtggtgaaaggacgtctaccccagctaggcgaaaaagtgctcgtgaaggctgcatacaatcccggacaggcagtaccctggaatgctgtgaaggtgcagacgctcagtaatcaaccactgctcaagtcgccagcgccacccttactgcacgtggcggctttggggcagaagcagggcattttaggtgctcagccgcagcttatctttcagcctcaccgaatcccacctctgttcccccagaagcctctgagcctctttcagacgagccatacattacacctgagtcacctaaacagatttcccgcacgcggacctcatggcagactcgatcagggcaggagcgacgattacgattcaaaaaagaggaaacagcgtgccggaggggagccatggggggcaaagaaacccagacacgatttaccgccatatagagtccacctgactccctacactgtggactctccgatctgcgattttcttgagctccagcgacgctatcgttccctgctggtgcccagcgactttctgagcgtccacctcagctggcttagcgccttccccctgtcccagcccttctcacttcatcacccaagccgcatccaggtttcgtcagaaaaggaggcagcaccggatgccggtgccgagcccattacagctgattctgaccctgcttatagttcgaaggttcttctcctgtcgtcccctggactcgaggagctgtacaggtgctgtatgctctttgttgatgatatggctgagcccagggagacaccagagcaccccttaaagcagatcaagttcctgctgggcaggaaggaggaggaagccgtcctagtggggggagaatggagcccatccctcgacggactggatccccaggcggaccctcaagtactggtgcggacggccatccggtgcgcacaggcacagaccggtatagatctgtctggctgcacaaaatggtggcggttcgccgaatttcaatacttgcagccagggccaccgagaaggttgcagacagtcgttgtgtatctgcctgacgtgtggacaatcatgcccacgttggaggagtgggaggccctgtgtcaacagaaggccgcagaagcagcccctcccacacaggaggcccaaggcgaaacagaaccaacagagcaagcccctgacgccctcgagcaggctgcagatacctcccggaggaacgctgaaacccctgaagcaacaacacagcaggaaaccgacacggacctgccggaggcgccaccacctcccctagagcccgcagtcatcgcgagaccgggatgcgttaatttaagcctgcatggtatcgtcgaagaccggcgtcccaaggagaggatttctttcgaggtcatggtgctcgccgagctctttctggagatgctccagcgagattttgggtacagagtgtacaaaatgctacttagcttgcccgaaaaggtggtatctccacctgagcctgagaaggaagaagccgctaaggaggaggccacaaaggaggaagaggctattaaagaagaagttgtcaaagagcctaaggacgaggcccagaatgaaggtccagccaccgagtcggaagccccactgaaggaagacggactgttgccaaagccactctcctccggcggagaggaggaggagaagccgcgaggcgaagcctcagaagatctctgtgagatggcactcgaccctgagttgttactgctccgagatgacggggaggaggagttcgccggagcgaaactcgaagactcagaggtgcgcagtgtggccagcaaccagtccgagatggaattttcttcactgcaagacatgcctaaagagctggacccctccgcagtgctacccctcgactgtctcttggcattcgtgttttttgacgccaactggtgcggttacctacatcgtagagacctggagaggatactgctcacccttgggatacgtctgtccgccgagcaggccaaacagctggtaagtcgagtcgtcacacagaatatatgccaatatagaagcctgcagtactcaagacaggaggggttggatggcggattgcccgaggaagtcctgtttgggaacctggacttactgccacccccaggtaagagcaccaagcccggagcagccccaacggagcataaagccttagtgtctcacaatggctccctcattaacgtcggttccctgttgcaaagggccgaacaacaagactccggtagactgtatctcgaaaacaaaatccacactctggaactgaagcttgaagagtcccataacagattttctgcgacagaagttacaaacaaaaccctggcagccgaaatgcaggagctgcgggtgagattagctgaagctgaggaaaccgcgcgaacggctgaaaggcaaaaatcacagctgcagcgtctccttcaggaattgcgcaggcgtcttactcccctgcagctggagatacagagagtggtggaaaaagcggatagctgggtcgaaaaagaggagcccgcaccatccaactag

SEQ ID NO: 236629 - DNA, 3480 bp, synthetic construct
  misc_feature 1..3480: note = Description of Artificial Sequence: Synthetic coding sequence
  source 1..3480: mol_type = other DNA
atgttggattttctggccgagaacaacttgtgtggacaagccatcctcagaatcgtttcttgtggtaatgctataattgcagagctcctccgactgtctgaatttatccccgctgtgtttcgattgaaggatcgggctgaccagcagaagtacggcgacattatatttgacttcagctatttcaaaggacctgagctctgggagagtaaactggacgctaagccagaacttcaagatctggatgaggagttccgcgagaacaacattgaaatcgtgacaagattttacttggctttccaatctgttcacaaatacatcgttgatctgaacagatatctggacgatctgaacgagggagtgtatattcagcaaacccttgagactgttctgttgaacgaagacggtaagcagttactctgtgaggcactgtacctgtacggtgtgatgcttttagtgatcgatcaaaagatcgaaggtgaagtgagagaaagaatgttagtgtcttactacaggtactcggccgctagatcgtcagctgactcgaatatggacgatatttgtaagctcctgcgctctactggttactccagccaaccaggggctaagcgcccttccaactaccccgaaagctattttcagcgcgttccaattaacgagtcattcataagtatggtaatcggacgtctcaggtctgatgacatatataaccaagtctccgcataccctttaccggagcacaggtcaacagcacttgctaatcaggccgctatgttgtatgtgattttatacttcgagcctagcattctacacacccatcaggccaagatgagggaaattgtcgacaaatacttccccgataattgggtgatctccatttacatgggaattacagtcaatctggttgatgcttgggagccctacaaggctgccaaaacagcattaaacaacacactggacctatccaatgttcgcgagcaagcatctaggtacgcaactgtaagtgaaagagttcatgcccaggtgcagcaatttctcaaagagggatacctcagagaagaaatggtgctggataacatccccaagctgttaaattgtctcagggattgcaatgtggctatccgctggctgatgttacatacagctgattctgcctgtgatcctaataacaagaggctacgccagataaaagatcagatcctgaccgatagcaggtacaatcctcgcatcttgttccagctcctgcttgacacagcgcaatttgaattcattttgaaagaaatgttcaagcagatgttgtcagaaaaacagacaaagtgggagcattacaagaaagagggatccgaacgcatgaccgagctggccgatgtgtttagtggtgtcaaaccgctgacacgtgtagagaagaatgagaatctccaagcctggttccgcgagatatctaagcagatcttaagtttaaattatgacgattcaacagctgcaggacgcaagaccgtgcagttgatccaggctctggaggaggttcaggagttccatcagctggagtcaaaccttcaggtgtgccagttcctcgccgacacaaggaagtttctccatcagatgatcagaactatcaatatcaaggaagaggtgttgattaccatgcagatcgttggagacctttctttcgcgtggcagctgatagacagctttacttccataatgcaggaatcaattcgagtgaatccaagtatggtcacaaaacttcgcgctacattcttaaaactagccagtgcattggacctcccactacttcggattaatcaggcaaactctcccgacctcctgagcgtcagccaatattattctggagagctcgtgagctacgtgaggaaggtgctgcagattattccggagtccatgtttacttccctccttaagatcattaagttgcagacacatgacatcattgaggtgcctaccaggctggacaaagataagctgcgtgactacgcccagctcggccctaggtacgaggtggctaaactgacacacgccatcagcatctttactgaggggatcctgatgatgaaaaccactttggttgggattattaaagtggatccgaagcagctgctcgaagatgggatcagaaaagagctggtgaaacgggtggcctttgctttgcacagaggactcatcttcaaccctcgcgctaaaccaagcgaactcatgcccaaactgaaggagctgggcgcaactatggacgggtttcatcggtcatttgagtatatccaggactacgtgaacatatacggtttgaagatttggcaggaagaggtttcccgtattataaattacaacgtagaacaggaatgcaataattttctgcgcaccaaaatccaagattggcagtcgatgtaccagtctacgcatataccgattccgaaattcacccctgtggatgagtctgtcacttttatcggccgtctttgtagagaaattctgcggatcaccgacccaaagatgacatgtcacattgaccagctcaacacatggtacgatatgaagacacaccaggaagtcacttcatcacggctcttttcggaaattcagaccaccctgggaacgttcggcctcaatggtctggaccgcctactgtgcttcatgatcgtaaaggaattacagaatttcctatcaatgttccaaaaaataattctcagagatcgcaccgtgcaggacactctgaaaacgttgatgaacgcggtgtcgccattgaaaagtattgtggctaatagtaacaaaatctacttctctgccatcgcaaagacacagaagatttggacagcttacctggaggctattatgaaagtgggacagatgcagatcctgcggcaacagatcgccaacgagttgaattactcttgtcgatttgactccaagcatctcgccgctgccttagaaaatttgaataaagctttgcttgcagatatcgaggctcattaccaggacccatctctgccctaccccaaggaagacaacaccctcctgtatgaaattacagcgtatctcgaagcggctgggatccacaacccactaaacaagatctatattacgacgaaaagactgccctatttccctattgtaaatttcctgttcttaatcgcccagctcccaaaactccagtacaataaaaatttgggtatggtctgccgtaagcccaccgaccccgtggactggcctcctctggtattaggacttctcaccttactgaagcagtttcactcaagatatactgaacaatttctggctctgataggccagtttatctgcagtacggttgagcagtgcacctcacaaaaaataccagagattcctgccgatgtcgttggcgcactgctctttttggaagactacgtccggtataccaagctgcccaggcgagtcgcggaagcacatgttccaaactttatttttgacgagttccggacggtactctag

SEQ ID NO: 236630 - DNA, 2424 bp, synthetic construct
  misc_feature 1..2424: note = Description of Artificial Sequence: Synthetic coding sequence
  source 1..2424: mol_type = other DNA
atgttctccgccggtgctgagtccctgctgcaccaggcgagggagattcaagatgaggagttgaagaagttctgttcccgaatctgtaagttgcttcaggccgaagatctcggcccagataccttagatagccttcagaggttgtttctgattatctccgccacgaaatatagccgtcggctcgagaagacatgtgtggacctgctgcaagcaacactggggctccctgcctgcccggaacagcttcaggtgctgtgtgcagccatcctccgcgaaatgagcccctctgattccctcagccttgcctgggatcacacccagaacagtcggcaactgagcctggtagctagtgtgctgctggcccagggcgatagaaatgaggaagtacgcgctgtgggacagggggtcctgcgcgctcttgaaagccggcaaccggaaggccctagcctacgccatctgctgcccgtgatggccaaggtggtggtcctgagtccaggaaccctgcaggaagaccaggcaacactgctgtcaaaacgcctggtggattggttgcgctacgcctcacttcagcagggattacctcactccgggggatttttttctacccctcgcgcacgccagcccggaccagttaccgaggttgatggtgctgttgccaccgatttctttacagtgcttagcagcgggcatcgcttcaccgatgaccagtggcttaacgtacaggctttttctatgctcagagcctggctcctgcactcgggtccagagggaccaggaactctggataccgacgaccggagcgagcaggagggcagtacgctcagcgtcattagcgctacatctagcgctggccgtctgctccccccacgagagaggctgcgggaagtggcctttgagtattgccaaaggttaatagagcagagtaaccgccgagccctccgtaaaggggactccgacttgcagaaggcgtgcctggttgaggctgtgttggttcttgatgtgctatgcaggcaagatccttcattcctgtatagatcgcttagttgcctgaaggccctccacggcagagtgcgcggtgatccagcttctgtaagggtgttactacccctggcccacttttttctgtctcacggcgaagctgcggcagtcgattccgaggctgtatatcagcacctctttacaagaatccccgtcgagcagttccactctccaatgctcgcattcgaattcattcagttttgccgcgacaacttgcacctgttctcaggacacctttccacactgaggctgagcttccccaacctatttaaatttctggcctggaacagcccaccactgacttctgaattcgtggctctgctgccagccctggttgacgcaggaactgcccttgaaatgttgcatgccctgctcgacctgccgtgcttgacggctgtcctagatctgcagctgcgtagcgctccagcagcctcagagaggcctctatgggacacttcgttgcgtgccccttcatgtctggaggcttttcgggatccacagttccagggactgttccagtatttgctccggcctaaggctagtggcgcaaccgaaagactggcccctctgcatcagttgctgcagcccatggccggatgcgctagggttgcccagtgcgcacaggctgtacccactctgttacaggcgttttttagcgctgtgacacaggttgcggacggctcgctaatcaaccaactggccttgctccttctcggccgtagcgattccctgtaccctgcccctggctacgccgctggggtccatagcgtgctctcttcgcagttcctcgctctttgcacgctcaagccatcactggtggtcgagctggcacgagatcttcttgagttcctggggagcgtgaatggtctttgcagccgggcaagcctggtgaccagtgtagtctgggccataggagagtacctctccgtgacatacgatagacgatgcactgtggagcagatcaacaagttttttgaagcgctcgaggccctgctattcgaagtgactcagtgtaggccgtcggctgccctcccacgctgtcccccacaggttgtcactgttctcatgacaacattaacgaagctggcttccagatcccaggatttgatacccagggcgtctttactgctttctaagatgaggaccctggcacacagtccggcaacttcgtctactcactccgaagaaggcgcagaggccattaggacaagagccacagaattgctgaccctgttgaagatgccctcagtggcccaattcgttctaaccccctcaacagaagtttgctcacctagataccatcgtgatgcgaatacagccctgccccttgccttgcggacagtgtcacgtctggtggagagagaagcgggactgatgccaggctag

SEQ ID NO: 236631 - DNA, 4086 bp, synthetic construct
  misc_feature 1..4086: note = Description of Artificial Sequence: Synthetic coding sequence
  source 1..4086: mol_type = other DNA
atgggtgcagccggtcgacaagattttctgtttaaggccatgctgacgatttcctggttgacactgacgtgtttccccggtgcaacaagtaccgtcgcagctggatgtcctgatcaaagccctgaactgcaaccatggaatccagggcatgaccaggaccatcacgtgcacattgggcagggtaagaccttgctactgacgagttccgccaccgtttacagcattcacatttcagagggtggaaaactggtgattaaagaccacgacgagccaatcgtgctgcggacgcgccacatcctgatcgacaacgggggtgagctacacgctgggtccgctctgtgtccatttcaaggaaattttaccatcattctgtatgggagggccgatgagggcatccagccagacccatattacggactaaaatatatcggagtgggaaaggggggtgcgcttgaattacatgggcagaaaaagctcagctggacttttttgaataagaccctccaccctggcggtatggccgaaggcggatacttttttgagcgctcgtggggacataggggcgtgatcgtgcatgtgatagaccctaaatctggcactgtgatccatagcgaccgattcgacacgtacaggagcaagaaagaaagcgagcgccttgttcagtacctcaacgcagttcccgatggcagaatcctttctgtggccgtgaacgatgaaggaagccgaaatcttgacgacatggcacgcaaggccatgacgaagctaggttcaaaacacttcctccatctgggtttccggcacccctggtcatttctgaccgtgaaaggaaacccttccagctctgtggaggatcatattgagtaccatggccacagaggcagtgctgccgctagggtttttaaactgttccagaccgagcacggcgaatatttcaatgtatccctgtcctccgaatgggttcaggacgttgagtggacagaatggttcgatcacgataaggtctcccagactaagggcggtgagaaaattagtgatctgtggaaagctcatccgggaaagatctgcaatagaccaatagacatacaggctacaacgatggacggcgtcaacttatccacggaagtggtatacaagaagggtcaggattacaggtttgcatgttatgacaggggccgagcatgcaggagttatagagtccggttcctgtgtggcaagcctgtaaggccaaaactgactgtgacaatcgatactaacgttaatagtacaatcctgaatctggaggataatgtccagagctggaagccaggggacacgctggttattgcctccaccgactattccatgtaccaggccgaagagtttcaggttctgccttgtcgctcctgcgctcccaaccaggtgaaggtggccggtaagcccatgtaccttcacattggcgaggagattgacggggttgacatgagagcagaagtagggcttctgtccagaaacatcatagtaatgggggagatggaagataaatgctatccttacagaaatcacatttgcaatttctttgatttcgatacattcggcggtcatatcaagtttgccttgggctttaaagccgcacatctagaaggcactgaactgaaacatatggggcagcagctggtcggacagtaccctatccacttccacctcgcgggagacgtcgacgagcggggagggtacgacccccctacgtacatacgggatctttcgattcaccacacgttctctagatgtgtcaccgtgcacggtagcaatggcctcctgattaaggacgtggtcggatataattctctgggccattgcttttttacggaagatggacctgaagagaggaacaccttcgatcactgtctcggactgctggtgaaatcagggacgcttctcccctctgatcgcgactcaaagatgtgtaagatgatcaccgaggactcataccccggatatattccaaagccccgtcaagactgtaacgcggtctctacgttttggatggcaaaccccaataataacttaatcaactgcgctgctgcaggctccgaagagactggcttttggttcatatttcaccacgtgcccaccggtccctctgtggggatgtattcccctggatattccgagcatattccactaggcaagttttacaataatagagctcactccaattatcgagctggcatgatcatagacaatggcgtaaagactactgaagcttctgcgaaagataagcgcccatttttaagcataattagcgcgcgatatagcccgcaccaggacgcagaccctttgaaacccagggagccggcaatcatccgccacttcattgcctataagaaccaggaccacggggcatggttgcgcggaggagatgtctggctcgattcctgccgattcgcggacaacggcatcgggttgaccctggcttctggaggcacatttccatacgacgacgggtcgaagcaggagattaaaaactccctgtttgtcggcgagagtggcaatgtaggcacagagatgatggacaatcggatctggggacccggtggcttagatcactccgggaggactctcccgatagggcagaatttcccgatcagaggcattcagttgtacgatgggcctatcaacattcagaactgtacatttaggaagtttgtggctctggaggggcgtcatactagcgccctggccttccgcctcaacaatgcatggcagtcatgcccccataataatgtcaccggcattgcctttgaagatgtgcccatcacttctcgggtcttcttcggagagcccggaccctggttcaaccaattggatatggacggcgataaaaccagcgtgtttcacgacgtcgacggcagcgtgtcagaatatcccggtagttatctcacaaaaaatgacaattggctggttcgccaccctgattgtataaacgttcccgactggcgtggcgctatttgttcaggatgctacgcccagatgtatatccaggcctacaagacaagcaatctacggatgaagattataaaaaacgactttccaagccacccgctgtatctagagggagcactgacacgtagtacgcactatcagcagtatcaacctgttgttactctgcaaaaggggtacaccatccattgggaccaaaccgctccggctgagctcgcaatatggctcattaacttcaacaagggagactggattcgtgtggggctgtgctaccctagaggcaccactttctcaatactgagcgacgttcacaaccgcctactgaaacaaaccagcaaaactggcgtgttcgtgaggacgctgcaaatggacaaggtagagcagagctatcccggacggtcacactactactgggatgaagatagcggactgctgtttctgaagctgaaagcgcaaaatgagagggagaagttcgccttttgctctatgaagggttgtgagaggattaaaattaaggctctcattcctaagaacgccggagtaagcgattgcacagctactgcatatcctaagttcaccgagagagctgttgtggatgttcctatgcccaagaagttatttgggagtcaactcaagaccaaagatcattttttggaggtgaaaatggagagcagtaagcagcactttttccatttatggaatgactttgcctatattgaggtcgatggcaagaaatacccaagttccgaagatggcattcaggtagtggttattgatgggaaccagggcagagtcgtgtcccacacatcctttaggaacagtatccttcagggaatcccttggcaattgttcaattatgtagccacgatcccagataactccatcgtgcttatggcatctaaaggacggtatgtatccaggggtccttggacaagggtcctcgagaaactcggtgccgaccgcggactgaaactgaaggagcagatggcgtttgttgggtttaagggatcctttcgccctatctgggtcacattagatacagaggaccacaaagccaaaatcttccaagtcgtccctattccagttgtgaaaaaaaaaaagctgtag

SEQ ID NO: 236632 - DNA, 1866 bp, synthetic construct
  misc_feature 1..1866: note = Description of Artificial Sequence: Synthetic coding sequence
  source 1..1866: mol_type = other DNA
atggctaatgtgccatgggctgaagtttgtgagaagtttcaagccgcactggccctgtctagagtcgagttgcataagaacccagaaaaagagccttataagagcaaatatagcgctagggctcttttggaagaggtgaaggcattgctcggcccagcaccagaggacgaagatgagcgacccgaggccgaggatggaccaggcgcaggcgatcacgcactggggttgccagctgaggtcgtggaacctgagggccctgtagcccagcgggcagtgagactggctgttatagagtttcacctgggagtgaaccacatagacaccgaggaactctcggctggagaggaacacctcgtgaagtgtttgaggctgttgagaagatatcgattaagccacgattgtatcagtctctgcatccaggcacaaaacaacctgggcatcctgtggagtgagcgggaggagattgaaaccgcccaggcctatctggagagctccgaggcgctatacaatcagtacatgaaggaggtgggctccccccctctcgatccgactgaacggttcctgccagaggaggagaaactgactgagcaggagcggtccaaaagattcgagaaggtctatacccacaacctgtattatctggcccaagtctaccaacacctagaaatgttcgaaaaagctgcccactactgtcacagtacactgaagcggcaactggagcacaatgcctatcatcccatcgaatgggcaattaacgccgctaccctctcccagttctacataaacaagctctgctttatggaggcacggcactgtctgagtgcagcgaacgtgatcttcggacagacaggaaaaataagtgccacagaggatactcccgaagcagagggggaggtacccgaactctatcatcagcgcaaaggagagattgccagatgttggattaaatactgcttgactctgatgcaaaacgcccagctcagtatgcaggacaatattggcgagctcgatcttgataagcaaagcgaactccgcgctcttcgaaagaaagaacttgacgaagaagagagcatcaggaagaaggctgtgcagttcgggaccggagagctttgcgacgctatatccgctgtggaagaaaaagtgagctacctgcgtccccttgacttcgaagaggcccgagagctgtttctcctcgggcaacactacgtttttgaggcgaaagagttctttcaaatcgacggttatgtgacagaccatatcgaagtggtgcaggaccactccgctctgtttaaagtcctggctttctttgagactgacatggagcggaggtgtaaaatgcataagagaagaatcgcaatgctggagcctctgactgttgacctgaaccctcaatattatttgctggtcaacagacaaatacagttcgaaattgcacacgcttactacgatatgatggaccttaaggtcgctattgctgacagactaagggatccggattcgcatattgtgaagaagataaataacctgaacaaatccgccctgaaatactatcagctgttcctggactctctacgagatcctaacaaagtgtttcccgagcatataggagaggacgtgctacgccctgccatgttagcaaagttcagagttgctcggctctatggaaagataattaccgctgacccaaaaaaagagctcgagaacctggcgaccagtttagagcactataaattcatagtggattactgcgaaaaacatccagaggcagcgcaggaaatcgaggtggagcttgagctgtctaaggaaatggtaagcctgctccccaccaaaatggaaaggttccgaaccaagatggctctcacctag

SEQ ID NO: 236633 - DNA, 4550 bp, synthetic construct
  misc_feature 1..4550: note = Description of Artificial Sequence: Synthetic coding sequence
  source 1..4550: mol_type = other DNA
atggacaatcagcaggacaaagccatcgtggcttccgctaacggcgaaaataccctcatcaatggcgtgaaggagaacgactccgaggaccaggacgttgccatgaaatctttcgcagctctagaagcagccgctcccattcagcctactcccgtcgctcagaaggagaccctgatgtatcccagaggactgctccccctgccatcaaaaaaaccttgcatgcagagccccccaagccctttgggcctcatagaagctcctgaacacgccgctaatagcgcctcggtaaacgcgatttcactgacaagcggtatcgctaaggggctgaatacctggtctctcccgaatgagtgtgaaaaggccccttttgcaatcatggaacctgccggtatgtctgccctgaacggcgactgcctcatgcagccctccagaacatgtttaggttgttttatggagagcaaggatgcagtggatccagagccaggtatttccctgaaggttggagatctcaaccgcgactacgagacttgcgccgtcagcgacatcgggatacagtgcattaatgctggtgagaacatgaagtatggggagcaacttcttagtgaccagctgttggggttcccactgcataagtctcgggcaggggaccgcagggagaccgagaagcccgacatcgatctcgaggaccctgcccagaaatcatactacgaggccctactgctggacaaatgtaatacagaggaggccctcctcgcaaatagcaatcaggattggggatattttgagaccttcattagtgagtcaaaaatagaactgctagatctctgtagcaaaaatgagctgtccgtcaacctatttagtgaagaagatgttgacaactacatgttcgatgacgacgaatccaccttaggaagcgatgtgtgttccctgaaaatccggtacgagtccttccaagacaacgtgagagataaaaccacgcttttaatgcaggaggacgcacaattcaacttcttcccatcggtttttacaacctgcccaaagcgggagtcaaaatccggggctctcaaacagagtagcgatttcagccagttcaaggtacctgacgtgtccataatctggggcgaggaagacaaaaatttggataaaaaaaaaggcaaagaagaaggacaggaagacaagggggtggaaaagaaggatggtaaagacaacggggaaaagcctgcgcttaacaaaccttgtagcggaacagaggtggagcagcttaagaatcccaagcagggccatctggccaactctctcgaaacttccggatcattttctgatgactctagttttattgaaatttcatacgacgctatgggagagatcaaggattgcagtaggtatatggccagagatacgaatagtgggtcaagcagctctcagcaaaactacggcctgagggccaaacggaaagtaaggtactccgaggactacctttacgatgttgatagcctagagggggagaaggtcaacgagagaaaagaatggttgccagttggatccaaagaggaagatgacgacgagtggtgtcccaagaagaggcgaaaggtaactcgaaaggagccacccgtgatcataaaatacataatcattaataggttcaaaggagagaagaacatgctagtgaaactcggcaaggtggatgcttccgagactactgtaaacttgagcgaaaatcaattgaacaagtatgctaagctagcccctttgaagggtttctggcagaagaagaaaaagcagcgcaacaccaacaccgattctatcaagacacctttctcacagaagcagtcctttgaaccagggtcgttcgaggtttcttttctccccccagctcgcaagcggaaatccaagctcggcaataggcatcgcatccagcgcatcccaagcattgaaatctccgcttcgagtaaacagattagcctgtgtaatgaccagaggcacgccagtaatcataaggaggatggcggactgaaaggcacattaaagtcagctcccctcggtgctcccagttgcgcaaatggaagccacttaaatgatattaccggtcccgattcagttaaagtgaaagctcaggacactgagttcaaggggcctgagagaaaagtactgaacaaaattaaatttaaatctgaggccaggcttaagtctaagaaagtaaaagccgctggccaggaatcaaagcctatagtccaaatgtcgcccttgcttgagaaccagagtagtaaggccaacctgaaaaatgaggtgatacctggtactagcaatagcagcagactcagcgaattccacgaggcaaaggcggcaaaaagcagcacctttttgcccacaacttgcagcagcgaaatgccactgtcatctgccaatgtaacaacgaatatcccagtaatacctggcggataccttcagaccttgctggatgcaagcgacctctccaacaacacgagcatctcctacttttcccatcacagtcctgagcaaaacgaggggagtctgactcaaactgaaaagtctttcgtgcccttgcaacctacccaggattgtgtgctgacttctagctcagactccgagttgcagcagagctcccataactttaagatggaatcatcaaactataggaacgtttggcctaacaaggccacaagtggcacccaggagtttatggcagaggtctcccgggagatcgcgcctacccaaagttctgaatttggtgcgtcacaggtggtgagtatggagaacaacttgacccccacgacatacaatcccatctgcctaaatagcggcggttccaactgtaataaagtcctatacgattcaatgcaggatactcagctcccttccgatgacagctaccagctatgtcattttaacaacggcgagatctgttttccattccagcaggggcctgtgaatatggacgacgggaggctcttctccttcgactccatggccccactctcggtgtccagttcgaactactgcagcctgtctcttaaatcatgcgagaaggacggggacgacgacattacagacgacttcctggctcactgtagcccaaaactggttattcagcagagcatcgacgaaattgctcccctgaaagaatcaaccgacctgctcgacatctccaacttcacccccgataagtttaggcactcctctttaagtgagatgtcacccccagataccccgagcctaagtccacagatcacccgctgtgaaagcatgaaaaccctaggcacgctcaaggggttccaggaaggcgtgccgggtccactggattcagtcgagaaaattaaatgggactgtagtacactgagccggcaggtccagatggaggatggattcacgttgaacaatcaccagtttcagtttcacatgtttaatgatgaagattccgtgtccctgcttcagaagaacccttgtctgtccacatttaacgacccttccggacaaatctctacaaacaataaggtgagtaagtcgcgaaaaaagagcagcccttcaaagtcaggggctatgaaccagtcttcctctcagaaaaacactagaaagaaaagtctgaagggcaacaacaaaggcattgagaagccgcctggcaaaaattcacgtcaggtgcctaaatcaacaaagaaggggaaatacatggcggctatcaatggagaaaagatgcagatcggtatcggcaggggtgggagccagactaatactatctcgtccaccggcaaaactctcgccgagtgcatacaacacggagggccaatggcatccatgaaaatgccctcgcagaaagggctgagcggggactgggccctaggaaaagaatcatcgccaggatggagcgacatgtctatgggaacgaacaccaactcgctgctcgatgatgaccagcgggagtttcaggagccatcctacatcctcagcaacatcgcaagtggaatggccgatgtgcagcgattcatgatggcctctattgagcctctctgggagcctatggagcaccacggggaccccaatatattttactcccctgagagcaatagcctgaaattgaaaactcttaagattctcgcaggcactcctcaggaaagcaagaaaaaaatcaatagtgggtcacaaggggctactaagaatcaccgcagcataaagggagtctctaagtccaatggtaagacggctattggagaccctggtagagctaacatgcctggatacaatgaggattcacggagcacgttcttcgataagaaatattccaacatgtcaaccttagggaacaatgggcctacccataaaaagctctataggcataaaagctcctctaaggccctcagggacgagaagtgcaagggaaagcacatggaacgcgaacaagtgcataaagacgagtcaggtacagcgtctttcgagaagcttcgggacagtgattacaacctgctgaaggccgaaaccactttctgggtgctccctgtctttgaggaggagacaaggatctttcaaaaggacatcta

SEQ ID NO: 236634 - DNA, 4080 bp, synthetic construct
  misc_feature 1..4080: note = Description of Artificial Sequence: Synthetic coding sequence
  source 1..4080: mol_type = other DNA
atgtattcagtcgaggacctgctcataagtcatggctacaaactttcaagggacccccctgcttccagagaagataatccaaaggggagacaggcagcccgaaccggcacacgggcaggccaagggttacagaacggtcatgaagatggccctgccgctctggctcataggaagacatccgccggaaagggccacgtgtctgactctgaatcccgccgttctacaccgcgaggtcacggggagcctcagtccaccagcgcaagccgcacctcggaagccggattctgcaatcagcccccttccgcttggtcatcccatccgccaaccggaaacgaccaggcctatagaaggcgcggaaggcaggaagctagatcccagaagcctagggagcatgagaatctggaggcacggggaatggctcaggctcatagccttccagtgcacgtcagggaagggccttgggaggtaggtggaagatccgagcatgtgatgaagaagccagtttgggaagaggaacttcgcatgtccgggcctgctaagtggcaaaacgtgagcctggaaagctggaaccaaccaagaaaactcggacgccaaatgtccgatggggatggagagcgactgttccaagatttatacccctttatccaaggagagcacgtgctcaactcccagaacaaggggaagagtaggtcgctgccgagagttttatccccagagagcttatcctgcaccgaaatccctatcccactgaatgagcggcacagccctaagatgccaccttacccacctacttgtgccccaaacctcgatagcacacgtaactcggagaagagcggctgctctgcaccgttcccccgacctaagtttggaaggccgctgaagcctccaagctatagctcccatcagcaaagtcggggaggggcagatagctctgatagccaggacagccaacagatggacgcgtacgtgcccagacatgaattgtgcctttccgaccctggcctggagccacccgtttacgtgccaccgccttcatacaggtccccccctcagaatattccgaacccatatctggaggatactgtccctataaacgtgtgtggcggacactcgcaacaacagtctcctacagaaaaggccggtgcttccgggcaaccaccatcagggcctcctggtacaggaaatgaatatggcgtgtccccaaggctcccacaaggactgccggctcaccctcggccagtgacagcatatgatggtttcgtgcagtatattcctttcgacgatcccaggctacggcacttcaaactggctcagccacaggggttctgtgaggacatcaaactcgacgataagtcttacaattcaagccccgtgactgcacaggaaccagcccacgggggaatgcagcctgacggggctatctggaatccacagagcctgatcccaccatcgggggatgaacggggactagtgttggccgactcgtctccacggtggctttggggacagccaccaggcgacggcgagaacagcggattgccgaatcagcgcgatcgctgtgtggctcggggacagtggcccgacgtacggggaagtcagcacggccacaccggaaggcaagttagcagtccctactcgcagggcgaatctacctgtgagacacagacaaaacttaagaaatttcagacaggaactcggacaaagaagtctagcaagaagaaaatgaacgaaacaattttttgcctcgtgtccatccccgtgaagtcagaatctcacctccccgaccgggatatggacaacaacgacctgaagccatcagccgaccagaaaaacggatctgataagtctcccgctcttcaagagcagagtttactgtcaatgtcatccacagatctagagctgcaggcattaacagggagcatgggtgggagaacagagttccagaagcaggatttgggagagccagaagaggaccgccagacaaatgacttatctttcatccacctcaccaagcaccgggagctgaagcactctggctcctggccgggtcatagataccgcgaccagcagacacagactagtttctcggaggaaccccagtcttctcagctgctccccggtgctaaactgggcggtccgagtcgggcagctcttagcccgaagtgctcagacccagccgcttctgaggcccagacgcacaccgcatttcctacaggtgaccataagcaacgtccgagcgccaggaacctcaagggacacagaagcctgagtccatctagcaactccgcttttagtaggaccagcctttctgtcgatcaggcccctactcccaaggccggaaggagtcagccctgcgtcgacgttcacggcctcggagctcacccaggcccaaagagagaagttgtgaagggagagcccaccggaccctgcaattcaaagcagctctttggccagttcctcctaaagccggtgagccggagaccttgggacctcatctcccagctggaatctttcaataaggagttacaagaggaggaggaaagttctagcagctcatcttcctcttcatcatcttcggaagagtctgaagccgagccacagcaggagaatagggctcactgccgccaagaggacgtgggttttagagggaactccccggaaatgcgagtcgagccacagcccagaatgtgggtgcccgaatctcctgtatgccgtagtggcagaggggagagtaaatctgagtcctggagcgaagagcttcagccaggccaccccagggcctggccgccaagcccaggcaggttccgggtggaggaagggggtggtgctccgttttgcagtgccgacgggtcaacttctgctgagaaaagacatctagaagttagtaacggaatggatgagctggccggatctccgttcccagtgacaagaatgtctagcaggagttcagacgccaaaccgttaccagcgtcctaccctgcagagcctagggagccccaggagtcccccaagataacctccgcatttagctccgttaagccatccgaggccgtgccaagaaaatttgactcaggcggagaacggggagcgggtctgccgctgtcccttagcaataagaaccggggtctgtcagcccctgacctgcgctccgtgggtctgactccaggtcaagaacagggcgcttcagaactggaaggctccctgggggaggccagtactatagagataccacctggtgaaagcctgcaggcaagggcggctagaatcctgggtattgaggtcgctgtggaatccctgctgcccggaataagaagggcaggccagaaccagcctgcagagcctgacgcctccgcctgcaccccggagtctcctcaagaagagctgttgagccgtcccgcacctgcggatgtccccagggtcagcactgatgcattctatggcagacgtaaatgcggctggaccaaatctcctctcttcgtcggtgatcgggatagtgcccgtcgcgctccccaggcctttgagcactctgacgtggatggggtggtcacatccacggatccggttcctgagccagaaccgagcccgctcgagtcaaaatttttcgaacagaaggatgtggaaaccaagccgccattcaggagcaccctattccacttcgtagagaggactccgagcgttgctgggagcgagaagcgtttgcgcagcccgtcaaaagtgattgagagcctgcaggaaaagctcgcgtcacctccgagacgagctgacccggacagattgatgcggatgaaagaagtcagctcggtctcccgaatgcgagtgctgagcttcaggaatgccgacagccaggaagatgcagaagagttgaaagcaacaacacggggacaagctggtctgccaggaggacttgtgtcccctggctccggcgatcgtgcccaacgcctgggacattcactgagtgtgagcaaggactcgatatcacgtgaggagaaagagcacccggctgcgcagaaagagaaatcaatggatcaggacttctggtgccctgacagttatgacccatcgcgagtcgagagagtttag

SEQ ID NO: 236635 - DNA, 3219 bp, synthetic construct
  misc_feature 1..3219: note = Description of Artificial Sequence: Synthetic coding sequence
  source 1..3219: mol_type = other DNA
atggcccctcctactggcgtcttgtccagtttgctgttgctggtgactatcgcaggctgcgcacgcaagcagtgttccgagggtcgaacctactcgaacgccgtcatatcccccaacttggaaacaactcgaattatgcgggtatcacacacttttcctgtggtggattgcacagcagcctgttgtgacttgagcagctgcgatctagcctggtggttcgagggcagatgctatttggtctcctgcccccacaaggaaaattgcgagccaaagaagatgggcccaattaggagttatttgactttcgtcttgaggcccgttcaacgacctgcacagctccttgactatggagacatgatgctgaaccgtggaagcccgagtgggatttggggcgatagcccagaggatatccggaaggatctgactttcctgggcaaagactgggggctggaagagatgtcggaatattctgacgactaccgtgagctggagaaggatctgctacagccatcgggcaagcaggaaccgcgaggatctgctgagtacaccgattggggtcttttgcctggctcagaaggcgcatttaattcatccgtcggggatagtcctgccgtgcctgccgaaacgcagcaggatccagaattgcattaccttaacgaatccgcctcgactccagccccaaagttacccgagcggtccgtactgctgccattgccaacaacaccctcttcaggggaggtgttggagaaggaaaaggcaagccaactccaggaacaatccagtaactctagtggcaaggaggtcctaatgcccagtcattcactgccaccagctagcttggagctgagttccgtgaccgtggagaagtctccagtgctgacggttacccccggttccaccgagcacagcatccctactcctccgacatcagcagccccaagtgaaagcacccccagcgaactacccatctcccccacaactgccccaagaaccgtgaaggagctgacagtgtctgctggcgataacctgatcattacgcttcctgataatgaggtcgaattaaaagccttcgtggcacccgctcctccagtggaaactacatataactacgagtggaatcttattagccatcctacagattaccagggcgaaattaagcaaggacacaaacaaaccctgaatctgagccagctgagcgtcggactgtatgtattcaaggtgacggtgagctccgaaaacgcctttggggagggttttgtgaatgttactgttaagcccgcaaggagggtgaatctccctccagttgcggtcgtttccccacagcttcaggagctcactctgcccctgacttcagccctgatagacggctctcagtcaaccgatgacaccgagatcgtgagctaccactgggaggaaatcaatggaccatttattgaagagaagactagtgtggatagtccagtgctgaggctgtcaaatctggaccctggcaattactcgtttcgactgaccgtcaccgactccgacggcgctaccaatagcaccaccgccgctcttattgtgaacaacgctgtcgactatcccccagtcgctaatgccggacccaatcatactatcacgctgcctcagaactctattactctgaacgggaaccaaagcagcgatgaccatcagatcgtgctgtatgaatggtcgctggggcctggatctgaaggcaagcacgtggtaatgcagggagtgcagaccccatacctgcatctgtctgctatgcaggagggagattatacattccagttgaaggtgacggacagctccaggcagcagtcaacagccgtggtaacagttatagtgcagccagaaaataatagaccccctgttgccgttgctggcccagataaggagctgattttcccagtggagtctgccacgctggacggcagctctagctcggatgaccacggtattgtgttctaccactgggaacatgtgagaggcccttctgccgttgagatggagaatattgacaaggctatcgccaccgtcacgggcctgcaggtcggaacgtatcacttccgactgacagtgaaggatcaacagggcctgagctcaacctcaacactcaccgtcgcagtgaagaaggagaataatagtccacccagggctcgggctgggggtcggcacgtccttgtgctaccaaataactcaatcaccttggatggttctcggtcaacagacgatcagaggatcgtgtcttatctttggatccgagatgggcaatctccggctgccggtgatgttattgacggcagcgatcatagcgttgctttgcaattaacgaatctggtggagggtgtttacacattccatttgagggtaaccgacagtcagggggcatctgacacagacactgcaacagtcgaagtgcagcctgatcccaggaaatctggattggtcgagcttactttgcaggtaggcgtgggccagctcactgaacagaggaaagatacactcgtgcgccagctggctgtcctcttaaatgtgttagacagcgatatcaaggtgcagaagattcgggcacatagtgacctatctacggtaatcgtattttacgtccagtcccggccacccttcaaggtcctcaaagccgcagaggtggcacgaaacctgcacatgaggctgtctaaggagaaggcggatttcttactgtttaaggtgctcagggtagacaccgccggttgtctgctcaaatgcagcgggcacggccactgtgaccctttgacaaagcggtgcatctgcagccatctgtggatggagaacctgatacagcgctacatatgggatggagaaagcaactgtgagtggtctatcttctacgtgaccgttcttgcattcactttgatcgtgctcaccggcggttttacatggctgtgtatctgctgttgtaagagacagaagcgtacaaagatcagaaagaagacgaagtacaccattctagataacatggatgaacaggagcgcatggagcttcgcccaaaatatggcatcaaacatcgaagtactgagcacaattcctccctgatggtcagcgagtccgagttcgatagcgaccaggacactatcttctctagggagaagatggagcggggtaaccccaaggtgtcgatgaatggctctatccgcaatggcgctagcttttcatattgttctaaggatagatag

SEQ ID NO: 236636 - DNA, 918 bp, synthetic construct
  misc_feature 1..918: note = Description of Artificial Sequence: Synthetic coding sequence
  source 1..918: mol_type = other DNA
tctcagctgcctgtgcgtgccgaggagcgtaccgaatcatgtctttggggatgttgggcatcctctcgggtaagaaggacgtcggacgcttgttcctcacctctggctacttctcgctcagcacgatcctgtggagtgctgaccgcacctgtcaagggtgcctcctcatcactggttgttaagctcgccgacacggaccgggagcgtgctttgcggagaatgcaacaaatggctggacacctaggggcatttcatccagcacctttacctctcggagcttgcggggcttacaccacggctatactgcaacaccaggccgctctactggccgctgcacagggcccaggcctcggtcccgtggcggctgtcgccgcacagatgcagcatgtagccgcattctcattggtggctgccccactactacccgcagcggcagctaattcgccacctgggtctggtcccggaacgctccctggcttgccagctcctatcggcgttaatggctttggacctctgacaccacagactaatggacagcccggatcggataccctgtataacaacggcctgtccccttaccctgctcagagtcctggcgtagcagacccactccagcaggcgtacgcgggtatgcatcactacgcaggacccgaggggtgcaatctgtttatctatcacctcccgcaggagttcggcgacgcagaattgattcagacctttctgcctttcggcgctgtggtctctgcaaaggtgttcgttgatcgggctactaaccagtccaagtgctttggcttcgtgtcctttgacaaccccacttctgcgcagacagccattcaggccatgaacggattccagattggaatgaagagacttaaagttcagttgaaacgcccaaaagatgctaaccgcccatattag

SEQ ID NO: 236637 - DNA, 198 bp, synthetic construct
  misc_feature 1..198: note = Description of Artificial Sequence: Synthetic coding sequence
  source 1..198: mol_type = other DNA
atggtccggaccaaggccgactctgttcccggaacctaccgaaaggtcgtcgcagccagagctccgaggaaggtgttgggttcatcaacttcagctaccaactcgacgtcagtatccagcagaaaagaacacgttctgtgtaacttgattactcagatgatgaagaagaatcgtactttctccttcattttcgaatag

SEQ ID NO: 236638 - DNA, 15018 bp, synthetic construct
  misc_feature 1..15018: note = Description of Artificial Sequence: Synthetic coding sequence
  source 1..15018: mol_type = other DNA
atggaccagcgtaagaatgaatctattgtcccaagcatcacgcagctggaggacttccttaccgagcacaatagcaacgttgtgtggttgctggtggcgacaatactgtcatgcggttggatcatctatctgacttactacaactcccggaacgtgggcctgattcttaccctggtactcaacagactgtacaaacatggctatatacatatcgggtccttctcattttctgtactgagtgggaaggtcatggtgcgcgagatctactacatcactgaggacatgtctattcgaatccaagatggattcattatcttccgctggtggaagatgtataaccccaagcaaaaacagcacgatccaaaagccgaaacccggttgtacatcacagtgaatgatttcgaattccatgtatacaaccgctcagacttgtacggacggcttcaagagttatttgggctagaacccaccataattcccccaaaaaaggacgacgacaagacgcgggaaattgggagaacgcggacacagagtaaaatcgagcgggtcaaagtcaaaacggagagtcaagacccaacaagctcatggcgatctctcatcccggtgatcaaggtgaatgtctccactggtaggctcgcctttggcaatcattaccagcctcagactctgtgtattaatttcgacgacgcctttctgacctataccaccaagcctcccagcagccacctcgatcaattcatgcacatagtgaagggtaagctcgaaaacgttcgtgtgatgctggtgcctagcccgagatatgtcggactgcaaaatgacgagccccctcggctgatgggcgagggtttcgtggtaatgcaatcaaatgacgtcgacatttactactatatggacgagcccggtctggttcccgaggagaccgaagaaaacatcgagggtgaaatgtcatccgaggattgcaaattacaagatctgcccccatgctggggcctcgatatcgtctgtggaaaagggacagacttcaactacggaccgtgggccgaccgccaacgggattgcctgtggaaattcttcttcccccctgactatcaagtgctgaaggtctccgaaatcgctcagccaggacgcccacggcaaattttggcctttgagctgcgcatgaatataatcgcggatgcaaccatagacttactttttactaaaaaccgcgagacgaacgcggtccatgtgaatgtcggcgcaggcagctaccttgaaatcaatatcccaatgacggtggaggaaaacgggtacacacctgcaatcaagggccaactcttacacgtagatgcaactaccagcatgcaatacaggacactgctggaggccgaaatgctggcctttcacatcaacgcctcataccctaggatttggaatatgcctcaaacatggcaatgcgaactggaggtgtataaagcaacgtaccatttcatcttcgcacaaaagaacttctttacggacctcattcaagactggagtagtgactcccctccggacatcttttccttcgtaccttacacctggaactttaagatcatgtttcaccagttcgagatgatttgggctgcaaaccagcataattggatagactgttctacaaaacagcaagagaacgtgtacctggcagcctgtggcgaaaccctcaacattgatttctcacttccgttcaccgacttcgtgcctgctacatgtaataccaagttctcactccgaggagaagacgtggacctacacctgtttttacctgactgccacccctcaaagtattcactgtttatgctggtcaaaaactgccaccctaacaagatgatccatgacaccggcatacccgctgagtgtcaatctgggcagaagactgtcaagcccaaatggagaaacgttactcaggagaaatccggctgggtagagtgctggactgtgcctagtgtgatgttgacgatagattatacatggcatccaatttacccccagaaggcagacgaacagctcaagcagagtctttcggaaatggaagagactatgctgtccgtgctgagacccagccaaaaaacctccgacagagtggtctcatcaccatccacaagctccagacctcccatcgacccctcagagctcccacctgataaacttcacgttgagatggagctttcacctgattcccagattactctatacgggccacttctgaacgctttcctctgcattaaagaaaattactttggggaagacgatatgtatatggattttgaggaagttatttcatcgcccgttctgagcctaagtacatcaagcagctctgggtggacagccgtgggaatggaaaacgacaaaaaggaaaacgaagggtccgcgaagtctattcatcccctggcactgcgcccttgggacatcactgtcctggttaacctgtacaaagtgcacggccgactgccagtgcacggaacaacagacggacccgaatgccctaccgcctttcttgaaaggctctgtttcgagatgaagaagggcttcagggaaactatgctccagctgattttgtctccgctgaatgtgttcgtctcagacaactatcaacagcgcccacctgtggacgaggtattgcgcgaggggcatattaacctaagtggccttcagctccgcgcacatgcaatgttttctgcagagggacttccattgggaagcgacagtctagagtacgcttggctgattgacgtgcaggctggctctctgacggccaaggtaactgctcctcaactggcctgtctgctggaatggggccagacattcgtgtttcacgtcgtatgtagagaatatgagctcgaaaggcccaagtctgtgatcatatgccagcatggaattgatagacggttttgcgagtcaaagctgtcgtgcattccaggcccttgccctaccagtgatgatctgaagtataccatgatacgactggcagtggatggggcagacatatacatagtggagcatgggtgtgcaactaacatcaagatgggcgctatcagggtggctaactgcaacctccataaccagagtgtgggcgagggcatttcagccgctatccaggactttcaggtacgccaatacatcgagcagctcaacaactgtcggataggacttcaaccagccgtcctgaggagagcatactggctggaggctggtagtgcaaatcttggactcatcactgtggacattgccctggctgccgatcatcacagcaagcatgaagcacaaagacatttcctcgagactcacgatgctcgcaccaagaggctttggttcctgtggccagatgatatcctgaaaaacaaaagatgcaggaataaatgcggctgcctgggaggctgccgattcttcggagggacagttacaggcctcgacttctttaagcttgaggagctgacccccagcagtagctctgctttcagctccacaagtgcagaaagcgacatgtactacggtcaaagcttgttgcagccaggcgaatggattattaccaaggagatcccaaagataatagatggcaacgtcaatggaatgaaaagaaaagaatgggagaacaaaagtgtgggtattgaggtggaacggaagacccaacatctctccttacaagtgccactacgatctcatagttcttcctcctcaagcgaggagaattctagctctagcgccgctcagccgctgctggccggtgaaaaggagtcaccatcatcagtcgctgacgatcacttggtgcagaaggaatttctgcacgggacaaaaagagatgatggacaggccagtatccccacagaaattagcggcaatagcccagtgtccccaaatacccaggataaatcggtgggacagagtcctctgcgatctccactcaaaagacaggcctccgtttgtagcacaaggctgggcagtacaaaaagcctcacggccgcattctacggtgataagcaacccgttacagtgggagtacagtttagctctgacgttagcagaagcgacgaaaatgtcctggactcacctaagcaacggagatcatttgggagtttcccttatactcctagcgccgactctaattcgtttcaccagtacaggtctatggacagcagcatgtccatggctgacagtgaggcttatttttcggcagccgaagaatttgaacctatttcctccgacgagggcccagggacttaccctggacgaaaaaaaaagaagaagcagacacagcaaattgactattctagaggcagcatatatcattccgtcgagggaccactcaccgggcatggggagtcaattcaggattcaagaaccctgccttttaagacacatccatctcaggcaagcttcgtgtcagctctcgggggagaagatgacgtgatcgagcacctgtatatcgtcgagggggaaaagactgtcgagtctgaacagattacgccgcaacaaccagtgatgaactgctatcaaacatacctcactcagtttcaggtaatcaattggtccgtgaaacatccaacgaataaacgaacatctaagtcctccctgcaccgccctctcgacctggacacccctacttccgaagaatccagcagctccttcgagcaactgagcgtaccaacctttaaagtcatcaagcagggcctgacagcaaatagtctgctggacagaggaatgcagctgagtggctcaacgtccaataccccatataccccgctcgaaaaaaagctggcagacaacacagacgatgagaccctgaccgaagagtggaccctcgatcagccagtatctcagactcggaccaccgctatcgtggaggtgaaaggaaccgtcgacatcgtgcttacacctcttgtggctgaggcgctggaccgttacattgaggccatggtgcattgcgcatccacgagacaccccgcagccatcgtagacgacctgcacgctaaggtgctgcgggaggctgtgcagaacagcaagacaacatttagcgaaaacctctcatccaaacaggacatcaggggtacaaaaactgagcagtccacaataggcacaaccaaccagggccaagcgcaaactaaccttacaatgaaacaggataacgtgactattaagggcctccaaacgaacgtcagcatccctaaagttaacttgtgccttcttcaggcctctgtggaggaatcaccaaccactgcaccaagccggtcagtcactcatgttagcctggtggctttgtgctttgatcggatagcgactcaggtgaggatgaaccgcggagtggtggaagagactagcaacaacgcagagcctggcagaacatctaacttcgacaggtacgttcatgcaacgaaaatgcagccgcagtcctccggctccctccgctctaacgcaggcgctgagaaggggaaggagatcgcagctaagctcaacatccatcgagtgcatggacaattgcgaggactcgatacaacagatataggaacttgcgcaataacggcaatcccctttgaaaagtcgaaagtgctgtttacacttgaggagcttgatgaattcacgtttgtggacgaaactgatcagcaggccgttccagatgtgacacgcattggtcctagccaggaaaagtggggctggataatgttcgagtgcgggctggagaacctgacgataaagggagggaggcagtcaggagccgttctttataacagcttcgggataatggggaaagcgtccgataccgagagagggggagtgttgacctcgaataattctagtgacagtccaactggaagcggttataatacagacgtatcagatgataatctcccctgtgaccgaactagcccctcttctgacttaaacggcaattctgtctcggatgagcaggatgagggagtggaatctgatgacttaaagaaggacctgcctctaatgccgccaccaccagatagttgctcaatgaagctcacaatcaaagagatatggttctcctttgccgctcccactaatgtcaggtctcatacgcatgcgttcagcaggcagctaaacctgctctccacggcaacccctgctgtgggagcgtggctggtgccgatagatcagttgaagtcttcacttaacaagctggaaacagaggggactctccgaatctgcgcagttatgggctgtatcatgacagaggcactggaaaacaagtcagtgcatttcccgcttcggtcaaaatataaccggctgacaaaggtcgcccgatttcttcaggaaaaccccagctgccttctatgtaatattctgcaccactatttgcatcaggcaaattatagtattatcgatgatgctacaatgtctgacggccttcccgcactcgtaacacttaagaaaggcctcgtggctctcgccagacagtggatgaaatttatcgttgtcacccccgcatttaagggcgtgtcattgcataggcctgctcagccactaaaaccacaaatcgccatggatcatgagcacgaggacggcctgggcttggacaatggaggaggactgcagagcgacacctcagctgatggggcagaatttgagttcgatgcagctactgtatccgagcacaccatgctgctggaggggaccgcaaataggccaccgccaggatcatccggtccagtgaccggagcggagattatgcgtaagctgtcgaaaacacacacacactctgactcagcgctcaaaatcaagggcattcacccttaccatagcctttcctatacgagcggggataccgccacagactctcctgttcatgtggggcgtgctggcatgccagtcaaggacagtccgagaaaggaaagcttattgtcctatctcactggatcctttccaagtctccacaacctgctggaggggacacctcaaaggtcctctgcagcagtcaagagctcctcgctcacaagaactggtaacactgttgccaccgatatgctgtccgagcatcctctgctgagtgaacccagtagcgtttcattctacaactggatgagtaacgccgtgggcaatagaggatctgttctccaggaatctcctgtcaccaagagtggccacaactccctgcccaccggagtggcaccaaacctccccacaatacctagcgcctctgatttcaatactgtcctgagctcagatcagaatacactggatggaacccacagccaacactccacatctcaggacgacgtcgccggtgtcgaggaggccaaccaaggctttcctgcggtacagctggccgacgcacaggtggtgttcaagccattgctgagtcataccggaatacagagccaggacactatgccattctgttaccgcatgtactttggagaacacctatcattttccgggacgttggattgtctcagggcggacatcgtcgactctgacactgccaaagagagaaaagggaagcgggctagaagacagggccacgtgaatctccctcctctcgaatttaaaccagcgctaatgttaggcacattcagcatcagtgccgtggtcatggagaagtcagtttgtacgccacagaactcaacctccgccctcagtttccacgacctgtcaaagagatattacaatacctttcattgcaacttcaccatctcttgtcagtcaatcagccagcatgtggatatggctctcgtgagactgatacaccagtttagcactatgattgacgatattaaggcgacccagaccgatataaaattgtctcgatacacagcaggaagtgctagtccaaccccaaccttcaagacgcgcaagcaccgcgactttcgcagctcggacttctcccgctcttcccgcggtagcctgaacggtggaaaccgggtcaataacgcgaagaataagcggacaaataacgaaaacaacaaaaaagagagtcggaacaaaaactccttggggagaagtgagcgtcggacatccaaagtcagtcggaagggatccaaggacgtggtggaccacatgacaatccatatggatgattccgatagcattacagtgtctgagcaatcggagcctagcgcagagtgttggcaaaacatgtacaaattgctgaatttctacagtctaatttcggacccaacaggcatcctcgagaaatcctcagaaacattcggtccggcaggcgttcgctctccaacagaaccaacctgtaaagtggtttttgaaaacgaacaggacaattcctcacttacaaagactcagcgtaagaggagcttggtgacatctgagcctcagcatgtcactctgattgtgttcggcatcggcatggtgaacaggacgcatcttgaagcggacattggaggcttgactatggaatccgaactgaagcgtattcacggatcatttactctgaaagaaaaaatgaaggacgtcttacaccagaagatgaccgagacctgtgccaccgcccatatcgggggtgtgaatattgtgctgctggagggtattaccccaaacattcagcttgaagattttcccacctctccaacatccactgctaagcaggaatttctgacagtcgtgaagtgctccatcgccaagtcacaagcactctactctgcacagaggggccttaagaccaacaacgctgctgtgttcaaggtgggagctattagtattaatatccctcagcaccccgctaccctgcactccatgatggtccgttcctcccaccagctctccaagcagatttccgatttgatccgtcaaccaagtactgcccctcagcccgtcaaggaggatattgccaccccactgcctagcgagaaaactcccacttccgtcaatcaaactccagttgagacaaacgaatttcctcaattgccggagggactcgaaaaaaagcccatcgtgctgaagttctcagctatgctagacggcatcgccataggcgctgccctcctcccgtcactgaaagcagagtacaaaatggggagaatgcggtctcacggaatgaccggcgcacagacgcgcttcacattcgaacttccaaaccatcgtctccgatttacctccaaagtctccgccaccgacatgtccaccatccccccatcggcatcactgaacttgcctccagtcactatgagtggcaagtatataatggaggagcacgactcctattctgaccaagtctggtcaatcgatgagctacccagtaagcagggatattatctacagggcaactaccttcgatgtgtcgcagaagttggatctttcgagcacaacctcacaacggacctgctgaaccacctggttttcgtgcaaaaagtgtttatgaaggaggtgaatgaggtcattcagaaagtcagcggaggtgaacagcctatcccgctctggaacgaacacgatggaacagcagatggtgacaaacccaaaatcctcttgtacagcctgaatctgcagttcaaaggcattcaggtgactgctacaacaccaagtatgcgcgcagtccgatttgaaacaggcctgattgagctggagctatctaacagacttcagacaaaggctagcccgggaagcagcagctatctcaaacttttcggaaagtgccaggtggacctgaacctagccttgggccagatagtgaagcaccaggtatatgaggaggctggcagcgacttccatcaggtggcttacttcaagacgagaatcggcttacggaacgctcttcgggaggaaatttccgggagcagcgatagagaagcagtactgatcactctgaaccgtccgatcgtatatgcccagcccgtcgcttttgatagagcagtgcttttttggctgaactataaggcagcttatgataattggaacgagcaacggatggcactccataaggacatacacatggcaacgaaagaagtggtggatatgctcccagggatccaacagacgtccgcccaagccttcggcaccttgtttttacaattaaccgtgaacgaccttggtatctgccttcctatcacaaacactgcccagtcaaatcataccggtgacctggacactggatcagcgttggtgctgaccattgagtctactctcattaccgcttgtagctccgagagtctcgtgtccaagggtcactttaaaaatttttgcattcgttttgccgacggattcgagacctcctgggacgactggaagccagagattcacggcgaccttgttatgaacgcatgcgtggtgcccgatgggacatatgaagtgtgtagtcgcaccaccgggcaagctgcagcggaaagctcatccgctggtacttggaccttgaatgtgctgtggaagatgtgcggtatcgatgtccatatggaccccaacatcgggaagcggctgaatgcccttggaaacacactgactaccctcactggtgaggaagacatagatgacattgctgatctgaatagtgtgaacatcgcagacttaagcgatgaggatgaagtggacaccatgagtccaaccatccatacagaggctaccgattaccggagacaggctgctagcgcctcccagccaggagaactgcgaggacgaaagataatgaagagaattgtagacatcagggagttaaacgaacaagctaaagtgatcgacgatctgaaaaagcttggcgcttcggaggggaccatcaaccaagaaattcaacgatatcaacagctagagtctgtcgccgttaatgacattcgcagagatgtacgcaaaaagctccggaggtcatcaatgagagctgccagtttaaaggacaaatggggcctgtcatacaaacctagctattcgcgctccaaaagcatatctgccagcggaagaccgcctttaaaaagaatggagagagcttcctccagggtgggggagaccgaagaattgcctgaaatccgcgtggatgcagcctcaccaggccctagggttacgtttaacattcaggacacttttcctgaggagacagaactcgacttgctttctgttaccatcgagggtcctagccactattcttctaactccgagggtagttgttctgtattctcttcgcctaagactcccggtggcttcagccccggtatcccatttcaaactgaggaggggcgacgcgatgactccctttccagcacctccgaggattctgagaaggacgagaaagatgaggatcacgaacgcgagcgcttctacatttatagaaaacctagccacacaagtagaaaaaaggctacaggcttcgccgcagtccaccagctcttcacagagagatggccaacaactcctgtgaacaggtccctttcaggtacggccaccgagcggaacattgatttcgaactggatatccgagttgagatcgacagcggtaagtgtgttctgcatccgaccaccttgctccaagagcacgacgatatctctcttcgtaggagttatgaccggtcctccagaagtttggaccaagactctccgagtaaaaaaaaaaaatttcagaccaattatgcttccacgacacacttgatgacaggcaaaaaggtgccttcttccctgcagacgaaaccttctgacctcgagacaacagttttctacatacccggagtggatgttaaacttcactataatagcaaaaccctcaagacagaatccccaaacgcttcccgaggctcaagcctccctaggacactcagcaaggagtcaaaactttatggaatgaaagattctgcaaccagccccccatcaccacctctgccctctactgtgcaaagcaaaactaacacattgcttcctccacagccccctcccataccagcagcaaagggtaaggggtcaggcggagttaaaaccgctaagttgtatgcctgggtggccctgcagagccttcccgaagagatggtcatttcaccgtgcctcttagatttcttggagaaggccctggagactatccccattacccccgtcgaacgcaactacacagctgtgagtagtcaggacgaggatatgggccatttcgaaattccggatccaatggaagaaagcactacaagcctcgtgtcttcatctaccagcgcttacagctctttccccgtggatgtggtggtttatgtgcgtgtgcagcctagtcagattaagttctcgtgtctacccgtgagccgggtcgagtgtatgctgaagctgccaagccttgacctggtcttctcttctaacagaggcgaacttgagaccctcggcacaacttaccccgcagagactctgtcccctggaggcaatgcaacacaaagcgggactaagacaagcgcttccaagactggaatcccagggagctcaggtctggggtccccactagggaggtcgcggcactccagctcccaatccgatctgacctccagttctagtagctccagcggactgtcattcaccgcctgcatgtcagatttttcattgtatgtctttcatccctacggcgcagggaagcagaaaactgctgtgagtgggctgacccccggttcaggcggtctgggtaacgttgacgaggagccaacaagtgtgactggacggaaagactccctgtcaatcaatctggaattcgtaaaggtatctctctctcgcataaggcgctcggggggtgcgtctttctttgagagccagagtgtttccaagtcagctagtaaaatggatactacactaatcaacatttctgcagtttgtgacatcggctccgcttcctttaagtacgacatgaggcggctcagcgagatacttgccttcccaagggcgtggtacaggaggtccatcgctcgacgactgtttctgggagatcaaaccataaatttgcccacatccgggcctgggacgcctgattctatcgagggggttagtcagcacctgagtcccgaaagctcaaggaaggcgtattgcaaaacatgggaacagccctctcagagtgcctccttcacacatatgccccagtcccctaatgtgttcaatgaacacatgaccaattctaccatgtcccctgggactgtgggtcagtcactgaagtccccagcctccatccgatcaaggagtgtgagtgactcttccgtgcccaggcgcgacagcctgtcaaagactagcactcctttcaataagtctaataaggccgcaagtcagcaaggcactccctgggaaaccctggtcgtgtttgctatcaatctaaaacagctcaacgtgcagatgaatatgtctaacgtgatgggaaacaccacttggacaaccagtggactgaaaagccaggggcgattgtcagtaggcagcaacagggacagagaaatcagcatgtcagtgggcctgggtcgctcgcagctagatagtaagggaggggtcgtgggcggaactatcgatgtcaacgccctcgagatggtagcccacattagcgagcaccccaatcaacagcctagccacaagatccaaataacaatgggcagtaccgaagccagggttgactacatgggctcctcgattctaatgggaatcttttccaatgctgatcttaagctccaagacgagtggaaggtgaacttgtataatactcttgattcttccattaccgataagtcggaaatctttgtgcacggcgacttgaaatgggacattttccaggtgatgatctcgaggtcaacaacaccggacctgattaagatcgggatgaaattgcaggagttcttcactcagcagtttgacacgtcaaagcgtgctctgagcacctgggggccagtcccttatctgcccccaaagacgatgacctcaaacctcgaaaagagctcacaggaacagttgctcgatgctgcgcatcacaggcactggcctggagtccttaaggtggtcagcggctgtcacatcagcctgttccagatacccctaccagaagacgggatgcagtttgggggatcaatgagcctgcatggcaaccatatgacccttgcctgtttccacggaccaaacttcagatcaaaaagttgggcactgtttcatctagaggagccaaatattgcattttggactgaagcccagaagatctgggaagacgggtcctcagaccattccacttatatcgtgcagactttggattttcacctgggccacaataccatggtcacaaaaccctgcggtgcccttgaatcaccaatggctaccattaccaagattacacgtagacgccacgaaaacccaccccacggcgtggcctcggttaaggagtggtttaattatgttacggccacacgtaacgaggagctcaatctcctccggaacgttgacgccaataatactgagaattcaacgaccgtgaagaactcttccctcctgagtggctttagaggcggtagcagttataatcatgaaaccgagacaatcttcgcattgccaaggatgcagctcgatttcaagtcgatccacgtgcaagaacctcaggagccctcactgcaagacgcttccctcaaacctaaagtggaatgtagtgtcgtcacagaattcacggatcatatttgcgtgaccatggatgccgaactcatcatgtttcttcacgatctggtgtctgcctacctgaaggaaaaggaaaaagcgatcttcccaccacgcatcttgagcaccagacccggacagaaaagccccatcataatacatgatgacaactctagtgataaagacagagaggatagtatcacctacacgactgtcgattggagggattttatgtgcaacacttggcatctcgagcctacgcttcggctcatttcctggacggggagaaaaattgatcccgtcggcgtcgactatatcctgcagaagctcggtttccaccacgcaaggaccacgatccctaagtggctgcagcgaggggtgatggaccccctcgataaggtgctctctgtcttaataaaaaaactcggaaccgctctccaggacgagaaagagaagaagggaaaagataaggaggagcactaa

SEQ ID NO: 236639 - DNA, 2772 bp, synthetic construct
  misc_feature 1..2772: note = Description of Artificial Sequence: Synthetic coding sequence
  source 1..2772: mol_type = other DNA
atgtctcagtttaagcgacagcgcatcaatcccctccctgggggtcggaacttcagtggcactgcctctacctctctcctaggcccacctcccggactgcttacccctccggtggccacagagttatcccagaatgcacggcacctgcagggcggagagaaacagagagtgtttactggaattgtgacgtcactgcacgattacttcggcgtggtcgacgaggaggtgtttttccagctgtccgtggtgaaggggagactaccccagctcggcgaaaaggtgctggtgaaggccgcttataatcccggacaggccgtgccttggaacgctgttaaagtgcaaacattgtccaaccagccactattgaagtcccctgcacctccactgctgcacgtagctgctctcggccagaagcaggggattctaggcgctcaaccacagctaatctttcaaccgcacaggattcctcctctcttcccacagaaacctctgtccttgtttcagacttcccacacattacatttgtcccatcttaacagattccccgctcggggtcctcatgggcgtctggaccagggacgctctgacgattatgactcaaagaaacgcaagcagcgggcaggcggagagccatggggggctaagaagccgaggcacgacctccctccttacagggtccatttgacgccctacacagtagattcaccaatctgcgatttcctggaactgcagagacgctaccggtctttactggtgccgtcagatttcctatccgtgcacctctcatggctttccgcatttccccttagccagcctttctccctgcaccacccatcacggatacaggtttccagcgagaaggaggccgctcctgacgcgggagccgagcctatcactgcagattctgacccagcttacagctcaaaggtgctgttgctgagctccccaggactggaagagctatatcgttgttgcatgctatttgtggacgacatggcagagcctagggagactcccgaacatcctctgaagcagataaaattcctcctgggacgcaaggaggaggaggccgtcctggtcggcggtgagtggagtccgtctctggatgggctggatccccaggccgacccgcaggtgctcgtgaggactgctatccgttgcgctcaagcccagaccggaatagacctgtctggatgcactaaatggtggcggtttgcggaatttcagtacctgcagcctggtccacctcgacggcttcagactgtggtagtttacttgcctgatgtctggactataatgccaaccctggaggagtgggaagccctgtgtcagcaaaaagcagcggaggccgcaccgcctacacaggaagcccagggcgaaaccgagccgactgaacaggcccctgacgctctggagcaagccgctgacacgagccgcagaaatgctgagactcctgaagctaccacccaacaggaaactgataccgacctccccgaggccccaccacccccactggaacccgctgtcatcgctcgcccaggatgcgttaatttgagtctgcatggtatagtcgaggatcgccgaccaaaggagagaatcagttttgaagtaatggtgttagccgaattatttctggagatgctacagagagacttcggttaccgggtttataagatgcttctgagcctgccggaaaaggtcgtttcccctcccgaaccagagaaagaggaagctgccaaggaggaagccactaaagaggaagaagctataaaggaggaggtagtgaaggaaccaaaagatgaagcacaaaacgaggggccagcaaccgagtccgaagcccctctcaaagaggatgggttactccccaagcccttgtcatctggtggtgaagaggaagaaaaaccacggggagaggcaagcgaggacctttgtgaaatggctttggatcctgaattacttctattgagagatgatggggaagaggagtttgctggggctaagctggaagattcagaggtcaggtccgttgccagcaatcagagtgagatggagttctccagtctccaagacatgccaaaggagctcgacccctccgccgtgcttcctctcgattgtttgcttgccttcgttttctttgatgccaactggtgtggttatcttcatcgtcgcgacctggagcgcattctgcttaccctcggtatccggctttccgccgaacaggccaagcaacttgtctctagagttgttactcagaacatttgtcagtatcggagtctgcagtattccagacaagaaggattggacggaggcctgcctgaagaagtactctttgggaaccttgacctactgcctccaccaggaaagagtacaaagcctggggcagcaccaaccgagcacaaagccctcgtctcccacaacggctctttaattaacgtgggctccttgctgcaaagggccgaacagcaagatagcggcaggctgtacttggagaacaagattcacacactggagttgaagctggaggagagccataatcgcttcagcgccactgaggtgaccaacaagaccctcgccgctgaaatgcaggaactgcgcgtacgactggctgaggccgaagagacagctcgcacagccgaacgccagaagtcacagctgcagaggctactgcaagagctgagaaggcgtctgacccccctgcaattggaaatccagagagtcgtagaaaaggccgattcgtgggtcgaaaaagaagaaccagccccatctaactag

SEQ ID NO: 236640 - DNA, 2982 bp, synthetic construct
  misc_feature 1..2982: note = Description of Artificial Sequence: Synthetic coding sequence
  source 1..2982: mol_type = other DNA
atgggagccgcaggcagacaggattttttgtttaaggccatgctaaccatctcttggctgacactcacgtgttttcccggagcaacttccaccgtggctgccggttgtccggatcagagccccgaactacagccatggaaccctggccacgaccaggatcatcacgtgcatatcgggcaaggaaaaaccctgctgttgacctcctcagctacagtctatagcatccacataagcgagggcggaaagctggtcatcaaagaccacgatgagcctatcgtcctgagaacccggcacattttaatcgataatggcggtgaattacacgcaggatctgctctgtgcccattccagggcaatttcactattattctgtatggaagagcagacgaggggatccagccagatccttactacggcctaaaatatattggcgttggcaaagggggagccctagagctccacgggcagaaaaagcttagttggacattcctgaacaagactcttcatccaggcggtatggcagagggcggttattttttcgagcgatcctggggccaccgcggagtcatcgtccacgttatcgaccccaaaagcgggaccgtgatccatagcgacaggtttgacacctacaggagcaagaaagaatccgagcggctggtacagtacttgaatgcagttcccgatggtcgtatacttagcgtcgccgtcaatgacgaggggtcccgaaacctcgacgacatggcccgtaaggcaatgacaaagctgggctctaaacacttcctgcaccttggtttccgccacccgtggtcgttccttaccgtgaaaggaaacccctctagttccgtggaggaccatatcgagtaccacggccatcgaggcagcgctgccgcaagggtctttaagttgtttcagaccgagcacggggagtattttaatgtgtcactgtccagcgagtgggtccaggacgttgaatggacagaatggttcgaccacgataaggtttcacagactaaaggaggggagaagataagcgatttatggaaagcacatccgggaaaaatttgcaaccggcctattgatatccaggccacaactatggacggggtcaatctttccactgaggtggtttacaaaaagggacaagactataggtttgcctgttatgatcgcggacgcgcatgtagatcttacagagttagatttctctgcggcaagcccgtcagaccgaaactgacggtgactatcgataccaatgttaattctacgatcctaaacctcgaagacaatgtccagagttggaaaccaggcgatacattagtcattgcttccacagattactcgatgtaccaagccgaggagttccaggtgttaccctgtagatcttgtgccccaaatcaggtcaaagtagctggcaagccaatgtatcttcatatcggagaagaaatcgatggtgtggacatgagagccgaagtcggactcctgtcaaggaatattatagtgatgggcgagatggaagacaagtgttacccctaccgcaaccacatctgtaatttctttgattttgacacatttggcggacacatcaagtttgcactgggtttcaaagctgcccatctggagggaacagagctgaagcacatgggccagcaactggtcgggcagtacccgattcactttcacctcgccggagacgttgatgagcggggaggttatgacccacccacatacatcagggatctcagtatccaccataccttcagtcgctgcgtcaccgtccatgggagcaatggcctccttattaaagatgtggtaggatacaactctctcgggcattgctttttcaccgaagacggaccagaagagagaaacaccttcgatcattgtctcggcctcctggtgaagagcggtacactgctcccaagcgacagagactctaagatgtgcaaaatgataaccgaggattcataccccggatatatacccaaaccccgtcaggattgtaatgctgtatccaccttttggatggccaacccaaataataacctgattaactgtgcggcagcgggtagcgaagaaacgggcttttggttcatattccaccatgtgcccacaggacccagtgtcggcatgtattctccgggttacagcgagcatatccctctggggaaattctataacaaccgagcccactctaactacagagccggaatgataatagacaacggcgtcaagactactgaagcttcagccaaagataagcggccattcctgtctattatctcggccaggtacagccctcaccaagacgcagaccctctgaagccacgggaaccagccatcattagacatttcattgcctacaagaatcaggatcatggcgcttggctgcgcggaggggatgtgtggcttgatagctgccgcttcgcagacaatggtatcggattgacccttgcatctgggggaaccttcccctatgacgatggctcgaaacaagagattaagaactctctcttcgtcggagagtcaggcaatgtggggaccgagatgatggacaataggatctggggacctgggggactggaccactctgggagaactctgccaataggtcagaattttcccatccggggaatacaactttacgatggacctattaatatccaaaattgtacgttccggaagttcgtggccctcgaggggagacatactagcgctctagcattcaggctcaataatgcttggcagtcttgcccccacaataacgtaacaggcattgctttcgaggacgttcccattacatccagggtgttctttggcgaaccagggccttggttcaaccagctggacatggatggagacaaaactagcgtctttcacgacgtggacggttccgtgagcgaataccccggatcatacctgacaaagaacgacaataaatggcacagcctcgctagtaaagcagccagcggcccttctggatag

SEQ ID NO: 236641 - DNA, 4086 bp, synthetic construct
  misc_feature 1..4086: note = Description of Artificial Sequence: Synthetic coding sequence
  source 1..4086: mol_type = other DNA
atgggcgctgcaggacgacaggacttcctgtttaaggctatgctgactatcagctggctaaccctaacctgctttcctggggctacctctaccgtcgcggcagggtgcccggatcaatccccggaattacagccttggaatcccggacacgaccaggatcaccatgtgcacattggacaaggaaagactttactactgacctccagtgccaccgtgtacagtattcatattagtgaggggggtaaacttgtgatcaaggatcacgacgagcccatcgtcctccgaacacgacacattcttatcgataacgggggagagctccatgcaggttccgcgctgtgtccctttcagggcaattttacgatcatcttgtacggcagggccgacgagggcattcagccagacccgtattatgggttaaagtacatcggagttggcaagggtggtgccctggagctacacggtcaaaagaaactgtcttggaccttcttgaacaaaactctgcaccctggcggtatggccgaaggcggatatttcttcgaacgaagctggggccaccgcggagttatcgtacacgtcatcgaccctaagagcggcacagtaatccactccgatcggttcgacacctaccgctccaagaaggagagtgaaaggctggtgcagtatttgaatgccgtaccagatggccgtattctgtcagtcgccgtcaatgacgagggctccaggaatctggacgacatggctcggaaggctatgaccaagctcggtagtaagcactttctgcatctcggtttcagacatccctggtccttcctcacagtcaagggtaatccctctagctcagttgaagatcatattgagtatcacgggcacagaggcagcgctgctgcgagggtttttaagttatttcaaacggagcacggcgagtactttaatgttagcttatcatccgaatgggtacaagatgtagagtggactgaatggttcgatcatgacaaagtgtcacagaccaaagggggagagaaaatcagtgacctatggaaagctcaccctggaaaaatctgtaatcgccctattgacatccaagccaccaccatggatggcgtaaatttgtcgaccgaagttgtctacaagaagggccaggattatagattcgcttgctacgataggggaagggcctgccgaagttacagagttcgctttctttgcggaaagcccgttaggcctaagcttaccgtgaccatcgatacaaacgtgaatagtactatcttgaatcttgaagataatgtccagtcgtggaagcccggagatacgctagtgatcgcatccacagattatagcatgtaccaggctgaggaattccaggtgctgccttgtcgatcctgcgccccaaatcaggtcaaagtcgctgggaaaccgatgtatctgcacattggtgaagaaatcgacggagttgatatgcgcgcagaagtgggcttactgtcccgcaacattattgtaatgggggaaatggaagacaagtgttacccttaccgcaatcatatatgcaattttttcgatttcgacacattcgggggacatattaagtttgctctgggttttaaagccgctcatctggaaggcacagaattgaagcatatgggtcaacagcttgtgggtcagtatcccattcacttccacctggctggcgacgttgatgaaaggggaggctacgatcccccaacatacatccgggatctaagtattcatcatactttttcacgatgtgtaactgttcatggctcgaacggtttgctcataaaggacgttgtcgggtacaattcacttggccactgtttttttaccgaggatggtcccgaagagcgcaacacattcgaccattgcctcggactgctggtcaaatcaggaacgctgctgccgtccgatagggacagtaagatgtgcaagatgatcactgaagacagttaccccggttacatcccaaaacctagacaggactgcaatgccgtgagcaccttctggatggcaaatccgaacaataacttgattaactgtgctgctgcaggatcagaagagacgggcttctggttcatatttcatcatgtccccacgggaccgagcgttgggatgtattcacctggctactctgagcatattccactggggaagttctacaataatcgcgctcactcaaattatagggccggtatgatcatcgataatggggtcaagactacagaagcatcagcgaaggacaaacggccttttctctccattatctctgcaagatactccccacatcaagacgctgatcctctcaaacccagagagcctgcgattatcaggcactttattgcctataagaaccaggatcacggcgcatggctccgcggaggggatgtctggttagacagttgcaggtttgccgacaacggaattggtctcactctggcgagcgggggaacatttccatacgatgacggaagtaagcaggaaatcaagaatagtctatttgtgggagagtccggtaatgtgggcacagaaatgatggataatcgcatttggggcccagggggacttgatcacagcggacgcaccctccccataggccagaattttccaatcagaggcattcagctgtacgatggtcccatcaacattcagaactgcacttttagaaagttcgtcgccctagagggaaggcacacctctgccctggcatttcgactgaacaacgcctggcagtcctgcccccataataacgtcacaggtatcgcattcgaggatgtgccgataactagtcgagtgttcttcggagagccagggccatggtttaaccaactcgatatggacggggacaagacgagtgtgtttcatgatgtagacggcagtgtctccgaatatccgggaagctacctaaccaagaacgacaactggctcgtgaggcatccagactgtatcaatgttcctgactggcggggagccatctgcagtggatgttatgcgcagatgtatattcaagcttacaagaccagtaacctgagaatgaaaatcattaagaacgacttcccaagtcacccattgtatcttgagggtgccttgacccggtctactcattaccagcaataccagccggtggtgacgctgcaaaaagggtacactattcactgggaccaaaccgcccctgccgagctcgcaatttggctgattaactttaataaaggggattggatccgcgtgggcctgtgttatcctagaggcactacctttagcatcctgtccgatgtccataacaggttgctgaaacagacctcaaagacaggcgtctttgtccgaacacttcagatggacaaagttgaacagagttatcccggtagaagccactattactgggatgaggattcagggctgctctttttaaaactaaaagcacaaaacgaaagagagaaatttgcgttttgcagcatgaagggttgtgagcggatcaagattaaagcacttattccaaagaacgctggtgtgagtgactgtacggccacagcctaccctaagttcaccgagagggccgtagttgacgtgcctatgccaaaaaaactatttggcagccagttgaagaccaaggatcatttcctggaagtgaaaatggagtcctccaagcagcatttctttcatctgtggaatgattttgcttacatagaagtggacggtaagaaatatccgagctctgaggacggcatacaggtggttgtcatcgatggcaaccaggggcgtgttgtatcccatacctccttccggaattctatattacagggcatcccatggcagctatttaactatgtggctacgattcctgataactcaattgtgcttatggcatcaaaagggagatacgtctcccggggaccatggacccgcgtgctggaaaagcttggggctgatagagggctcaaactgaaggagcagatggcgttcgtaggcttcaaagggtcatttaggcccatatgggtgaccctggacaccgaagaccacaaggctaagattttccaagttgtgcctattccagtcgttaaaaagaaaaagctttag

SEQ ID NO: 236642 - DNA, 1947 bp, synthetic construct
  misc_feature 1..1947: note = Description of Artificial Sequence: Synthetic coding sequence
  source 1..1947: mol_type = other DNA
atggaggtgaagggaaaaaaacaattcacagggaagtccacaaagaccgctcaagagaaaaaccgctttcataagaattccgatagcggctcctccaaaacattcccaaccagaaaggtggcgaaggaggggggacctaaggtgacaagcaggaattttgagaagagcatcacaaagctgggcaaaaagggggttaagcagttcaagaataagcagcaaggagacaaatctccaaagaacaaatttcagcctgcaaacaaatttaacaagaaacgaaaattccaaccagatggacggtccgatgaaagcgctgccaaaaagccaaaatgggacgactttaaaaagaagaaaaaggaattgaaacagtcccgccagctttcagacaaaacaaactatgatattgtcgtcagggctaagcagatgtgggagatcctgcgcagaaaggattgtgataaggagaaaagggtcaagctgatgtcagacctgcagaagctaatccagggtaagataaagacgatcgcgtttgctcacgactcaaccagggtgatccaatgctacatacagtacggaaatgaggagcaacgcaagcaagcattcgaagaactgagggacgacctcgttgaattgtctaaagccaaatactcgagaaacatcgtcaagaagtttctgatgtatggcagtaagccccaaattgccgaaataatcaggagttttaagggacatgtccgcaagatgttgcgacacgccgaagcctctgccatcgttgagtacgcatataacgataaggcaatcctggaacaacgcaatatgctcaccgaagagttatatgggaacacatttcagctgtataaatccgctgaccataggaccttagacaaagtcttggaggtacagcccgagaaacttgagctcattatggatgagatgaagcagatcctgacccccatggcccaaaaagaagccgtaatcaagcattctctagtccacaaagtctttctggatttctttacatatgccccaccaaagctgcgatccgagatgatcgaagcaattagagaggcagttgtatacctcgcacacacccacgatggggcacgggtggctatgcattgcctatggcatgggaccccaaaagaccgaaaagttattgtcaaaacaatgaagacatacgttgaaaaggttgccaatggccagtactcgcatctggtgctgcttgccgcatttgactgcatcgacgatacgaagctcgttaagcagattattatctccgagatcatctcctctcttccatcgatcgtcaacgacaaatacggcaggaaggttctgctctacttactctcacctcgcgacccagcccacaccgttcgagagattatagaagtcctacaaaagggcgacggcaatgcccacagcaagaaagataccgaagtgcgcagaagagagcttctagaatccatttcacccgctctgctctcatatttacaggaacacgcccaagaggttgtcctggataagagcgcatgcgtgctcgtgtcagacatactgggcagtgccaccggtgacgtccagcccacaatgaatgctatcgcaagtctcgccgcaacaggcctacatccgggaggcaaggacggcgagctccacatcgccgaacacccggctggtcatctggtgttgaagtggttgatagagcaggataaaaagatgaaggagaatggacgagagggctgctttgccaaaaccctggttgagcatgtcggaatgaaaaacttgaaaagctgggcatccgtgaatcgcggtgcaattatccttagctccctactccagtcctgtgatctggaagtcgcgaacaaagttaaagcagccctcaagtctctgatcccaactctggaaaagactaagagcacgtctaaagggatagaaattctccttgagaagttgtcaacgtag

SEQ ID NO: 236643 - DNA, 339 bp, synthetic construct
  misc_feature 1..339: note = Description of Artificial Sequence: Synthetic coding sequence
  source 1..339: mol_type = other DNA
atgaagaatcaagtctgcagtaagtgtggggaaggtacatactcattgggatccggaataaagttcgatgagtgggacgaactcccagcaggattttccaatattgccacattcatggatactgtggtcggcccatctgactctcgaccagacgggtgtaataactccagctggatcccgagaggaaattacatcgaatctaatcgtgacgattgtacggtgtcactgatatatgctgtgcatctgaagaaatctggttatgttttttttgaataccagtacgtagataataacatatttttcgaatttttcattcagaacgaccagtgccaggagtag

SEQ ID NO: 236644 - DNA, 1842 bp, synthetic construct
  misc_feature 1..1842: note = Description of Artificial Sequence: Synthetic coding sequence
  source 1..1842: mol_type = other DNA
atgttttcagctggggctgaatcccttttacaccaggctcgggaaattcaggatgaagagctgaaaaagttctgttctagaatctgtaaattacttcaagccgaggatcttggccctgatactttggactctctgcagaggctcttcttgatcatcagcgcaaccaaatattctcgcaggttggagaaaacttgtgtggatctactgcaggcaactctcggtctgcccgcatgccccgaacaattgcaggtcctgtgtgcggctatcctgagagagatgtccccatcagactcgctgtcccttgcatgggaccacactcagaactccagacaattgagcttggttgccagcgtgctgctggcccaaggggatcggaacgaagaggtccgggcagtggggcagggggtgctccgggctttagagtctcgacagcctgaaggaccctctctgcgtcacctcctgcccgtgatggcaaaggtggttgtgctttctcccggaaccctccaggaggatcaagctacgctgttgagcaaacggctcgttgattggttgcgttatgcttccctgcagcagggtctgccccactccggaggattcttctccacccccagagccaggcagcctgggccagtcacagaggtggatggggctgtagccacagatttcttcaccgtcctgagctccggtcatcggttcacagatgatcagtggctcaatgtccaagcattcagtatgttgcgcgcttggcttctgcactctgggccagaaggtcccggaactctggataccgacgaccggtcagagcaagaggggagcaccctgtccgtgatatcagccacgtcatcagccggaagactccttcctccaagagagcgcctcagagaggtggcctttgaatactgccagagactgatcgagcagtccaaccgaagagcgctgcggaagggagattctgaccttcagaaagcttgcctggtggaagcagttcttgtacttgatgtgctctgccgtcaagatccctcgttcctgtacaggtccctctcctgcttgaaggctctgcacggacgggttcgcggagaccctgcatctgttcgagtcctgttgcccctagcccatttttttctgagtcacggggaggccgctgctgttgacagcgaggctgtgtatcagcacctgttcactagaattccagtggaacaatttcactcccccatgctggcgtttgagttcatccaattctgtagggacaatctacaccttttcagtggccatctgagcacccttcgtcttagtttcccaaatctgttcaaattcctggcgtggaatagtccaccgttaacatcggaattcgtggctctcctgcctgcgctggttgatgcagggacagctcttgagatgcttcacgcccttctcgaccttccgtgcctgaccgccgtcctcgacctacaactgcggagtgcacccgctgcgagcgagcgcccactgtgggacaccagcttacgcgctccttcatgccttgaggctttccgcgacccacaatttcaagggctgtttcagtacctgttgcgccctaaagcatcgggagcaactgaacggctggcgcctcttcatcaactactccagcctatggccggatgtgcgagagtggcacagtgcgcacaggccgtcccaactcttctccaggcatttttctctgccgttactcaagtcgcggacggttccctcatcaaccagctggccttgcttctgttggggcgatctgactccctataccctgcgccaggatacgctgccggagtacataggccagatgcctgccgccctatcttggtgcctctatag

SEQ ID NO: 236645 - DNA, 918 bp, synthetic construct
  misc_feature 1..918: note = Description of Artificial Sequence: Synthetic coding sequence
  source 1..918: mol_type = other DNA
atggagaaggaaacatacaagactgccaagctgattttagaaaggtttgaccctgacagcaaaaaagccaaggagtgcgaacccccttctgcaggtgccgctgttacggcgagacccggacaagaaatccgtcaacgtactgccgctcagcgcaacctgtcccctacaccagcaagtccgaaccagggccctccccctcaggtgcctgtttcacctggtcctcccaaggatagtagcgcccctgggggaccacccgagcggactgtaaccccagccctctcctccaatgtactcccaaggcaccttggctcacctgcaaccagcgtaccaggtatggggctccacccgcctgggcctcctcttgccagacccatcctgccgagagagcgcggagcccttgaccgcatagtagaatatcttgtgggggacgggcctcagaatcggtacgctcttatctgccagcagtgtttctctcacaacggaatggctttgaaagaggaattcgagtacatcgcttttcgctgcgcctattgcttttttttgaacccagcccgtaagacgagaccgcaggcgccacgcctccccgagttcagctttgagaaaaggcaagttgtggaagggagctccagcgtggggcctttaccttcaggcagcgtcctgagctccgataaccagtttaacgaggaatccctggaacacgatgttctggacgataacacggaacagactgacgacaaaatccctgcgaccgaacagactaaccaggtcatagagaaagcctccgattccgaggagcctgaggagaaacaagaaacagagaatgaagaggcttcggtcattgagacgaattctacggtgcccggtgcagacagtattcccgatcccgaactctcaggcgagtcccttactgccgagtag

SEQ ID NO: 236646 - DNA, 2589 bp, synthetic construct
  misc_feature 1..2589: note = Description of Artificial Sequence: Synthetic coding sequence
  source 1..2589: mol_type = other DNA
atgcacagcagctggatcccacgagggaattacatcgaaagtaatcgcgatgattgcacagtcagcctgatttacgctgtccacctgaagaagtctggttacgtgttctttgaatatcagtatgttgacaacaatatcttctttgaatttttcatccagaacgatcagtgtcaggagatggacacaacgactgacaagtgggtgaagctaacagataacggggagtgggggtcccatagtgtgatgctgaagtccggtaccaacattctgtactggcggaccacgggtattctcatgggaagtaaggccgttaagccagtgcttgtgaaaaatattacaatcgagggcgttgcatacaccagcgagtgcttcccctgcaaacctggcacattttctaataaaccaggctcgttcaattgtcaggtttgccccagaaacacatattctgagaagggcgctaaggagtgcatcagatgcaaggatgactcgcagttttccgaagaaggttcgagtgagtgtactgaacgccctccgtgcactaccaaggattatttccagatccatactccatgcgacgaggaaggtaagacccaaatcatgtacaaatggatagaaccgaagatctgtcgtgaggatctgactgacgcaattaggcttcctccgagcggcgaaaagaaggactgccctccatgcaaccccggattctataataacggatcaagtagctgccatccttgccctccaggaactttcagcgatgggacaaaggagtgtcggccatgtcccgcaggaacagagcccgctctcggtttcgaatacaaatggtggaatgtgctccccggaaacatgaaaacctcatgcttcaacgtcggtaatagtaaatgtgatgggatgaacggctgggaggtggctggagaccatattcagtcgggtgccggaggatccgataacgattatcttatcttgaacctgcacatccctggattcaaaccacctacttccatgacaggagctactgggagcgagctgggtcgaattacatttgtcttcgagacactgtgctcagccgattgcgtactgtattttatggtggacatcaatcgcaaatcaacaaatgtggtggagtcatggggcggtactaaggagaaacaagcatacactcacattattttcaagaatgctactttcacgtttacctgggcctttcagcggaccaatcagggacaggataaccggagatttattaacgatatggtcaagatctattctattacggccaccaatgccgtggacggcgtggcatcttcttgtagagcctgtgctctcgggagtgagcagtctgggtcgagttgtgtcccctgtcctcccggacactacatcgagaaagaaaccaatcaatgcaaggagtgccctcctgacacctatttgagcattcaccaggtgtatggtaaagaggcctgcatcccgtgcggcccaggttccaagaataaccaggaccatagcgtctgctatagtgattgttttttctatcacgagaaggagaaccagtcacttcactacgacttctccaatctcagcagcgtagggtccctaatgaatgggcctagtttcacctcaaaaggcaccaagtactttcatttctttaacataagcttgtgcggccacgaggggaagaagatggccctttgtacaaacaacatcacagatttcacagtaaaggagatcgtagcaggtagtgatgactataccaacctggtgggtgcgtttgtgtgtcagagcactatcatcccttctgagagtaaaggatttagagctgccctctccagtcaaagcatcatcctcgccgacacgttcattggagtgacagttgagaccaccctgaagaacatcaatatcaaggaggatatgttccccgtgcccacctcacagattccggatgttcattttttttataagtcctctaccgccaccacttcttgcataaacggcagatccactgccgtgaagatgcggtgcaacccaactaaatccggggctggggtgatctctgtaccatctaagtgcccagcaggaacttgtgatgggtgtaccttctattttctatgggagtcagcggaagcatgcccactttgtactgagcacgactttcatgagattgaaggggcttgtaagagagggtttcaagagacactgtatgtctggaacgagccaaagtggtgtatcaagggaatttctctgccagagaaaaaactggctacctgtgaaaccgtggatttttggttgaaggtcggtgcaggcgtgggtgcatttacggccgttcttttggttgccttgacatgctacttctggaagaagaaccaaaaactggaatataaatacagtaagctggtgatgacgacaaactcaaaggaatgtgaactaccggctgcggactcatgcgctatcatggagggcgaggataacgaggaggaagttgtgtacagcaacaagcaatcattgcttggaaaactgaagtcactagcaaccaaggagaaggaggatcattttgagtcggtccaacttaaaacatctagatcccccaacatttag

SEQ ID NO: 236647 - DNA, 5852 bp, synthetic construct
  misc_feature 1..5852: note = Description of Artificial Sequence: Synthetic coding sequence
  source 1..5852: mol_type = other DNA
atgccgggagcccgtcgccgtcgccgtggggctgctatggaagggaagcccagagccggagtcgccctggcacccggaccctccggtaggcgcccatctgcccgatgtgcgcgacgtagacgacccggactgcttctccctggactatggctcctcttactagcaagacccgcatcttgtgcgccagatgaactatcaccagaacagcataatctatctttatatagcatggagttagtcctcaagaagtctacaggccactcagcagcccaggtcgccctgaccgagaccgcacctggaagccagcattcctcgccactgcacgttacagcccctccatccgcaaccaccttcgacacggccttcttcaaccagggtaaacagaccaagtcgaccgcggaccccagcatcttcgtcgcaacctacgtcagcgtgaccagcaaggaggtggctgtaaacgacgatgagatggacaatttcctgccggacacacactggaccaccccccgaatggtgagtcctattcaatacatcacggtcagccctcccggactccccagggaagccttagagcctatgttgaccccaagtctgcccatggttagtcttcaggacgaagaggtcactagtggttggcagaacacgactcgacagcctgccgcatatgctgaatccgcaagccattttcatacctttagatcagcttttagaacctcagaaggtattgtacctactccaggtagaaacttagtgctctaccccaccgatgcctattctcacctcagcagccgtaccctccctgagatcgtcgcaagtttgacagagggcgtggaaacaactctttttctctccagccggtctctgatgccacagccgttgggtgatggaattactatcccacttccaagtctgggcgaagtatcccagcctcccgaggaagtatgggctacctccgctgacagatacacagatgtgaccaccgtccttagccagtccctggaggagacaattagtccccgaacataccctacggtgacagcaagccacgccgctttggcattttctaggacccattcacctctcctgtcaacgcccctggcctttgcgagttccgctagtcctaccgatgtgagctcaaatccgttcctgcctagtgatagctctaagacctccgagctccactctaattctgcccttcccggacccgttgataatacccatattctgtcccccgttagtagcttccggccatatacctggtgcgccgcatgcactgtaccaagcccacagcaggttcttgccacatcacttatggagaaagacgtggggtcaggcgacggcgctgagactctgtgcatgaccgttttagaggagtcatctatttccctgatgtcatcagtggtggctgacttttccgaattcgaggaagatccccaggtgtttaacactcttttccctagcagaccaatcgttccactatcttcccgatccatggagatttctgaaacctcagttggcatcagcgccgaagttgatatgagttccgtgaccacaacacaggttcccccagcccacggtaggctctctgtgcctgctagtctggaccccacagccggaagtctgagtgtcgctgaaacccaggtgacgcccagttcagtgaccactgcctttttcagcgttatcacctcaattctcttggacagcagtttttctgtcatcgccaataaaaacaccccctccttagccgtgagagaccccagcgtatttacaccatacagtctggtgccctccgtggagtcttctcttttttccgaccaggagagaagttcattctccgaacacaaaccacggggagcactagatttcgcttcctccttcttttccactccacctttagagctgagcggatccatctcctcgccttcggaagcccctgcgtctttgtccctgatgccctcagatctctccccctttacttcacaaagtttttccccgttggtggaaaccttcacactgtttgacagtagtgatcttcagagttcccagctatcattgccaagttccactaatctggagttttcccagctgcagccctctagcgaactcccgctgaacactatcatgctgcttccttccagaagcgaagtgagcccctggtccagcttcccatctgactcacttgagtttgtggaagcctccactgttagtctgaccgattctgaggcccacttcacaagtgcgttcatcgagactactagctatctggaatcctcgctcataagtcacgagagcgccgttacagctttagtgcccccagggagtgaaagttttgatattctgactgccggtatccaggccactagtccccttaccactgtgcatacaaccccaattctgacagagagcagtctcttctccacactgacccccccagacgatcagattagcgcactggacggtcacgtctctgtgctcgccagcttcagcaaggcaatccccaccggtacggttctcatcaccgacgcgtatctgccctccggctcttcatttgtctctgaggcgacgcccttcccgctgccaaccgaactgaccgtcgtgggcccttccctcactcctaccgaggtgccgctcaacaccagtacagaagtgagtacgacaagcaccggagcggctacggggggtcccctagactctacgttgatgggcgatgcggcaagccagagtcccccagagtcgtcggcagctcctccgctgccatcactgagaccagtgactgcatttacactcgaggctacagtggataccccgacacttgccaccgccaagccgccttacgtgtgcgatatcacagtgcctgatgcatatttgattacaacggtgctcgcacgacgagcagtacaggaatatattattacggcaataaaggaagtcctcagaatccactttaatagagcagttgagctgaaggtatacgagctctttaccgatttcacatttctggtcacaagcggccctttcgtttacaccgctatcagcgttatcaatgtgctgattaactcgaagctagtgcgggaccagacccccctcatacttagcgttaaaccctcattcttagtccctgaatcgagatttcaagtccagacagttctgcagttcgtgccaccaagtgtcgacaccgggttttgcaatttcactcagcgtatcgagaaaggcctcatgaccgctctgttcgaggtgagaaagcaccaccaaggcacctacaatctgaccgtacagatcttaaatatcaccatcagtagttcacgggtgacaccacgacgcggacctgttaacataattttcgccgtcaagagtacccagggattcttgaacggatccgaggtctccgagctgttgagaaaccttagcgtggttgagttttctttctatctgggttatccagtactgcaaattgccgagccattccagtatccacagctcaacctatcgcagctcctgaagtcctcctgggtgcggaccgttcttctgggggttatggagaaacagctccagaatgaggtgtttcaggccgagatggaaagaaagcttgcacagctgctgtctgaggtgtccacacgacgtcggatgtggcgcagggcgacagtcgccgcaggaaactcggtggtgcaggtcgtcaatgtatctagactcgagggggatgacaatcctgtccagctcatttactttgttgaagatcaagatggggagagattgtctgctgtgaaaagcagcgatctcatcaacaaaatggatctgcagcgcgctgcaattattctagggtaccgtattcaaggcgtcatagcccaacccgtggaccgggtcaaacgaccttctcccgaaagtcagtcgaacaatctgtgggtcatcgtaggtgtcgtcattccagtgctggtggtaatggtaatcgtggtaatcctgtattggaaactgtgtcgcaccgacaaactggacttccaacccgacacagtcgctaacattcagcagaggcagaagttgcagatccccagcgtgaaagggtttgacttcgccaaacaacatctgggacagcataataaggatgatattctgattatccacgagcccgcaccgctgcccggaccgctgaaggatcatacaacgccaagtgagaacggggacgtgcccagccccaagagcaaaataccctcaaagaacgtgaggcatcgtggccgagtatcaccaagcgatgccgactctacggtgtctgaagaaagctccgagcgagatgccggagacaaaacacccggtgctgtcaacgacggccgatctcacagggctccacaaagtgggccaccgcttccatctagcggaaatgaacagcacagctccgcatccatattcgagcatgtagacaggatctcacggcctcctgaagcgtcccgacgggtgccatccaagatccagctaatcgcaatgcaaccaatcccggctccgccagtccagcgcccaagtcctgcggacagagtggccgagtctaataagattaacaaggaaatccaaacagccctgaggcacaagtcagaaatcgaacatcacaggaataagatcagattacgagcaaagaggcgaggccattacgaatttcccgtggtagatgatctgtcatccggggacaccaaggagagacaccgcgtttatcgcagggcccaaatgcaaattgataaaattctggatcccaccgcatcagtgccatcagtatttattgagccgcgtaagagctctcgcataaagaggtcccccaaacccaggagaaagcaccaggtgaatggatgcccagctgacgcagagaaagacagactcattactacagactctgacggaacttaccggcgtccaccaggggtgcacaattcagcttacatcggatgcccgagcgatcctgatctgcctgctgacgtgcagacgccctccagcgtggagctaggccgatacccagccctcccgttccccgcttcccagtacattccaccccagccttccattgaggaggcaagacagactatgcactcccttctggacgatgccttcgccctggtcgccccttcctcccagccagcatctacggctggcgttgggccaggcgtgcctcccggactgcctgccaacagtactcccagtcaggaggagcggcgtgccacccagtggggaagcttctacagccctgcccagactgcaaataacccctgcagtagatatgaggattatgggatgacaccacccacgggacctcttccaaggcctgggttcgggcctggtctgctgcaatccacggagctggtgccaccagacccccagcagcctcaggcctcggccgaggctcccttcgcggctagagggatctattcagaagagatgccatcagtggctagaccacgcccagtgggaggaactacagggtctcaaatccagcacttaacgcaggtcggaatcgcttcccgcataggtgcccagcctgttgagataccccctagccgaggatcgcagtatggaggccctgggtggccaagctacggagaggatgaggcgggacgtagagaggcaactcacatgctgggacaccaggaatactccagcagtcctctcttccaggtgcctcggacttctggtcgggaaccgagtgcgccttccgggaacctacctcacagagggttgcagggtcctggcctgggataccctacatcttccacagaggatttgcagcctggacactcaagtgctagccttattaaggccatcagggaagaactacttcggctgtctcagaagcagagtactgtgcagaacttccacagtta

SEQ ID NO: 236648 - DNA, 357 bp, synthetic construct
  misc_feature 1..357: note = Description of Artificial Sequence: Synthetic coding sequence
  source 1..357: mol_type = other DNA
tgaaagtctaacggaaagactgcaattggcgaccccggacgagctaacatgccaggatacaatgaggatagtcgcagcacttttttcgacaaaaaatattctaacatgtctaccctggggaacaacgggccaacccacaagaagctgtacaggcacaagtccagcagcaaagctttgagggacgagaagtgcaagggcaagcatatggagcgagagcaggtccacaaggatgaaagtgggacagccagttttgagaagctgcgggactcggattataatctcttaaaggctgagacaacattttgggttctccctgttttcgaggaagaaacccgcatctttcagaaggatatttag

SEQ ID NO: 236649 - DNA, 3084 bp, synthetic construct
  misc_feature 1..3084: note = Description of Artificial Sequence: Synthetic coding sequence
  source 1..3084: mol_type = other DNA
atgagagtatctcacacctttcccgtggtggattgcacagcggcatgttgcgacctgagctcctgcgatttagcctggtggttcgagggcaggtgctacttggtcagctgcccgcacaaggagaattgtgagcccaagaagatggggccaatccgctcctatctgacattcgtcctccggcctgtacagcggccagcccagcttctggattatggcgatatgatgctgaaccgtggatctccatctgggatttggggcgactcacctgaggacattcggaaggacttaacgttcttgggcaaagactggggcctggaggaaatgagtgaatattccgatgattaccgagaacttgagaaagatcttctccagccttccgggaaacaggaaccccgtggcagcgccgagtatactgattgggggcttctcccaggtagcgagggggcatttaatagctccgtcggagatagcccagctgtgccggcagagacccaacaagacccagaattgcactacttgaatgaatctgcatctacacccgcaccaaagctcccagaacggtctgttctactccccctccctacaacgccatcatccggcgaagttttggagaaggagaaggcctcccagctacaggagcagtccagcaattcctccgggaaggaagtgttgatgccgtcacatagtctccctcctgcaagtctggagctctcatcagtgaccgttgagaagtctcctgtgttgactgtgactcccggtagtaccgagcatagtatccccacccccccaacaagcgccgctcctagtgaaagcacaccctctgagttgcctatcagtccaacaacagcccctcgcactgtcaaagagctcacggtttccgctggagataatcttatcatcaccctgcccgacaatgaagtggagcttaaggcgtttgtggctcccgctcctccggttgaaacaacatataactatgaatggaatctgatatctcatcctaccgactatcagggcgagatcaagcaggggcataaacagactctgaatctaagccagctgtctgtcgggctatatgtgtttaaggtgactgtctccagtgaaaatgctttcggagaaggatttgttaacgtgaccgtgaagccagctcggagggttaacctgccccctgtggcagtggtaagcccccagctgcaggaactgacccttcccctgacgagcgcactgatcgacggatcacagtctacagacgacaccgagatagtgagttatcactgggaggagatcaacggaccattcattgaggaaaaaaccagtgttgacagtcccgtattgcgcctttccaacctggaccccggaaattacagttttaggctcactgtcactgactcagacggcgctactaacagtacaaccgcggcactgattgttaacaacgcagtcgattatccccctgttgcaaatgcgggaccaaaccatacaatcaccttgccccagaactccatcacattgaatggaaatcagagctctgacgaccaccaaatagttctttatgagtggtcacttgggccaggaagcgagggaaagcacgtcgtgatgcagggcgttcagactccttatcttcacttgtccgcaatgcaagaaggagactacactttccagctcaaggtaacagattcctcccgacagcagtcaaccgctgtcgttaccgtgatagtccagccagaaaacaaccgcccacccgttgcggttgctggccctgataaagagctgatcttcccagtggagtctgctaccctggatgggtcttcaagctccgacgaccacgggatcgtattctaccattgggagcacgtccggggtccttccgccgtcgagatggaaaacatcgacaaggcaattgcaaccgtgaccggtctccaggtgggaacataccatttcagactcaccgtcaaagaccaacagggtttgtcgtctacctctacactcaccgtggccgtgaaaaaggaaaataacagccctccaagggccagggcgggtgggagacacgtgctggttctgcccaacaattccatcactctggacggctctcggtcgaccgacgatcagcgaattgtgtcttatttgtggatccgcgacggccaaagtccagcagccggagatgtaatcgacggctccgatcattccgtcgccctgcagctgacaaatctggttgaaggagtatacacttttcatctgcgcgtgactgatagccagggcgcttcggatacagacacagctaccgtagaggtccagcccgacccgagaaaatctggcctcgtggaactaacactgcaggtgggcgtggggcagttaaccgaacagaggaaagacacgctcgtgcgccagctggccgtgcttcttaatgtactggacagcgacatcaaggtgcaaaagattcgtgcacacagtgatttgagtacggtgatcgtcttctatgtccagagtcgccctcccttcaaagtcctgaaggccgctgaagttgcgagaaacttacacatgagactgtccaaggagaaggctgatttcctgcttttcaaagttcttcgtgtcgacacagccggatgcctcttgaaatgctctggacatggccactgcgatccgctcaccaaaagatgcatctgcagccatttgtggatggagaatctgatccagcgttatatttgggacggggaatcaaactgcgaatggtcgatcttttacgtcacagtgttagcgttcacgctgatcgtcctgacaggcggattcacctggttatgtatctgctgctgcaaacgccagaaacggactaagattcggaaaaaaacgaaatacacaattctcgataatatggacgaacaggaacgcatggaattgcgaccaaagtacgggatcaagcacagaagcacagaacataattcgtctctcatggtttcggagtctgaatttgatagtgatcaggacactatcttcagtcgggaaaaaatggagaggggaaacccaaaagttagtatgaacgggtctatccgtaatggcgcttcattctcctactgtagtaaggaccgctag

SEQ ID NO: 236650 - DNA, 1821 bp, synthetic construct
  misc_feature 1..1821: note = Description of Artificial Sequence: Synthetic coding sequence
  source 1..1821: mol_type = other DNA
atgggcaatacctgtcgcgtgtgttaccagcttgaggccatcaagagatcaaatgagatgtctaatgtgatgggcaacacaacctggaccacgtccgggcttaaaagccagggacggctctccgtcggatccaacagggaccgcgagatttccatgagtgtgggcctgggcaggtcacagttagattctaaaggcggagttgtcgggggtaccatcgatgtgaacgctctggagatggtagcacacatttcggagcaccctaaccagcagcctagtcataagatccagatcaccatgggcagcactgaggccagagtggactatatgggaagctctatcctgatggggatcttctctaatgctgacctcaaattgcaggatgagtggaaggtgaacctatacaacaccttagactcttctattactgataagtccgaaatttttgttcacggagatctgaaatgggacatcttccaggtgatgattagcaggtccaccacaccagacctgataaaaattggaatgaagttgcaggagtttttcacgcaacagttcgacacatccaagcgggcattgtcaacatgggggcctgtgccatacctgccaccaaaaaccatgacaagtaacctggagaagtcctcccaggagcagttactcgatgctgcacatcatagacattggccaggggtcctgaaggtcgtttcgggttgccacatcagtcttttccagataccacttccagaagacggcatgcagtttggtgggtcaatgagtcttcatggaaatcacatgactctcgcttgtttccatgggcctaatttcaggagcaagtcttgggccctgtttcacttggaggagccaaatatagccttctggaccgaagcacagaagatttgggaggacggtagctctgaccactcgacgtacatcgtgcagaccttggatttccacctgggccacaacactatggtgactaaaccttgtggggcactcgagagtccaatggccacaatcaccaagattactaggcggcgacatgagaaccctccccacggagttgcatccgttaaagagtggtttaattatgtcactgcaacaagaaatgaggaactgaatcttctcaggaacgttgacgctaataatacagagaattcaactaccgtaaagaatagcagcctgctcagtggtttccgcggaggatctagctacaaccacgaaacagaaaccatctttgccctgcctcgcatgcagctggacttcaagtcaatccatgtacaggaaccacaggaaccaagcctgcaggatgccagccttaagcccaaggtggagtgttcagttgtaaccgagttcacagatcacatttgcgtgactatggacgccgagcttataatgtttctgcacgacttggtttctgcatatctaaaagaaaaagaaaaagctatatttccccctcggattctcagcacacgccctggtcagaagagcccaatcattatccatgatgataacagttccgataaggacagggaggacagtattacctacacaacagtggattggcgcgatttcatgtgtaacacgtggcacttagagcccaccctgcgcctgatttcgtggacaggaaggaagattgaccccgtgggtgtcgattatatcctacagaagctggggtttcatcatgccagaactactataccgaaatggttacagaggggcgtcatggatcccctggacaaagtcctcagcgtgctgattaaaaagctggggactgccttacaggacgagaaggagaagaagggaaaagataaagaggaacactag

SEQ ID NO: 236651 - DNA, 5804 bp, synthetic construct
  misc_feature 1..5804: note = Description of Artificial Sequence: Synthetic coding sequence
  source 1..5804: mol_type = other DNA
atgccgggagctcgcagacggcgtagaggggcagccatggaaggcaagcctagagctggggtggcactcgccccaggccctagcggcagacgccctagtgcaagatgtgctcggagacggaggccgggtcttctgctccccggtctgtggctgctgttattggccagacccgcttcctgcgctcccgacgagcttagccccgagcagcacaacctaagcttatattccatggagctggtcctgaaaaagagcacgggccatagcgcggctcaggtggcacttaccgagaccgctccaggctctcagcactctagcccactgcacgtcacggcccctccctcagccactacctttgatactgcatttttcaatcagggtaaacaaactaaatcaacagccgatcctagcattttcgtggcgacatacgtttctgtcacatcgaaggaagtggccgtgaacgacgatgaaatggacaacttcctccctgacactcattggaccaccccacgtatggtgtctcccatccagtacattacagtgtcccccccaggactaccccgtgaggccctggagccaatgctaacccctagcttgcctatggtgagcctccaggatgaagaggtcacctccggatggcagaatacgacacgccagccagcggcatatgctgaatcagcgagtcactttcataccttcaggagtgctttccgaacctccgaggggatagtgcctacccccggacgaaacttggtgctgtatccaaccgacgcgtattctcacttgtcctccagaaccttacccgagattgtggcaagcctgacagagggcgttgaaaccactctttttctgagcagccgcagtcttatgcctcagccactgggcgacggcattaccatccctcttccctccttgggggaggtcagccagccacctgaggaagtctgggccacctctgcagacaggtatactgatgtcaccaccgtcttatcacaaagcctcgaagagaccatatcacctcggacttatcctacggtaaccgcatcccacgcagctttagccttcagtagaacgcactcaccactcctgtcaacccctctggcctttgctagttctgcctctccaaccgatgtctcttcaaaccctttcctcccctcggatagcagcaagacatctgagctgcactctaattctgccctgccaggccctgtagacaacacgcatattctgtcccctgtgtcgagcttccgaccatatacctggtgcgctgcctgtacagtgccctctccccaacaggtcctagccactagcctgatggagaaggatgtgggctctggagacggggctgagacactgtgcatgaccgtcctggaggaaagcagcatatctctcatgagttccgtggtggccgatttctctgaattcgaggaggacccccaagtgttcaacaccctctttccttcacgcccaatcgtccctctctcctcacgctccatggaaatatccgagacctccgttggaatttccgccgaggtggacatgtcatctgtgacgactacacaggtcccgccagcccatggacggctgtctgtacccgcatccctggacccaactgccggatctctaagtgtggccgaaacccaggtcactccctcaagcgtgacgaccgcctttttctccgttatcacttctattttacttgatagctcgttttcggtgatcgcaaataaaaatactccctcgctagcagtccgggatccatccgtgttcaccccgtacagcctcgttccatcagtcgaatctagccttttcagcgaccaagagagatctagtttttccgaacataagccacgcggagcgctggactttgcttcctcgttttttagcactccccctcttgagttgtcagggtctatctcttccccaagcgaggcaccagcctctctgtctctgatgccgagcgacctcagtccctttaccagtcagtctttcagtcccctggtcgaaacctttactctgttcgactcttccgatctgcagagcagccagctgagcttgcctagctccactaaccttgaattcagccaattgcagcctagttctgagttgcctctcaacactataatgctcctgcccagcagatctgaggtaagtccttggtccagtttcccaagtgactcactcgagtttgtggaagcctccaccgtgagtctgaccgactctgaggcccattttacctccgcatttatcgaaaccacaagctacctggaaagttctctcataagccacgaaagcgccgtaacggcattggtacccccagggagcgagtccttcgacattttgacggccggaattcaggccacctctcccctaactacagtgcacaccacccccatactcactgagtctagtctcttcagtaccctcactccacccgatgaccagataagcgcactcgacggccatgtgagcgtgttggctagcttctccaaagcgattcctacgggtacagtgctgatcactgacgcgtatctccccagtggctcctcttttgtctcggaagccaccccatttccattgcccactgagctgacagtggtgggaccatctcttacaccaactgaagtgcccttgaatacgtccacagaagtgagtaccacttctaccggggctgccactggcggtcccctagattccacgttaatgggggatgccgcaagtcagtcaccaccggagtcttccgccgctcctccacttccttcactacgcccagtgactgcatttacactcgaagctactgtagacactcctacgctagccacagcaaaacccccatacgtatgtgatatcaccgtcccagacgcgtacctgataaccaccgtgctggcccgtcgtgcggtgcaggaatatatcatcacggctatcaaggaagtgctgcgaatccattttaacagggctgttgaactgaaagtttatgagttgtttacagatttcaccttcctcgtgactagcggtcccttcgtgtacactgccatatccgttatcaatgtcctgattaattcaaagttggtgagggaccaaacccctttgatcctgagcgtgaagccttcattcctcgtcccagaatccaggttccaggtacagaccgttctgcagttcgtaccccctagcgtcgacacaggattttgtaactttacccagcgcatcgaaaaagggcttatgacggcattatttgaggtccgtaaacatcatcaggggacttacaatctgacagtgcagattttaaacataacaatcagcagttcccgcgtgacccccagaagagggccagttaacatcatcttcgctgtcaaaagcactcaggggtttctaaatggctccgaggtgtccgagttgcttcgaaacctctccgtggttgagttctccttctatctggggtaccccgtccttcagatagccgaacccttccagtaccctcagttgaatctttcccagcttcttaagtcgagctgggtgcgtactgtgttgctgggcgtcatggaaaagcagctgcagaacgaagtctttcaagctgagatggagaggaagttggcccaacttctgtcagaggtatctacgcggcgacggatgtggaggcgggctacagtggctgcaggcaatagcgtcgtgcaggtggttaacgtgtctaggcttgagggtgatgataatcccgtgcaactgatttactttgtggaggaccaggatggagaacgcctctccgcagtaaagagctcggatttaattaacaagatggacctacaacgtgcagcgattatactggggtataggatccaaggcgtcattgcccagcctgtagacagagttaaacggccatcccctgaatcacagagtaataatctgtgggtgatcgtcggtgttgtcatccccgtgctagtcgtcatggttattgttgtaattctgtactggaaactctgtcgcacagacaaattggactttcaacccgatacagtggccaacatccaacagagacagaagctgcagataccctctgtaaagggctttgactttgcaaaacagcacctggggcaacataataaggacgacatcctcatcattcacgagccggctccactcccagggcctttaaaggaccataccacgccgagtgaaaacggcgatgtaccttcaccgaagagcaagatcccttcgaaaaatgtgaggcatcggggtcgcgtctcaccatcagacgctgattccactgtctctgaggagtcctcagaaagggatgccggagacaagaccccaggggcagtgaatgatggcagaagccatcgcgctccccagtccggacccccactgccatcttctgggaacgagcagcattcctctgcttccatcttcgagcacgtcgacagaatatctcggccaccagaggctagtcggagagtgcccagtaaaatccagctgatcgcaatgcaaccaatccccgcacctcctgtgcagagaccaagccctgccgaccgcgtggcagaatcaaacaagatcaacaaagaaatacagacggccctgagacacaagtctgagattgaacatcacaggaataaaatcaggttgagggccaaaaggagaggccattacgagttccccgtggtggacgatctgtcttcgggtgacacaaaggagcgccacagagtttaccggagagctcagatgcagatcgataagatcctcgaccctaccgcaagcgtcccctccgtttttattgaacccagaaagtcaagccggattaagaggtcaccaaagcctcggcgaaaacaccaagtgaacggctgtcctgctgacgctgagaaggatcgcctcataacaacagacagcgatggcacctaccgaagacctcctggagttcataactcggcttacattggatgtccatcagacccagacctgccagcagatgtccaaacccccagttccgtggagctgggccgatatccggctttacccttccctgcgtctcagtatattcctccgcagccctcgattgaagaagcacgccagacaatgcactccctgttggacgacgcctttgccctcgtagcccctagttctcagcctgcttcgacagccggtgttggacctggtgtgccaccgggtttgcctgctaattcgacgccatcccaagaagaacggagggcgacccagtggggtagcttctactctcctgcacagacagcaaacaatccctgcagcagatacgaagattatggaatgacacccccaacaggcccacttccacgcccagggtttggcccaggcctgctgcagagtactgaacttgttccaccggacccccagcaaccacaggctagcgcagaagcaccatttgcagcacgaggcatctattccgaagaaatgccatcggtagcccgtcctcggcctgttggagggacaaccgggagtcagattcaacatctcactcaggtaggaatagcctcaaggatcggggctcaaccagtagaaattcccccatcccgcggttctcaatatggcggacctggctggccatcctacggcgaggacgaagcaggcaggagagaagctgtgccaaggacgagcggccgagagccatccgccccatcaggcaaccttccacacaggggcctgcagggccctggactcggctacccaacctcttctacagaagatcttcagcctggccattcctccgcatcacttataaaggctatccgcgaagagttgcttagactaagtcagaaacagagtacagtccagaatttccactccta

SEQ ID NO: 236652 - DNA, 252 bp, synthetic construct
  misc_feature 1..252: note = Description of Artificial Sequence: Synthetic coding sequence
  source 1..252: mol_type = other DNA
atgggcggacttttcagccggtggcgcaccaaacctagtacagtggaagtgcttgagtctatcgataaagaaattcaggcactggaagagtttcgggagaagaaccagcggctgcagaagttgtgggttgggcgattgattctttatagcagtgtcttgtacttgttcacctgcttgattgtctacttgtggtatctacctgatgaatttaccgcgcgtttggccatgactctgcccttcttcgctttttag

SEQ ID NO: 236653 - DNA, 3090 bp, synthetic construct
  misc_feature 1..3090: note = Description of Artificial Sequence: Synthetic coding sequence
  source 1..3090: mol_type = other DNA
atgctgttcagagccaggggcccagtcaggggaaggggctggggacgtcccgctgaggcgccaaggagaggacggtcacctccctggagtccggcttggatatgctgctgggctttagccggatgccaggcagcctgggccggagatctcccctctagttccagcagacccctgcccccttgtcaagagaaagactaccactttgaatacaccgagtgcgattcctctggaagtcgctggcgggtcgccatcccaaacagcgccgtggactgttctggcctgccggacccagtgcggggaaaggagtgcaccttctcttgtgcctctggtgaatatctggagatgaaaaaccaggtgtgctccaaatgcggtgagggaacgtattcgttaggttccggcattaagtttgacgagtgggacgaactgccggctggcttcagtaatatcgcgacctttatggacacagtggtgggcccaagcgattcacgccctgatgggtgtaataactccagttggatacctcgagggaattatatcgaatctaatcgagacgactgcactgttagcctgatctacgcagtacacctgaaaaaatctggctatgtgtttttcgagtaccagtacgtagataacaatattttctttgaattcttcatccagaacgatcagtgccaggagatggacacgacaacagacaagtgggtgaagttaacggataacggcgaatggggctcacactctgtaatgctcaagtcaggtacaaatattttgtactggagaaccaccggtattttgatgggaagcaaggctgtgaagccagttctggtgaagaatatcactatcgagggcgttgcatacacatccgagtgtttcccatgtaaaccgggaacattttcaaacaagcctggttcgtttaattgccaggtgtgtcctcgaaatacctactcagaaaagggtgcaaaggaatgtattcgctgtaaggatgatagtcagttctccgaagaggggtccagcgaatgcactgagcgtcccccttgtactactaaggattatttccagattcacacaccctgtgatgaagaagggaagacccagatcatgtacaagtggatcgaaccgaagatttgccgtgaggatctaaccgacgcaatcagactccctcccagcggtgagaaaaaagattgtccaccatgtaatcctggcttttacaacaacgggagttccagttgtcatccctgccctcccggaactttttccgacggaacaaaagaatgccgaccttgccccgcaggtacggagccagcccttggattcgaatataagtggtggaacgttctgcctggcaacatgaagaccagttgcttcaatgtcggcaactctaaatgcgatggaatgaacgggtgggaagtagcaggtgaccacatccagtctggtgccggaggctccgataatgattatttaattcttaacttgcacatccctggctttaagcccccaacctcaatgacgggtgctacaggatccgagctcggcagaatcacttttgtctttgaaacgctctgctccgcagactgcgtcctatactttatggttgatatcaaccggaagtctacaaacgtcgtggaatcctggggcggaaccaaggagaagcaagcatatacgcacataattttcaaaaatgcgacgtttacatttacctgggcatttcagcgaacaaaccaaggacaggataatcgcagattcatcaacgatatggtgaagatttactcgatcaccgctaccaacgcagtggatggagtagcatctagctgccgcgcatgtgctctcgggagtgaacagagtggatctagttgcgtgccatgccctcccggacactacatagaaaaggaaaccaaccagtgcaaagagtgtcccccagacacttatctttccatccatcaggtgtatggtaaggaagcctgcatcccatgcggaccaggcagtaagaacaaccaggatcattcggtttgctactctgattgttttttctaccacgagaaagagaatcagagtctccattacgatttctctaacctgtcctcagttggatccttgatgaatggaccaagcttcacctccaagggcacgaagtattttcactttttcaatatcagtctctgtggccacgagggtaagaaaatggcactgtgcaccaataacatcaccgactttactgtgaaggaaatagtagcgggttctgatgactacacaaacctggtgggggcttttgtgtgccagagcacaatcataccctccgagtccaaggggttcagagccgctcttagctctcagagcattattctggctgatacgttcataggtgtcacagtcgagactactctcaagaatattaatattaaggaggacatgtttcctgttccgacgagtcaaattcctgacgtacattttttttacaaatctagcacagctacaacatcctgcatcaatgggaggtctacagcagtcaaaatgaggtgtaaccccaccaagtcgggggctggggtcatttccgtaccttctaagtgtcccgcaggcacctgtgatgggtgtaccttctactttctgtgggagtctgctgaagcttgtccactttgtacagagcacgattttcacgagatcgagggtgcttgtaagcgcggattccaggaaactttatacgtttggaacgagccaaagtggtgtatcaaaggaatctcattgcccgagaagaagctcgctacttgtgaaacagtggatttttggctgaaagtgggggctggcgttggagcatttaccgccgtgttactagtcgccctgacctgttatttctggaaaaagaatcagaagctggaatataagtattctaaactcgtgatgacaactaactctaaagaatgcgagctgcccgctgcggattcctgtgctattatggagggagaagataacgaggaggaagtagtgtacagtaataagcagtccttgttaggaaagctgaaatctctggctacaaaggaaaaagaagaccatttcgagtccgtgcagctgaaaacctcacggtctcctaatatctag

SEQ ID NO: 236654 - DNA, 11043 bp, synthetic construct
  misc_feature 1..11043: note = Description of Artificial Sequence: Synthetic coding sequence
  source 1..11043: mol_type = other DNA
atggatcagcgcaagaacgagagtatcgtcccctcaataactcagctagaagattttctcactgagcacaattctaacgtcgtgtggctgctggtggctacgatactatcgtgcggatggattatatacttaacttattacaattcccgcaatgtgggcctgattctgacgcttgtactgaatcgactctataaacacggctacattcatatcggctctttctcattcagtgtgcttagtggcaaggttatggtcagagagatttattatattactgaagacatgagcattagaattcaggacggattcattatattcaggtggtggaaaatgtacaacccaaaacaaaagcagcatgatccaaaagccgagaccaggttatacattacagtgaatgactttgaattccatgtttacaaccgctccgacttatatggtagactgcaagaactcttcggactggagcccactataattccccctaagaaggacgatgacaaaacacgagaaattggacggactagaactcaatcgaaaatcgaacgggttaaagtgaaaacagaaagccaggatccaacatcatcctggcggtccctgattcccgtgatcaaggttaacgtctccacaggtcgccttgccttcggcaatcattaccaaccacaaacattgtgtatcaatttcgacgatgcatttcttacatatacgaccaagccaccaagttcgcatctggaccagtttatgcacatagttaagggaaaactggaaaatgttcgcgtgatgcttgtcccaagccccagatatgtcggacttcaaaacgatgaacctccgaggcttatgggcgagggattcgtggtcatgcagtccaacgacgtggatatctactattatatggacgagcctggattagttccggaggagactgaggagaacatcgagggagagatgtcaagcgaagactgcaaattgcaggacttgcccccatgttgggggttggatatcgtgtgcggcaaaggaaccgactttaactacggcccttgggccgacaggcagagggattgcctttggaaattttttttccctccggattatcaggtactgaaagtatctgagattgctcagcccggacggcctagacaaatcctggccttcgagcttcgcatgaatatcattgcggacgcaactatcgatctgctctttacaaaaaaccgtgaaactaacgccgtgcatgtgaacgttggggctggaagctacttggagatcaatattccaatgaccgttgaagagaacggatatacaccagcgatcaagggccagcttctccacgtcgacgccaccacatcaatgcagtatcgtaccctgttagaggccgaaatgctggccttccacattaacgctagttatcccaggatctggaacatgccccaaacttggcaatgcgagctggaggtttacaaagctacttaccattttatttttgcacagaagaacttttttactgacctgattcaggactggtcctctgattctcctccagatatcttcagctttgtgccttatacttggaattttaagataatgtttcatcagtttgagatgatctgggctgccaaccagcataattggatcgactgctcaacaaaacagcaggaaaacgtttatctcgcagcatgcggggagaccctcaatatcgactttagcctgccgtttactgattttgtccccgcaacttgcaatacaaagttttccctgaggggtgaggatgtcgacctccacctgttcctcccggattgtcacccctcaaaatactcactttttatgttggttaaaaactgccaccctaataaaatgatccatgacaccgggatcccagcggagtgccagtctggacaaaaaaccgtcaaaccgaagtggaggaatgtcacacaagaaaaatctggatgggtggaatgctggaccgttccctctgttatgctcacgatcgattacacatggcatccgatatacccccagaaggctgacgaacagctcaaacagagtttgagtgagatggaggagacgatgctgagcgtgttgcggccatctcaaaaaacaagtgaccgcgtagtgtcatcaccatcaaccagctctcgccctcccatcgacccgtcagaactgccacccgataagttgcatgtggagatggagctgagccccgacagccagatcaccctgtacggcccactcctgaacgcgtttttgtgtatcaaagaaaactattttggcgaggatgatatgtacatggacttcgaggaagtgatctcatcgcctgttctgagcctgagcacaagctcatctagcggatggacagctgtgggcatggagaacgacaaaaaggaaaatgaaggcagtgctaagtccatccaccctctcgccttgagaccatgggatatcaccgtgctcgtgaacctgtacaaggtccatggtaggcttccagtacacggaacaactgacggccctgagtgcccaactgcattcctggagaggctgtgtttcgagatgaaaaaaggatttcgcgagactatgctgcagttaattttgagcccactgaatgtgttcgtctccgataattaccaacaacggcctcctgtcgacgaggtattaagagagggtcacataaacctgtccggcctacagttgcgcgcacacgccatgttcagcgcagaggggcttccgcttgggtctgatagccttgaatacgcctggctaatcgatgtccaggccggttccttgaccgcaaaggttacagcccctcagctggcatgccttctggagtggggtcagactttcgtgtttcatgtcgtctgcagagaatatgaactcgagcgtcctaagtccgtgataatttgccagcacggcatcgatagacggttctgtgaatctaagctgtcttgtatccccggaccttgtccaacttcggacgacctgaagtacactatgatcaggctcgccgtggatggggctgatatctacatagtcgaacatggttgcgccacaaacataaagatgggtgccattcgggtagcaaattgcaatttgcataaccagtctgtgggtgaggggatttcagcagcaatccaggactttcaggtccgacagtatatcgagcaactgaacaactgccgtattggcctacagccggcagttttgcgccgagcttactggctcgaggctggaagtgcgaatctgggactcattacagtggatatcgccctggctgctgaccaccatagcaaacacgaagctcagcgacacttcctggagacacatgatgctcggaccaagcggttgtggttcctttggccagacgacattctgaaaaataagagatgtcgaaacaaatgcggttgcctggggggatgtcgatttttcggcggaactgtcaccgggctggacttcttcaagctggaagagttaactccttcctcatcaagtgccttctccagtacgtcagccgagagcgatatgtactatggccaatcccttttgcagcctggtgaatggataataactaaagagatccccaagattattgatggaaatgtgaatggtatgaaacggaaggagtgggagaataagtctgtaggaatcgaggtggagaggaagacccaacatctttctttgcaggtcccgctcagaagccattctagttcaagttcatccgaggaaaacagcagttcttccgcagcgcagcccctgctggcaggtgagaaggagagtccctcaagtgtggccgacgaccatctggtgcaaaaggagttcctgcacggtactaagcgggatgatggtcaggctagcattcctactgagatatcaggtaacagtcctgtttctccaaacacgcaagacaagtctgtcggccaaagtccactcaggagcccgcttaagcggcaggcaagcgtttgcagcacccggttggggagtacaaaatccttaacggccgctttctacggggacaaacagcccgttactgttggtgtacaattctcttccgatgtgtctaggagtgacgagaacgtgctagattcgccaaaacaaagacgctctttcggatcctttccgtatacccccagcgctgattctaactcctttcatcaataccgttccatggacagctctatgagcatggcggatagtgaagcctattttagtgcggctgaagagttcgagcccatctctagcgacgagggtccaggaacgtatccaggacgaaagaagaagaagaagcaaactcaacaaatcgactattccaggggatctatctaccactcagtggaaggccctttgaccggccatggggagagtatccaggacagcaggacactccccttcaagacccatccctctcaggctagttttgtttctgcactgggaggagaggacgatgtgattgagcacctttatattgtggagggagagaaaacggtagagagcgagcaaatcactccgcagcagcctgtaatgaattgctaccagacttatcttacccagttccaggtgattaactggtccgtgaagcaccccactaataaaaggacatctaagagcagccttcaccggccactcgacctggacacccctacctctgaagagtcctcaagtagcttcgagcagctcagcgtccccacattcaaggtgataaaacagggcctcactgcaaacagtttactcgatcggggaatgcagctgtcgggcagtacctcaaatactccatacactcccctggagaaaaagcttgcggataatactgatgatgaaacacttacagaagagtggactctggatcagcccgtgagtcagaccagaactacagcgatcgtcgaggtgaaaggcaccgtggacatcgttctgactcccctggtagcggaagcgctggacagatatatcgaggcaatggttcactgtgcgagtacacgtcacccagcagcgatcgtagacgacctccacgccaaggtgctgagggaagcagtgcagaattcaaaaaccaccttctctgaaaatttgagcagtaaacaggacatcaggggcactaaaaccgagcaatccacaatcggaaccacgaaccaggggcaggcgcagaccaacttgaccatgaaacaagataacgtcaccatcaaaggcttacaaaccaacgtgagtatcccaaaagtcaacctgtgcctcctgcaggccagcgtggaggaatcgcctaccaccgccccttcacggagcgttacccacgtgtctctggtcgctctgtgttttgaccgcattgcaactcaggtgagaatgaaccggggtgttgtcgaggaaaccagcaataacgctgagcctggcagaactagcaattttgacagatacgtccatgcaacgaagatgcagccacagagctctggttcgctccgttcgaacgccggtgcggagaaggggaaggagattgcagccaaacttaatatccacagagtgcatggtcagctgcggggtctggatactacggacattgggacttgtgccatcacggcaattcctttcgaaaagagcaaagtgttatttactcttgaagaactcgatgagtttacatttgtagacgagaccgaccaacaagctgtccctgacgtaactaggattggaccaagccaggaaaaatggggatggattatgttcgaatgcgggctagaaaacctgacaatcaaggggggacgtcagagcggagcagtcctgtataatagctttggtattatgggcaaagcaagtgataccgagcgtggaggggtactcacaagtaataacagcagtgactcccctacagggagcggatacaataccgacgtatcagatgataatctgccctgtgaccgcacaagcccctcaagtgacctcaatgggaacagtgtgtctgacgaacaagacgagggcgtggagtctgacgacctgaagaaggatctcccactaatgccgccacccccagattcctgtagtatgaaactgacaattaaggaaatctggttttcgttcgccgcaccaaccaacgtccgctcccacacgcatgcgttttcccgtcagctgaacttgctgtccactgcaactcccgcagtgggcgcttggctggttcctattgaccaactgaaaagcagcctcaataaactcgagaccgaaggcaccctcagaatctgtgcagttatgggctgcattatgactgaagcgctggaaaataagagcgttcatttccctctgaggagcaagtacaatagactcaccaaggtcgcccgattccttcaggagaatccgtcttgccttttgtgtaacatcctgcaccactacctccaccaggcaaactattctatcatcgatgacgccacaatgtccgatgggctgcccgctctagtgactttaaaaaaaggcctggtggctctggctcggcagtggatgaagttcatagtggtaactcctgccttcaagggggtgagtctgcatcgtcccgctcagcctttaaagccgcagattgctatggaccacgagcacgaggacggactgggactcgataacggcggagggctgcagtctgacacatctgcagatggggctgaatttgagttcgacgccgctactgtatccgaacacacgatgctgctggagggcactgctaaccgtccccctcctggatccagcgggccagtgaccggcgcagagatcatgaggaagcttagcaagacacacacccactccgattcagcgctaaaaatcaaaggcatccatccatatcactctttatcctacacctccggcgataccgccacagattcccctgttcatgttggccgagccggaatgcctgtcaaagattccccaaggaaggagtcacttctctcttacctcaccggatcatttccaagccttcataacctcctcgaagggacgccgcaacgttcttctgcggcagtcaaaagtagcagccttactagaactggcaacaccgtcgcaacagatatgctgtccgagcacccactcctgtctgagccctcgtctgttagtttttacaattggatgtctaacgctgtggggaatcgcggatccgtcctgcaagagtcaccggttacgaagtcaggtcataactccctgccaacgggcgttgctccaaatcttcctacaatcccctctgcctctgactttaatacagtgttgagcagcgatcagaacacgctagacggtacacattcccagcactcaacctcccaggatgacgtagccggagtggaggaggcgaatcaggggtttccagctgtgcaactagctgacgcccaagttgtgttcaaaccactgttatcccatacaggcatccagtcccaggatacaatgccgttttgttaccggatgtactttggagaacacctgtctttttccggcaccctcgactgcctgcgggctgacatcgtagactcagatacggctaaggagcggaagggaaaaagggcccgaagacaaggtcatgtgaacctcccccctctggagttcaagccggctctgatgttagggacttttagcatctccgccgtagtgatggagaagagtgtctgtaccccgcagaactctacctcagctttaagcttccatgacctgagcaaacggtactacaatactttccactgcaacttcactatcagttgtcagagcatttcacagcacgtcgatatggctctggtgcgcctgatacatcagttcagcactatgatcgatgacattaaggcgactcaaactgacatcaagctgagtaggtacactgcgggttctgcatcacccacgccaacattcaaaacacggaaacatcgggatttccgctcctctgactttagcaggagcagcagggggtcactaaacggaggcaacagggtgaacaacgcgaagaacaagcgaacgaataatgagaacaataaaaaggaatctagaaataaaaattcattgggcaggagcgagcgaaggacatctaaggtatcacggaaggggagcaaagacgttgtcgaccatatgaccatacatatggacgactctgattcgatcacagtttcagaacaaagcgaacccagcgctgagtgctggcagaacatgtataaactcttgaatttttatagccttattagcgaccccacaggcatactcgaaaagtcctctgagacctttggcccagccggagttaggtcaccaacggaacccacgtgcaaagttgtgtttgagaatgagcaggataatagttcactgactaaaacccagaggaaacgcagtctcgtgacctcagagcctcagcatgtgacacttatcgtgttcggcatcggaatggtgaatagaacgcacttggaggctgatatcgggggtctcacaatggagtcagaactgaaacgaattcacggctcctttacgctgaaagagaagatgaaggacgtacttcatcagaaaatgacagaaacttgcgcaacggcacatatcgggggagtcaacattgtgcttcttgaaggaattacccccaatattcagctcgaggattttcccacaagtcccacctccaccgcaaagcaagagttcctgactgtggtgaagtgcagtatcgccaaatctcaggctctgtattcagcccaaagaggattgaaaacgaacaacgctgcagttttcaaagtgggcgctattagcatcaacatcccacagcatcccgcaaccctccatagcatgatggtgaggagtagccatcagctttctaaacagattagcgatctgattagacaacctagcacggctccacaaccagtgaaggaagacatcgcgactccactgccctctgagaagacgcctaccagcgtgaatcagactcccgtggagacaaacgaattcccccagctccccgaggggcttgagaaaaaacctatcgtcctgaagttttccgcaatgctcgacggcatagctatcggagccgcactgctgccatccctgaaggctgaatacaaaatgggtaggatgcgcagccatggaatgaccggagctcagacacggttcacattcgagctccctaaccaccgcttgaggtttactagtaaagtgagcgccaccgacatgagtacaatcccaccatctgcttctctgaacctgccacctgtcaccatgtcaggaaagtacattatggaggaacatgactcctactcagaccaggtgtggtccattgatgagctgcctagtaagcagggttattatctgcagggcaattacctgcgatgcgtggctgaggtgggctcattcgagcacaacctaaccactgatctgcttaatcacctcgtctttgtacagaaggtattcatgaaagaagtcaacgaagtgatccagaaggtttccggaggggagcagccgatccccctgtggaacgagcacgatggtactgcagatggcgataaaccaaagattctgctgtattctctgaacctccagtttaagggtattcaggtgaccgcgactacaccctctatgcgggctgttcggttcgaaaccggccttatcgagttagaactgtcaaacagactccagaccaaggctagtccaggcagctcttcatatctgaagctttttggcaagtgccaggtagacctgaatctggcacttgggcagattgttaaacatcaggtctacgaggaggccggttcggacttccaccaggtggcatactttaaaacaaggatcgggctgcggaatgccctaagggaagagatctctggctcctctgatcgggaagcagtattgatcactttaaacagaccaatcgtctatgcgcagccagtggccttcgatcgcgcagtgctgttttggctgaattacaaggcagcgtacgataactggaatgagcagaggatggcattgcacaaagacatccacatggccactaaggaggttgtggacatgctgccagggatccagcagacaagcgcccaggcgtttggcacattatttctccagcttacagtaaatgatcttggcatctgcctgcccatcaccaataccgctcagtccaatcacacgggcgacctcgacacaggatctgctctggtccttacaatagagtctacccttataacagcctgcagctcagaatcattagtaagcaagggccattttaaaaatttttgtatccggtttgcagacggcttcgagacaagctgggacgattggaaacctgagatccatggcgatctcgtgatgaacgcctgcgttgttccagacggtacatacgaggtgtgttctcgaactactgggcaggccgcagcagagagtagctctgcaggcacctggaccttaaacgtgctctggaagatgtgcggaatagacgtgcatatggatcccaacattggaaagcgccttaacgcacttggcaacacactgacaaccctgaccggagaagaggatattgatgatatcgcggatttaaacagcgttaacatcgccgatttgtcagacgaggacgaagtagacaccatgagtcctacaatacacactgaggcaaccgactacaggagacaggccgcatccgccagccagcccggagaactccgaggacggaaaatcatgaagaggatcgttgatataagagaactcaacgaacaagccaaggtgattgacgatctgaagaaactaggcgcaagtgagggtactatcaatcaggaaattcagaggtaccaacagctggagagtgtcgccgtgaacgatatccggcgagacgtacgtaagaaactgagacgctcctcaatgagagcagcctccttgaaagataagtggggactgagctacaagccctcctattcaaggtctaaaagcatctcagcttctggccgtccacccctcaaacgcatggaaagggcatcttcaagagttggtgaaaccgaagagctgccagagatccgtgtggatgcagcaagccctggtccacgagttactttcaacatacaggatactatcgcggagattcgtagaaagaaaatttccttcaaggttgtgttctag

SEQ ID NO: 236655 - DNA, 2241 bp, synthetic construct
  misc_feature 1..2241: note = Description of Artificial Sequence: Synthetic coding sequence
  source 1..2241: mol_type = other DNA
atgccgtgcctgggtctgctcgctaacctttgccgacataacctaagtgtccaaacccatattaagacattgagcaatgtgaagtccttctatcggactcttatcaccctgctggcccacagcagtttgactgtggtggttttcgccctgtcgatccttagcagcctcacactgaatgaagaggtgggtgagaagcttttccatgccaggaacatccaccaaacatttcagctcattttcaacatcctgatcaacggggatggaactctgacaaggaagtactccgtggatcttcttatggatctgctgaagaaccctaagattgccgactacctcacaaggtatgagcacttctcctcttgcctccatcaggtcctgggtctcttaaatggcaaagatccagacagctcttctaaagtgctcgagttacttctcgccttttgttctgtgacccagcttcgccatatgctgacccagatgatgtttgaacagtcacccccaggatctgcaaccctgggtagtcacacaaaatgtctggaacccaccgttgccctgctccgatggctgtctcagccccttgatggatccgagaattgttccgtactggcccttgaactgttcaaagaaatattcgaagatgtgattgacgccgctaactgcagtagcgctgacaggtttgtgacactactgctgcccaccattctggaccagctacagttcactgagcaaaatttagacgaggcccttaccaggaagaaatgcgagagaatcgctaaagcgatcgaggtcttgttgactctctgcggcgacgataccctgaaaatgcacatcgccaaaatcttgaccaccgtgaagtgcacgaccctgatcgagcagcagttcacctacggaaaaattgacctgggctttgggacaaaagttgccgacagcgagctgtgcaagttggcggcagatgtgatcctgaagacactggacctgattaataagctgaagccgctggttcccggtatggaggtaagtttttataagattcttcaggacccaagattgattactccactcgcgttcgcacttacatccgacaacagagaacaagttcaatcggggttgcggatcctgctggaggctgctccactgcctgactttcccgcattggtgttgggagaatcaattgccgcaaacaatgcatatcgccaacaagagactgaacatattccacggaagatgccgtggcagagctcaaaccacagctttcctacctcaatcaaatgtctgacaccacacctcaaggacggagtgccgggactaaacattgaggagctgatagagaagctacagtccgggatggttgttaaagaccagatatgcgacgtgcggataagtgacataatggatgtgtacgaaatgaagctttcaaccctggctagcaaggagagcaggctgcaggatctgctggagacaaaggccctcgccctggcgcaggccgacagactcatcgcccagcaccgatgtcagcgcactcaggcagaaaccgaagccaggaccctggctagcatgctacgggaagtagaaaggaagaatgaggaactcagcgtgttgctaaaagcgcaacaggtggaatccgaacgagcccagtctgacatcgagcatctgttccagcacaataggaagctggagtccgttgccgaagagcatgagatcctgactaaatcttatatggaactcctacagagaaacgagagtacagaaaagaaaaacaaggatctgcagatcacctgtgactccctgaacaaacaaatcgagaccgttaagaaactgaacgaaagtctcaaagagcaaaatgagaagtctatcgctcagttgatcgagaaggaggagcaacgtaaggaagtgcagaaccagttagtcgacagagaacataagctcgccaacttgcaccagaaaactaaagtgcaggaagaaaagatcaaaacactgcagaaggagagagaggataaggaggaaacaatagacattttgcgtaaggaactttccaggaccgaacagattagaaaggaactgtcaatcaaagccagctccctggaggtgcagaaggcacagttggagggacgacttgaggagaaagagtcattagttaaacttcagcaagaggaactgaacaagcactctcacatgatagccatgattcattccctgagcggcggtaaaattaatccggagacagtaaatctaagtatctag

SEQ ID NO: 236656 - DNA, 840 bp, synthetic construct
  misc_feature 1..840: note = Description of Artificial Sequence: Synthetic coding sequence
  source 1..840: mol_type = other DNA
atgaccctccccttcttcgcctttccgctcattatttggtccattcgtacagtaattatattctttttcagtaagcgcaccgaaaggaacaacgaagccttagatgatctgaaatcgcagagaaagaagatcctggaggaagtcatggaaaaggaaacctacaagacagccaaactcatccttgagcgatttgatcccgacagcaaaaaggccaaagaatgcgaacctccctccgccggagcagcagtgacagcccgacccggacaggagatccggcagcggacagccgcacagcgtaatctgtccccgacccctgccagtccaaatcagggtcctccaccacaggtgcctgtgtcccccggaccaccaaaagactcctctgcacccggaggccctccggagcgcaccgttacccctgcactgtccagtaacgtcctccctcgccatctcggtagccctgcaacaagcgttcccggaatgggcttgcatccaccaggaccaccccttgccaggccaatactcccgagagaacgcggtgctctggataggatagtcgagtacctggttggagatggaccccagaatcggtatgctttgatctgccagcagtgtttctcccacaatggcatggccctgaaggaggagtttgagtatattgcttttcgctgcgcatactgcttttttctgaacccggcacgcaaaacgaggcctcaggctcctagactccccgagttcagctttgagaaaaggcaggtggtcgaggggtccagcagtgtggggccattgccaagtggttccgttcttagctctgataaccaatttaacgaagtgcagtattag

SEQ ID NO: 236657 - DNA, 3192 bp, synthetic construct
  misc_feature 1..3192: note = Description of Artificial Sequence: Synthetic coding sequence
  source 1..3192: mol_type = other DNA
atgacccgcctggggtggccaagtccctgttgtgccaggaagcagtgttcagagggccgtacatactcaaacgcagttatttcgccaaatctggagacgaccaggatcatgagggtgtcgcacactttccctgtggtcgactgcactgctgcctgctgcgacctgtcctcctgcgatctggcgtggtggttcgagggtcgttgctacttggtcagttgcccacataaggaaaactgtgagccaaagaagatgggcccaatccgctcctacctgacctttgtcctgcgacctgttcagagacccgctcagctcctcgattacggggatatgatgttaaacagggggagcccctccggaatctggggcgactcacctgaggatatcagaaaggatctcacctttcttggaaaagactggggcctggaagaaatgtccgaatactctgatgactatagggagcttgagaaggacctgctacagccgtcaggcaaacaggagccgcgaggcagtgcggaatacaccgattggggcttactgccaggatccgagggggcattcaacagtagcgtcggcgacagccctgccgttcctgcagaaacccagcaggaccctgaactacactatctcaacgagagcgcctcaaccccagcaccaaagctgcccgaacgatccgtactgctccctctgcccactaccccaagcagcggcgaggtgttagagaaagagaaagcctcacagctgcaagaacagtcttctaattcctctgggaaggaagttctcatgccctcacactcgctgccacctgcttcacttgaactgtcttctgttacggtcgaaaagagtcctgttttgacagtaacgcccggatccacggagcactcaataccgacgccacccaccagtgcagcgccaagcgagtcaaccccctcagagctcccaatttcgcctactactgccccaaggaccgtgaaagagctcaccgtgagcgccggagataatctgatcattacgctgcctgataacgaggtggaactcaaagccttcgtggccccagctcccccagtggagaccacttataactacgaatggaacctgattagccaccctacagactaccagggtgaaatcaaacaaggccataagcagacgttgaatttgtcacagctgtcggtgggattgtacgtgttcaaggtcaccgtttcctccgagaatgcatttggcgagggattcgtgaacgttactgtcaaacccgcacggcgagttaatctcccccctgtggctgtagtttctccgcaattgcaggaacttaccctaccactaacatcagccctcatagacggtagtcagagcaccgatgacacagagatcgttagctatcactgggaggaaatcaatggtccgtttattgaagagaagacgagcgtggattccccggtgctgaggctttcgaatctggaccctggcaactactcatttcgcttaacagtgactgactccgatggagcaactaactccaccactgccgctctaatcgtgaacaacgcagtagactatccgccagtggcaaacgctgggccaaaccacacgatcacactgccccagaattccattacccttaacgggaaccagagttcggacgaccaccagatcgtactgtacgagtggagcttgggaccagggagcgagggaaagcacgtggttatgcagggagtgcaaaccccatacctgcacctctccgctatgcaagagggggattatactttccagctcaaagttaccgacagttcccgccagcaatctaccgccgtggtaaccgttatagtccagcctgaaaataatcgaccacccgtggccgtcgctgggccagacaaggagcttatctttccagtagagagtgctactctcgacggcagttcctctagtgatgatcacgggatagtgttctatcactgggagcacgtcaggggtccaagcgccgtcgaaatggaaaacattgacaaggccatagccactgtcacagggctgcaggttggaacataccatttcaggctgaccgtgaaggatcagcagggcctgtcctcaacctcaaccctcacggttgctgttaagaaggagaataactctcctccaagggcacgcgctgggggtcggcacgtgctcgttctaccaaacaactcaattaccctagatggttcccgttccactgatgaccaacgcattgttagctacctttggatacgcgatggacagagtccagcagcaggcgacgtgatcgatggttcagaccatagcgtggctcttcagctgactaacctggtggaaggcgtgtacactttccacctcagagtcacagacagccagggagcttccgacacagatactgccacagttgaagtgcagcccgaccctcgcaagtctggacttgtcgaactcactcttcaggtcggcgtcggacagctgaccgagcagagaaaagatacactcgtacgacagctggctgttttgctgaacgtgctggactcggacattaaggtgcagaaaattcgggctcacagtgacctgtccacagtaatcgtgttttatgtgcagtcacggccaccctttaaggtgttaaaagcagctgaagttgcaagaaatctgcatatgcgcctgtctaaggaaaaagctgatttccttctctttaaggtacttagagtagatacagcgggttgcctgttaaaatgcagtggacatgggcattgtgacccccttaccaagcggtgcatttgttcacacctctggatggaaaacctgatacagcgatacatctgggacggagaatccaactgcgagtggtctatcttctatgttacggtattggccttcaccctcattgtgctgaccggtggcttcacttggttgtgtatatgctgttgcaagaggcagaagagaacaaagatcaggaagaagacgaagtataccattctggataacatggacgagcaggagcggatggagctacggccaaaatacggcatcaagcacagatcaactgaacacaattcaagtctgatggtatcggaaagcgaattcgacagcgaccaggataccatcttctccagagagaagatggagagaggtaacccgaaggtgtcaatgaacggcagtatccggaatggtgcatcctttagttattgttccaaggacaggtag

SEQ ID NO: 236658 - DNA, 1293 bp, synthetic construct
  misc_feature 1..1293: note = Description of Artificial Sequence: Synthetic coding sequence
  source 1..1293: mol_type = other DNA
atgggtcgcagttggcccggactttccctgtgtcagtggcgattgttgcccgcactggaggccggttgggctgttgctgccgagaccggcggaggtggacggccaggacgagccgctccagcttcttgctcttgtgaattcctttggactattgatgacatctaccattgcgctcaatttctacagattaaagatggttggatcatcttttcaatggaggcccgtctagcaatgactctccccttcttcgcgtttccgcttatcatctggtccatcaggactgtaatcatcttctttttcagcaaacggaccgagcggaacaacgaggccctcgacgacctgaagagccagaggaaaaagatcctggaagaggtcatggaaaaggaaacatacaaaactgctaagctgatcctagagcggttcgacccagacagcaagaaagcgaaggagtgcgaacccccaagcgcgggagcggctgtgaccgccagaccaggacaggaaattagacaacggaccgcagcgcagcggaatctgtccccaacaccagcttcacccaaccaagggccaccgcctcaagtcccagtgtccccaggcccacctaaggactcttcagcgccaggcggaccccctgaacgtaccgtgacaccggctctgtccagcaatgtgttgcccagacaccttggatctccagcaacaagcgttccgggaatgggccttcatccgccaggaccccctctcgcgaggccaatcctgcctcgcgaacgtggcgcactggaccggattgttgagtacctggtgggagatgggcctcagaatcggtatgcactgatttgtcagcagtgcttctcccataatggcatggccctgaaggaagagtttgagtacatcgcatttcgttgcgcatattgcttctttctcaatccagcccgaaagacccggccacaggccccacgtcttccggagtttagtttcgagaagagacaggtcgtcgaaggcagtagctctgtggggcctctcccaagcggctctgtgttatcttccgataatcagttcaatgaagagtccctggagcatgacgtgcttgacgacaatacagaacagacagatgacaagattcctgctacggagcagactaaccaggtgatcgagaaggcgagtgattcggaagagcctgaggaaaagcaggagacagaaaacgaggaagcctcagtgattgagaccaactcaaccgtgcctggagctgatagcatccctgatcctgagttgagcggcgagtctctgaccgctgagtag

SEQ ID NO: 236659 - DNA, 3036 bp, synthetic construct
  misc_feature 1..3036: note = Description of Artificial Sequence: Synthetic coding sequence
  source 1..3036: mol_type = other DNA
atggccccaccaactggggtgcttagctcgctcttactcctggtcaccatagcaggctgcgcaaggaagcagtgttccgagggaagaacttactcaaacgccgtgatctcaccaaacctggagaccaccagaattatgcgggtgtcccataccttccccgttgttgactgcaccgcagcttgttgtgacctctctagctgcgatctggcgtggtggttcgaaggtcgatgttacttagtaagttgtccgcataaggaaaattgcgaaccaaaaaagatgggaccaatccggtcctacctcacattcgtgctgcgtccagtccaacgtccggcacagctcttagattatggagacatgatgctcaatagggggagcccaagcgggatatggggcgactcgcctgaggatattcggaaagatctgacgtttctggggaaggactggggactcgaggaaatgagcgagtatagtgatgattatagggagttggagaaggatctgcttcaaccgtccgggaagcaggaaccacgaggcagtgccgaatacactgattggggcctcctgcccggttcagaaggggcttttaattcaagtgtgggtgattctcccgctgtgccggctgagacacagcaagacccagagctgcactacttgaacgagagcgcgagcacgccagctcctaaactaccagagaggtccgtgctactgccactgccaaccacaccctcctcaggcgaggtgctcgaaaaggaaaaggcctcccaacttcaggaacaaagctctaacagctcagggaaggaggtcttaatgccctctcattcgctccctcctgcaagcctggagctgtcgagcgtcacagtggagaaatcaccagtgctgaccgtgacaccaggaagcaccgagcatagtatcccaacgccaccaacctccgcagcaccgtcagaatcaacacctagtgaacttcccatcagcccaaccacagccccacgaaccgtgaaggagctgacagtttctgccggagacaatctcataatcacactccccgacaacgaagtagagctgaaggcattcgtcgcacctgcacctccggtggagacaacgtataactacgagtggaacctgatcagccatcccaccgactatcagggcgagatcaagcagggccacaaacagaccctgaacctgagtcagctgtctgttgggctgtacgtatttaaggttaccgtgagcagcgagaatgcttttggggaagggttcgttaatgtcactgtcaagcctgcccgacgtgttaacctacccccagtagccgttgtctccccacagcttcaggaactgaccctgcctctgacgtccgcgcttatcgatgggtctcagagcacagatgataccgaaatcgtctcctaccattgggaagaaatcaacggcccatttattgaggaaaagactagtgtggacagtccggtcctgcgcctgagcaacctcgaccccggtaattacagctttcggctcacagtgactgacagcgatggcgctaccaacagcactactgcagcccttatcgtgaataatgcagtcgactatcctcctgttgccaatgctggcccaaatcacaccatcactcttccccagaattctattactctgaatggcaaccagtcatcggatgaccaccagatagtcctgtatgagtggtccctaggacccggtagtgagggaaagcatgtggtcatgcagggagtccagaccccatacctacatctctctgctatgcaagagggagactacacctttcagctgaaggtcaccgactcaagcagacagcaaagtactgccgtcgttacagtcatcgtgcagcccgagaataatcgtccaccagttgcagtcgccggaccggataaggagttaatatttccagtagaatcagccacacttgacggcagctcttcctctgatgatcacggcatagtattctatcattgggagcacgtacggggaccgagcgccgtggaaatggagaacatcgacaaggctattgccacagtgacagggcttcaagtgggcacttaccatttccgcttgacagttaaggaccagcaaggcctttcatctacgagcaccctgacagtggccgttaagaaggagaacaatagtcctccacgagccagggctgggggacgccacgtgttagtactgcctaacaacagtatcactcttgacggttcgaggagtacagatgatcagaggatagtatcctacctttggatccgagacggccagtctcccgctgctggagacgttatagacgggagtgaccacagcgtggcactccagctgaccaatctggtcgagggtgtctacacttttcatctccgggtaactgattcacagggcgcttctgacactgataccgcgaccgtggaggtgcagccagatccgaggaagagtggtttagtagagctcacattgcaggtaggagttgggcagctgacagagcagcgcaaggatacactggtacggcaactcgcagtgctgcttaacgttctggactctgacataaaagtgcagaaaattagagcccactccgatctgtccacagtgatcgtgttctatgttcagtcccggccaccttttaaagtattaaaagcagcggaagttgcccgaaacttgcacatgaggctgtctaaggaaaaagctgactttctgctatttaaggtgctacgggtcgacacagcgggttgtcttcttaagtgttccggtcacgggcattgcgaccctctgaccaaaagatgtatctgctctcacctatggatggagaatctgattcagcgatatatttgggatggagagagtaactgtggtataaaacataggagcacagagcacaacagtagtctgatggtttcagaatctgaattcgattctgaccaagacaccattttctctagggaaaaaatggaacgcggaaaccccaaggtgagcatgaacggctcaatccgtaacggagcatcattttcttattgctctaaagacagatag

SEQ ID NO: 236660 - DNA, 1206 bp, synthetic construct
  misc_feature 1..1206: note = Description of Artificial Sequence: Synthetic coding sequence
  source 1..1206: mol_type = other DNA
atggagactcccgaggttccagtgggatcactcatcgattttggtcccgaggcacctacgtctagccctctggaagccccaccccctgtactgcaggacggagacggctctctgggggacggtgcttccgagagcgaaactaccgagtctgctgactctgaaaacgatatgggcgagtcaccgagtcatccttcatgggatcaggaccgcaggtcaagttctaatgagagtttcagctcgaaccagtcaaccgagagtacccaggacgaggagacactagccctgagagacttcatgaggggctacgtcgaaaagatttttagtggcggagaggatttggaccaggaagagaaggccaagttcggggagtattgttcctccgagaacgggaagggacgagaatggtttgctcgatatgtgtccgctcagcgatgtaacagcaagtgcgtcagcgaagcaaccttttaccggttggtgcagtccttcgctgtggtgctgttcgaatgtcatcagatggatgacttcggacctgcgaaaaacctaatgacgatgtgtttcacatattaccatatcggcaagcctcaattgctcccccctgaatccagggagaagcctgccggtagcatagactcctatctcaagagcgcgaacagttggctggccgaaaagaaagatattgcggagaggctgcttaagaacactagcgccaggactgagaacgtgaagggtttttttgggggtcttgagaccaagctgaagggtccactggctaggcgaaacgaagaggatgagaacaagcctcaagagaagcgaccaagagccgtgacagcatactcaccagaagatgagaaaaagggagagaagatttacctttacacccatttgaaacagcagcccatctggcatacactgcggttctggaacgcggcattttttgatgccgtgcactgcgagcggactaagcggagccccaccacaagagaaaagtggtgccacatgacgcaggaagaacgtgatgactccctaaggtttaatgagaacatcaccttcggacagcttgggacctttactcataacatgctcgcctttggcctcaataagaaactgtgtaatgattttctgaagaagcaggcagtgatcgggaaccttgatgaagagcagtataaactactctctgaccatattgagcaaatggcaaccgagtag

SEQ ID NO: 236661 - DNA, 3219 bp, synthetic construct
  misc_feature 1..3219: note = Description of Artificial Sequence: Synthetic coding sequence
  source 1..3219: mol_type = other DNA
atggcccctcctactggtgtgctctctagtctgctgttgctcgtaactatagccggttgcgctcggaaacagtgctcggaagggagaacctactctaatgccgtcatcagccccaacctggagacgacacggattatgagagtgagtcacactttcccggtcgtggattgtacagcagcatgttgcgacctgagctcatgcgatctcgcctggtggttcgaaggcagatgctatctagtcagctgtccacataaagaaaactgtgaaccaaagaaaatgggaccaattcgttcctacctcactttcgtcctaaggccagtgcaacgacctgcccagctgctagactatggagacatgatgctgaaccgaggctctcccagcggtatctggggggattccccagaggatatcagaaaggacctgacctttcttggcaaggactggggtctggaggagatgtctgaatacagcgacgattatcgagagctcgagaaagatctgctgcagccatctggcaaacaggagccccgaggttccgcggaatataccgattggggactactgcctggctctgaaggcgctttcaactcaagtgtgggcgacagcccagctgtccctgctgaaacgcaacaggaccccgagctgcattatctgaacgagagtgccagcaccccagctcccaaacttccagagcggtccgtcctgttgcccctcccaactacccctagtagtggggaggtacttgagaaggagaaggcaagtcaactgcaggaacagagctccaattcctctggaaaggaggtgctgatgccgagccatagcttgccacctgcctccctcgagttgtcatccgtcacagttgagaagtcccctgtgctgacagtgacgcctgggtcaaccgaacacagcatccccacaccgcctacgtccgcagctccctccgaatctaccccttctgagttaccaatttcaccgaccaccgctcctcgtaccgtaaaggaactgaccgtcagcgctggtgacaatctcattattacattgccggataacgaggtggagctaaaagcattcgtcgcccctgcgccaccagtggaaacaacgtacaactatgaatggaacttaataagccaccctacagattaccaaggcgagatcaagcaggggcataaacaaaccctcaatctgagtcagctgtcagttggtctctacgtgttcaaggtgactgtcagctccgagaacgctttcggggagggattcgtcaacgttaccgtgaaacccgcacgccgagtgaacttgcctccagttgccgttgtgagccctcagctgcaggaattaaccctgcccctgacgagtgcgctgatcgacggttcccaaagtacggacgatacggaaattgtgtcataccactgggaagagatcaacgggcctttcattgaggagaagacttctgttgatagccctgttcttcgcctgagtaatctagatccgggtaactacagcttccgactgactgtcaccgactcagacggggctaccaactccacaacagccgcactgatcgtgaacaatgccgtggactacccacccgttgccaacgccggacccaatcacactattactctccctcaaaactcaatcacccttaacggaaatcaatcctccgatgaccatcagatagtgctgtacgagtggtcattagggccaggatccgagggtaagcacgtggtcatgcagggcgtgcagactccgtatctacatctcagtgcgatgcaagagggcgattacacattccagctcaaagtgacagattctagcaggcaacagagcacggctgtcgtgacagtgattgtgcagcctgaaaacaatcggccaccagtcgcagtggccggaccagataaggaactgatttttcccgtggagtccgctacactggacggttctagctcctcagacgaccatgggatcgtcttttatcactgggagcacgtcaggggaccgagcgccgtagaaatggaaaatatagacaaggcaattgccactgtcacgggcttgcaagtcggtacctatcatttccgactaaccgtgaaggaccaacaaggattgtcttcgactagcaccttgacagtggccgtgaagaaggaaaacaatagtcccccacgcgctagggcagggggaaggcatgttctggttctgcctaacaacagcataacacttgatggatcacgttcgacggacgaccaacgaatcgtgagttacctttggatcagggacgggcagtctcctgctgcaggagatgtgatagacggatccgatcatagcgtggcattacagttaaccaacttggtggagggtgtgtatacattccatctgagggtgaccgattcccaaggcgcaagtgacactgatactgccaccgtggaggtgcagcctgatcctcgcaagtctggcctcgtggaactcaccctccaggtgggtgtgggccagttgacagagcaaagaaaagatacgcttgtgagacaactggcagtcctgctcaacgtgctggactccgatatcaaggttcagaagattagggctcactcagatctgagtaccgttatcgtgttttacgtgcagtcccgtccacctttcaaagtgctgaaggccgctgaggtggctcgcaatctccatatgcgcctctcgaaggagaaagctgattttctgctgttcaaagtcctgcgcgtggacaccgcgggatgcctgctaaaatgttccgggcatgggcactgcgatcctctaacaaagcgctgcatttgctctcatctatggatggaaaacctgatccaaagatacatctgggatggggaatctaactgtgagtggtcgatattttatgtgaccgtgttagcattcaccctcatcgtccttactgggggttttacctggctgtgtatctgctgttgtaagcgccagaaacgaaccaaaatacggaagaagaccaaatatacaattctcgataacatggacgagcaagaaagaatggaactgaggccaaagtacggaatcaaacacaggagtaccgagcataatagttcactgatggtgtcagaaagcgaattcgattccgaccaggatacaatcttctcacgggagaagatggagagagggaaccctaaagtttcaatgaatggatcaattcggaacggtgcgtccttttcctattgttctaaggatagatag

SEQ ID NO: 236662 - DNA, 1380 bp, synthetic construct
  misc_feature 1..1380: note = Description of Artificial Sequence: Synthetic coding sequence
  source 1..1380: mol_type = other DNA
atggggggtctgttttctcgctggagaacgaagccgagcaccgtcgaagtgttagagagcatagataaggagatccaggcactcgaggagtttcgcgagaaaaaccagcgccttcagaaactctgggttgggcgactgattctctactcgtccgttctgtatttgttcacctgtttgattgtgtacttgtggtacctacctgatgaattcaccgcccgtctagccatgaccttgcctttcttcgccttccctcttataatctggtccattagaacagtgattatttttttcttcagcaaacgaactgaacggaacaacgaggcactggatgatttaaaaagccagaggaagaagattcttgaagaggttatggaaaaggaaacctataagaccgctaaattgatcctagagaggtttgatcctgactctaagaaagcaaaagaatgcgaacctcccagtgcaggcgcagccgtgacagctcgacccggtcaggaaatacgccagaggaccgcagcgcagagaaacctaagtcccacccccgctagtccaaaccagggaccccctccccaggtgcccgttagccctggccctcccaaagactcatctgcaccaggaggaccacccgagcgcacggtgacacccgctctcagcagtaatgtgctccccagacatctcgggagccccgcaactagcgtcccaggaatggaaatgggcctgccacacatagcgcaggcaggactggaacatctcagcagttcggacctctcaacatcgaccagtcaatcagcagggatcaccggcctacaccctccaggaccccctttggctcgacccattttgcctcgcgagcgtggagccctcgatcgcatcgtggagtacctcgtaggtgacggcccacaaaaccgctatgcactcatctgccagcagtgtttttcccacaacgggatggcattgaaagaagaattcgagtatatcgccttccgctgtgcgtattgtttcttccttaaccctgctcggaaaacccggccacaggctcccaggctgcccgagttctccttcgagaaacggcaagtagtggagggatccagctctgtgggccctctcccctctggatccgtactgtcgagtgataaccaattcaacgaggagtccttggaacacgatgtgttggacgataatactgaacagactgatgataagattcccgcaacagagcagaccaatcaggttatcgagaaggcctcagattccgaagagcctgaggagaagcaggagacagaaaacgaggaggcttcagtgatagagacaaattccactgttccgggtgccgattccattcctgacccggagctgagtggcgagtccctaacagccgagtag

SEQ ID NO: 236663 - DNA, 240 bp, synthetic construct
  misc_feature 1..240: note = Description of Artificial Sequence: Synthetic coding sequence
  source 1..240: mol_type = other DNA
atgcacccggacttaagcccgcacctgcacaccgaagaatgtaatgtactcattaatctgttgaaggaatgccataagaaccacaatatcctgaaatttttcgggtactgcaacgacgtggacagggaactgcgcaagtgtctgaaaaacgagtacgtggagaatcgcactaaaagtcgcgaacatggcatcgccatgcggaagaaattatttaaccccccagaggaaagcgagaagtag

SEQ ID NO: 236664 - DNA, 1569 bp, synthetic construct
  misc_feature 1..1569: note = Description of Artificial Sequence: Synthetic coding sequence
  source 1..1569: mol_type = other DNA
atgagcaggcagctcttgcctgtgctgctactgttgctcctgcgagcaagctgcccgtggggtcaggagcagggcgcaagatctccatccgaggagcctcccgaagaggaaatcccgaaagaagacggcattctggttctatcaagacacactctcggcttagctttgcgcgaacatccggcactgttggtggaattttatgcaccctggtgcggccattgccaggccttggctccagaatacagcaaggccgcagctgtgctggccgctgaaagcatggtggtgaccctcgccaaggtggacggacccgctcagagggagcttgcggaggagttcggggttaccgaatatccgaccttgaaatttttcaggaacggcaatcgtacccatccagaggaatataccggcccaagagacgctgaaggcatcgccgagtggttaagaagaagggtgggaccctcggcaatgcgtctcgaagacgaagctgccgcacaggcactgatcggcggaagggatctggttgtcatcgggttttttcaggacgaagatgttgctacctttcttgctctggcgcaggatgctctggacatgacttttggcctcaccgatcggccacgcttgttccagcagtttggtttaaccaaggataccgttgtgctattcaagaaatttgatgagggcagggcggatttcccagtggacgaagaactcggactagatctaggcgatctcagcagatttctcgttactcacagcatgagactcgtgaccgagtttaatagtcagacctcggcgaagatctttgccgcaaggattctaaatcacctgttgctgttcgtgaaccagacactggcagcccatcgcgaactgctcgcagggttcggtgaagccgcacccagattcagaggccaggtgctcttcgtggtcgtcgatgtggccgcagacaacgaacacgttctgcagtacttcgggctgaaggcagaagccgctcccaccctgcgccttgtaaatctggagacaacaaagaaatacgcacccgtggacggcggacccgtaactgccgcttctatcaccgccttttgtcatgcagtgctgaacgggcaggtcaagccttatcttctgagccaggaaattccaccagactgggaccagaggccagtcaaaactctcgtgggtaaaaacttcgagcaggtagcatttgacgagaccaagaacgtcttcgtaaagttctacgcgccatggtgtacccattgcaaggagatggctccggcatgggaggctctggctgagaaatatcaggaccacgaagatatcatcatcgccgagcttgacgccacagccaacgagctcgacgccttcgctgtgcacggcttccccactctgaaatattttcctgctggcccaggaaggaaggtaatcgaatacaagtctactagggaccttgaaaccttctcaaaatttctcgataacggtggtgtgctcccgaccgaagagcccccagaggaaccggctgccccttttcctgagccccctgccaactctaccatggggagtaaggaagagctgtag

SEQ ID NO: 236665 - DNA, 1485 bp, synthetic construct
  misc_feature 1..1485: note = Description of Artificial Sequence: Synthetic coding sequence
  source 1..1485: mol_type = other DNA
atggggtcgggcactggcagtgaagaacccctgggaggcgcttcccggggtggcaacccgcagggcggatgggatttgggcgcagagccccctcaccctggccctgggcctgcaggcgctccttgtccagctggagggatcctgtgtcccgtcgtatgggctctcccaggacccggaccgcgagtgcagcagggcagttgcagggctaggggcagggtcaacggagggcacgccgaagagttcggagtgaccgaataccctaccctgaagttctttaggaacggcaaccggacccaccccgaggagtacaccggacctcgagacgctgagggtatcgccgaatggctgcgacggagggtcggcccttcggccatgaggttggaggacgaagcagcggcacaagcgctgatcgggggtagagatctggtggtgattgggttctttcaggatctccaagacgaagatgtcgccacatttttagctctggcccaggatgctctggacatgacttttggccttacagaccggcctaggctgttccaacagtttggattgaccaaagatactgttgtactcttcaagaaattcgatgagggcagggcagattttcctgttgacgaggagctgggactcgaccttggcgatttgagccgcttcctcgtaacgcacagcatgaggcttgtgacggagttcaactctcaaacttctgccaagatcttcgcagccagaattcttaatcacctgctattgttcgtaaaccagactctggcagctcacagggaactcctggctgggttcggcgaggccgcaccccgatttagagggcaggtgctgtttgtggtcgttgacgtggcagccgacaacgagcacgtgttgcagtattttggtctgaaggccgaggctgcaccaacattgcggctcgtgaacctggagaccactaagaagtatgcccctgtggacggagggcctgttaccgcggcttccatcactgccttttgtcatgccgtgctgaacggacaggtaaaaccttacctccttagccaggagatccccccagattgggaccagaggcccgtgaaaacgttggtggggaagaattttgagcaggtggcatttgacgagaccaaaaacgtctttgtcaagttctatgccccttggtgcacccactgtaaggaaatggcccctgcttgggaagcattggctgaaaaataccaggatcatgaagacatcatcattgccgagttagacgccaccgccaacgaattggacgcatttgccgtgcatgggtttcccaccctcaaatactttcctgccggtcctggtcgaaaagtcattgaatacaagagcacccgagacctggagacattttctaaattcctcgacaacggcggagtgctccccacagaagaaccacctgaggagcctgcagccccattcccagagccgcctgcaaatagcaccatgggtagcaaggaggagctttag

SEQ ID NO: 236666 - DNA, 1323 bp, synthetic construct
  misc_feature 1..1323: note = Description of Artificial Sequence: Synthetic coding sequence
  source 1..1323: mol_type = other DNA
atggccctgttagttctgggactggtgagttgcacctttttcctcgctgtaaacggcctatactcaagctctgacgacgtgatagagctgacaccaagtaatttcaaccgcgaggtgattcagtcggattcactttggcttgtcgagttttacgccccttggtgcggccactgccagagactcacccccgagtggaaaaaggccgctacagctctgaaggacgtggttaaggttggtgccgtcgatgcagacaagcatcatagcctgggcggacagtacggcgtacagggcttccccacgataaagatctttggcagtaacaaaaacaggccggaggattatcagggaggccgaacaggcgaagctattgtggacgcagcactgtccgcactacgccagttggttaaggaccggctggggggtagatctggcggatacagcagcggcaagcaggggcgttctgattcaagttctaagaaagacgtcatcgagctcactgacgattcattcgataaaaatgtgctcgactcagaggacgtgtggatggtggagttctacgcaccgtggtgcggacactgcaaaaacttagaaccggaatgggcggcagcagcttctgaggtaaaggagcagaccaagggcaaggtgaagctggcagccgtcgacgccaccgtgaaccaagtactggccagtcgttacggcatcagaggatttccgacaattaaaatcttccagaaaggtgaaagcccagtggactacgacggtggtaggactagaagcgatatagtctctagagcactagacctcttctccgataatgccccacctccagaactgttggagatcatcaacgaggatatcgctaagaggacttgtgaagagcaccagctgtgcgtagtcgctgtactgccgcacatcctggataccggagcagcaggccgtaatagctatcttgaagtgctgttaaagctggcagataagtataagaaaaagatgtggggctggctttggaccgaagccggtgcccaatccgaactggaaacagctctagggataggcggattcgggtaccctgctatggcagccatcaacgccaggaagatgaagtttgcactgctcaagggaagctttagtgaacagggaataaacgagtttctgcgcgagctaagtttcggacggggaagtaccgcacctgtagggggaggggcattccccactatagtagagcgtgaaccgtgggacggcagagacggagaacttccggtcgaggatgacattgatctctcggatgtggagcttgatgatctgggtaaggatgaactttag

SEQ ID NO: 236667 - DNA, 1338 bp, synthetic construct
  misc_feature 1..1338: note = Description of Artificial Sequence: Synthetic coding sequence
  source 1..1338: mol_type = other DNA
atgtaccccagtactaccatggctaacgcccctggcctagtgtcatgcacattttttcttgccgttaatgggctgtacagttcttctgacgacgttatcgagctgactcccagcaatttcaatagggaagtcatccaaagtgattctttgtggctggtggaattctacgccccatggtgcggtcactgtcagcgtctgactcctgaatggaaaaaagcagctaccgcccttaaggatgtagtcaaagtgggggctgttgatgctgataaacatcacagcttgggaggccagtacggcgttcaaggcttccctactattaaaatatttggctccaataagaacagacccgaggattaccagggtgggagaactggggaagcaattgtggatgctgccttaagcgcgctgcgtcagttggtgaaggacaggctgggcggtcgctcgggcggatattcatcaggcaaacagggaaggtcggactcgtcaagcaagaaagacgtgatcgagttaacagatgacagtttcgacaaaaatgtactcgatagcgaagatgtgtggatggttgagttctatgctccgtggtgtgggcactgtaaaaacttagaaccagagtgggcagcagcggcatctgaagtcaaagagcaaactaagggcaaagtgaagctcgctgccgtggacgccacagtaaaccaagtgttggcttccaggtatggaatcagggggtttcctacaataaagatttttcagaaaggtgaatcccctgttgactatgatggtggtcggacgagaagcgatattgtttctagagccctggacttgttcagcgacaatgccccacccccagagctgctggaaataatcaacgaggatatcgcaaagaggacgtgtgaggagcatcagctgtgcgttgtcgccgtgttgcctcacattctagatactggcgcagcaggtagaaactcctacctggaagtcttactgaagctggcggacaagtacaagaagaagatgtggggctggctgtggaccgaggccggtgcacagtccgagttagaaaccgccctgggaatcgggggtttcggctaccccgcaatggctgccattaatgccagaaaaatgaagtttgcgctgctgaagggatctttctctgaacagggcatcaacgaattcctcagggagctgtcttttggacggggaagcactgcccctgtgggaggcggagcatttcctacgatcgtcgagagggagccttgggatgggagagacggggaactacccgtggaggatgacattgacctaagtgacgtagaactggacgacctcggaaaagatgagctctag

SEQ ID NO: 236668 - DNA, 36 bp, synthetic construct
  misc_feature 1..36: note = Description of Artificial Sequence: Synthetic coding sequence
  source 1..36: mol_type = other DNA
atgtatccttctacaactatggccaacgctccctag

SEQ ID NO: 236669 - DNA, 1314 bp, synthetic construct
  misc_feature 1..1314: note = Description of Artificial Sequence: Synthetic coding sequence
  source 1..1314: mol_type = other DNA
atgatcttagggctagtgagctgtacgttctttttggccgtgaacggtctctactcgagctcagatgacgttatcgagctaaccccctctaacttcaatagggaggtgatccaatcagactctctgtggctcgttgagttttacgcaccttggtgcgggcattgccagaggctgacccccgaatggaagaaggcagccacggcccttaaggacgtggttaaggtgggcgcagtggacgccgacaagcatcactctttaggtggacagtacggggtgcaggggttccccaccattaaaatcttcgggtcaaataagaatcgcccagaggactaccaggggggtcgaactggtgaagccatagtggatgcagctctcagcgccttgaggcagctggtcaaagataggctcggtggacgcagcggcggatattcatcaggaaagcagggcaggtccgatagttcctcaaaaaaggatgtcattgagctgaccgacgatagttttgataagaacgtactggactccgaggacgtctggatggtagaattctacgccccatggtgtgggcactgcaaaaatctcgagcccgagtgggctgccgcagcctctgaggtcaaggagcagacaaagggaaaggtcaaactggctgccgtcgatgccacggtaaatcaggtcctggcaagccgttatggaattcggggattcccgaccattaagatcttccagaaaggcgagtccccggtggactatgatggtggtagaacacggtccgatatcgtgagcagagcactggatctcttctccgacaacgcccctccacccgagctgctggaaattattaatgaagatatcgctaagaggacatgtgaggagcatcagctgtgtgtcgtggccgtgctgccacacattcttgatacaggcgcagcgggacgcaattcttatctggaagtgctgctgaaactcgccgacaaatataagaagaagatgtggggatggttatggacagaggctggtgctcaatcggagctggaaaccgctctgggcataggcggatttggatatcccgcaatggctgcaattaacgctcggaagatgaaattcgccttactgaaaggcagtttttccgagcaaggcattaacgagtttctcagggagttaagctttggacgcggatcaacggctcccgtgggtggaggcgcttttcctaccatcgtggagcgggaaccatgggacgggagggacggtgaactgccagtcgaggacgacatcgacctttccgatgtggaactggatgacctgggtaaggacgagttgtag

SEQ ID NO: 236670 - DNA, 1956 bp, synthetic construct
  misc_feature 1..1956: note = Description of Artificial Sequence: Synthetic coding sequence
  source 1..1956: mol_type = other DNA
atggccgactccgcggaacttaagcaaatggtcatgtcccttagggtatcagagctgcaagtacttctggggtatgcaggcaggaataagcatggaaggaaacatgagctgctgactaaagccttgcatctgttaaaggctggttgtagccccgcagtgcaaatgaagattaaagaactttataggcgcaggtttccccagaagatcatgacacccgctgacctcagcatccctaatgtgcacagcagccctatgccagccaccctgtctccctcaaccattccccaactgacgtacgatggccaccccgctagctcgcctctgctccctgtcagtctgctgggccctaaacacgagcttgagctcccgcacctcaccagcgccttacatccagtgcacccagatatcaagctccagaaacttcctttctacgatcttctagacgagctcattaagcccacatcactcgcttctgacaactcccaaagattcagggaaacttgtttcgcgtttgctctgacccctcagcaggtgcagcagattagctcctctatggacatatctggtactaagtgcgacttcacggtgcaagtgcagctacgattctgcctatccgaaaccagctgcccccaggaggatcacttcccccctaacctgtgcgttaaggtcaacacaaaaccctgctccttgccaggttacttacctcccaccaagaacggcgtggaacccaaacgacccagcagacccataaatattacctcactggttaggttgagcaccaccgttccaaatacaatcgtcgtttcttggacggccgaaattggaaggaattactccatggcggtgtatcttgtgaaacagttgtcctctactgtactgcttcagaggctacgcgcaaagggcattagaaatccggaccacagccgagcgttgatcaaggaaaaattgacagccgaccctgactccgagatcgccacaacttcactgagggtgtctctgttatgtccgctagggaaaatgcgtctgaccatcccttgcagagctctcacatgcagccacctgcagtgtttcgacgccactctgtacatccagatgaatgagaagaagccaacatgggtttgtccagtgtgcgataaaaaggcaccctacgagcacttaatcatcgatggcctgtttatggagatactaaagtactgcacagattgcgacgagattcagtttaaggaggatgggacctgggctcctatgaggtccaagaaggaagtgcaggaggttagcgcttcttataatggggtagacggttgtttgtcctctaccctggagcatcaggtggcatcgcaccatcagagctcaaataagaacaagaaggtggaggttatcgatctcacaatcgattcatcgtccgatgaagaggaggaagaaccctctgcgaagagaacctgcccctcgctctcccctacctctcctctgaataataagggcatcctgtcattgccccatcaggcatcacctgtgtctaggacgcccagtttacccgctgtggatactagttacattaatactagtctaatccaggactacaggcaccccttccacatgaccccaatgccctatgatcttcaggggctggactttttcccctttctgagtggcgacaatcagcactataacacttccttgttggccgcagcggcagccgctgtgtcggatgaccaagatcttctgcattcctctcgatttttcccttacaccagctctcagatgtttctcgaccaattgagcgccggtggttccacttcattgcctaccaccaacggatctagttcaggctctaacagttcactggtgtcgtccaattcactgcgagagtcccactctcataccgtaacaaatcggagtagtactgacactgctagtatattcggtattattcccgatataattagtctcgactag

SEQ ID NO: 236671 - DNA, 1962 bp, synthetic construct
  misc_feature 1..1962: note = Description of Artificial Sequence: Synthetic coding sequence
  source 1..1962: mol_type = other DNA
atgtttacattgcaagactcctacgtgaagcaaatggtgatgtccttacgggtaagcgaattacaagttctgctgggatatgcaggaagaaacaaacacggcagaaaacacgagttgctgactaaagctctgcaccttctgaaagcaggatgttcccccgcagtacagatgaagatcaaggagctgtaccgcagacgctttcctcagaagatcatgacaccggctgatcttagcatccccaacgtgcactccagtcctatgcctgctaccctcagccctagtaccatccctcagctgacatatgatgggcatccagcatctagcccactcctccccgtctcactgctgggaccaaagcacgaacttgagctccctcatctgacctcagcactccaccccgtgcacccggatataaagttgcagaaactccccttttacgatcttcttgatgaactaatcaagcccacatcactggcctctgataattcccagagatttcgggagacgtgttttgcttttgctctgaccccacagcaggtgcagcagatctcctcaagcatggacatatccggcactaagtgcgattttacagtccaggtgcagctccggttctgtcttagcgaaacctcctgtccccaggaagatcatttcccaccaaatctttgcgtgaaggtcaacaccaaaccttgtagcctacccggatacctccctccaaccaaaaacggtgtagagcccaagaggccttccagaccgatcaatatcacatctctggtacgcctgagcactacagtgccaaacactatcgttgtcagctggacagcagagattggcagaaactacagcatggccgtttacctggttaaacagttatcttcgaccgtgctcctgcaaagactgcgggctaagggaatccgaaaccccgaccattctagagctctgataaaggagaagttgaccgccgaccccgattccgagattgcaactacctccttgagagtgtctctcctttgtcccctgggcaagatgcggcttacaattccttgtcgagccctcacgtgctctcatctgcagtgttttgatgctacgttgtacattcagatgaatgaaaaaaaaccaacatgggtatgtcctgtctgcgacaagaaggcaccttacgaacatctgatcattgatgggttattcatggagatcctgaaatattgcaccgattgtgatgagatccagtttaaagaagacggaacctgggcccctatgagaagtaaaaaagaggtacaagaggtcagtgccagctataacggggtggacggatgtctcagttcgaccctggaacatcaggttgcatctcaccaccagtcttcaaataaaaataaaaaggtggaagtgatcgacttgacaattgacagcagctccgacgaggaggaagaagaaccaagcgccaagaggacgtgtccatcgctctccccaacatcaccacttaacaacaagggaatcctctccttgcctcatcaagcaagtccggtgtcaagaaccccctcactgccggctgtggacacaagttatatcaacacttccttgattcaggactaccgccacccctttcatatgacccccatgccatacgatttgcagggactggactttttcccctttctcagcggagacaaccagcactataatacatcgttgctggctgcagcagctgcagcagtaagtgatgaccaggaccttctacatagcagccgattttttccttatacttccagccagatgtttcttgaccagctgtccgccggtggatcaacctccctgccgactacaaacggaagctctagtggatccaacagctcactcgtatctagtaacagcttgcgggaaagccattcccacacggtcacgaacagaagtagcaccgacacagcgtcaatattcgggatcatcccagacattatctccttggattag

SEQ ID NO: 236672 - DNA, 1782 bp, synthetic construct
  misc_feature 1..1782: note = Description of Artificial Sequence: Synthetic coding sequence
  source 1..1782: mol_type = other DNA
atggccgagctcggagagcttaaacacatggtcatgagtttccgggtttcagagctgcaggtgctgctgggctttgcgggaagaaacaagagcggcagaaagcatgagttgctcgcgaaggctctgcacctgctcaaaagttcctgtgctccgtcggttcagatgaagataaaagaattgtatcgaagaagattccctcggaagacccttggtccatccgacctcagtctcttgtcgttgcctcccggtaccagtccacctgtgcatccggacgtgacaatgaagcctctgcctttctacgaagtctacggcgaattgataaggccgaccacgttagcgagtacttcgtcacagcggtttgaagaagcccatttcacctttgccctgacacctcaacaggtccaacaaatattaacctcccgcgaagtactgccaggcgctaaatgcgactacactatccaagtgcaactgagattttgtctgtgtgagacatcatgtccccaggaagattatttccctcctaatctgtttgtcaaggtcaatggaaagctctgcccgctacctggttatctgccacccaccaaaaatggcgctgaaccaaagcgtccaagtcgacctattaatatcaccccactcgccaggctgagtgctaccgtgcccaacactattgtggtgaactggagttcagagttcggaaggaattattcactctctgtgtacctggtgcggcagctcacagcagggacccttctccagaaactgcgtgccaaaggaatacggaatccagatcattccagggccctgatcaaggaaaaactgacggcggatcctgattctgaagtggcaacaacctcgctgcgggtaagcttgatgtgcccactgggcaaaatgaggctgacggttccttgccgcgcattaacatgtgcacatttgcaatcctttgatgcggctctttaccttcagatgaatgaaaagaagcccacatggacatgcccagtgtgcgacaaaaaagcaccctatgagagcctgatcatcgacgggctgtttatggaaatcctgtcatcttgttccgattgtgacgagatccagtttatggaggacgggtcatggtgtcctatgaagcccaaaaaagaagctagtgaagtgtgtccccctccaggctatggactcgatggattgcagtactcacccgtgcaggggggagacccctctgaaaataagaagaaggttgaggtcatagaccttacgatagagagcagcagtgatgaggaggacttgccaccgaccaaaaaacattgcagtgtgacctccgccgctatacctgcacttcctggcagcaagggcgtgctgacatctggccaccaaccaagctctgttttaaggtcacctgcaatgggtactctcgggggagacttcctgtctagcctccccctccatgagtatcctccagctttccccttaggtgcggacattcaaggactcgacctgtttagcttcctccagacagagagtcagcattacgggccaagcgttataacaagtctggacgagcaggatgctctggggcatttctttcagtatagggggaccccatcgcatttcctcggtccccttgcgcctacattgggctcgtcccattgcagtgcaactcccgctccacccccagggagggtctcaagcatcgtggcaccaggtggggcattgagggaagggcacggtggcccattaccctctggaccttcccttaccggctgtcggtcggacatcatttcactggattag

SEQ ID NO: 236673 - DNA, 873 bp, synthetic construct
  misc_feature 1..873: note = Description of Artificial Sequence: Synthetic coding sequence
  source 1..873: mol_type = other DNA
atggtgatgtcgttcagagtctctgagctccaggtcctgctcggatttgctgggaggaataagagcggacggaagcatgagttacttgctaaagccctccatcttttgaagtcttcttgcgcacctagcgtccagatgaagatcaaagaactgtatcgtcggcgttttccgagaaagaccctaggtccatctgatttgtctttgctatcgcttccacccggaacatcccccgtcggttccccaggacctcttgctcccatacctccaactcttctggccccaggaactttgctcgggcctaagagggaagtggacatgcaccctcctctcccacagcccgtgcacccagatgtaaccatgaagccactgccattttacgaggtctatggtgaactgattagacccactacattggccagtacatcctctcagagattcgaagaggcccatttcacatttgctttgacaccccagcaggtgcagcaaatcctgacatctcgcgaggtcctccctggagcgaagtgcgattataccattcaagtgcagcttaggttttgcctgtgcgaaactagttgtcctcaggaggattatttccctcccaacctctttgttaaggtgaatggaaaactttgccccctgcctgggtatctgcctcccaccaagaatggcgctgaacctaagcgcccatcgaggccaatcaatattacaccacttgctagactctccgcaacagtgccaaataccatcgtggtgaactggtctagcgagttcggtagggtgtcaaccgctaaagccggtgcctggaagtccttgctgagagtgaagggtaaccaccccgtctcatgggtgggagaagccttttcctctctctag

SEQ ID NO: 236674 - DNA, 1887 bp, synthetic construct
  misc_feature 1..1887: note = Description of Artificial Sequence: Synthetic coding sequence
  source 1..1887: mol_type = other DNA
atggcagagctaggagagctcaaacatatggtaatgtccttccgcgtttccgagttgcaggtcctgctcgggttcgcaggccgtaacaagagtggaagaaaacatgagcttctggccaaggcactgcacctgctaaagagcagctgtgcgccttccgtgcagatgaaaatcaaggagctgtaccgcagacggttcccccgaaaaaccctggggccatctgacctgtcacttctaagtctgcctcctggaacaagtccagtggggagccccggaccactggccccaattccccctaccctgctcgcccctggcaccctcttgggccctaagcgggaggtggacatgcaccccccactgccgcaaccagttcaccccgatgtgacgatgaaacctctacccttctacgaagtatacggagaactgattaggcccacaacattggcttccacctcgagtcagcggtttgaggaggcacattttacgttcgctctcacgccccagcaggtccagcagattttgacatccagagaggtgcttcccggagctaagtgtgattacactattcaggttcaactgaggttctgcctctgtgaaaccagctgtccccaagaggactattttcccccaaacttattcgtcaaggttaacggcaagttatgccccctgcccggatatctgcccccaaccaagaatggtgctgagccaaagcgccctagcaggccaattaatattaccccccttgccaggcttagcgcgaccgtacccaacaccattgtcgtaaactggtcctctgagtttggcaggaactacagcctgagcgtctacctagtgcgtcagttaaccgccggaactctgttgcaaaagctaagagccaagggaatccgaaatcccgatcattcgcgagccttaattaaagagaagctaactgctgaccccgactcagaggtcgcgacaacaagtctgagagtttccttgatgtgccccttggggaaaatgcgtctcacggttccctgcagggccctgacatgtgcccacctgcagtcctttgatgctgctctgtacctgcagatgaatgagaagaagccaacttggacctgtccagtctgtgacaagaaagccccatacgagagcctgatcattgatggacttttcatggagattctcagtagttgcagcgactgcgatgaaatacaattcatggaagatggatcctggtgtccaatgaagcccaagaaggaggccagcgaagtgtgtcctccgccaggttacgggctggatggacttcagtactcaccagtccaagggggagacccttctgaaaataaaaagaaggtcgaggtgatagacctgactatcgaatcctctagcgacgaagaggaccttcctcccaccaagaagcattgcagcgtaacttcagctgctatccccgcactgcccggaagtaagggcgtgttaacaagcggccatcagccctcctcagtccttaggagtcccgctatggggactcttggaggggattttctatcatctttaccattgcatgaatacccaccagcattcccattaggcgcagatatacagggccttgacctgttctcttttctgcaaacggaatcccagcactacgggccttctgtgattactagccttgatgagcaggacgccctgggacacttttttcagtatagaggaacaccaagccatttcttgggcccactagccccaaccctgggcagctcacattgctctgctactcctgcacccccaccagggagggtgtcttctattgtggcccctggcggtgcactgagggaggggcacggtggcccactccccagcggcccatctctgactggatgccgctccgacatcatctcccttgattag

SEQ ID NO: 236675 - DNA, 780 bp, synthetic construct
  misc_feature 1..780: note = Description of Artificial Sequence: Synthetic coding sequence
  source 1..780: mol_type = other DNA
atggttatgtctttcagagtaagtgagttacaggtgctcctcgggtttgccggtagaaataaatccggacggaagcacgaattgctcgcaaaggctctgcacctgcttaaatcaagttgtgccccaagcgtccagatgaagataaaggaactatatagacgcagatttccacgcaagaccctcggacccagtgacttgtcgctcctgtcactgcctcccggaacatcacccgtaggatccccaggaccattggcacccataccacctaccttgcttgcacctggaacactgctaggtcctaagcgtgaggtggacatgcacccccctctaccgcagcctgtccaccctgatgtgactatgaagccgctccccttttatgaagtctacggcgagctgatccgaccaaccaccctggcaagcacctccagccagaggttcgaagaggcacactttactttcgccctgacaccccagcaagtccagcagatcttgacaagcagagaggtcctcccgggagccaaatgcgattacactatccaggtccagctacggttttgcctgtgtgagacaagttgccctcaagaggactatttcccaccaaacctgttcgtgaaggtaaacggtaagctgtgtccacttccaggttacctgcccccaacgaagaacggcgcagagcctaagcggccatcccgcccaatcaacataacgcccctcgctcggctatcagccactgtgcctaataccattgtggtgaattggagcagcgaattcggcagatag

SEQ ID NO: 236676 - DNA, 1248 bp, synthetic construct
  misc_feature 1..1248: note = Description of Artificial Sequence: Synthetic coding sequence
  source 1..1248: mol_type = other DNA
atgtttgctgacctagactatgatatcgaggaggacaaacttggcatcccaaccgttcccggaaaggtcacccttcagaaggatgcacagaacctgattggcatttctatcggcggaggggcacagtattgcccctgcctgtatatcgttcaggtgttcgacaacacacccgcagcactggatggaactgttgccgctggcgatgagatcactggagttaacggaaggagcattaagggcaagaccaaggtcgaagtagccaaaatgatccaggaggtgaagggagaggttacgattcattacaacaagttgcaggccgatcccaagcaaggcatgtcgctggatatcgtgctcaagaaagtgaagcatagactggtggagaatatgtcatctgggacagcagatgctctgggcttgtcacgtgccatcctgtgcaacgacggactggttaagcggctggaagaactggagcgtacagcagaactgtataaaggaatgacagaacacactaagaacctcctgcgcgctttttatgagttgtcccaaacccaccgcgcattcggcgacgtattttctgtaattggcgtgagagagccccaacctgctgccagcgaggcttttgtgaagtttgccgacgctcacaggagcatcgagaagtttggaatcaggctccttaagactatcaaaccgatgctcaccgatcttaatacctatcttaataaagctatcccagatacccgtcttacgataaagaaatatttggatgttaaattcgagtatctgagctattgtcttaaggtcaaagagatggacgacgaggaatactcatgcatagccctgggagagcccttatatcgcgtgtccaccggcaactatgagtatcgcctgatcctcagatgtagacaagaggcgcgtgccaggttcagccagatgcgcaaggacgtgctggaaaaaatggaactgctggaccaaaagcacgtgcaggacattgtgttccagcttcagcgcctagtcagcacaatgagcaaatactacaacgattgttacgccgtccttcgggacgcagatgttttccctattgaagtggacctcgcccacacaacattagcctacgggcttaatcaagaggaatttactgacggagaggaagaggaagaggaggaagacaccgctgcaggtgagccctccagagatacccgcggtgccgctggaccactggataagggaggtagctggtgcgattcctag

SEQ ID NO: 236677 - DNA, 1248 bp, synthetic construct
  misc_feature 1..1248: note = Description of Artificial Sequence: Synthetic coding sequence
  source 1..1248: mol_type = other DNA
atgttcgctgacctcgactacgacattgaagaagataagctaggaatcccaactgtgccaggaaaagtgaccctacagaaggatgcccagaaccttatcggcatttctatcggaggcggtgcccagtactgtccctgcctgtatattgttcaggtgttcgacaataccccggctgccctggacgggacagtcgctgccggtgatgagatcacaggagtaaacgggaggagcatcaaggggaagacaaaagtcgaggtcgctaaaatgatccaagaagtgaaaggggaagttacaattcactacaataagctgcaggccgacccaaagcagggcatgagtttagatatcgtcctcaaaaaggtgaagcatcgtctggtggaaaacatgtcttctggcactgccgacgctctaggactgtcccgggcaattctctgcaacgacggactggtgaagcgtctggaggagttggaaagaacagcagagttatataaggggatgacggaacatacaaaaaatctactgcgggctttttacgaactgagtcagacacatcgcgcttttggggacgtatttagtgtgataggggtacgggaaccccagcctgcagcttctgaagcgttcgtaaagttcgcagatgcgcaccgaagcatcgagaagtttggcataaggttattaaagaccataaaacccatgctcacagacctgaacacttacttgaacaaggccatccccgacaccaggctgacgatcaaaaagtatctcgacgtcaaatttgaatatctcagctattgcttgaaagtgaaagaaatggatgacgaagagtactcttgtatcgctttgggcgagcccctgtaccgggttagtacagggaactacgagtatcggttgatcttacgctgtaggcaagaggcacgcgctaggttttctcagatgcgcaaggatgttttggaaaagatggagctgttggaccagaagcatgtgcaggacatcgtgttccaactccagcgccttgtgtcaacaatgtctaaatattataacgactgttacgccgtgctgagagatgcggacgtgttccccattgaagtggacctggcacacaccactctggcctacggtcttaaccaggaggaatttacagatggagaggaggaagaagaagaggaagataccgcagccggagaaccctcccgggacacgagaggcgctgccggtcccttagataaaggtggatcatggtgcgattcttag

SEQ ID NO: 236678 - DNA, 690 bp, synthetic construct
  misc_feature 1..690: note = Description of Artificial Sequence: Synthetic coding sequence
  source 1..690: mol_type = other DNA
atgttcgccgatttggactacgatatcgaagaggacaagctgggcatccctacagttccagggaaagtcacactccagaaggacgcacagaatctgattggaataagcattgggggaggcgcacagtactgcccttgtctgtacatcgtccaggttttcgataacacaccagccgcactcgatggtacggtggcagccggtgatgaaatcacaggcgttaatggtcggtctatcaaggggaagactaaggttgaggtcgctaagatgatccaggaggtgaagggcgaagtcacaatacattataataagctgcaggcggacccaaagcaagggatgagccttgacatcgtgcttaagaaagtcaagcatcggctggtagagaacatgagcagtggcacagccgatgcccttggacttagccgcgcaattttatgtaacgacggcctggtcaagcggctggaggagctggagcggacggcagaactgtacaaaggtatgacagaacatactaaaaatctgttacgggctttttacgagttgagccagacacaccgggctttcggcgacgtctttagcgttatcggcgtgcgtgagccacaaccggctgcatctgaggctttcgtgaagtttgccgacgcccacagatcgatcgagaaatttggcatcagactccttaaaacaattaaatag

SEQ ID NO: 236679 - DNA, 405 bp, synthetic construct
  misc_feature 1..405: note = Description of Artificial Sequence: Synthetic coding sequence
  source 1..405: mol_type = other DNA
atgttcgccgacttagattatgatatagaagaagacaagctaggcattccaactgtgcccggtaaagttactctgcaaaaagacgcgcaaaacctgattggaataagtattggaggtggggctcagtactgcccatgcctgtacatcgtccaggtgttcgacaacaccccagctgccttggatggtacggtggctgccggagatgagataaccggcgttaacggtcgatccatcaaaggtaagaccaaagtggaggtcgccaagatgatccaggaagtgaagggcgaagtgaccattcactacaataaactgcaagccgaccccaagcaaggcatgtcgctcgacatcgttcttaagaaagtgaagcatcgactggtcgagaacatgtcgagcggcaccgcatag

SEQ ID NO: 236680 - DNA, 393 bp, synthetic construct
  misc_feature 1..393: note = Description of Artificial Sequence: Synthetic coding sequence
  source 1..393: mol_type = other DNA
atgttcgccgatttggactatgatatcgaagaagacaaactcggaatacctacagtgcccggtaaggttacgctgcaaaaagatgcccagaatctgataggcatctctatcggagggggagcacaatactgcccgtgcctttatatcgttcaggtctttgacaacacccctgccgctctcgatggcaccgtggcagctggtgacgaaatcactggcgtgaatggtcgctcaattaaaggcaagaccaaagtcgaggtggcaaagatgattcaggaggtgaagggtgaagtcacaatacattataataagctgcaggcagatcctaaacagggaatgtccctggacattggccagcgcctgggcttccacggcccagggcctcacagctcctag

SEQ ID NO: 236681 - DNA, 117 bp, synthetic construct
  misc_feature 1..117: note = Description of Artificial Sequence: Synthetic coding sequence
  source 1..117: mol_type = other DNA
atgttcgcagatctcgactacgacatagaagaggacaaactgggtattcccacagtacctggcaaggtaacattgcagaaggacgcccagaatctgatcgggatctccattgggtag

SEQ ID NO: 236682 - DNA, 231 bp, synthetic construct
  misc_feature 1..231: note = Description of Artificial Sequence: Synthetic coding sequence
  source 1..231: mol_type = other DNA
atgacggacgtggagactacctacgctgactttattgcctccgggaggaccggacggagaaatgcaattcacgatatcctggtgtccagcgcaagcgggaactcaaatgagctggccctcaaactggccggactggacatcaataaaacagagggcgaagaggatgcacagcggtccagtacggagcagagcggagaagcccagggggaagccgctaaaagcgaaagttag

SEQ ID NO: 236683 - DNA, 231 bp, synthetic construct
  misc_feature 1..231: note = Description of Artificial Sequence: Synthetic coding sequence
  source 1..231: mol_type = other DNA
atgacggacgtagaaacaacttatgccgatttcatcgcctcaggcagaaccggcaggaggaacgccattcatgacatcctggtatcgtccgcttcaggaaatagcaatgagttggcgttgaagctcgccggactggatataaataagactgagggagaagaggacgctcaaagaagctccacagaacagtccggggaagcccagggagaagcggcaaagtcagagtcgtag

SEQ ID NO: 236684 - DNA, 231 bp, synthetic construct
  misc_feature 1..231: note = Description of Artificial Sequence: Synthetic coding sequence
  source 1..231: mol_type = other DNA
atgaccgacgtggagaccacctacgcggacttcatcgcttccggtcgaactggcagacgaaatgccatccatgacatattggtttcctccgcctctggaaattcaaatgaactcgccctaaagctggcaggactcgacatcaataaaactgaaggcgaggaagacgcccagcgtagttccaccgagcaatccggcgaggcacagggagaggctgcaaagtctgagagctag

SEQ ID NO: 236685 - DNA, 258 bp, synthetic construct
  misc_feature 1..258: note = Description of Artificial Sequence: Synthetic coding sequence
  source 1..258: mol_type = other DNA
atgtcccaccaggatgtggccatgaggactgactcctcaaagatgacagacgtagagagcggcgttgctaatttcgcctcttctgcgagagccggaagacgcaacgcgttgcctgacatccaatcttcagccgctaccgatggaacctccgacctgcctctgaagctggaggccctcagcgttaaggaggacgctaaggagaaagacgagaaaactacccaggatcagctggaaaagcctcagaacgaggaaaaatag

SEQ ID NO: 236686 - DNA, 237 bp, synthetic construct
  misc_feature 1..237: note = Description of Artificial Sequence: Synthetic coding sequence
  source 1..237: mol_type = other DNA
atgagaaccgacagctcaaagatgaccgatgtggagtcgggcgttgctaacttcgccagtagtgctcgcgctggcagacggaacgctttgcccgacatccaaagctcagctgccacagacggaacctcagacctgcctctaaaactggaggccctttcggtcaaagaggacgccaaggagaaggatgagaagacgacccaagaccagctggagaagccccagaatgaggagaaatag

SEQ ID NO: 236687 - DNA, 264 bp, synthetic construct
  misc_feature 1..264: note = Description of Artificial Sequence: Synthetic coding sequence
  source 1..264: mol_type = other DNA
atgcacattctgttcgtcgacgtagcgatgcggacagactccagcaagatgactgacgtggagagcggagtggccaatttcgcaagcagcgcaagagctggccgaaggaatgctttgccagatattcagtccagcgcagccaccgacggcacaagcgatctacctctgaaacttgaggccttatcagttaaagaggacgccaaggaaaaggatgagaaaaccacacaagaccagttagaaaaacctcagaacgaggagaagtag

SEQ ID NO: 236688 - DNA, 237 bp, synthetic construct
  misc_feature 1..237: note = Description of Artificial Sequence: Synthetic coding sequence
  source 1..237: mol_type = other DNA
atgcgaacagatagcagtaaaatgacagatgttgagtccggcgtcgccaacttcgccagctctgcccgagccggacgacgcaacgcccttcccgacatccagagctctgcggcaacagacgggacgtctgatctcccattgaagctggaagccctgtccgttaaagaagatgctaaggagaaagacgagaaaactactcaggaccagctggagaaaccacagaatgaggagaagtag

SEQ ID NO: 236689 - DNA, 237 bp, synthetic construct
  misc_feature 1..237: note = Description of Artificial Sequence: Synthetic coding sequence
  source 1..237: mol_type = other DNA
atgcggaccgactcaagcaaaatgaccgacgttgaaagtggggtggccaatttcgctagttccgcaagggcaggtcgtcgtaacgccctccccgatatacagtcctcagcggctactgacggaaccagcgacttaccgctgaagctggaagctctgtccgttaaagaggacgccaaggaaaaagacgagaagacaacccaggaccaactggagaaaccacagaacgaggaaaaatag

SEQ ID NO: 236690 - DNA, 237 bp, synthetic construct
  misc_feature 1..237: note = Description of Artificial Sequence: Synthetic coding sequence
  source 1..237: mol_type = other DNA
atgcgcactgattccagtaagatgacagatgtggaatccggagtagctaatttcgcttcttccgcccgtgctgggagaagaaacgcacttccagatatccagtctagcgcggctaccgacggcacttctgacctgccactgaaactggaagccttgagcgtcaaagaagatgccaaagagaaagatgaaaagacaacccaggatcaacttgaaaaacctcagaacgaagaaaagtag

SEQ ID NO: 236691 - DNA, 237 bp, synthetic construct
  misc_feature 1..237: note = Description of Artificial Sequence: Synthetic coding sequence
  source 1..237: mol_type = other DNA
atgcggactgacagctctaaaatgactgatgtcgaatcaggcgtcgcaaatttcgctagctctgccagggccggacgccgaaatgccctgcctgatatccagtcttccgcagctacagatggaaccagcgatctgcccctgaagctggaggcattatccgtgaaggaagacgcaaaagaaaaggatgagaaaaccactcaggatcagctcgagaaaccccagaatgaagagaaatag

SEQ ID NO: 236692 - DNA, 231 bp, synthetic construct
  misc_feature 1..231: note = Description of Artificial Sequence: Synthetic coding sequence
  source 1..231: mol_type = other DNA
atgatggaagtggagagctcttatagcgacttcattagctgcgatcggaccgggcgtcgcaacgccgtcccagatatacagggcgatagtgaagccgtttctgttcgtaagctggcaggggacatgggagaactggcgctggaaggggcagagggacaggtggaaggctcagctcccgacaaagaggctggaaaccagccccaatcaagcgatggcacaacttccagctag

SEQ ID NO: 236693 - DNA, 195 bp, synthetic construct
  misc_feature 1..195: note = Description of Artificial Sequence: Synthetic coding sequence
  source 1..195: mol_type = other DNA
atgatggaggtggagagcagctattctgactttatcagttgcgacagaactggccgtcggaacgccgtcccagacatacagggcgactccgaggcagtgtccgtaagaaagctggccggagacatgggagaactggccctcgaaggggcagagatggatctcaccatgctgccttggctggtctctaactcttag

SEQ ID NO: 236694 - DNA, 231 bp, synthetic construct
  misc_feature 1..231: note = Description of Artificial Sequence: Synthetic coding sequence
  source 1..231: mol_type = other DNA
atgatggaggtggagagcagctactcggattttatttcatgcgatcgtaccggacgacgcaacgcagtcccggatatccagggcgattccgaagctgtgtccgtcaggaaactcgctggtgacatgggagaactggccttagagggtgcagaaggacaggtagagggatcagcgcctgacaaagaagcgggtaatcagccccaaagctctgatggaaccactagttcttag

SEQ ID NO: 236695 - DNA, 231 bp, synthetic construct
  misc_feature 1..231: note = Description of Artificial Sequence: Synthetic coding sequence
  source 1..231: mol_type = other DNA
atgatggaagttgagagtagctacagtgatttcatctcatgcgacagaaccggcagacggaatgccgtacctgatatccagggtgactctgaggccgtcagcgttagaaaactcgctggagatatgggggagctcgcccttgaaggcgctgaaggacaggtagaggggtctgcaccagacaaagaagctgggaaccagcctcagagctcagacggcacgaccagttcttag

SEQ ID NO: 236696 - DNA, 231 bp, synthetic construct
  misc_feature 1..231: note = Description of Artificial Sequence: Synthetic coding sequence
  source 1..231: mol_type = other DNA
atgatggaggtcgagtcatcatactcagattttattagctgcgacaggactggcagacgcaacgccgtgccggatatccaaggtgactccgaggctgtgagcgtgcgaaagttagccggtgatatgggagaactggctctggaaggggcagagggccaggtggaagggtctgccccagataaagaggctggaaaccagccccagtcaagtgatggtaccacgagtagctag

SEQ ID NO: 236697 - DNA, 231 bp, synthetic construct
  misc_feature 1..231: note = Description of Artificial Sequence: Synthetic coding sequence
  source 1..231: mol_type = other DNA
atgatggaagtggagtcaagttactcagactttatcagctgcgataggacggggaggagaaacgccgtacccgacatccagggcgattcagaagcggtcagcgtcaggaagttggctggcgatatgggagagcttgcgctcgaaggggctgagggccaggtggagggatccgctccagataaagaagctggcaaccaaccccaaagttcggacggaacgacatctagttag

SEQ ID NO: 236698 - DNA, 231 bp, synthetic construct
  misc_feature 1..231: note = Description of Artificial Sequence: Synthetic coding sequence
  source 1..231: mol_type = other DNA
atgatggaagtagagagctcctatagcgactttatctcctgtgaccgtacgggacgcagaaacgccgtcccagacatccagggtgacagcgaagcagtgagcgtgagaaagctggccggagatatgggagaactcgccttggagggtgccgagggacaagttgagggctccgcacccgacaaagaagcagggaaccagccacagtcatccgacggtacaacttcaagctag

SEQ ID NO: 236699 - DNA, 1578 bp, synthetic construct
  misc_feature 1..1578: note = Description of Artificial Sequence: Synthetic coding sequence
  source 1..1578: mol_type = other DNA
atgccattacttgacggagacctggaaggatctggaaagcactctagtcgaaaagtagacagtcctttcggtccaggcagtccctccaaaggcttctttagcaggggccctcagcccaggccatcctctcccatgtccgcacccgtccgccctaaaacctctcccggaagccccaaaaccgtgttccctttcagttatcaggaaagccctcctagatctcccagacgtatgtcattttcaggaatctttcgctccagtagtaaggagagctcccctaatagtaatcccgcaacatctccaggagggatacgcttctttagcaggagcaggaagacctcgggcctgagcagctccccaagcacaccaacacaagtgactaagcagcacacctttcccctggagagctacaaacatgagccggagaggctcgagaacagaatttatgcctcatcctcccctcccgacaccggccagcggttctgcccatccagcttccagagccccactcgccctcccctggcaagccccactcattacgccccatccaaagctgccgctctcgcggctgcgctgggaccggctgaggccggaatgcttgagaaactcgagttcgaagatgaggccgttgaagacagcgaaagcggagtttatatgcgattcatgaggtcacataagtgttacgacatcgtgccgacaagctcgaagttagtggttttcgacacaactctccaggtcaaaaaggccttctttgccctcgtggccaatggagtgcgagcagctcccctgtgggaatcaaaaaaacagtcgttcgtggggatgttgactataaccgacttcattaacatccttcaccgctattataagagtcccatggtgcagatttacgaactggaagaacataagattgaaacttggcgagagctctatctccaagaaaccttcaaaccgcttgttaacatttccccagacgccagcctcttcgacgccgtgtactcgttgataaagaacaagatacatcgccttcctgtgattgacccaatttcaggcaacgcattatacatcttgacgcacaaaagaattctgaagtttctgcaacttttcatgtccgacatgccaaaaccagcctttatgaagcaaaacctcgacgagctcggtattgggacttaccacaatatcgccttcatccatccagatacacctattattaaggcactcaatatcttcgtggagcgaaggatcagtgcattgcctgtcgtcgatgagagcggcaaggtcgtggatatctactccaaatttgacgttattaacctggcagcggagaagacttataacaatttggatattaccgtaacccaggccctgcagcaccgcagccaatactttgaaggtgttgtaaaatgcaacaagctcgagattttggaaaccatcgtagatcgaattgtaagagctgaggtccaccggcttgtagtcgtcaatgaggctgattccatcgtgggcattatctccctcagcgatattctgcaagccctgatcctgacccctgccggtgcgaagcagaaggagacagaaactgaatag

SEQ ID NO: 236700 - DNA, 987 bp, synthetic construct
  misc_feature 1..987: note = Description of Artificial Sequence: Synthetic coding sequence
  source 1..987: mol_type = other DNA
atgctggagaagctcgagttcgaagacgaagccgtagaggactctgaaagtggcgtgtacatgcggttcatgcgaagccacaagtgctatgatatcgtccctacatcgagtaagctagttgtttttgacacaaccttgcaagtcaaaaaggcattctttgcactggtagctaacggcgtgagggctgcaccgctctgggagagtaagaagcagtctttcgtagggatgctcacgattaccgatttcattaacattctgcatcggtattacaaatcaccgatggtccaaatctatgaattggaagaacataaaatcgaaacttggcgcgaactgtatttgcaggagacattcaaaccgctagtgaacatttcgcccgatgcgtctctgttcgatgctgtctacagcttgataaagaacaagatccacaggctacctgtcatagatcccatcagcggaaacgctctatacatcttgacacacaagagaatcctcaagttcctgcaattgtttatgagcgatatgccaaaacctgcgttcatgaagcaaaacctcgacgagctcggcatcggaacatatcataacattgccttcatccatccagacacgcccattatcaaggccttgaatatctttgtcgaaagaagaatctctgctttacctgtcgtcgatgaatcaggaaaagtggtcgacatttatagcaagtttgatgtaattaacctggctgccgaaaagacctataacaacctggatatcaccgtgacccaagccctgcagcacagatctcaatactttgagggggttgtcaagtgtaacaaactggaaattttggagaccatcgtagacaggattgtcagggcagaggtgcacaggcttgttgtggtcaatgaggctgactccatcgtcggaattatttctctatctgatatactccaggctctcatcctaaccccagccggtgcgaagcagaaagagacagaaactgaatag

SEQ ID NO: 236701 - DNA, 1335 bp, synthetic construct
  misc_feature 1..1335: note = Description of Artificial Sequence: Synthetic coding sequence
  source 1..1335: mol_type = other DNA
atgagcagcagctacgatgaggcctcgttagcgccagaagaaactaccgattcattttgggaagtaggtaattataagagaacagtaaaaagaatcgatgacggccatagactatgcaacgatcttatgaattgcgtgcaggaacgcgctaaaatcgagaaggcttatggccagcagctcacagattgggctaagcggtggaggcagcttatagaaaagggtccacagtacggaagcctggagagagcctggggggcaatcatgaccgaggctgataaggtgagtgaactccaccaggaggtgaagaacaatttattgaacgaggacctggagaaagtgaaaaattggcagaaggatgcctatcacaagcagatcatgggtgggttcaaggaaactaaagaagcagaggacgggtttcgtaaagcacaaaagccctgggccaagaaaatgaaagaactggaggccgctaagaaggcataccacctggcttgtaaagaggagaaactggctatgactcgggaaatgaattctaagacggaacaatctgttacccctgaacagcaaaagaaactgcaggataaagttgacaagtgtaaacaggacgtgcagaaaacccaggaaaagtacgaaaaggtgttagaggacgttgggaaaaccacacctcaatatatggaaaatatggagcaagtgttcgaacagtgtcagcagttcgaggaaaaacggctggtgttcttgaaggaagtcctcctggacattaaaagacacctgaacctcgctgaaaactcgagctacatccatgtgtatcgggaactagagcaggctattcggggagctgacgcacaggaggatctcaggtggtttcgatcaacctccggaccaggcatgcctatgaattggcctcaattcgaagagtggaaccctgatctaccgcatacgaccaccaaaaaggaaaaacaacctaagaaagccgaaggggtggctctcaccaacgctactggcgctgtcgaaagcacctctcaggctggtgaccggggatcagttagtagctatgatcggggtcagccttacgctaccgaatggagcgacgacgaatctggaaatccattcggagggtctgagaccaacggaggcgcaaacccgttcgaagatgattccaagggggtccgggttagggctctgtatgactacgatgggcaggaacaggatgagctgtctttcaaagcaggtgacgaattaacaaaacttggcgaggaagacgagcagggatggtgcagaggtagactggattctgggcagctggggctctaccctgctaactatgtcgaggctatttag

SEQ ID NO: 236702 - DNA, 1281 bp, synthetic construct
  misc_feature 1..1281: note = Description of Artificial Sequence: Synthetic coding sequence
  source 1..1281: mol_type = other DNA
atgtcctcaagttacgacgaggcatcactagcgccagaggagacaacggactctttctgggaagtcggaaattacaagagaacagtgaagcgcatcgatgatggccaccgcctgtgtaacgacctcatgaactgtgtccaagaaagggcaaagatagagaaagcttacggacagcaactcacagattgggcgaagcggtggcgtcagttaattgagaaaggccctcaatatggctctctggagcgcgcttggggagctattatgacggaagctgataaggtgtcagagctgcaccaggaagtcaagaacaatctcctcaatgaggaccttgaaaaggtgaagaattggcagaaagatgcttaccataagcaaatcatgggtggttttaaggagacaaaggaggccgaggatggttttcgaaaggcccagaaaccatgggccaagaagatgaaagagttggaagctgcaaaaaaggcatatcacctggcctgcaaggaagagaagctcgcgatgaccagggaaatgaactctaagaccgagcaaagcgtgacacctgagcagcagaagaaacttcaggataaggtggataagtgcaaacaagatgttcagaagacacaggagaagtacgagaaggtgcttgaagatgtgggaaagacgacgcctcaatatatggaaaacatggagcaggtctttgagcagtgtcagcagtttgaggaaaagcgccttgtcttcctcaaagaggtgcttctggacatcaagagacacttgaatctcgctgagaatagctcttacatccatgtctacagagaattagagcaggcaattcgaggcgctgacgcacaggaggatctccggtggttccgctcaacgtctggtccaggcatgccgatgaattggccccagtttgaggagtggaatcctgacctcccccatacaacaaccaagaaggaaaaacagccaaaaaaggcagagggtgttgctctgacaaacgcgacaggagctgtggagtcaacaagtcaggctggcgataggggatcggtctccagttatgatcgcggacagccttacgccactgagtggtcagacgacgagtctgggaatccattcggaggttctgagaccaatggcggagcaaatccctttgaggacgattccaagggcgtccgcgttcgggctctgtacgactatgacggccaagagcaggacgagttgtccttcaaagccggagatgagctaaccaagcttggactgtaccctgccaactacgtagaggctatctag

SEQ ID NO: 236703 - DNA, 1335 bp, synthetic construct
  misc_feature 1..1335: note = Description of Artificial Sequence: Synthetic coding sequence
  source 1..1335: mol_type = other DNA
atgagttcttcctatgatgaagcttcccttgctccagaggaaaccacagattccttttgggaagtgggtaattacaaacggacggtgaaaaggattgacgacggccatagactctgcaacgacttgatgaattgcgtgcaggaacgggcaaagattgagaaggcttacgggcagcagctcacggactgggccaagcgctggcgccagttgattgaaaagggccctcagtatgggtctctagaaagagcatggggcgcaattatgacggaggcggataaagtttccgaactccatcaggaggtaaaaaacaacctgcttaatgaagatcttgagaaagtgaagaactggcagaaggacgcgtatcataaacagataatgggaggttttaaagagactaaggaggctgaggacggatttaggaaggctcagaagccttgggccaagaaaatgaaggaactcgaggctgcaaagaaagcatatcacctagcatgcaaggaggagaagctggcgatgacacgagagatgaatagcaaaaccgagcagtcggtgacccctgaacaacagaagaagctgcaggataaggttgacaaatgcaagcaggacgtacagaagacacaggagaaatatgagaaagtgttagaggacgttggaaagaccacaccgcagtatatggagaatatggagcaggtgttcgagcaatgccagcagtttgaagaaaaacgtctggtcttccttaaggaggtgctgcttgatatcaaaaggcacctcaacttagcggagaattcctcatatattcatgtgtacagagagttagagcaggcaatccgaggagcggacgctcaagaggatctgcgatggtttaggtcaacgtccggaccagggatgccaatgaactggccccagtttgaagagtggaaccctgatctgcctcacactaccacgaagaaggaaaaacagcccaagaaggccgagggagtcgccctcaccaatgccacgggcgcagtggaatcaacctcccaggctggcgacagaggatctgtatctagctatgatcgaggtcagccctatgccaccgagtggtcagacgacgagtctggtaaccccttcggcggttccgagactaacggcggagcaaacccttttgaggacgacagtaaaggagtgagggtgcgcgctctgtatgattatgatggccaagaacaggacgaattatcgttcaaagcaggcgacgaattgacaaaacttggggaagaagatgaacagggatggtgccgcggacgattagattctggccaactgggcctgtatccagccaactacgtcgaggctatttag

SEQ ID NO: 236704 - DNA, 1275 bp, synthetic construct
  misc_feature 1..1275: note = Description of Artificial Sequence: Synthetic coding sequence
  source 1..1275: mol_type = other DNA
atggctcccgaagaagatgccggaggtgaggccctgggaggctcattttgggaggctggaaattacagacgcactgtgcagcgtgtggaagacggacataggctatgcggagacttggtgagttgcttccaagagagagctagaatcgaaaaggcctacgcccagcagctcgcagattgggcccgaaagtggcgtgggaccgttgagaagggaccacagtatggcacgcttgaaaaggcttggcacgccttcttcactgcggcagagagactgagcgcattgcatctggaggtgcgggaaaagcttcaggggcaagacagtgagcgggtaagggcatggcagaggggggcttttcacagacctgttctggggggtttcagagagagcagggccgcagaggatggtttcagaaaggcccaaaagccctggttaaaacgtctgaaagaggtggaggcgagcaagaaaagctaccacgccgcacgcaaggacgagaaaacagcccagacacgcgaaagccacgccaaggccgatagcgctgtatcacaggagcagctgcgcaagttgcaagaacgggtggaacgatgtgctaaagaggcagaaaaaactaaagctcagtacgagcagactctagcagaactccaccgatatacaccacgatatatggaggatatggagcaggcatttgagacctgccaggccgctgagcggcaacgactcctttttttcaaggatatgttattaacactgcaccagcatctcgatctctcatctagcgaaaaattccatgagttacacagggatctgcatcagggcatcgaggcggctagcgatgaggaggacctgcggtggtggcgatccactcacgggccaggaatggccatgaattggccacagttcgaggaatggagcctggacactcaacggactatcagcagaaaagaaaagggcggacgttcacctgatgaggtgacattaacctctattgtcccaacacgcgatggcacagcccctcccccacagagtcccggttccccaggcactggtcaagacgaagagtggagtgacgaggagtcacccaggaaagcagctacaggagtgcgggtccgagccctttatgactacgctgggcaggaagctgatgagctttcatttagggccggagaggagctgctgaagatgagtgaggaggatgaacaaggttggtgccagggccaactgcagagcgggcgtattggactgtacccagccaactacgtcgaatgtgttggtgcatag

SEQ ID NO: 236705 - DNA, 879 bp, synthetic construct
  misc_feature 1..879: note = Description of Artificial Sequence: Synthetic coding sequence
  source 1..879: mol_type = other DNA
atggcacctgaagaggacgctggcggtgaagcactgggaggaagcttctgggaagcaggaaattatagaaggaccgtccagcgcgttgaggatggacacagattgtgcggagacctggtttcctgcttccaggagcgggctagaatcgagaaggcttatgcccagcagcttgcagactgggcgaggaagtggagggggacagtcgaaaagggacctcagtacggcacgcttgaaaaagcgtggcatgctttcttcacagcggctgagcgactctctgccctgcatctggaagtcagggaaaagctacagggtcaggatagtgaacgcgtgagagcgtggcaaagaggtgccttccacagacccgtgttgggcggtttcagggagtcccgggctgctgaagacggcttcaggaaggcacagaaaccttggctcaagcggctcaaggaagtagaagcttcaaaaaaatcataccacgctgcaaggaaagatgaaaagactgcccagactagagagacccaaagacagaccgcgcctagcccacggtcgagctgtgccaactgccgaaacggatggaatgccgttcctcgtcggccacggcgtcagaagctaagtatgtccaggagatggcaatcgtgtatagctactctccatgctacttggcgtacgtggaatcgccctctccggcctgccagacctcctagcgcctccggattcttttcatccaggatttgctgtagtccttacacttcaacctggacatttcctgcagtccgctcctccatgaattcaaccgtaacttgtactcgggctttgcgccagccagtgacaaagaggatctgcgccggaggggctgcacccaccggacaagcttggccttag

SEQ ID NO: 236706 - DNA, 210 bp, synthetic construct
  misc_feature 1..210: note = Description of Artificial Sequence: Synthetic coding sequence
  source 1..210: mol_type = other DNA
atggcgccagaagaggacgcaggaggtgaggctctgggaggtagcttttgggaagccggaaattaccgcaggactgtgcaacgtgttgaggacggtcatagactttgtggggacctcgtttcctgttttcaggaacgggcacgaatagaaaaggcatatgcgcaacaactcgccgactgggcccgtaagtggagagggacggttgaatag

SEQ ID NO: 236707 - DNA, 429 bp, synthetic construct
  misc_feature 1..429: note = Description of Artificial Sequence: Synthetic coding sequence
  source 1..429: mol_type = other DNA
atggctccagaagaggacgctggtggcgaggccctgggagggtcattttgggaggctgggaactataggcgtaccgtgcagagagtggaagatgggcatcgcctgtgcggagaccttgtgtcctgcttccaagaaagagccaggattgagaaagcatacgctcaacagttggcagattgggcacggaagtggaggggtacggtagagaagggcccacagtacgggacactggaaaaggcctggcatgctttttttacagctgctgagagactgagtgccctgcatcttgaagtgcgagagaagcttcagggacaagattcagagagggtaagggcttggcagcgcggagcgttccaccgacctgtattaggaggattccgcgaatcgagggctgcggaggacggattccgcaaagcccagaagccctag

SEQ ID NO: 236708 - DNA, 1218 bp, synthetic construct
  misc_feature 1..1218: note = Description of Artificial Sequence: Synthetic coding sequence
  source 1..1218: mol_type = other DNA
atggcacccgaagaggacgctgggggagaagcgctgggcggttctttctgggaggcaggcaactataggcgtaccgtgcagcgtgttgaagacggacatcggctgtgcggggaccttgtaagctgcttccaggaaagggccaggatcgaaaaagcatatgcccagcaactagcggactgggcgaggaagtggcggggaacggtggaaaaaggcccacagtacgggactttggagaaagcatggcatgcgttcttcacggcggcagaaagactgagtgccctgcacctggaagtacgggagaagctccaaggacaggattctgagagagtaagggcttggcagaggggagcatttcatcgcccagtgctggggggattccgggagagccgagccgcagaagacggatttaggaaagcccagaaaccctggctgaagcgccttaaagaggtagaagccagtaaaaagagctaccatgccgctagaaaagacgagaaaaccgcccagacccgggaatcacacgctaaggctgactcagctgtctcacaggaacagttgcggaagctccaagaaagagtggaacgatgtgccaaagaagccgagaagactaaagctcagtacgagcagaccctcgccgaattgcataggtatacaccacggtatatggaagatatggagcaggcctttgaaacttgccaggctgctgagcgtcagcgactactattctttaaggacatgctactaactttacaccagcatttggatctgtctagttctgagaagttccacgaactacatcgggatctccatcagggaatagaggctgcttctgacgaggaagacctgagatggtggcggagcacacatggaccaggtatggctatgaattggcctcagtttgaggagtggagccttgatacacaacggaccatcagtcgcaaggagaaaggaggcaggtcgcctgacgaggtgaccctgacatccatcgttcccacccgggacggtaccgcccctcctccccaatcacctggatcacctggaacgggccaggacgaagaatggtcagatgaggagtcccccagaaaggccgcaaccggagttcgtgtgagagcactgtacgactatgccggtcaggaggcagatgagctgagcttcagagcaggggaagagctgctgaagatgtctgaagaggacgagcagggatggtgccagggccagtag

SEQ ID NO: 236709 - DNA, 210 bp, synthetic construct
  misc_feature 1..210: note = Description of Artificial Sequence: Synthetic coding sequence
  source 1..210: mol_type = other DNA
atggcacccgaggaagatgccggaggtgaggcccttggcggttcattctgggaggccggtaattaccgtagaacggtgcaacgggtggaggatggacacaggctctgcggggatctagtgtcatgtttccaagagcgcgcaagaatcgagaaagcgtacgcccagcagctggctgattgggcaagaaagtggagaggcacggttgaatag

SEQ ID NO: 236710 - DNA, 447 bp, synthetic construct
  misc_feature 1..447: note = Description of Artificial Sequence: Synthetic coding sequence
  source 1..447: mol_type = other DNA
atggctcctgaggaggacgcgggaggcgaagccctcggcggtagcttctgggaagccggaaattataggaggactgttcagagggtagaagatggacacagactgtgcggtgaccttgtgagctgcttccaggagagagctaggatagagaaagcgtacgcccagcagttagctgactgggccagaaaatggaggggaactgtggaaaaaggtccccaatacggaactctggagaaagcctggcatgcatttttcaccgcagccgaacgcctctccgctctccatctggaggtgagggagaaacttcagggccaagactccgaaagagtaagggcttggcagagaggagctttccacaggcctgtcctcggcggattccgcgaatctagggcggcagaggacggctttaggaaggcccagaagccatggcttaagaggctcaagtag

SEQ ID NO: 236711 - DNA, 1275 bp, synthetic construct
  misc_feature 1..1275: note = Description of Artificial Sequence: Synthetic coding sequence
  source 1..1275: mol_type = other DNA
atggcacccgaagaggatgccggtggagaagccttaggcggttctttctgggaagccggaaactatcgtagaactgttcagagagttgaagacgggcacagactctgcggagacctggtcagctgcttccaggagagagcacggatcgagaaggcatatgcccagcagctggcagactgggctagaaagtggcggggaactgttgagaaaggcccacaatacggaactcttgaaaaagcgtggcatgcctttttcaccgctgcagaacgtctgagtgctctccacctggaggtgagagagaagctgcagggacaagactcagaaagggtgcgcgcttggcagagaggggcatttcatcggccagtattaggtggtttccgagaatccagggctgcagaggacggttttcgcaaagctcagaaaccatggctgaagcgattgaaggaggtagaagcctccaaaaaatcataccatgcagctcgcaaggacgagaagaccgcacagaccagggagtcccacgccaaggcagatagcgccgtttctcaagaacagctgcggaaattgcaagagcgagtggagcgctgtgccaaggaagccgagaaaacaaaggcacagtacgagcagactctcgcagagctgcacagatatacccctcgctacatggaggatatggagcaggccttcgagacctgtcaggccgcagagcggcaacggctcttattcttcaaggatatgctgctgactctccatcaacacctggatctttcctccagtgaaaagttccatgaactacatcgggacctgcaccagggtattgaagccgcatccgacgaagaggatttgagatggtggcgttccacccatgggccaggcatggccatgaactggccacagtttgaagagtggtcccttgatacccagcggaccatttcccgcaaagagaagggcggtcgctcacctgatgaggtcacgctgaccagcattgtgcctacgcgcgacggtaccgcaccacctccacaaagtccaggcagccccggaacaggccaggatgaagaatggagcgatgaggagtcccctcgaaaagcagctactggagtgcgcgtccgagctttatacgactacgcgggacaggaagccgacgagctgagtttcagggccggagaagaactgttgaagatgagcgaggaggacgagcagggatggtgccaaggccagctgcagagcggcagaataggtctctatcccgcaaattatgtggaatgcgtgggtgcttag

SEQ ID NO: 236712 - DNA, 1587 bp, synthetic construct
  misc_feature 1..1587: note = Description of Artificial Sequence: Synthetic coding sequence
  source 1..1587: mol_type = other DNA
atgcttctgccccttttactcttgctacctatgtgttgggcagtagaagtaaagaggccccgtggagtctccttgaccaaccatcatttttacgatgagtcaaagccattcacatgcttggatggatcagctactattcctttcgaccaagtcaatgacgattactgcgactgcaaggatggttctgacgagcctggcaccgccgcttgcccaaatggatctttccactgtacgaatacgggctataaacctttatatatccccagcaaccgcgtcaacgatggagtttgtgactgctgcgatggaaccgacgaatacaattctggcgtgatatgcgagaacacttgtaaagagaaaggcagaaaagagcgcgagtctcttcaacagatggcagaagtaacaagggaggggtttcggctcaaaaagattcttatcgaggactggaagaaagccagagaggagaaacagaagaagctgatcgagctgcaggctggcaagaaatctcttgaagaccaggtggagatgctgcgaacagtcaaagaagaggcagaaaagcccgaacgagaggcaaaggagcagcatcagaagctgtgggaagaacagctggccgcagccaaagctcagcaggagcaagagctcgcagcagacgcattcaaagaattagacgatgacatggatggcacggtgagcgtgaccgaactgcaaacacacccagaactggacacagatggtgacggcgctctttcagaggcagaggcccaggcacttttaagtggggacacacagactgatgcaaccagtttctacgatagagtgtgggctgccattagggataaatacaggtctgaagctctgcccacggatctaccagcccctagtgccccagatctcactgagcccaaagaggaacaacccccagtgccatcctcccctaccgaggaagaggaagaagaggaggaagaggaagaagaagaggcagaggaagaggaggaagaagaagacagcgaagaggctcctcccccactatctcctccccagcctgcgagccccgcagaggaagacaagatgcccccatacgacgaacagacgcaggccttcatcgatgcagcccaggaggcccgaaacaaattcgaggaggccgagcggtctttaaaggacatggaggagtctattaggaacctagagcaggagatctcattcgactttggacccaacggcgagttcgcttacctgtattctcagtgctatgaactcacaaccaacgaatacgtgtacaggctctgccccttcaagctggtgagccagaagcccaagctcgggggttcaccaacttccctcgggacatggggaagttggataggccctgaccacgacaagttctctgctatgaagtacgaacaggggacaggatgttggcagggcccaaacaggtctacaaccgtccgcctgctttgtggcaaagagactatggtgacgagtactacagagccctcaagatgtgaatatttaatggagttaatgacgccagctgcttgcccagagcctccacccgaagcccctaccgaggacgatcatgatgaactctag

SEQ ID NO: 236713 - DNA, 1578 bp, synthetic construct
  misc_feature 1..1578: note = Description of Artificial Sequence: Synthetic coding sequence
  source 1..1578: mol_type = other DNA
atgttgcttcccctgctgctcctacttcctatgtgctgggccgttgaggtaaagagacctcggggagtttctctcactaatcatcatttttacgacgaatcaaaacccttcacgtgcctggacggctctgcaacgatcccctttgatcaggttaatgatgactactgcgactgcaaggacggctctgatgaacccggaacggccgcttgccccaacggctccttccactgtacaaatacagggtataaacccctgtacatcccctcaaaccgtgtcaatgacggagtgtgcgactgctgcgacggtaccgacgagtataatagcggcgtgatttgtgagaacacatgtaaggaaaagggcagaaaggaaagggagagcctgcagcagatggccgaggttacacgggaaggtttccggttaaaaaaaatcctcatcgaggactggaagaaagccagggaggagaagcagaaaaaattaatcgagctgcaggccggaaaaaaatcactggaagatcaagtcgagatgctgcgcacagtgaaggaagaggcggagaagccagagagagaagcaaaagagcaacaccagaaactttgggaggagcagctggccgctgctaaggcccagcaggaacaagagctagctgcagatgcatttaaggaactggacgacgacatggatggaacggtatcggtgacagaactgcagacacaccccgagctggataccgatggggacggtgctctgtcagaggcagaggcccaggcattgctcagcggagacactcaaactgacgcgacctcattctacgaccgggtgtgggcagcaatccgagacaaataccggagcgaagcactgcctacagaccttccagccccttctgccccagatctgacagagcccaaggaagagcagccgcctgtcccatccagccctacggaagaagaggaggaggaggaagaagaagaagaagaggaagctgaagaagaggaggaggaagaagattccgaggtgcagggcgagcaaccaaagcctgcaagccccgctgaggaggataagatgcccccttacgacgagcagacccaggcattcatcgatgcagcccaggaggcccgaaataaatttgaggaggccgagcggtccttgaaggacatggaggaatctattcgaaacctcgagcaggaaatatccttcgattttggcccaaacggagagttcgcctatttgtacagtcagtgctatgagcttaccacgaacgagtacgtgtaccgtttgtgccctttcaaactagtgagccagaagcctaagcttggcggtagtcccacctccctgggcacctggggttcatggataggaccagatcacgacaaattctcggccatgaagtatgaacaggggacagggtgctggcagggacccaatcgctcaacaaccgttcgattactgtgtggtaaggaaacaatggttacttctactaccgaaccatccaggtgtgagtaccttatggagctgatgacaccggctgcctgtcccgagccccctccagaggcacccactgaggacgatcacgatgagctgtag

SEQ ID NO: 236714 - DNA, 2031 bp, synthetic construct
  misc_feature 1..2031: note = Description of Artificial Sequence: Synthetic coding sequence
  source 1..2031: mol_type = other DNA
atggctccattcctcagaattgcttttaattcttacgagcttggttctttacaggcagaagatgaggcgaaccaaccattctgtgcggtgaaaatgaaggaagctctgtccacagaacgtggcaagacactcgtccaaaaaaaaccaacgatgtatcccgaatggaaatccacgttcgacgctcacatctacgaaggcagagtgatacaaatcgtgttaatgagagcagccgaggaaccggtcagcgaagtaaccgtgggggtctccgtcctagcagagagatgcaagaaaaataacggcaaggccgaattttggctagacctgcagccccaggctaaggtgctgatgtcagtacagtactttctcgaggacgtcgattgcaaacaatcgatgcgaagcgaggacgaagctaaattcccaaccatgaaccgcagaggggcaatcaaacaggccaagatccattacattaagaaccatgaatttatagcgaccttctttggccagccaacattctgctccgtgtgtaaagattttgtttggggactaaataaacaagggtataagtgccggcagtgcaatgcagctatacacaaaaagtgtattgacaagataattgggcgatgcaccgggacagcagccaactcccgcgacacgatttttcagaaagaaagattcaatattgatatgccccaccggtttaaagtgcacaactatatgtctcctactttttgcgaccattgtgggtccctgctgtggggcctcgtgaagcagggactcaagtgcgaggactgcggtatgaacgtacatcacaagtgccgcgagaaggttgccaatctgtgtggcatcaatcagaagctccttgcagaggctttgaaccaagtcacgcagagggcctcacggaggtccgattcggccagttctgaacccgtcggcatctatcaagggtttgagaagaagaccggggtcgcaggggaagacatgcaagacaactccggtacttatggtaagatctgggagggatccagtaagtgcaatattaacaacttcattttccataaggtcctgggcaaggggagttttggcaaggtgctgctcggcgagctaaagggcagaggggaatacttcgccataaaagctctgaagaaagacgtcgttttgatcgatgatgacgtcgaatgcactatggtagaaaaacgcgtcctgaccctggctgctgagaatccattcctaactcacttaatatgtaccttccagaccaaggaccacctctttttcgtgatggagtttttaaacggcggtgatctaatgtatcatatccaggataagggacgtttcgaattataccgggcaacattctacgccgctgaaataatgtgtggtctacaattcctgcactccaagggtataatctatcgggacctgaagctcgataatgttctcctggatcgcgatggccatattaagatcgcagatttcggcatgtgcaaggagaacattttcggcgaaagtcgggcatccacgttttgcggaacccctgactatatagccccagagattctgcagggtttaaaatacaccttttcggtggactggtggtcttttggagtcctgttgtatgagatgcttatcggacagagcccttttcacggggatgacgaggacgaattgttcgagtctatccgagttgataccccacactaccctaggtggatcacaaaggaatcaaaggacatcctggaaaagcttttcgagcgggagcctacgaagcgactcggggtcacaggcaacatcaagattcatccattttttaaaaccataaactggacactgctcgaaaaacgccgactggagcccccttttcgccctaaggtgaagagcccacgtgactacagcaactttgaccaagagtttctcaatgagaaggcacggctgtcttactcagacaagaatctgatagacagcatggaccaatccgcatttgcaggattcagtttcgtgaacccaaagtttgaacacttattagaggactag

SEQ ID NO: 236715 - DNA, 2031 bp, synthetic construct
  misc_feature 1..2031: note = Description of Artificial Sequence: Synthetic coding sequence
  source 1..2031: mol_type = other DNA
atggccccattcctgcggatagcattcaatagctacgagctcggctcgctgcaggcggaagacgaggccaaccaaccattctgtgcagtgaaaatgaaagaagcactgtctactgaacgcggtaagacattagtgcagaaaaagccgaccatgtacccagagtggaagtcaactttcgacgcccacatctacgaaggtagggtcattcagatagtcttaatgcgcgctgccgaggagcccgtttctgaggtaaccgtgggcgtgagcgtcctggctgagaggtgcaagaagaacaacgggaaagcagagttctggctggaccttcagccacaggccaaggtgctgatgagtgtccagtacttcctcgaggacgtcgattgcaaacagtccatgagatcagaagacgaggccaagttccctacaatgaacaggagaggagctatcaagcaggccaaaattcattacataaaaaatcatgagtttatcgccacgtttttcggtcagcctaccttctgcagcgtgtgcaaggacttcgtgtggggcctgaacaagcagggctacaagtgtcggcagtgtaacgccgctatccacaagaaatgtattgacaagattataggtaggtgcacaggtaccgctgcaaattctagggacacaattttccagaaggagcggtttaacatagacatgccccaccgatttaaagtgcacaactatatgtctccaaccttttgtgaccattgcggttctctgctatggggccttgtcaagcaaggcttgaagtgtgaggactgtggcatgaacgtgcaccataagtgcagggaaaaagtggccaatttatgcggcatcaaccagaagctgctcgccgaagccttgaatcaggtgacacaaagagcgagcagacgcagcgattctgcctcatctgagcctgtgggaatttatcagggattcgagaaaaagaccggcgtggctggcgaggacatgcaggataattcaggcacttatggcaaaatttgggagggcagcagcaagtgcaacatcaacaactttattttccacaaggtgctgggcaaaggaagctttggaaaggttctcttgggcgaactcaaagggaggggggaatatttcgcaattaaggccctgaaaaaagatgtcgtattaatcgatgacgatgtcgagtgtacgatggtggagaagcgtgtgcttacgctggcagccgagaacccctttttgacgcacctgatttgtaccttccagacaaaagaccatctgttctttgtaatggagtttctcaatggtggagacctaatgtatcacattcaggataaaggaagatttgagttatacagggccaccttttacgctgcggagatcatgtgtggattgcagtttttacactcaaaggggatcatataccgtgacctcaaactcgataacgtgcttcttgaccgagacggtcacatcaagattgctgattttgggatgtgtaaggaaaacatatttggagagtccagagcctccaccttttgcggtacccccgattatatcgccccagagatcttacagggactgaagtatacattcagtgtagattggtggagttttggtgtgctcctatacgagatgctcatcgggcagtctcccttccacggagatgatgaggacgagttgttcgaatctattagggtggacacccctcattacccgaggtggatcaccaaggaatccaaggacatactcgaaaagctattcgagagagagcccactaagcgtctcggagtgactgggaacattaaaatccatccattcttcaaaaccatcaactggaccctactggaaaagagaagactcgagcctcctttcagacccaaagtcaaaagccccagagattacagtaattttgaccaggaatttctgaatgagaaggctagattgtcttattccgataaaaatctaatcgacagcatggatcagtccgcattcgccggattttcatttgtcaatcctaagtttgaacacctgcttgaggactag

SEQ ID NO: 236716 - DNA, 234 bp, synthetic construct
  misc_feature 1..234: note = Description of Artificial Sequence: Synthetic coding sequence
  source 1..234: mol_type = other DNA
atggctccttttttgagaattgctttcaattcctacgagctcggcagccttcaagctgaagatgaggccaaccagcccttttgtgctgtgaagatgaaagaggccctcagtactgaaagagggaagacgttagtgcaaaagaagcccacaatgtacccagagtggaaatccacctttgacgcccacatctatgagggaagggtgatccagatagtcctgatgcgagccgcttag

SEQ ID NO: 236717 - DNA, 378 bp, synthetic construct
  misc_feature 1..378: note = Description of Artificial Sequence: Synthetic coding sequence
  source 1..378: mol_type = other DNA
atggcacccttcctgcgaatcgcatttaacagctatgaactcggatctctgcaagctgaggatgaggctaaccagccattttgcgcagtgaagatgaaggaagccctgtctaccgagaggggaaaaaccctcgtgcaaaagaagccaactatgtacccagaatggaaaagcaccttcgacgcccacatctacgaaggcagggtgatccagatcgtccttatgagagcggcagaggagccagtgagtgaagttaccgtgggagttagcgtgctcgcggagaggtgcaagaagaataatgggaaggccgaattttggctggatctgcagccccaggccaaggtattgatgagtgtccaatactttcttgaagacgtttag

SEQ ID NO: 236718 - DNA, 2052 bp, synthetic construct
  misc_feature 1..2052: note = Description of Artificial Sequence: Synthetic coding sequence
  source 1..2052: mol_type = other DNA
atgtctagcgggacaatgaagttcaacggatacttaagagtgagaattggagaggctgtgggactgcaacctaccagatggagcctcagacacagtctattcaagaagggccatcagctgctggatccgtacctcacggtgtcagtggatcaagtgcgcgtggggcagacatctacgaagcaaaagactaacaaacctacgtataatgaggaattttgcgctaatgtgacggatgggggacaccttgagctagccgtgttccacgagacccctctgggatatgaccattttgtggctaattgtacactccagtttcaggagctcttgaggaccacaggcgctagcgacacattcgaagggtgggtcgatctagagccggaaggcaaggtttttgttgtgataactctgactgggagcttcaccgaagccactctgcagagagatagaattttcaaacatttcacacggaagagacagagagccatgaggagacgcgtgcatcagatcaatgggcataaattcatggcgacatacctgagacagccaacatactgttcgcattgccgcgagttcatctggggcgtttttggcaaacagggctatcaatgccaggtgtgtacatgtgtggtacacaaaagatgccaccacttgatcgtgacagcatgtacatgccaaaacaacataaataaagtggactctaaaattgcagagcagaggttcggtatcaatatcccccataagttcagcatccataactataaagttcccactttctgcgaccactgcggcagccttttatggggaatcatgagacaggggctacagtgcaagatctgtaaaatgaacgtccacattaggtgccaagctaatgtggcacctaactgtggagtgaatgctgttgagctagccaaaaccttagccggaatgggcctgcagcccggaaatattagccctacctcgaagctggtcagtagatcaactttgcgccgacagggcaaggaatcctccaaagaaggcaacgggatcggtgtgaactcatccaaccggctgggaattgataacttcgaattcatccgggtgctgggtaaaggctccttcggtaaggttatgctggcccgagtgaaggagacgggcgatctgtatgccgttaaggtcctgaagaaggatgtgatactgcaggacgatgacgtagagtgtactatgactgagaagaggatcctgtcactggcaaggaatcatcctttcctcacccaactcttctgttgcttccagacacccgaccggctattctttgtgatggagtttgtgaatggtggggacttgatgtttcacattcagaagtctcggagatttgacgaagcccgagcacgtttttacgcagctgaaatcatcagcgcactaatgttcctgcacgacaagggcatcatctatcgcgatctaaaactggacaacgtgctgctagatcacgagggccattgtaagttagctgacttcggcatgtgtaaggagggtatttgtaatggtgtgacaactgctaccttttgtggcactccagactacatcgccccagagatcctgcaagagatgctgtatggccctgcagttgattggtgggccatgggcgtgctgttgtacgaaatgctttgtggccacgccccttttgaggccgagaacgaagatgacctttttgaagcaatcctcaatgatgaggtggtgtatccaacgtggctgcatgaggatgcaaccggtatcctgaaaagctttatgacaaagaatccaactatgaggcttgggtcactcactcaggggggagaacacgccattctgcggcatcccttttttaaggaaatcgattgggctcagttaaaccataggcagattgagcctccattcagacctaggatcaaaagccgcgaggatgtatcaaactttgaccctgactttataaaggaagagccagtgttgacaccaatagatgaaggccacctgccgatgatcaatcaggatgagtttaggaatttttcttacgtctcaccggaacttcagccatag

SEQ ID NO: 236719 - DNA, 357 bp, synthetic construct
  misc_feature 1..357: note = Description of Artificial Sequence: Synthetic coding sequence
  source 1..357: mol_type = other DNA
atgtcgagcggtaccatgaaattcaatggttaccttcgtgtacgcatcggtgaagccgtaggcctgcagcctaccaggtggtccctcagacattctttgttcaaaaaggggcatcagttgctggacccatacctgacagtttccgtggatcaggtacgcgttggccaaacctctaccaaacagaagactaataaaccaacctataacgaggaattttgtgctaatgtgacggatgggggtcatctcgagctggccgtttttcatgagacccccctcggttatgaccatttcgttgccaactgcacgcttcagttccaggaactgctgcggaccaccggggcttccgacaccttttag

SEQ ID NO: 236720 - DNA, 1791 bp, synthetic construct
  misc_feature 1..1791: note = Description of Artificial Sequence: Synthetic coding sequence
  source 1..1791: mol_type = other DNA
atgcccacacagagagatagctcaacaatgtcccacacagtggctggtgggggttcaggcgaccactcccaccaggttcgagtgaaggcatactataggggagacattatgatcacccactttgagccctcaatcagttttgaagggctgtgtaacgaggtgcgggacatgtgctccttcgacaacgagcagctctttaccatgaaatggatcgacgaggagggcgacccatgtactgtttcctctcagctggagctcgaggaggccttccggctctatgaactgaacaaagacagcgaattgttgatacacgtgttcccctgtgtgcctgagagacctggcatgccatgcccaggcgaggataagtcaatctaccggcgtggcgctagacgatggcggaaattgtattgtgctaatggccacacctttcaggccaaacgctttaaccggcgtgcccactgcgccatttgcacagatagaatctgggggttggggagacaaggctacaagtgcatcaactgcaagttactggttcacaagaaatgtcataagctcgtgaccatcgaatgtggaagacattccctacctcaggaacctgttatgccaatggatcagtcttcaatgcatagcgatcacgcacagaccgtgataccctataatccttcatcacacgaatcccttgatcaggtgggcgaggagaaggaggctatgaatacaagagagagtgggaaggcaagcagttcattggggttgcaggatttcgacttactccgcgtcattggcagaggatcgtatgcgaaggttctactcgtccgtctgaaaaagactgatcggatctacgcaatgaaagtggttaagaaggagctagtgaatgatgacgaagatattgactgggtgcagactgaaaagcatgtgttcgagcaggctagcaatcatcctttcctagtggggctacattcatgtttccaaacagaatcaaggcttttctttgtgatcgagtatgtgaatgggggtgacctcatgtttcatatgcagcgacagaggaagcttccggaggaacacgctcgtttctactcagccgaaattagcctagccctaaactatttacatgaaaggggaatcatatatcgggaccttaagcttgataatgtcctgctggactcagaaggccatatcaagctgacggactacggaatgtgcaaagaagggttgcgtcccggagacacgactagtactttctgtgggacgccaaattacatcgctcccgagatattgcgtggggaagactatggcttttcggtggattggtgggcacttggagtcctcatgttcgaaatgatggctggcaggtccccatttgatatagtagggtctagtgacaaccccgatcagaataccgaagattacttatttcaggttatcttagaaaaacagataagaatccctcggtctctttccgtgaaggccgcatcagtcttgaagtctttccttaataaggacccaaaggagcggctcggatgtcatcctcaaaccggtttcgcagatatacagggtcatccatttttcaggaatgttgattgggacatgatggagcagaagcaggtcgttccaccgttcaagccaaatatctctggtgagtttgggctagataattttgattcccagttcactaacgaacccgtccaactcacacccgacgacgatgacatcgtgcggaaaatagaccagtccgagtttgaggggttcgaatacattaacccactattaatgtcagccgaggaatgcgtgtag

SEQ ID NO: 236721 - DNA, 2121 bp, synthetic construct
  misc_feature 1..2121: note = Description of Artificial Sequence: Synthetic coding sequence
  source 1..2121: mol_type = other DNA
atgtccccatttttgagaattggcctaagcaatttcgattgtggcagttgccagtcttgtcagggcgaagccgtgaatccttactgcgccgttctggttaaggagtacgtagagtccgagaatgggcaaatgtacatccagaagaaacccacaatgtatccgccatgggacagtacttttgatgcccatattaacaagggcagggtgatgcaaattatcgtcaaaggaaagaacgtcgatctgatttctgagactaccgtggagctctattcacttgctgagcgctgtcgcaaaaacaacggcaagacagagatttggctggagcttaagccacagggaagaatgttgatgaacgctcggtatttccttgaaatgagcgacactaaggacatgaacgagtttgagacagaagggttttttgccctgcaccaacgaaggggcgcaattaagcaggctaaggtccatcatgtgaaatgccacgagtttactgctacgttctttccacagcccacattctgttccgtctgtcacgagtttgtgtggggcctgaacaaacagggttatcagtgcaggcagtgtaacgccgctatccataagaagtgcattgacaaggtaatcgccaagtgtaccggaagcgcgatcaacagcagagagaccatgttccataaggagagatttaaaatcgacatgcctcatcgctttaaagtatataactataagagccccaccttttgtgaacattgtggcacattgctgtgggggcttgcccgtcagggcctgaagtgcgatgcctgcggcatgaacgttcaccacaggtgtcagactaaagttgctaacctgtgcgggatcaatcagaagctgatggccgaagcgctggccatgatagagtcaacacagcaagcgagatgtctgcgagatacggagcagatttttcgggaaggcccagttgagattggcttgccctgttcaattaaaaatgaggcacgaccaccttgcctccccacccccggtaagcgagagccccagggcattagctgggagtctcctctggacgaggtcgataaaatgtgccatcttccggaacccgaactcaataaggagcgaccaagcctgcaaatcaaactgaaaatcgaggattttatcctgcataaaatgctgggtaaaggcagcttcggcaaggtatttctggcggagttcaaaaaaacaaaccagttcttcgccataaaggctcttaagaaggatgtggtgctgatggatgacgatgttgagtgtaccatggtcgagaaaagagttctaagtctggcttgggaacacccgttcttgactcatatgttctgcacctttcagaccaaggagaatctgtttttcgtgatggaatatttgaacggtggcgacttaatgtaccacattcagagctgccacaaattcgacctcagcagagcaacattctatgctgcagagatcatcctgggacttcagtttctacactccaagggcattgtttaccgggatctgaaactggataacatcttactcgataaggacggccacattaagatagccgactttggcatgtgcaaggagaacatgttgggagatgccaagaccaatacattttgcggaactcccgattatatcgccccagagatcctgctaggccaaaaatacaaccatagcgtcgattggtggagcttcggcgtgctgctgtacgagatgctgatcgggcagtctcccttccatggccaggacgaggaggagctgtttcacagtatcaggatggataatcccttttatcctaggtggctagagaaagaggcaaaagacctgctggtgaagttattcgtcagagaacctgaaaagagattaggcgttcggggagatatcaggcagcaccccctgtttagggagatcaattgggaggaacttgagagaaaggaaattgaccctcctttcaggccaaaagttaaaagccctttcgattgtagcaactttgataaggagtttttaaatgaaaaaccccgtctgtcttttgcagaccgagcgctcataaactctatggaccagaacatgttccggaattttagctttatgaacccaggcatggagcggctgatctcttag

SEQ ID NO: 236722 - DNA, 1932 bp, synthetic construct
  misc_feature 1..1932: note = Description of Artificial Sequence: Synthetic coding sequence
  source 1..1932: mol_type = other DNA
atgtctccattcttgcgcattggtctttcgaattttgactgcggctcctgtcagtcttgtcagggcgaggcagttaatccatattgcgccgtccttgtcaaggagtatgtggagagcgaaaatgggcaaatgtatatccaaaagaagcccacaatgtatccaccttgggacagcacttttgatgcgcacatcaacaaaggcagagtgatgcaaataatcgtgaaaggaaagaacgtggacctgatctctgagaccacggtagagctgtattccctggctgagcggtgcaggaagaacaatggcaaaaccgaaatttggctggaactgaaaccacaggggaggatgctgatgaatgcaagatatttcctcgagatgtctgacactaaagacatgaatgagtttgaaaccgaaggattttttgccctccaccaaagacgtggcgctatcaaacaagctaaggtgcaccacgtgaaatgccatgagtttaccgccacgtttttccctcagccaacgttctgttccgtatgccacgaattcgtatggggtttgaacaagcaagggtatcagtgtaggcagtgcaacgccgcaatccataaaaaatgcatcgacaaggtgattgctaaatgtacaggttcagctatcaactctcgcgagaccatgttccacaaggagaggtttaaaatcgacatgccacatcgattcaaagtgtacaattacaagtcgcccacgttttgtgagcattgtgggacgctcctttgggggcttgcgagacaaggactaaaatgtgatgcatgcggcatgaacgttcaccaccgttgtcaaaccaaagtggcaaacctctgtggcattaatcagaaacttatggcagaagctcttgctatgattgaaagtacccagcaagccaggtgcctccgtgacacagaacagatatttcgcgagggtccagttgagataggcttaccctgtagtatcaaaaacgaggctcggcctccatgcctcccaacacccggtaaacgcgaaccgcagggcattagttgggagtcccccttggacgaagttgacaagatgtgccacctgcccgaacctgagctgaataaggaacgaccgagtctgcaaattaagctgaagatagaagatttcatcctgcataaaatgttaggaaaaggttctttcgggaaggtgttcttagccgaattcaagaagacaaaccagttcttcgcaattaaagcattaaaaaaggacgtggtcctgatggacgatgacgttgagtgcactatggtggagaaaagagtcctgagtctggcctgggagcacccctttctaacccatatgttttgcaccttccagacaaaggaaaatctgttctttgtcatggagtatttgaacggtggtgatttaatgtaccatatccagagctgccataagtttgatctttcacgggctaccttctacgccgcagaaattattctgggcctgcaattcctgcactctaaagggatagtctatcgggatctgaagctggacaacatcctgttagataaggacggtcatattaaaattgcggacttcggaatgtgcaaggagaacatgctcggagacgcgaagactaataccttttgtggtaccccagactatattgccccagaactgttcgttagagagccggagaagaggttgggcgtgcgcggagacattaggcaacatcctctttttcgagagatcaactgggaggagttagagaggaaggaaatcgaccctccctttcgcccaaaagttaagagccccttcgattgcagtaactttgacaaggaatttctcaacgaaaagccacggttgtcgttcgccgatcgggctcttataaacagcatggaccaaaacatgttcaggaacttctcctttatgaatcccggaatggagagactgatctcatag

SEQ ID NO: 236723 - DNA, 1440 bp, synthetic construct
  misc_feature 1..1440: note = Description of Artificial Sequence: Synthetic coding sequence
  source 1..1440: mol_type = other DNA
taactctcgctccttccctgtttgttatttctgcccacaatcatcccaaagaagatcgtcatccaacgagatagtcttccttctaagaagctgagctacggcttgattgcatgcgggatgaatgtccatcaccggtgccaaacgaaagtggcgaatctctgcggcataaaccaaaagctcatggctgaagccctggccatgatcgagagcacccagcaggctaggtgcctccgtgatacagagcaaatcttccgcgaagggcctgtggaaattggcctcccatgctctataaagaatgaggccaggcctccgtgtctgccaacaccaggaaaacgtgaaccgcaaggaatctcttgggaatcccctctggacgaggttgacaagatgtgtcacctccccgaacccgagctgaacaaggagcggccatcacttcaaatcaaactcaaaatcgaggattttatactccacaaaatgttaggcaaaggaagctttggcaaggtattcctagcggagttcaagaagacaaaccaattcttcgccattaaggcccttaaaaaagacgtggtactgatggacgacgacgttgagtgcacgatggtcgagaaaagggtgctcagtctcgcctgggagcatccttttctcacgcacatgttctgtactttccagactaaagaaaatttattcttcgtaatggagtatctgaacggcggagatctaatgtatcacattcaatcttgccataaattcgatctgagtcgagctaccttctacgcggctgaaatcatcctaggtttgcagttcctccactcaaagggaatcgtctaccgggacctgaaactggacaatatcctgcttgataaggatggacatattaaaatcgcagattttggtatgtgtaaagaaaatatgctgggcgatgctaaaaccaataccttttgcgggacccctgattatatcgcccctgagatccttctggggcaaaaatacaaccactcagttgactggtggtcttttggggtcctcctgtacgaaatgctaattggccagagccctttccacggacaggacgaagaagagctattccattctatacggatggacaacccgttctatcctcggtggctggaaaaagaggcaaaagatcttctggttaaattgtttgtccgcgagcctgagaaaagactgggagtacggggtgatataagacagcatccactgtttcgtgagattaattgggaagaacttgagaggaaagagatagaccctccgttcaggccgaaggtaaagtcgcctttcgattgcagcaactttgataaggaatttcttaatgagaaacctagacttagttttgccgatcgggcattaatcaactccatggaccagaacatgttcaggaatttctcgttcatgaacccaggtatggaaagactgatctcctag

SEQ ID NO: 236724 - DNA, 1746 bp, synthetic construct
  misc_feature 1..1746: note = Description of Artificial Sequence: Synthetic coding sequence
  source 1..1746: mol_type = other DNA
atggataccaaggatatgaacgaattcgagactgagggcttttttgcactccaccagaggagaggtgcaattaagcaggcaaaagttcatcacgtgaagtgccacgaattcaccgcaaccttcttccctcagccaaccttctgtagtgtttgccatgaattcgtgtggggcctcaataaacagggataccagtgtcggcagtgtaacgcggctattcacaagaaatgtattgacaaagtgatagcaaaatgtaccggctccgccattaactcgagagagacaatgttccataaagaacggttcaaaatcgacatgcctcatcgcttcaaggtctacaactacaagagccctacattctgtgagcattgtggtacactcctttgggggctggcacgtcaaggactgaaatgcgatgcgtgcggcatgaacgtgcaccatagatgtcagactaaagtggctaacttgtgcgggatcaaccagaaactgatggccgaagccctcgccatgatcgagagcactcagcaagccaggtgtctccgggacacagagcagatctttcgggagggcccagtggagatcggcctcccatgctccattaagaacgaggcgagaccgccttgtctgcctacccccggtaaacgagaacctcagggaatcagctgggaatcaccactggacgaggtggataaaatgtgccaccttcccgaacccgagctaaacaaagagcgcccttctctacaaattaaactgaagatcgaagatttcatactgcacaagatgcttggcaagggatcttttggaaaggtattcctggccgagttcaagaagaccaatcagttttttgccatcaaagcactgaagaaagatgttgtgctgatggatgatgatgtggaatgtacaatggtggaaaaacgggtcctgagcttggcctgggagcacccctttttaacacacatgttctgtaccttccagactaaggagaacctcttcttcgtgatggaatatctgaacggaggggacctcatgtatcatatccagagctgtcacaagtttgatctctctagagccactttttacgccgctgagataattctagggctccagtttctacacagtaaaggtatcgtatacagagatttgaagttggataacattctgctggataaggatgggcacatcaagatcgcggactttggtatgtgtaaggagaacatgcttggtgacgctaaaacaaacacattctgcggcacccctgactacatcgcgccagagatcttgctgggccagaagtacaatcacagcgtagactggtggagctttggggtgctcctctacgagatgcttatagggcagagccccttccatggccaggatgaggaggagctatttcatagtattcgaatggacaaccctttctacccccgatggctggagaaagaggccaaggacctcctcgtgaagctgtttgttagggagcccgaaaaacggctgggcgtgaggggtgacatccgacagcatcctttattcagggaaatcaactgggaagaactagagcggaaagagattgaccccccttttcggcctaaggtgaagagccctttcgattgtagcaatttcgacaaggagtttctgaacgagaagcccaggctctcattcgctgaccgcgcactcatcaattccatggaccagaacatgttccgcaatttctctttcatgaatcctggaatggaaagactaattagctag

SEQ ID NO: 236725 - DNA, 1032 bp, synthetic construct
  misc_feature 1..1032: note = Description of Artificial Sequence: Synthetic coding sequence
  source 1..1032: mol_type = other DNA
atggcttctaactcgtccgatgttaaagaattccttgcgaaagccaaggaagatttcttgaaaaagtgggagtccccggcacaaaacacagcccacctcgatcagttcgagagaatcaagactctcggcacgggcagttttggacgggtgatgctggtcaaacataaggaaactggtaaccactacgcgatgaagattctggacaagcagaaggtagttaagctgaagcagattgaacatacattgaacgaaaaacgtatcctgcaggcggttaatttccctttcctggtgaagttggagttctctttcaaggataatagtaacctgtacatggtgatggagtacgtgcccggtggtgagatgttctcacacctcaggcgtatcggacgtttttctgaaccccacgcaaggttctacgcagcccagattgttctgacatttgaatacctacactccttagatctcatataccgcgatctaaagcccgagaatctgctcatcgaccaacagggatatatacaagtgaccgattttgggttcgcgaagagagttaaaggcagaacctggaccctttgtgggacaccagaatatctcgcccctgagataatcttatcaaaggggtacaataaggctgtggactggtgggctctgggggtcctgatctatgagatggcagcgggttatcctcccttcttcgccgatcagcctatacagatttatgaaaaaatcgtgtcgggtaaggtcagatttcctagccatttctctagcgatttgaaggacctcctcagaaatctgttacaagtggacttaacaaagcggtttgggaacttgaagaatggcgttaacgatattaaaaaccacaagtggttcgctactacagattggatcgccatttaccagcgcaaggtggaggctcctttcatacctaaatttaagggcccaggcgatacatctaattttgacgactacgaggaggaagagatacgcgtatcgatcaatgagaaatgcggaaaggaattctctgagttctag

SEQ ID NO: 236726 - DNA, 1146 bp, synthetic construct
  misc_feature 1..1146: note = Description of Artificial Sequence: Synthetic coding sequence
  source 1..1146: mol_type = other DNA
atggaatccggctctacagcggcttctgaagaagcacgctcgttaagggagtgcgagctttacgtacagaagcacaacattcaggccttactaaaagacagcatagttcagctttgcacggcacgtccggagcgaccaatggctttcttaagagagtatttcgaacgtctcgagaaggaagaagccaaacagattcagaatctgcagaaggctgggacacgcaccgactcacgtgaggatgaaatcagtcctccaccacctaatcctgttgtcaaggggagaaggcggcgaggtgctattagtgctgaagtttatacggaggaagatgccgcttcctatgtccgtaaagttatcccgaaggactacaaaacaatggcagctcttgctaaggcaatagagaagaacgttctcttctctcacctggacgataatgagagatcagacatcttcgacgccatgttctctgtgtctttcatagcgggtgagactgtcatccagcagggggacgagggcgataatttttacgtgatagaccagggggagaccgacgtttacgtcaataatgagtgggccacctccgtaggagaaggcggtagcttcggggaattggctctcatatacggcacgccgagagccgctacagtaaaagcaaaaacaaacgttaaactctgggggattgatagggattcctacaggcgcattttgatgggatccaccctgaggaagcgcaaaatgtacgaggaatttctcagcaaggtgagcatccttgagagtctcgataaatgggaaaggctgactgtcgccgacgctctggagcccgttcaattcgaggacggacagaaaattgttgtgcagggggaacctggtgacgaattcttcatcatcctggagggcagtgccgcagtcctgcagcgcagatccgagaacgaagaatttgtagaggttggcagactgggtcctagtgactatttcggcgaaatcgccttgctaatgaatcgaccccgtgctgccaccgttgttgctagggggcctttaaagtgcgtgaagcttgacaggcctcgcttcgagagagtcctaggcccttgttccgacatcctcaagaggaacatccagcagtacaatagctttgtgagtctcagcgtatag

SEQ ID NO: 236727 - DNA, 2739 bp, synthetic construct
  misc_feature 1..2739: note = Description of Artificial Sequence: Synthetic coding sequence
  source 1..2739: mol_type = other DNA
atgagcgcaccaccagtgttacgccctccaagccctcttcttcctgtcgctgccgcagcagccgctgccgcagctgctctagtgcctggaagcgggccagggccagcgccatttcttgcccctgttgccgcaccagtgggaggtattagtttccacctgcaaattggcctgagccgtgagcccgtgctcctgctgcaggactccagtggggactattcccttgcccacgtgagagaaatggcatgctccattgtagaccagaaattccctgaatgcggattctacggtatgtacgataagatcctactctttcgacacgacccaacttcggaaaacatccttcaactggttaaggccgcatctgatattcaggagggcgatcttatcgaggtagtgctctcggcttctgcgaccttcgaggacttccaaatccgccctcacgcactattcgttcattcttaccgagccccagccttttgtgaccattgtggcgagatgctttgggggcttgtgcgccaggggctgaaatgtgaaggatgcggcctaaactaccacaagaggtgcgcatttaaaatacctaacaactgctccggtgtgaggagacgacgactgtctaatgtgtccctgacaggtgtgtctacaattcggacatctagtgccgagctgagcacttccgcgcctgacgagccactgctgcagaagagcccgagcgaatcattcatcgggagggaaaagcgctctaattctcagagttacatcggcagaccgatccacctcgataaaatcctgatgtctaaagtcaaggttccccatacgtttgtgatccactcctacacaaggcccactgtgtgccagtactgtaagaaattgctcaaaggactcttcagacaagggctgcaatgtaaagattgccgctttaattgccacaagcgctgtgcccctaaggtccctaataattgcctgggcgaagtcacaataaatggcgatttattgagccctggcgcagagtctgatgtggtcatggaagagggaagcgatgacaacgacagtgaaaggaatagcggcttgatggatgatatggaagaagcaatggtccaggacgcggagatggccatggccgagtgccagaatgacagcggcgagatgcaggatcccgaccctgatcatgaagacgcaaaccgcaccatcagcccgagtaccagtaacaacatacccttgatgcgtgtagtgcaatcggttaagcacaccaaaagaaagagttctacagtgatgaaggagggctggatggtgcactacacctctaaggatacactgaggaaacgtcattactggaggctcgattctaagtgcattaccttatttcagaacgatactgggtcccgctattataaggaaataccactgagtgaaatcctcagccttgagccagtgaaaacatccgcacttattcccaacggcgcaaatccgcattgttttgagatcaccacagcaaatgtcgtgtattatgtcggtgagaatgtagtgaatccctcatccccatcgccgaacaacagtgtgcttacttccggcgtaggcgcagacgtggcgaggatgtgggaaattgccattcaacacgctctaatgcctgtgatcccgaaagggagctctgtgggaaccgggactaatcttcaccgggacatatcagtaagcatatcagtctcgaattgccaaatccaggaaaacgtcgacatttctactgtgtatcagatttttccagacgaagtcctcggctcaggtcagtttggaattgtgtatggcggaaaacaccggaagacaggcagggatgtggctatcaagatcatagacaaattgcggtttccaaccaagcaggagtcacagcttagaaacgaagtggctatcttacagaacctgcatcatcctggagtggtgaacctggagtgcatgtttgagaccccagaacgcgtttttgtggtgatggagaagttacatggagatatgcttgagatgatactttccagtgagaaaggtaggttgcctgagcacatcaccaagtttctaatcactcagatcctcgtggctctccggcacctgcactttaaaaatatagtgcactgtgatctgaagccagaaaatgtcctgctcgccagcgcagacccgttccctcaggtcaagctctgtgatttcggcttcgcacgaataataggcgaaaagtctttcagacgttctgtggtgggaacccctgcatatctggctcctgaggtgttgcgaaataaaggttataaccgaagtctcgacatgtggagtgtgggagtcataatatatgtgtccctcagtgggaccttcccttttaatgaggacgaggatatccacgaccagattcagaacgcggcatttatgtaccccccaaacccatggaaagaaatttcccatgaggcaatagacctgatcaacaaccttctgcaagtgaagatgagaaagaggtactccgtcgataagactctttctcacccatggctgcaggactatcagacttggctggacctgagagaactggaatgcaaaattggcgaaaggtacattacccacgagtccgacgacctgcgctgggagaagtatgcgggagaacaaggtctgcagtacccaacccacttaatcaacccaagtgcatctcatagtgacactcctgaaacagaggaaactgagatgaaggcattaggggaaagggtatccatcttgtag

SEQ ID NO: 236728 - DNA, 2637 bp, synthetic construct
  misc_feature 1..2637: note = Description of Artificial Sequence: Synthetic coding sequence
  source 1..2637: mol_type = other DNA
atggctaccgccccatcttaccccgctggactccctggtagcccaggacccggaagtccacctcctcctgggggactggagctccagtcccctcctccgctactcccccagatacccgctcctggctctggcgtgagctttcacatccagattggtctgactagagaatttgtcctcctacccgcagcatctgagttggcccatgtgaaacagctggcatgttcgattgtcgatcagaagtttcccgagtgtggtttttatgggctgtacgacaaaatactcttgtttaaacacgacccgacatctgccaacttattgcagcttgtccgttcatcgggagatatccaggaaggcgatttagtggaggtggtgctctctgcgtccgcgacctttgaagattttcaaatccggcctcacgccctcactgtccatagctaccgtgccccagctttttgtgaccactgtggagagatgctttttgggttggtgagacaagggttgaagtgcgacgggtgcggactgaactaccataaaaggtgcgccttcagtatccccaacaactgttccggagcaagaaaacggcgactgtcaagcacgtcactcgctagcgggcacagtgtgagactaggtacatccgagagcctgccatgtacagccgaggagctgagtcggagtactactgagctgctccccagaaggccaccatcctcttcctcctccagttcagcatcttcatacactggacggccaattgaactggacaagatgctgctgtctaaagttaaagtgccccacacgtttctcatccatagttacactcgccctactgtctgccaggcatgcaaaaaactcctgaaaggactctttagacagggcttgcagtgcaaggactgtaagttcaactgtcacaagagatgcgctacacgtgttccaaacgattgcctgggcgaagctctgatcaatggcgatgtgcccatggaggaagccacggattttagcgaagccgacaagtccgctctgatggatgagagcgaagatagtggcgtaattcctggcagccattcggaaaatgcgctacacgccagcgaggaggaggagggagaaggaggaaaagcgcagtccagcctcgggtacatccctctcatgcgagtggtccaatcagttaggcacaccacgcggaaatcctccaccacattgagagaggggtgggtggtccattatagcaacaaggatactcttcgtaaacgtcattactggagactagactgtaaatgtatcacactgtttcagaataacactaccaacaggtattacaaggaaatccctctgagcgagattcttaccgtcgagagtgctcaaaacttcagcctggtccctcccggaactaatcctcactgcttcgaaattgtgacagccaacgccacgtatttcgtgggcgaaatgcccggagggaccccgggaggaccatcaggacagggagcagaagctgccagaggctgggaaacagctatccgccaggctctgatgcccgtgatacttcaggacgctccctcagctccaggacacgctcctcataggcaagcctcactgtcaatctcagtctcaaactcacagattcaggagaacgttgatattgctacggtgtatcagattttccctgatgaagttttgggctccggccagttcggtgtggtttacgggggaaagcaccgcaagacaggaagggatgttgcggtcaaagtgatcgacaagttgcgcttccccacaaagcaggagtcccagttacgtaacgaggtagctatcctgcagtcgttaaggcatcccggtattgttaatctggaatgtatgttcgagacacccgagaaggtttttgtcgtcatggaaaagctgcacggcgacatgctcgaaatgatactctcctctgaaaaggggcgtctgcccgaacgtctgacaaaatttctcattacccagattcttgtcgctctgaggcatctgcatttcaagaacattgtgcactgcgatctgaaaccagaaaatgttctgctggcatccgctgacccctttccacaggtcaaactttgcgatttcggattcgcccgaatcataggggagaagtcatttcgccgatctgtcgttggaacacccgcatacctcgctccagaggtgttgctgaatcaaggctataatagatccctggatatgtggtctgtgggtgtcataatgtacgtcagcctgagcgggacatttccctttaacgaggatgaggacatcaacgaccagatccagaatgcagcctttatgtatcctgccagcccctggtcccacattagcgcaggagcaattgacctcataaacaacctactgcaagtgaaaatgcgaaagaggtactccgtggataaatccctgagtcacccgtggctgcaagagtatcaaacgtggttagacttgcgggaactcgaggggaaaatgggcgaaaggtacattacacacgaaagcgacgatgtgaggtgggagcagttcgcagccgaacatccactaccaggaagtgggctccccaccgacagagacctgggcggagcctgcccaccacaggaccacgacatgcaaggcctcgccgagcgaattagtgtgctatag

SEQ ID NO: 236729 - DNA, 2637 bp, synthetic construct
  misc_feature 1..2637: note = Description of Artificial Sequence: Synthetic coding sequence
  source 1..2637: mol_type = other DNA
atggctactgcaccatcatatccggcaggactgcctgggagccccggacccggtagcccgccacctcccggtggtctggaactgcagtccccaccacctctactgcctcagatccccgctccagggtctggagtctccttccacattcaaattggccttacacgcgagttcgtactcttgcccgctgcttctgagcttgcgcatgtgaagcagcttgcatgctcgatcgtcgaccaaaaatttcccgaatgcggcttctacggcctgtatgacaaaattcttttgttcaaacacgaccccacttccgccaatctgctgcaactggtaaggtcgtcaggtgatatccaagagggggatttagtggaagtggtgctgtccgccagcgccacgtttgaagacttccagatccggccacatgctctgactgtgcattcttaccgagctccagcgttctgtgaccactgcggagaaatgctatttgggctggtgcgccagggcctaaagtgcgacggctgtgggcttaattatcataagagatgcgcttttagcatccctaataactgcagtggggctaggaagcgcaggctcagcagcacctccttagcatcaggacattctgtaagattaggcacgtccgaatctctcccctgcaccgctgaggagctatcccgctccactaccgagttgctgccaaggagacctccttcatcgtcatcaagcagtagcgcttcaagctacacaggcagacccatcgagctcgacaaaatgctcctcagcaaagtgaaagtacctcacactttcttgatccattcttatacccgtccaaccgtctgccaagcttgtaagaaactacttaaaggtttgtttcgtcagggcctccagtgtaaggactgcaagtttaactgccataagcgttgtgccacaagggtcccaaatgactgtctgggagaggcactcatcaatggcgacgtgcctatggaagaagcaacagatttttctgaagccgacaaatccgcactaatggatgagagcgaagattccggggtcatccctggatcacactctgagaacgccctacacgcctctgaagaggaggagggcgaggggggaaaagcacagagtagtctgggttatatacccctcatgcgcgtagtgcagtcggtccgacacactacgcgcaagtccagtaccactctcagagaggggtgggtggtgcactactctaacaaagatacgcttcgaaaaaggcattattggcgactggactgcaagtgcataaccctgtttcagaacaataccacaaacagatattataaggaaattccattgtccgaaatacttaccgtggaatcagcgcagaattttagtctggtgccaccgggaaccaaccctcattgttttgaaatcgtaaccgccaatgctacctacttcgtgggtgagatgcctggtggaaccccagggggtcctagtggacagggcgcagaagctgctcgaggttgggaaactgctatcagacaggcactgatgcccgtcatcctacaggatgccccaagcgcgccaggacatgcccctcacaggcaggccagcttgtcgatttccgtatctaactcccagattcaagagaatgttgacattgccactgtttatcagatattcccagatgaagtgctggggtctgggcagtttggagtcgtttacgggggaaaacatagaaagacaggtagggacgtagctgtgaaggtgatagacaaactgcggtttcctaccaagcaggaatcccagttgcgaaatgaggtcgccattctgcagtccttgcgacaccctgggatagtgaacttagaatgtatgtttgaaacacccgagaaggtgttcgtagtgatggaaaaactgcacggagacatgcttgagatgatcctgagcagtgagaaaggccgtctgcccgagcgcctcaccaagttccttatcactcagatattagttgcactgaggcatctacatttcaagaatattgtccactgcgacttaaaacccgagaatgtgttgttggcatccgccgaccctttccctcaagtcaagctgtgcgatttcggattcgctaggatcatcggtgagaaatcatttcgacggtctgtcgttggtacacctgcgtacctggcgcctgaagttctattgaaccagggatacaatcgctcactggatatgtggtcagtaggggttatcatgtatgtgtccctgtccggtacattcccttttaatgaggacgaggacatcaacgaccagattcagaatgctgctttcatgtaccctgcgagtccctggtcccatatctctgccggtgctattgacctcattaataatctactgcaggtgaaaatgaggaagcgatactccgtagacaagtctctgagtcacccttggctgcaagagtaccagacgtggctggacctccgcgaactggagggcaagatgggcgaaaggtacatcacacacgagtctgatgacgtccggtgggaacagtttgccgcagaacaccctctgcctgggagcggactgcccaccgaccgggatttagggggtgcttgccctccccaggatcacgatatgcagggacttgccgaacggattagcgtcctctag

SEQ ID NO: 236730 - DNA, 2166 bp, synthetic construct
  misc_feature 1..2166: note = Description of Artificial Sequence: Synthetic coding sequence
  source 1..2166: mol_type = other DNA
atgctctttgggctggtgaggcagggtttaaaatgtgatggctgcggcttgaactaccacaagcgctgcgctttttctatacctaacaattgtagtggggctagaaagcggagactgagttctacctccttagcgtcaggccattctgtccggttgggcactagtgagtccctaccatgcacggccgaagagctctcccggtcgaccacggagctcttgccgagaaggcctccaagcagctcaagctcctcatctgcgtcaagttataccggcagaccaatcgaattagacaagatgctgctttctaaggtaaaggtgccgcatacgtttctgattcattcctacactcgccctaccgtatgccaggcctgtaagaagctgctgaaaggcttatttcggcagggcctgcagtgtaaggattgcaaattcaattgccacaagaggtgcgcaacccgcgtgcctaatgattgtctcggcgaggctctcatcaatggcgacgtccctatggaggaagccaccgacttcagcgaagctgataagtcagcgttgatggacgagtcagaggactccggcgtcataccaggaagccactctgagaatgccctgcacgcgtccgaggaagaagaaggtgaagggggtaaggcccagtcttcccttgggtacatcccgctaatgagggtggtgcaaagcgtgcggcataccacccgcaagtcttcgactaccttgcgggagggatgggtagttcactatagcaacaaagacacgctgagaaaacgtcattattggagactggattgtaagtgtattaccttgtttcaaaataatactaccaaccggtactacaaggaaattcccctgtcagagatcctgaccgtagagagcgctcaaaacttctccttggtgccaccgggaaccaatccccattgttttgagatcgtgacagctaatgccacctactttgtcggcgaaatgccagggggtacacctggcggtccttccggccaaggggcagaggcagctcgcggttgggagaccgctatcagacaggccctcatgcctgtgatactgcaggacgctcctagtgctccaggacacgccccacaccgccaggcctccctgtccattagtgtctctaatagccagatacaggagaacgtcgatattgccacagtctaccagattttccccgatgaagtgctcggaagcggccaattcggggtggtgtacggaggtaagcacagaaagactggaagggatgtcgcagtcaaggtgatagataagctgcgttttcctacaaagcaggagtctcagttgcggaatgaggtggcaatacttcagtcgctgcgccacccaggaattgtgaacctggagtgtatgttcgaaaccccggaaaaggtgttcgtcgtgatggagaagctccatggggacatgctggagatgatactgagctcagaaaaaggtaggttaccagaaaggttgaccaaattcctgattacgcagattctggtggccctgcgacatctgcacttcaagaacatcgttcattgcgacctgaaaccagagaacgtgctgctagccagtgccgaccccttcccgcaggtgaagctttgtgatttcggctttgccaggatcattggcgaaaaatcattcaggcgctccgtcgtgggcacacctgcctatctggctcccgaagtgctcctgaatcaaggctacaaccgatcgctggacatgtggagcgtgggagtgatcatgtatgtttctctgagcggaaccttcccttttaatgaggacgaggacatcaacgaccagattcagaacgcagcattcatgtaccctgcttccccctggtcccatatttcagcaggcgcaatcgatttaatcaataacctcctgcaagttaagatgcggaagcggtacagtgttgacaaatcactgagccatccctggctccaggagtaccagacatggttagacctgagggagctcgagggaaaaatgggcgagagatatattactcacgagtctgacgatgtaaggtgggaacagtttgcagctgaacaccctctgccaggttcaggcctgcccactgatcgggatcttggcggagcctgcccccctcaggaccacgacatgcaaggcttggcagaacgaatatcagttctctag

SEQ ID NO: 236731 - DNA, 1482 bp, synthetic construct
  misc_feature 1..1482: note = Description of Artificial Sequence: Synthetic coding sequence
  source 1..1482: mol_type = other DNA
atgaggagaagacgcgcagctgtagcggctggcttctgcgcttctttcttgctcgggtctgtgctcaatgtgctgtttgccccaggcagcgagccaccaaggcctgggcagtcaccagaaccaagccctgcccctgggcctgggagacgcggaggacgcggagagctggcacgtcagattcgtgccaggtacgaagaggtccagcgatactcccggggtggcccaggtccaggcgcagggcgtccagaacggaggcgcctgatggacctcgcacccggtggcccaggcttgcctagacctaggcctccgtgggctcggccactcagtgacggtgctcctggttggccaccggctcctggaccaggaagtcccggaccagggccaaggctgggttgcgcggctctgagaaatgtctcgggggctcagtatatgggatccggatacacgaaggccgtttatcgcgtgcgcctgcccggtggcgctgcagtcgcactgaaggcagtggacttctctggccacgacctggggagctgtgtcagagagttcggcgtgcggagaggctgctacaggttggctgctcataagctcctcaaagagatggtccttttggagcgcctgcggcatcctaacgttctacaattgtatggctactgctaccaggattccgaagacatcccggacaccctaactacaattaccgaattaggggcaccagtggagatgattcaattgctgcaaacttcttgggaggatcggttccgcatctgtctgagtctcgggagattgctgcaccacttggctcactctcccttgggcagtgtcactctgctggatttccgccctcggcagttcgtgctcgtggacggcgagctcaaagtcacagatctggacgatgcgagggtggaggagaccccttgtgcaggcagcaccgactgcatcctcgaattccccgcacggaactttacgctgccctgctccgcgcagggttggtgcgaaggaatgaatgaaaagaggaacctctacaatgcctaccgcttcttttttacgtacctgctgccccattccgccccaccttcactacggcctttgctggatagcattgtcaacgcaactggggagttggcctggggggtggacgagacactggcacagttagagaaggtgctacacctatatcgatcggggcagtacttgcagaactctaccgcttcctcatctactgagtaccagtgcattccagattctacaatcccacaggaagactatcgatgctggccttcttatcaccacgggtcttgcctgttatcggtgttcaatttggccgaggccgtagacgtttgtgaatcccatgctcaatgtagagcattcgttgtaaccaaccagaccacttggaccggtaggcagctcgtgttcttcaaaacaggttggtctcaggttgtaccggacccgaataagacaacttacgtcaaggcgagcggatag

SEQ ID NO: 236732 - DNA, 2829 bp, synthetic construct
  misc_feature 1..2829: note = Description of Artificial Sequence: Synthetic coding sequence
  source 1..2829: mol_type = other DNA
atggcctcagatgctgtgcaaagtgagcccaggtcatggagtctgctggagcagctcgggctcgccggagccgatctcgccgcaccaggagtgcaacagcaactggaactggagcgcgaacgccttcggagagaaatacgaaaggaacttaagctgaaggagggagctgagaacctgagacgtgcgacaaccgacctggggaggtccctgggccctgtggagcttctgttaaggggcagctcacgaagacttgacctcctgcatcagcagttgcaagaactccacgcccacgtcgtcctccctgatcctgcagccactcacgatgggccacagagtcctggagcagggggaccgacatgcagtgctaccaacctctcaagggtcgccggtctcgagaagcagctggctattgagcttaaagttaaacaaggcgctgagaatatgatccagacctatagtaatgggtcgactaaagatcgaaaactgcttttaactgcccaacagatgctccaggactccaaaactaagatcgatatcatcagaatgcagttgagaagagcacttcaggcaggtcagctggagaatcaggctgcgcctgacgatacacagggctccccagatcttggtgccgtggagttacggattgaggagctgaggcaccactttcgggtggagcacgcggtcgccgagggtgccaagaacgtcctgaggctcctgtctgccgcaaaggcgcctgatcgaaaagccgtgtctgaagcccaggaaaaattgaccgaaagcaaccagaagttaggcctattgcgcgaggcactagaaaggcgtctgggcgagttacctgccgaccatccaaagggacgcttgctgcgggaagagctggctgccgcaagtagcgcagccttttcaacgcgtctcgctggacctttccctgccacacactactcaactttgtgtaagcctgcgcctctgacagggaccctggaagtgcgggtcgttgggtgccgcgatctcccagagacaatcccctggaatcctacccccagtatgggcggacctgggacccccgattccagaccccctttcttatccaggccagctagaggcttgtactctcggtccggcagtctgtccggccgtagttctttgaaggccgaggccgagaacacatcagaggtgtccacagtcctgaagctcgacaatactgttgtgggtcagacctcctggaaaccatgcggaccaaatgcatgggaccagtcttttacattggagctggaaagagctcgagaactagaactagccgttttttggagggatcagcggggattgtgtgcgctgaagttcctgaaactggaagacttcctcgataacgagcgccatgaggtgcagctagatatggagccacagggttgcctcgtcgccgaagtcacctttagaaatcccgtgatagaacggataccgagacttcgccgacagaagaagatcttttcaaaacagcagggtaaggcatttcagagagctcgtcaaatgaatattgatgttgcaacttgggtccggctgctgcgcagactgattcctaatgcaacggggacgggtactttctcacccggagcgtccccaggctctgaagctcgaacgactggagatattagtgttgaaaaactcaacctcggcactgattcggattctagcccccagaagtcaagcagagacccaccgagctcaccgtcctcactttcctcacccatccaagagagcaccgcacctgaactcccatccgaaacccaggaaacccctgggcctgccctgtgctcacccctgagaaaaagtcctctgaccctggaagatttcaagtttttggccgtgctcggaagggggcactttgggaaggtgctgctaagcgaattccgacctagcggtgagctgtttgccatcaaagcgctcaagaagggggatattgtcgccagagatgaggtagaaagtcttatgtgtgagaagagaatactggctgctgtgacgtctgcaggccacccatttctcgttaatctgtttggctgcttccagacgcctgaacacgtgtgcttcgtcatggaatattcagcaggaggtgatttaatgctgcacatacacagcgacgtgttttcagagcctcgcgctatcttctacagcgcctgcgtggtgcttgggttgcagtttctgcatgagcataaaattgtgtaccgggatctcaaactggataacttgctcttggacaccgaaggctacgtgaaaatcgcagattttggcctgtgcaaggaaggaatgggttatggcgacaggacctcgactttttgcggaactccagaattcttagcacccgaagtgctgacggatacaagttacactcgggcagtcgactggtggggcctgggggtcttgctgtatgagatgctcgtgggagagtccccttttccaggcgacgatgaagaggaagtgtttgactccatagtaaatgatgaggtgagatacccacggtttctgtctgccgaggctatcgggatcatgagacgactgctccggagaaacccggaaagaagacttgggtcatcagaaagagacgctgaagatgtgaagaagcagccatttttccgaactctgggatgggaagcccttttagctagaaggcttccacccccttttgttccgaccctctccggtcggaccgatgtgtctaattttgatgaggagtttacgggcgaggccccaactctgagccctccccgtgacgctcgtccgctcactgccgcagagcaagccgcattcttggacttcgatttcgtggctggcggatgctag

SEQ ID NO: 236733 - DNA, 2847 bp, synthetic construct
  misc_feature 1..2847: note = Description of Artificial Sequence: Synthetic coding sequence
  source 1..2847: mol_type = other DNA
atggctgaggctaacaacccttccgaacaagaactcgaaagtgaaccgagaagttggtctttgttggaacaactcggtctcgccggagcagacttagctgctcccggtgtgcagcagcagttagagctcgaacgggagaggctgcgacgtgagataaggaaagagctcaagttgaaggagggtgccgaaaacctgagaagggccacaacagacctcggacggagcttggggcctgtagagcttcttctacggggttcatcgaggcgcttagacctgcttcaccagcagctacaggaactgcatgcgcacgtggtgctgcctgatccagcggcaacacatgatgggcctcaaagccctggcgctgggggtcccacttgtagcgccaccaacctttccagagtggccggactcgaaaaacagcttgcaatcgagttgaaagtaaaacaaggggcagaaaacatgattcagacatactctaatggcagcacaaaagaccggaagctgctgctgactgcccagcagatgttacaggatagtaagaccaagatagatatcatccgcatgcagcttcgcagagccttgcaggcaggtcagctagaaaatcaggccgctcctgatgatacacaagggtcaccagatcttggggcagtcgaactgcgaatcgaggagctcaggcaccacttccgcgttgagcacgcagtggcagaaggggctaagaacgtcctgcgactgctgtctgctgctaaggccccagacaggaaggccgtctccgaagcacaggaaaagctcaccgagagcaaccagaagttgggcctgttgagggaggcactggagcggaggcttggtgagctgcccgcagaccatcccaagggacgccttcttcgggaggagcttgccgctgcctctagtgcggcatttagtacacggctggcaggcccattccccgcaacgcactactccacactgtgcaagccagctcccttgacaggcacccttgaggtgagggtagtaggctgtcgcgatctccctgagaccattccctggaatcccaccccctccatggggggtcccggaacccccgatagtcgccctccctttctctccaggcctgccagggggctttacagtagatcaggatctctgagcgggagaagttctctaaaggctgaggctgagaacacttccgaggtctccaccgtgctcaagctcgacaacaccgtagtggggcagacttcctggaagccctgcggcccaaatgcctgggaccagagcttcacgcttgagttggaacgtgctcgagaattggagctggctgtgttctggagggaccagcgaggtctctgcgctctgaagttcttgaaactggaagacttcttggacaacgagaggcacgaagtgcagcttgacatggaaccacagggttgtctggtcgccgaggtgacctttcgcaaccccgtcatcgagcgaattcctcggttacgaagacagaaaaagatcttcagcaaacagcagggcaaggccttccaaagagcccgtcaaatgaacattgacgtcgcgacttgggtgcgactgctgaggcggctgatccctaacgccactgggacagggacattctcacccggtgcctctccaggaagcgaagctcgcaccaccggagatatttccgtggaaaaattgaaccttggtactgactccgacagctcacctcagaagtcctcaagggatccaccaagcagtccaagctccctctcctcaccgattcaagaaagtacggctcctgagctgccaagcgagacacaagagaccccaggaccggctctgtgcagcccgctgaggaagtctccattaacccttgaagatttcaaattcctggcagtgttaggacgaggtcattttggcaaggttctgttatcagagtttagaccgagcggtgaactgtttgcgattaaagcgctcaagaagggagacattgtggcgagagacgaagttgagtcactgatgtgtgagaaacgcatcctggccgctgtgacaagtgctggccatccttttctggtgaacctgttcggttgctttcaaacacctgagcacgtgtgttttgtaatggaatatagcgcgggaggtgatctcatgctccatatccacagtgacgtgttctctgaaccacgcgcaatcttctattccgcctgcgttgtgctggggcttcagttcctgcacgaacataaaatcgtgtacagggatctaaaactggacaacttgctcctcgacaccgaggggtacgtgaagatcgccgacttcggcctctgcaaggaaggaatgggttacggcgatagaacttccacattctgcggcacccccgaattccttgctcctgaggtcctcacggataccagttacactagagccgtggactggtggggcctgggcgtcctgctgtacgaaatgcttgtgggcgagtcccctttccctggagatgatgaggaagaggtgtttgactccatcgtcaacgacgaagtcaggtatcctcgctttctgtccgccgaggccattggaatcatgcggcgattactgcgccgaaatcccgagaggcggctggggagcagcgagagggatgcggaggacgtgaagaagcagccatttttcagaactcttggctgggaggcgctgctggcacgtcgcttgcccccaccttttgtccctactctgagcggcagaacagatgtgagtaactttgacgaggagttcaccggtgaggccccaactctgagccctcctagagatgcgcgtcccctcaccgccgcagagcaggcagcctttctcgactttgactttgtggccggaggctgttag

SEQ ID NO: 236734 - DNA, 1815 bp, synthetic construct
  misc_feature 1..1815: note = Description of Artificial Sequence: Synthetic coding sequence
  source 1..1815: mol_type = other DNA
atggcctctaatcctgagcggggagagatcctgctgaccgagctgcagggggattcacgatccctcccgttctctgaaaacgtgtctgcagtgcagaagctcgatttctctgataccatggtacaacaaaaacttgatgacattaaggataggattaagcgcgagattaggaaggagctgaaaatcaaggaaggcgcagaaaatttgcgcaaggttaccaccgataaaaagtctttggcctacgttgacaacatcttgaagaaatcaaataaaaaattagaggaactccatcataaattacaagaacttaacgctcacatcgtcgtctcagatcctgaagatattactgattgtccccgtacacctgacacgccaaataatgaccccaggtgtagcacctccaacaatcggcttaaggctctgcagaagcagcttgacatagagctgaaggtgaaacaaggagctgaaaatatgatccaaatgtattcaaatgggtcatccaaggacagaaaactgcacggcacagctcagcagttattacaggactccaaaaccaaaatcgaagtaattcgtatgcaaatcctccaagctgtccagaccaacgagctggcttttgacaacgcaaagccagtcatctcaccgctcgagcttaggatggaggaactgaggcatcacttcaggatcgaattcgctgtggctgaaggtgctaaaaatgtcatgaagttgctgggttccggtaaggtgaccgataggaaagccctgtctgaggcgcaggcccgtttcaatgaatcttcccaaaagttagacttgctcaaatattccctcgagcagcgcctcaatgaggtgcctaaaaatcaccccaaatctagaatcatcatcgaagaactgtctctggtagccgcatcccccaccttgagccctagacagagtatgatttccactcagaatcaatatagtactctctccaagcccgcagcactcactggcactctggaggtccggctcatgggatgccaggatattttggaaaatgttcctggcagaagtaaagctacctccgtggcccttcccggatggtctccttctgaaacccgctcatcctttatgagccgaacctccaagagcaaatctggtagctcccggaacctcctgaagaccgatgacctgagcaatgatgtctgcgcagtgcttaagttggacaataccgtcgtcggtcagacctcttggaagccaatttcaaatcagagctgggaccagaagtttacactggagcttgaccgcagtagggagctggagatctctgtgtattggcgggattggcggtcactgtgcgcagtcaagtttctcaggctcgaggacttcttggataaccaaaggcatgggatgtgcttgtacttggaacctcagggtactctttttgcagaggtgacctttttcaaccctgtgatagagagacgtcctaaacttcagcggcagaaaaaaattttctcgaagcagcagggcaagacatttttacgggctccccagatgaatattaatattgctacctgggggcgactggtgaggagggccataccaaccgtcaaccactccggcacgttcagcccacaagcaccggtaccgactacagtcccagtggtagatgtgcggatcccacagttggcccctccggctagatacgtaagcgagattctgtcaattagctacacgaagttgctggggcatagttacgtgcttattatagctggcgtcctctccctggcgtttttcccctcttccatactcaaagttgtgttctgtctgctgaaaaagtag

SEQ ID NO: 236735 - DNA, 2484 bp, synthetic construct
  misc_feature 1..2484: note = Description of Artificial Sequence: Synthetic coding sequence
  source 1..2484: mol_type = other DNA
atgattcagatgtacagtaatggttcatccaaggatcggaaactgcacgggaccgcccagcagttgctccaggatagcaaaacaaagattgaggtcatccgtatgcagattctgcaggcagtgcagaccaacgaactggcctttgataatgccaagccagtgatttcccccctggaacttcgcatggaggagctgagacaccacttcagaatagaattcgctgtcgcagagggcgctaagaacgtgatgaagttgctcggtagcggaaaggtgacggatagaaaagccctctcagaggctcaagcgcgttttaacgaatcaagtcagaaactagatctgctcaaatatagcctggagcagcgtctgaatgaagtgcctaagaatcaccccaagtctcgcatcataattgaggaactttccctcgtagctgccagtcctacattaagcccaaggcaaagcatgatctccactcagaaccaatattcaacactcagcaaacccgctgccctgaccggtaccctggaagtgaggctgatgggttgccaagatattctggagaatgtccctggacgaagcaaagccaccagcgtggctctcccgggttggtctccctccgaaaccagatcttccttcatgagtaggacctcaaaaagtaagtcaggaagcagcaggaatctgctcaaaacagacgatctttcgaacgatgtatgtgccgtgcttaagttggacaacacagttgtcggccagactagctggaagcctatctccaaccagtcctgggatcagaagttcacattggaactggacaggtccagagagttggagatcagcgtgtattggagggattggaggagcctctgcgctgtcaaattcctgcgacttgaggacttcctggataaccagcggcatggcatgtgcctgtaccttgagccacagggtacactttttgcagaagtcactttctttaatcccgtgattgaacgacgcccaaagctgcagaggcagaaaaagattttcagtaagcagcaaggaaaaacatttctgcgtgctccccagatgaacattaatatcgctacctggggccgtctcgttaggcgcgctatccctaccgtaaaccattctgggacattttccccgcaagcaccagtcccaaccacggttcccgtagtagatgttcgcatccctcagctggctccgcctgcaagtgatagtacagtgaccaaactggatttcgatctggagccagaacctccaccagcccctccccgagcctcttccctgggcgaaattgatgagagctcagaactacgggtgctcgatatcccagggcaggattccgagaccgtgttcgacatccagaacgatcgtaacagcattctccctaaaagccaatctgaatacaagccagatacgccacaaagtggcttagagtactcaggcatccaggagttagaggataggcgttctcagcaaaggttccagttcaatctgcaagacttccgatgttgcgcagttttaggcagaggccactttggaaaggttctgctggctgagtataagaataccaatgaaatgtttgccatcaaagccctcaaaaaaggggatatcgtggccagggatgaagttgattctctgatgtgtgaaaagcgtatcttcgagaccgtaaattcagtgcgtcacccgtttttggtaaacctgttcgcctgtttccagaccaaggaacatgtctgtttcgtaatggaatatgcagccggaggagacttgatgatgcatatccatacagatgtcttctccgagcctcgtgcggttttctacgccgcatgtgtggtgctggggcttcagtacctgcatgagcacaagatcgtctatcgagaccttaagctggacaacttactgttggacaccgaaggcttcgtgaagattgcagactttggattatgtaaggaaggcatgggatacggtgatcggacaagtacattttgcggcacccccgaattcctggcgcctgaagttcttacagaaacaagctatactagggctgtcgactggtggggactcggagtcctcatttacgagatgttggtgggcgaatcgcccttcccaggagacgacgaagaagaggtcttcgactcaatagtgaatgacgaagtgcgctatccacgcttcctatctactgaagcgatctctattatgaggcggctgctcagacggaaccccgagaggcgacttggggcttctgagaaggacgctgaggacgtcaaaaaacacccgttcttccgactgatcgactggagcgccctgatggacaagaaagtcaaaccaccttttattccaaccatccgcggacgcgaggacgtctccaactttgatgacgaatttacatcggaggcgcctatactgacgccgccaagggaaccccgtatcctcagcgaggaggaacaggagatgtttcgagactttgactacattgctgattggtgttag

SEQ ID NO: 236736 - DNA, 2811 bp, synthetic construct
  misc_feature 1..2811: note = Description of Artificial Sequence: Synthetic coding sequence
  source 1..2811: mol_type = other DNA
atggcttccaaccccgaacgaggagaaatcttgctgactgaactgcagggcgactctcggtccctgcccttctctgaaaacgtgtcggctgtgcagaaactggatttctccgacacaatggtacagcaaaagcttgacgatatcaaagatagaataaagcgtgaaatccgcaaagaattgaagattaaggagggagccgagaatctgcgcaaagtcactaccgataagaagtcattagcctatgtagataacattttaaaaaaaagtaacaaaaaactggaagaattgcatcacaaattgcaggaattaaacgcccatatcgtagtgagcgacccggaggacatcacagattgcccaaggacccccgacactcctaataatgaccccaggtgctcaacctctaataatagactgaaggccctgcaaaaacagctcgacattgaattaaaggtgaaacagggggcagagaatatgattcagatgtactccaatggatctagtaaggaccgtaaactgcacggtacagcacagcagctacttcaggacagcaagacaaagattgaggtgataagaatgcagatccttcaagctgttcagaccaacgagctggctttcgacaatgctaagcccgtaatcagcccgctggagctgcgtatggaagagctaagacaccacttccgaatagagttcgccgtagccgaaggagcgaaaaatgtgatgaaacttctgggctctggcaaagtgaccgacagaaaggctctgtccgaagcccaagcgagattcaacgagtccagccagaagctggacttgttgaagtactccttagagcagaggttgaatgaagtccccaagaatcatcctaagtcacgtattattatcgaggaattgtcgctcgtggccgcaagtcctacactgagccctcggcagagcatgatcagtacccagaatcagtacagcaccttgtcgaagcccgcagccctgactggtacccttgaggtgaggttaatgggttgccaggacatacttgagaatgtgcctggaaggtcgaaagctaccagcgtcgccctccccggatggtctccgagcgaaacccgcagcagcttcatgtcaagaactagcaagtctaagtctggaagttctcgcaacctcctcaaaactgacgatctgtccaacgatgtttgcgccgtgctgaagctggacaacacagtggtagggcagaccagctggaagccgatcagcaatcaatcctgggaccagaaattcaccttagaactggaccgggttacttttttcaaccctgtgattgagcgcaggcctaaacttcagagacaaaaaaagatcttttctaagcagcaggggaagacgttcctgcgagccccacagatgaacattaacatagctacgtggggacggctcgtaaggagggcaatccctacagtcaaccatagtggtacctttagccctcaggctccagtccctacaaccgttccggtggtcgacgtgcgcattccccagctggcccctcccgcttctgattccaccgtgacgaagttggactttgatcttgaacctgaacctccccctgccccaccccgagcaagctctctcggagaaatcgacgagagctctgagttacgcgtgctcgacattccaggacaagatagcgagacggtcttcgatatccagaatgatcgtaactctatcctcccaaaatctcaaagcgaatacaagccagacacaccgcagagcggactggagtattcaggcatccaggaacttgaggaccgcaggtcccagcagcggtttcaattcaatctacaggatttcaggtgttgtgctgtgttaggtcggggtcacttcggtaaggtcctgcttgcggagtacaaaaatacaaacgaaatgttcgcaattaaggccctgaaaaaaggggacatcgtggcaagagacgaagtggacagcctaatgtgtgagaaaagaatattcgaaacagttaatagcgtgagacacccttttctcgtcaacctgtttgcttgttttcaaacaaaagagcacgtgtgcttcgtgatggagtatgccgcagggggagatctgatgatgcacatacacactgatgttttttccgaacccagggccgtgttttacgctgcgtgtgtagtcctcggactgcaatacctgcatgagcacaagatcgtgtatcgggacctgaagctggacaacctgctgcttgataccgaggggttcgttaagatcgctgacttcggcctgtgcaaggagggaatgggatacggggaccggaccagtacgttttgtggaactcccgaatttctggccccagaggttcttacagagactagttatacaagagctgtggattggtgggggctgggcgtgctgatctatgagatgttggtgggcgagagtccatttcccggtgacgatgaagaagaggttttcgactcaatcgtcaatgatgaagttcgctatcctcgcttcttgtcaaccgaggccattagtatcatgagacggctgttaaggcgcaatcccgagaggagactgggagcaagcgagaaagatgcggaggatgtcaaaaaacaccccttcttccggctgatcgattggtctgcactgatggataaaaaagtcaagccgcctttcatcccgaccattaggggaagggaagatgtgagtaacttcgacgatgaatttacaagtgaggcccctattctgacaccaccgagagaaccaagaattctttctgaagaggagcaggaaatgtttcgcgattttgactacatcgctgactggtgttag

SEQ ID NO: 236737 - DNA, 2955 bp, synthetic construct
  misc_feature 1..2955: note = Description of Artificial Sequence: Synthetic coding sequence
  source 1..2955: mol_type = other DNA
atggcaagcaacccagaacggggagaaatcttgctcaccgagctgcagggggattcgagaagtttacccttctccgagaacgtgagcgctgtgcagaaattggacttctccgatacgatggttcagcaaaagcttgatgatataaaagatcggattaaaagggagattcgtaaggagctgaaaataaaggagggggctgagaacctgcgtaaagtcaccaccgacaagaagagtttggcctatgtagataatatattaaagaaaagcaataagaagctggaggaactgcatcacaaacttcaggaactcaacgcccacatcgtggtttctgatccagaggacataactgactgtcccaggacccccgatacgcctaataatgatcccagatgctctacaagtaacaaccgactgaaggcccttcagaaacagctggacattgagctgaaggtcaaacagggcgctgagaacatgatacagatgtacagtaacgggtcttcaaaggaccgtaagctgcacggcacagctcagcagctgctgcaggactctaagaccaaaatcgaggtgatcaggatgcagatcctccaggcagtgcagacaaacgaactggcattcgacaatgcaaagccagttatctctcccttggagctccgcatggaagaactgagacatcatttccggatagagttcgcagttgcagagggggcaaagaacgtgatgaaactgctgggatccggtaaggtcacagatcggaaagcattgagcgaagcacaagcacggttcaatgaaagttcgcagaagttagatctgcttaagtattctctggaacagcgcctaaatgaagttcccaaaaatcacccgaaaagcaggatcatcattgaggagctgtcccttgtggcagcctcccctaccctgtccccgcgacagagtatgatcagcacgcagaaccaatattctacactgtctaaacctgccgctctgacaggaaccctggaggttagattgatgggatgccaggacatcctggaaaacgtgccagggcgttcgaaagctacgagcgtcgcactacctggatggtcgccctccgagacccgtagttcttttatgtcccggacaagcaaatcaaagtctgggtccagccgaaatctgcttaagacagatgacttgtccaatgacgtctgtgcggtcttaaaactggataacacggtggtcgggcagacatcatggaaaccaatttctaatcagtcatgggatcaaaaattcacattggagcttgacagatctcgggagctggaaattagtgtgtactggagggattggcggtctctgtgtgccgtcaagttcctgcgcctggaagattttcttgacaaccagaggcacggtatgtgcctctatctggaaccacaaggaactctgtttgcagaagtaaccttttttaatccagttatcgaacgaagacccaagctgcagcggcagaaaaaaatctttagtaagcagcagggtaagacattcttgagagctccccagatgaatatcaacatcgctacgtgggggagactggtaaggcgcgctatcccaaccgtcaaccatagtggtacgtttagtccccaggctccagtgccaactactgtccccgtggtggacgtaaggattccacagttggctcccccagcaagcgactctacagtgaccaagctggacttcgacctcgagcctgaaccccctcccgctcccccacgtgcaagttctctgggtgagattgatgagtcctctgagctccgggtcctcgacatccctggtcaggactctgagaccgtgttcgatattcagaatgacagaaacagtatcctccccaagtcgcagtcggaatacaaacctgataccccacaatcaggcctggagtattcagggattcaagaattagaggatcggagaagtcagcagcgattccagtttaacctccaggatttcagatgctgcgccgtgctgggcagagggcactttgggaaggtcctgctcgcagaatataagaataccaacgaaatgttcgcaattaaagcacttaagaagggggacatcgtggcgcgagatgaggtggacagcctcatgtgtgaaaagcgcatctttgaaaccgttaattctgtgcgccacccttttctggtgaacctctttgcttgtttccagacaaaggaacatgtttgctttgtgatggaatatgcggctggcggtgatctaatgatgcacatccacaccgacgtgttcagcgaacctcgtgctgtgttttacgcggcttgcgtcgtcctgggcttgcagtatctgcacgagcataaaatagtgtatcgagatctgaaattggataatctgctcttggataccgaggggtttgtgaaaatcgccgatttcggcctctgcaaagagggtatgggatacggcgaccggacatctactttctgtggtaccccagaattcctggccccagaggtgctcacggaaacctcatatactagagccgtggattggtggggactcggcgtgttgatctacgagatgctggttggggagtcacccttcccgggtgatgatgaggaagaagtgttcgactctatcgtgaacgacgaggtccgataccccagatttctctcaacagaagccattagcatcatgcggagactcctgcgcaggaacccagagcgaaggctgggggctagcgaaaaggacgcggaggatgtcaagaaacacccctttttccggctgatcgattggtcagccctgatggataaaaaggtgaaacccccattcattcccaccattagaggaagagaagatgtgagcaattttgatgatgaattcaccagcgaagccccaatcttgaccccaccaagagagcctcgaatcctctcggaggaagaacaggagatgttccgtgattttgactatattgccgactggtgttag

SEQ ID NO: 236738 - DNA, 636 bp, synthetic construct
  misc_feature 1..636: note = Description of Artificial Sequence: Synthetic coding sequence
  source 1..636: mol_type = other DNA
taagaagaactaagacatcatttccggattgagtttgctgtggctgaaggtgcaaaaaacgtcatgaaactgctgggctcaggcaaggtcaccgatcgcaaagctttgagcgaggcacaagccagattcaatgagtccagtcaaaagctcgatttattgaaatactccctggagcagagattgaatgaagttcctaaaaatcacccaaagtcccgtatcattattgaggaactcagtctggtggcggcatctccgactttgagtcctaggcagagtatgatctctacccaaaaccagtactccaccctgagcaagcccgcagcgctcaccgatgacgtgtgtgccgtgctgaagctagacaacaccgttgtggggcaaacatcgtggaagcccataagtaaccagagctgggatcaaaaattcactctggaactcgatagatcaagagagctcgagatctccgtatattggagagactggcgttccttgtgcgccgtgaaatttttgcgtttagaagactttctggacaaccagcgtcacggaatgtgtctctaccttgaaccccagggaacactgtttgcagaggttactttctttaaccccgtgatagagcggagacccaaactgcagagatag

SEQ ID NO: 236739 - DNA, 198 bp, synthetic construct
  misc_feature 1..198: note = Description of Artificial Sequence: Synthetic coding sequence
  source 1..198: mol_type = other DNA
tagggcttcgtcaagatcgcagacttcggcctgtgtaaagagggaatgggctatggcgaccgaacctccactttttgcggcacgcctgagtttcttgcccctgaagtgttgacggagacctcttataccagagctgtggattggtggggactcggggtgttgatatatgaaatgctcgtgggagaaacaagcgtctag

SEQ ID NO: 236740 - DNA, 1977 bp, synthetic construct
  misc_feature 1..1977: note = Description of Artificial Sequence: Synthetic coding sequence
  source 1..1977: mol_type = other DNA
atgaactccacacttgaggtacggctgatgggctgccaggatattctggaaaacgtccctggccgttctaaggccacctcagtggcattaccgggttggagtccatcagaaacacggagctcattcatgagtcgcacaagcaagtctaagagcgggtcttcccgcaatctcttgaagaccgatgatctctctaatgacgtgtgcgccgtgctaaaactggataataccgtcgtgggtcagacatcctggaagcctatctctaatcagtcttgggatcagaagttcacattggagttggatcgaagtcgcgaactggagatatccgtctactggagagattggagaagcctgtgtgccgtcaagttcctgcgtctcgaagactttctggataaccaaaggcacggaatgtgcctttacctggaaccacagggcactctgtttgctgaggtgactttttttaatccagtgatcgaacggaggcccaaactccagaggcaaaagaagattttttccaagcaacaagggaagacctttttgcgcgctccacaaatgaacataaacatcgcgacatggggcaggctcgtccggagagccatccctacagttaaccattccggaaccttctccccgcaagcccctgttcccacgaccgtgcccgtggtagacgtcaggatcccacagctggccccaccagcctctgatagcaccgtgaccaaactggacttcgatctcgagcccgagccaccacctgcaccccctcgcgcatcgagtctgggagagattgatgagagctcagagcttagagtgttggatatcccaggccaagactccgagaccgtatttgatattcagaacgatcgcaactcaattctgcccaaatcacagtccgagtacaagcctgacactccccagtcaggtctcgagtactctggaattcaggagctggaggaccggcgaagccagcagaggtttcaatttaatctgcaggacttcaggtgttgcgcggtcttaggcaggggccattttggaaaggtcctgttagccgagtacaaaaatactaatgaaatgttcgctattaaggcccttaaaaagggggatatcgttgcgagagacgaagtagattcgctcatgtgtgagaaacgaatctttgagactgtgaattctgtgcggcatccatttctcgtcaatttgttcgcttgcttccagaccaaagaacacgtgtgcttcgttatggagtacgctgccggtggggatctgatgatgcacatccatactgacgtcttctccgagccacgtgccgtgttttacgcggcatgtgtggtgctgggcctgcagtatctgcatgagcacaagatcgtgtaccgcgatttgaaacttgacaacctgcttctggatacggagggtttcgttaagattgctgacttcgggctgtgtaaggagggaatgggctacggggatagaacctctaccttctgtggaacccctgaatttcttgcaccagaagtccttaccgaaacatcttacactcgcgctgtcgactggtgggggctgggagtgctcatctacgaaatgctggtgggcgagtcccctttccccggagacgatgaggaagaggtgtttgatagcatcgtaaacgacgaagtgcgctaccccagattcctttctacggaggcgatttctattatgagacggctgctgcgcagaaatcctgagaggcgcctgggtgcttctgagaaggacgccgaggacgtcaagaagcatcccttctttcggttgatcgactggtccgcgctcatggataagaaggttaaacctccattcatcccaacaatacgcggtcgggaagacgtttcaaacttcgacgatgagtttaccagcgaggctcccattcttaccccaccgagggagccccgaatcctgagtgaggaggaacaggaaatgtttagagattttgactatattgctgattggtgttag

SEQ ID NO: 236741 - DNA, 336 bp, synthetic construct
  misc_feature 1..336: note = Description of Artificial Sequence: Synthetic coding sequence
  source 1..336: mol_type = other DNA
atgcacattcacaccgatgtcttctccgaacccagggccgttttttatgccgcttgtgtagtgctgggattacagtatctgcacgaacataagattgtatatcgagacttgaaactcgacaacttgctgctcgataccgaaggatttgtgaaaatcgctgacttcggactgtgtaaggagggtatgggatacggcgaccgcacctctaccttttgcggaaccccagaattcttggccccagaagtgctgactgagacatcatacacaagggcggtagactggtggggactcggcgtgcttatttatgagatgttggtgggcgagacatctgtatag

SEQ ID NO: 236742 - DNA, 2670 bp, synthetic construct
  misc_feature 1..2670: note = Description of Artificial Sequence: Synthetic coding sequence
  source 1..2670: mol_type = other DNA
atggaggaaggagcaccgcgacaaccagggcctagccagtggcctcccgaggatgagaaagaggtcattcgccgagctattcagaaagaacttaaaatcaaagaaggcgtcgagaatctgagacgcgtggcaacagatcggagacacttggggcacgttcagcagctgctgcgctcttccaacagacggcttgagcagctgcacggagaattgagggagctgcacgcacggatcctgctgcccggacctggacctggacctgctgagcccgtagcctccggcccacgcccttgggctgaacaactccgcgctcgtcacttggaagcactcagaagacagctgcacgttgagctcaaggtgaaacaaggcgctgagaacatgactcatacttgcgcaagcgggacaccaaaagagaggaaactcctcgctgctgcccagcaaatgctgagagactctcaattgaaagtggcgttgctgaggatgaagatctccagcctggaggcatcaggcagtcccgagccaggcccagaactgttggctgaggaactgcaacatcgcctccatgttgaggccgctgtggctgaaggagcaaagaacgtagtcaaattgctgtcctctagaagaacccaggatcgcaaggctttagctgaagctcaagcacaactccaggaatcctcccaaaagttggacctgttacggttggcgctggaacagctcctcgaacagttgccccctgcgcaccctctgcggagtcgggtaactcgggaactgcgcgctgcggttccagggtatccccaaccttcaggcactcccgtaaagcctaccgccctgactggcactctgcaggtccgtcttttggggtgtgagcagctattaactgccgtccccggaaggtcacccgctgcagccttggcttcttcaccatcggagggttggctgcgcaccaaggccaaacatcaacggggacgtggagagctcgccagcgaggtcctcgccgtacttaaggtggacaaccgggtggtaggccagactgggtggggtcaggtggccgaacaatcctgggaccagacctttgtcattcctctcgagagggcccgtgagttggaaatcggcgttcactggcgagactggcgccagctttgcggggtggcttttctgaggctggaggatttcctggacaacgcctgtcaccagttatctttatctctggtcccacagggtctgctttttgctcaagtgacgttttgcgacccagttattgaacgtcggcctagactgcagaggcaagagaggattttttccaaacggcgtgggcaggattttttaagagcaagccagatgaacctggggatggctgcgtggggcagactggtgatgaacttgctccctccttgctcctcaccatccactatttcccctcccaaaggatgtccgagaaccccaacaacactgcgcgaagcttccgatccggctacaccgtcgaactttctccccaagaaaactccgctgggcgaagagatgactcccccacccaagcctcccaggctgtaccttccacaggagcctactagtgaggaaacgccgcgtacaaaacggccacatatggaacctcgcacccggcgagggccaagtccgcctgcatctcccacgcgcaaaccaccacgcctgcaggatttcagatgtctggccgtgctgggacgtggtcactttggcaaggttctcctggtgcagttcaaagggacgggtaagtactacgccattaaagccctgaaaaagcaagaggtcctgagtcgtgacgagattgaaagtttgtattgcgagaaacggatattggaagccgtaggttgcacaggccacccattcctgcttagcctattagcctgctttcagacgtcctctcacgcctgttttgtcaccgagtttgtgcccggaggagatctgatgatgcagatccacgaggatgtgttccctgaacctcaggctcgcttttatgtagcatgtgtggttctgggccttcagttcctccacgagaagaagattatttatcgtgacctaaaactagacaacctcttattggatgctcaggggttcctgaaaattgccgactttggcctgtgtaaagagggtatcggtttcggcgacaggacgtccactttttgcggtacccccgagtttttggcccctgaggtgcttacccaggaagcatacacccgagccgtggactggtggggcctcggcgtgctgctgtacgagatgctcgtaggagagtgtcccttcccaggagatacagaggaggaagtcttcgattgcattgttaatatggacgccccttatccaggcttcttatctgtgcaagggctggaatttatacagaaactgctccagaagtgtccagaaaagaggctgggcgctggagaacaggatgcagaagaaatcaaggtccagcccttcttccgtacaaccaactggcaggccctcctggcaaggactattcagcctcccttcgtgccaaccctctgcggccctgcagacctgcgctatttcgaaggcgagttcacaggcctgccaccagccctgactccgcctgcccctcattcactgttgaccgcgagacagcaggccgctttccgagactttgacttcgtcagcgaacgctttctggagccatag

SEQ ID NO: 236743 - DNA, 1725 bp, synthetic construct
  misc_feature 1..1725: note = Description of Artificial Sequence: Synthetic coding sequence
  source 1..1725: mol_type = other DNA
atgcgacgtctgagctcatggcgcaaaatggccactgccgaaaagcagaagcatgatggtcgcgtgaaaatcggacattatattttgggagatacactgggcgtcggaacattcgggaaagttaaagttggtaagcacgaattaacaggccacaaagtggctgtgaagatcctcaatcgacagaagatacgcagtctggatgtggtcggaaagattaggcgcgagattcagaacctgaaattgtttcgccatccccacattattaaactgtatcaagtcatttctacaccaagcgacatatttatggtgatggagtacgtcagtggcggagagctgtttgactatatctgcaagaacgggagaaagagcgatgtccctggcgtcgtgaagacaggatctactaaagaactcgacgagaaagaaagtcgaagacttttccagcaaatattgtctggcgtcgattattgccacaggcacatggtggtgcacagggacctcaaacctgagaacgtattgctggatgcacacatgaatgctaaaattgcggacttcgggttgtctaacatgatgtcagatggagaatttctccgtaccagttgcgggtccccaaactacgccgctccagaggtcatcagtggcagactctatgcgggaccagaagtagatatttggtctagtggcgtgatcctctacgcattgctctgtggaaccctgcccttcgacgacgaccacgtaccgacactcttcaagaagatctgtgatgggatattctacacaccacagtacttaaacccgagtgtcatcagcctgctgaaacatatgctgcaagttgacccgatgaagcgagctacaatcaaagacattagagagcacgagtggttcaagcaggatctgcctaagtacctgtttcccgaagacccctcttacagctcaaccatgatcgacgacgaggcattgaaagaggtgtgtgaaaaatttgagtgctcagaggaagaggtgcttagttgcctatacaataggaaccaccaagaccccttagctgtggcataccatctcattatcgataacaggaggatcatgaacgaggcaaaagacttctatctcgcaacctctccccctgactctttcctggatgaccaccacctgacacgccctcaccccgagcgcgtgcccttcctggtcgctgagactcctcgtgcaaggcatacccttgatgagctcaacccacagaagtcaaagcaccagggtgtgcgcaaggccaaatggcacctaggtatccgctcccagtcccgccctaacgatattatggcggaggtgtgtcgtgcaattaagcagctggattatgagtggaaagtggtcaacccttactacctgagagtgagacggaagaatccagtgacgtccacttacagcaaaatgtccctgcagttgtatcaggtggatagccggacctacctcctggatttccgtagtatcgacgacgagattaccgaggccaagtcaggcaccgctaccccacagcgcagcggatcagtgtctaattacaggtcttgccagagatccgactccgacgccgaggcccaggggaagagttctgaagtgtctctcacttcttcggtgaccagcctcgacagcagcccagttgatctgacaccacgacctggctcacacaccatagaatttttcgagatgtgtgcaaacttgatcaaaatccttgcccagtag

SEQ ID NO: 236744 - DNA, 1680 bp, synthetic construct
  misc_feature 1..1680: note = Description of Artificial Sequence: Synthetic coding sequence
  source 1..1680: mol_type = other DNA
atgaggcgattatcaagttggcggaagatggccactgctgaaaaacaaaaacacgacgggagagtgaaaattggacactacatcttgggtgatacgcttggcgtgggcacctttggaaaggtgaaagtgggcaagcacgaactcacgggccataaagtggctgtgaagattcttaaccgccagaagattagaagcctcgacgttgtagggaaaattcgaagagaaatccagaacctgaagctcttccgtcaccctcatatcatcaagctgtaccaagtgatctctacccctagcgacatttttatggtgatggaatatgtctcaggcggagagctgttcgattacatctgcaaaaacggcaggttagacgagaaagaatcccgtcggttgttccagcaaatattgtctggagtcgattattgtcaccgccacatggtagtgcatcgcgacttgaagccggagaatgtgcttcttgatgcacacatgaacgcaaaaatagccgattttgggctcagcaatatgatgtccgatggggagtttctgagaactagctgcgggtcacctaattatgccgctccagaagttatctcaggaaggctctacgccggtccggaggtggatatttggagcagcggcgtcatcctgtacgcactgctgtgcggcacactaccctttgatgatgaccatgtcccaactctgttcaaaaagatatgtgatggaatcttttacactcctcagtaccttaacccatccgtgattagcctgcttaagcatatgctgcaggtggacccaatgaaacgggctaccattaaggatattcgcgagcacgaatggttcaagcaggatctgcccaagtatctcttcccggaggaccctagctacagcagcactatgatcgacgacgaggccctcaaggaggtgtgcgaaaaattcgaatgctcagaagaagaggtccttagctgtctgtacaaccgcaatcaccaggatcccctggccgtggcatatcatctgatcatcgacaacaggaggataatgaacgaagcgaaagacttttatctggctacttcacctccagacagcttccttgacgaccatcatcttacccgaccacatccggagagagtgcctttcctggtggccgagacccctcgcgcacgtcacaccctggatgaactcaatccccagaaaagcaaacaccaaggtgtaagaaaggctaagtggcatctgggcatacggtcccagtcccgacctaacgacatcatggcggaagtgtgccgagctataaaacagctcgattacgaatggaaggtggtaaatccttactacctgcgcgtgcggagaaaaaacccagtgacatcaacttattccaagatgagcctgcagctatatcaggtagatagtcgaacatacttactggacttccgttctattgatgacgaaataactgaagccaagagtggcactgccaccccccaaagatccggttccgtgtcaaactaccggtcttgccagcgtagcgacagtgatgctgaggcacagggcaaaagttccgaagtttcactgacctctagcgtgacttccttagactcaagccctgtagacctgactccacggccagggtcacacaccatcgagttcttcgagatgtgcgctaatctgataaagatcctcgctcagtag

SEQ ID NO: 236745 - DNA, 1659 bp, synthetic construct
  misc_feature 1..1659: note = Description of Artificial Sequence: Synthetic coding sequence
  source 1..1659: mol_type = other DNA
atggcggagaagcagaagcatgacggaagggtgaagattgggcactatgtgcttggggatacacttggcgtcggtacatttggcaaggtcaaaattggggaacatcagctgacaggacacaaggttgcggtgaaaattctcaacagacagaagatccgttcgttggacgtggtaggaaaaatcaagcgggagattcagaatttgaagcttttccggcacccccatatcattaaactgtaccaagtgatcagcacgcccacggatttctttatggtgatggaatacgttagcggaggagaattatttgattacatatgtaaacacggccgagtagaagagatggaggcccgtagactattccagcagatactgagtgccgtagactactgccacaggcacatggtggtccacagggatctgaagcccgagaatgtgctgctcgacgctcatatgaatgcgaagatcgctgatttcggactatccaatatgatgtccgacggtgagtttctgcgcacctcttgtgggtcacctaactacgccgctcctgaggtgatctctggtaggttgtatgcaggacctgaagtcgatatatggtcctgtggtgttatcttgtacgcactgctttgcggtactctgccttttgatgacgagcacgtgccaaccctttttaagaaaatcagaggcggtgtgttctacatcccggagtacctgaatcggtctgtggccaccctattaatgcacatgctgcaggtcgacccactcaagagagcaacaatcaaagatattcgagaacacgaatggttcaagcaagacctcccttcatatctttttcctgaggatcccagctacgatgctaacgtgatcgatgatgaagctgtgaaggaagtttgtgagaaattcgagtgcactgagagtgaggttatgaattctctctattcgggtgatccccaagaccagttagccgtggcgtaccatctgataatcgacaaccggaggatcatgaaccaggctagcgaattctatcttgctagttctccgccatcgggaagctttatggatgacagcgcaatgcatatacctcctggtctgaagccacaccctgaacgcatgcctccactcattgcagactcccccaaggccaggtgtccgctcgatgccctgaataccacgaaaccgaagagcctcgctgtaaagaaggctaagtggcatctggggatcaggagccagagtaaaccatacgacatcatggcggaagtgtatcgagccatgaaacagctggatttcgagtggaaggtcgtcaacgcataccacttgagggtgcggagaaaaaaccccgtgaccgggaactatgtcaagatgtctctgcagctgtacctcgtcgataacaggagttaccttctcgatttcaagtcaatagatgacgaggtcgtggagcagagatccggctcttcaacgccacagcgttcctgtagtgccgcaggactccacaggccccgttccagttttgattccacaacagccgagagtcattccctgagcggttctcttaccggctcattaactggctcaactttgagtagcgtgagcccacgtcttggatcccataccatggactttttcgagatgtgtgcctcactgataacaacactcgctcggtag

SEQ ID NO: 236746 - DNA, 744 bp, synthetic construct
  misc_feature 1..744: note = Description of Artificial Sequence: Synthetic coding sequence
  source 1..744: mol_type = other DNA
atgctcaccattaccgatttcatcaacatacttcacagatattataagtctgcgctggttcagatctacgaactggaagaacataagatagagacctggagggaggtataccttcaggattcattcaagcccctggtatgtatcagccccaacgcatcactttttgatgcagtgtcaagccttatcagaaataagatccaccgactcccagtaatcgatcccgagtctggaaatactctttatattttgacccacaagcgcatccttaagtttctaaaactcttcattacagagtttccaaaacccgaatttatgagcaagtccttagaagaactacagatcggcacctatgcaaacattgccatggtccggacgaccaccccggtgtatgttgccctgggcatcttcgtgcagcatagggttagcgctttgccagtggtggacgagaaagggagagttgtcgacatttactcaaaattcgacgtcattaacctcgccgctgaaaagacttacaacaatctggacgtgtcagtcactaaggcccttcagcatcgaagccattatttcgagggggtactgaagtgttacttacatgaaacgttggagaccattattaatcgactagtggaggcagaggtgcacaggctcgtggtggtggacgaaaatgacgttgtgaaagggattgtgagcctgtctgatattttgcaggccttggtactgacgggtggcgaaaagaaaccatag

SEQ ID NO: 236747 - DNA, 996 bp, synthetic construct
  misc_feature 1..996: note = Description of Artificial Sequence: Synthetic coding sequence
  source 1..996: mol_type = other DNA
atggagaccgtgatatcctcagattccagtccggctgtggagaacgagcatcctcaggagacgccagagagcaataactccgtatatacatcttttatgaaaagccacagatgttacgacctcatacctacctccagtaagctggtggtctttgatacctcactgcaggtgaagaaagccttcttcgcccttgtaaccaacggcgtccgagctgcgcctttgtgggactcgaagaaacagtcttttgttgggatgctgacaatcactgacttcatcaacattctgcatagatactacaagagcgccctcgtgcagatctacgaacttgaggagcacaagattgagacctggagggaagtctaccttcaagatagttttaagccgctggtttgcatatcacctaatgccagcctgtttgatgcagtttcctctctgattagaaacaaaatccatcggctgccagtcatcgatcccgagtcagggaacactttgtacatacttacgcacaaacgcatcctgaagttcttgaagctttttatcacggagttccctaaacctgagttcatgtctaagagcttggaggagctccaaattggaacatatgctaatatcgccatggtgcgtaccacaacaccagtttatgtggctcttggcatcttcgtacagcaccgggtgtctgccctacctgtggtggatgagaagggacgtgtggtggacatctactccaagtttgatgtaattaatctcgccgctgagaagacatataataaccttgatgttagcgttaccaaggcactgcagcacaggagtcactactttgagggagtccttaaatgctacctacacgaaacactggagaccatcataaataggctggtggaggccgaggtccatcgcctggttgtggttgacgaaaatgacgtagtgaaaggaatcgtcagccttagcgatatcctgcaggcactcgtccttactggcggagagaagaaaccttag

SEQ ID NO: 236748 - DNA, 1710 bp, synthetic construct
  misc_feature 1..1710: note = Description of Artificial Sequence: Synthetic coding sequence
  source 1..1710: mol_type = other DNA
atgggctcggcagtcatggacactaaaaaaaaaaaagacgtgtccagtccgggaggcagcggcggtaagaagaatgcatcacaaaaaagaagaagcctgagagtgcatattcccgacttgtcatcctttgctatgcccctcctggacggagacttagaaggttctggaaagcactcgtcacgcaaagtcgacagtccattcggcccaggttcaccatccaaaggattctttagtagaggcccacagccacgcccatccagtcccatgagcgctccagtcagacccaaaacttcacctgggagccccaaaacggtgttcccatttagctatcaggagtccccccctagaagccctagaaggatgagcttttcaggaatttttcgctcctcaagcaaagagtcgtctcctaattccaaccctgcaacatctcccggaggcattcgcttttttagcagatcgaggaagacctctggcctttcatccagtccaagcacacctacacaggtgaccaaacagcatacctttccgctggagtcttataagcacgagcctgaacgcctggagaatcggatctacgcgtctagctcgccacctgataccgggcagagattctgcccttcctctttccaatcacctactagaccaccattagcctccccaactcactacgcaccgtcgaaagccgcagccctcgctgcagcactcggcccagccgaggccggaatgctagagaaacttgagttcgaggacgaggcggtggaggatagcgagagcggggtgtatatgaggtttatgcgcagtcataaatgttatgatattgtgcctacctcctcaaagttagtggtatttgatacaaccctgcaagtgaaaaaggcattttttgctctggtggcaaatggggttcgcgcagcaccactttgggaaagcaagaagcagagtttcgtcggtatgcttaccattacggacttcatcaatattctgcataggtactacaaatctcctatggtccagatctatgagctcgaagaacacaaaatagagacttggagggagctgtatctgcaggagacctttaaacctcttgtcaatatttccccagatgcgagccttttcgatgccgtgtattctctgataaagaataaaatccacaggctccctgtaattgacccgatcagtggaaacgccctgtacatcctgacacataagcgcatactcaaatttctccagctcttcatgagtgacatgcccaagcccgcttttatgaagcaaaacctggacgagttaggtatcgggacctatcataacattgccttcattcatccagatacccccatcatcaaagcactgaacattttcgtagagcggcgtataagtgccctgccagtcgttgacgagagcggaaaggtggtggacatttacagcaaattcgacgtgattaatttagcagcagaaaaaacctataataatttggacattacagtcacccaggccctccaacatcgttctcagtactttgaaggcgttgtcaagtgcaataagctggaaatcctcgaaacaattgtggacagaattgtgcgggctgaggtgcatagactggtggttgtcaatgaagcagactccatagtcggtataatcagcctgtccgatatcctgcaagccctaattctgactccggctggcgcaaaacagaaagaaaccgagacggagtag

SEQ ID NO: 236749 - DNA, 1335 bp, synthetic construct
  misc_feature 1..1335: note = Description of Artificial Sequence: Synthetic coding sequence
  source 1..1335: mol_type = other DNA
atgaagaggttcggttccctgcgctccaataagaaacacaaggaccaaaaccgaagcacagagcgccgtcagagcgagcctcatggcctgttcgctagcggactgtctagcagtccctccacacccactcaggtgaccaagcagcatacattcccactggaaagttataagcacgagcccgaacgtctggagaaccgcatatacgcttccagttcgcctcctgacaccggccagcgtttctgtccatcctcattccagtcccccacacgaccacctctggcatcccctacccactatgcaccgtccaaagcagcagctcttgccgctgctctcggacccgcagaagccggtatgctggaaaaactcgagttcgaggacgaggtagaggacagcgagtcgggcgtgtatatgaggtttatgaggtcgcacaagtgctatgatatagtacccacgagttccaagcttgtggtcttcgatactaccctacaggttaagaaggctttcttcgccctggtggccaacggcgtccgcgcagctcccctgtgggagtccaaaaagcagtcatttgtaggcatgctgaccatcacagactttataaacattctccatcgatattacaagtcccccatggttcaaatctacgaattagaggagcataaaattgagacttggcgggaactctacctccaagagacgtttaagcctctggtgaatatcagtccggatgcctctctttttgatgcagtgtacagtttaattaaaaacaagatccaccggctgccagtaattgatcccatctccggtaatgcactgtatatcctcacgcacaagcggatattgaagttcttacaactgttcatgagtgacatgccaaaacctgctttcatgaaacagaacctcgacgaactcggcatcggcacttatcacaatattgcgttcatccatcctgatacacccattattaaggccttgaatatcttcgtggaacgacgcatctctgcccttcccgtggttgacgagagtggcaaagttgtggatatatatagtaaatttgacgtgatcaatctggctgccgagaagacctataacaaccttgacattaccgtcacccaggcgttgcaacataggagccaatacttcgagggggtcgtcaaatgtaacaagttagaaattcttgagactatcgtggaccggatagtgagggccgaggtccaccggttggtggtcgtaaatgaggctgactccattgttggcataatctccttgtccgatattttgcaggccttgattctgacacctgccggagccaagcagaaggagaccgaaaccgagtag

SEQ ID NO: 236750 - DNA, 309 bp, synthetic construct
  misc_feature 1..309: note = Description of Artificial Sequence: Synthetic coding sequence
  source 1..309: mol_type = other DNA
atggctggtcaggctttcaggaagttcctgcctttattcgaccgcgtcttggtggagcgaagtgccgctgaaacagttacgaaggggggaataatgttacccgagaagagccaaggcaaggtgctgcaagctaccgtagtcgctgtagggagcggttctaaggggaaggggggagaaatccagccagtgtccgtgaaagttggagacaaagtgctgctcccggaatacggagggaccaaagtggtgctggatgacaaagattatttcctcttccgggatggagacattttaggcaaatatgttgactag

SEQ ID NO: 236751 - DNA, 1062 bp, synthetic construct
  misc_feature 1..1062: note = Description of Artificial Sequence: Synthetic coding sequence
  source 1..1062: mol_type = other DNA
atggagcctggcctcgagcatgcactgcggaggacaccctcctggtctagtctgggaggctcggagcaccaggagatgtcctttttagagcaggagaacagcagcagttggccctctccggctgtgacttcttccagtgaaagaattagggggaagagaagagcgaaggcgctgcgatggacacgacagaagagtgtggaggaaggagaacccccaggccagggggaaggccctagatccagacctgccgctgagtccactgggttagaggctactttccctaagacgacccccctggcccaggccgatccagccggagttggaactcctcctacggggtgggattgcctgccctctgactgcaccgccagcgctgccggaagctctactgatgacgtggagttggcaacagaattccctgcgactgaggcctgggaatgcgaactcgaaggtctgctggaggagaggcctgcgctgtgcctgtccccacaggcaccttttcctaagctgggctgggacgacgagctcaggaaacctggagcacagatatacatgcgttttatgcaggaacacacttgctatgacgctatggcaaccagtagcaagctcgtcatatttgatactatgctggagatcaagaaagcatttttcgccttagtcgctaacggtgttcgtgccgctcctctttgggactctaagaaacagtccttcgtgggtatgctgactatcactgacttcatccttgtactgcatagatattacaggtctccgctcagatcaacatgcaaggccgcaagctccctttggagcccctctctgttgatgatcgcctgcctgaaattgtccactccatccagccggactggttcaatcgcatgtctattcctgacgcggtgccaggccacatactccacctcctcgcatacgaacgcatgtagctcttcctgtactagcctggtaccgtgctgcccaggccctccaagctcgaccgctctgtctaagatctgggccagcgcacactctgagacatggctgtggtgctggagacagcaccccagttag

SEQ ID NO: 236752 - DNA, 1395 bp, synthetic construct
  misc_feature 1..1395: note = Description of Artificial Sequence: Synthetic coding sequence
  source 1..1395: mol_type = other DNA
atgtcctttctcgaacaggagaactcaagcagttggcccagtccggcagtgacttcatcttctgagagaatccgaggcaaaagacgagctaaagccctgcggtggacgcgccagaaaagcgtcgaggaaggggaaccacccggtcaaggggaagggccaagatcacgacctgccgcagagtctaccggcctggaagccacgttcccgaagactacccccttggctcaggcggaccctgccggagtgggtactccccctaccggttgggactgcttaccaagcgattgcacagcaagcgccgcaggaagctcaaccgatgacgtcgagctcgcgaccgaattccctgccactgaagcctgggaatgcgagctggaggggctgctggaggaaaggccagcactttgcctgtccccccaagctcctttccctaaactgggatgggatgatgaactcaggaagccaggcgctcagatctacatgagattcatgcaggaacacacatgctatgacgcaatggcgaccagctccaaattggtgattttcgacacaatgctggagattaaaaaagcgttcttcgctctggttgccaatggggtccgggcagctcctctttgggacagtaagaaacaaagcttcgtgggcatgcttacgattacagattttattctcgtactccatcgctactatcggtcaccattggtacagatctacgaaattgaacagcataaaatcgaaacctggcgcgagatatatctacaaggatgcttcaagccattggtttccatctcccctaatgacagcctctttgaggcagtgtacactctgatcaaaaacaggattcatcgattgccagtgcttgatcctgtttcaggtaatgttctgcatatactcacgcacaagcgccttttgaaattcttgcacatattcgggagcctgctgcccagacctagtttcctttatagaaccatccaggatctgggtatcggcaccttccgagacttggctgttgtcttggaaacggccccaattctcacagcgctcgatatcttcgtggacagaagggtttcggctctcccagtagtgaacgaatgcgggcaggtcgtgggcctctactctcgatttgatgtaatccatctcgcagcccagcagacttacaaccacttggatatgtctgtgggcgaagcactccgccagcgcacactctgcctcgagggcgttctctcttgccagccccacgaaagtttgggggaggtaattgaccgtattgccagggaacaggttcatagactggttcttgtggacgagacacagcacctattaggcgtcgtcagcctctctgacatcctccaagcccttgtgttgtcccccgctggcatagacgctctcggggcttag

SEQ ID NO: 236753 - DNA, 1470 bp, synthetic construct
  misc_feature 1..1470: note = Description of Artificial Sequence: Synthetic coding sequence
  source 1..1470: mol_type = other DNA
atggaaccaggacttgaacacgccttacggcgtacaccaagctggagctcactgggaggctccgagcatcaggaaatgtcgtttctcgagcaggaaaacagttcctcttggccaagccccgctgtgacctcctcaagtgaacggatccggggaaagcggagagctaaggctcttaggtggacccggcagaagagcgtagaggagggagagcctcccggacagggtgagggccctaggtcgcgacctgccgcagagtccaccggtcttgaggcgacctttcctaaaacaacccccctggctcaagccgaccccgctggtgtgggtacccccccaaccggctgggactgccttccgtccgattgtactgccagcgccgcaggcagctctactgatgacgtcgaattggctacagaattcccggcaactgaagcctgggaatgtgaactggaggggctgttagaggagaggcctgctttgtgcctcagtcctcaggctcccttcccgaaactgggatgggacgacgaactgagaaagccaggcgctcagatctacatgaggtttatgcaggagcatacctgctatgacgcaatggccactagctcaaagctggtgatcttcgatacaatgctggaaattaagaaagccttcttcgccctggttgctaacggggtaagggctgcgcctctgtgggattccaaaaagcagtcattcgtcggcatgctgactattacagacttcatattagtgcttcatcggtattatcgctcacccttggtgcagatctatgagattgaacagcataagatagaaacctggagggaaatttatctgcagggttgctttaaacctctggtcagcataagcccgaacgatagcctgtttgaggcagtctatacacttatcaaaaatcggatccaccgcctgccagtgctggaccctgtgtctggcaacgtcctccatattctgacccacaagcggttgctgaaattcctgcatattttcgggagtctgctgcctaggcctagcttcctctatcgtacaatacaggacctggggataggaacgttccgggacctggccgttgtcctagagacagcacccatcttaactgccctggacatcttcgtagatcgcagagtgtccgctctccccgtggtgaacgagtgcggccaggtggttggactgtactcacgatttgacgtgattcatctagccgcacagcagacatacaaccatctggacatgtccgtgggcgaagccctgagacagcggacactttgcctggaaggagtattaagttgccaaccacatgagagtctgggagaagtcattgacaggatcgccagagagcaggtgcatcggctagtgctggtggatgaaactcaacacctgctaggagtggtatctttgtctgatatcctgcaggcgctcgtcttgtcccccgcagggatcgacgctctcggcgcatag

SEQ ID NO: 236754 - DNA, 918 bp, synthetic construct
  misc_feature 1..918: note = Description of Artificial Sequence: Synthetic coding sequence
  source 1..918: mol_type = other DNA
atgaggtttatgcaggaacacacatgctatgatgcaatggccacgtcaagtaaactggtgatcttcgacactatgctagagatcaagaaagccttcttcgccctggtggccaacggagttagggcagctccactctgggacagcaagaaacagtcattcgtcgggatgttgacaattactgactttatcctcgtcctgcaccgctattatagatctcctctcgtgcagatctacgagatcgagcagcataaaatagaaacatggagagagatttacctgcagggatgctttaaaccactagtgtcaattagcccaaatgactcattgtttgaagcagtatacaccctaatcaagaataggattcatcgtctgccagtgctggatcccgttagcggtaatgtcctgcacattctcactcataaacgcctgcttaaattcctccacattttcggctcactgcttcccagaccatcctttctctacaggacaatccaggacctaggaattggaacgtttagagacctcgccgtggtccttgaaacagccccaatcttgacagctctagatatatttgtggaccgccgtgtctcggcactcccagttgttaatgagtgtggccaggttgttggtctgtatagcaggttcgatgtgatccacctggcagcccagcagacatataaccatctggacatgtcagtgggagaagcgctgcgccaaaggaccctgtgcctggagggggtgctcagttgtcagccgcatgagtctctaggtgaagtcatagaccgcattgccagggagcaagtgcataggcttgttctcgtggacgaaacacaacacctcctaggagtggtaagtctctcagatatcctccaagcactggtgctgagtccggctgggattgatgctctgggtgcctag

SEQ ID NO: 236755 - DNA, 1056 bp, synthetic construct
  misc_feature 1..1056: note = Description of Artificial Sequence: Synthetic coding sequence
  source 1..1056: mol_type = other DNA
atgggaaatgcagccgctgcgaagaaggggtctgagcaggagagtgtcaaggagttcctggctaaggcaaaggaagactttctaaaaaagtgggagtctcctgcgcagaatacagcccacctggaccagttcgagcgtatcaaaacactggggacaggctcctttggacgggtgatgctcgttaagcacaaggaaactgggaaccactacgctatgaagatcttagataagcaaaaggtggttaagctgaagcagatcgagcataccctcaatgaaaaaagaatactgcaggccgtcaactttcccttccttgtgaagttggagttctctttcaaggacaatagtaatctgtatatggttatggagtatgtgcctggaggagagatgttctcccacctccgtcgcatcggtcgcttttccgaaccacacgccaggttttatgccgcacagattgtgctgactttcgagtacctccactcgctggacctgatctacagagatctcaagccagagaacctgctgattgatcagcaaggctacatccaggtgaccgatttcgggtttgcaaagcgcgtgaaaggtcgtacctggaccctctgcggaacgcccgaatatctggcgccagagattatactgtccaaaggatataacaaggccgtcgattggtgggctttgggcgtgttaatttatgagatggccgcaggctaccctccctttttcgccgatcaacctatccagatctatgagaaaatcgtgagcggaaaggtgcgtttcccaagtcacttcagcagcgatctgaaagatttgcttcggaacctgctccaggtggatctgacaaaaagattcggaaatctcaaaaatggagttaatgatatcaaaaaccataagtggtttgctaccactgactggattgccatttaccaaagaaaagtggaggccccatttatacccaagttcaagggcccaggtgatacctcaaacttcgacgactatgaagaggaggagatccgtgtcagcattaacgaaaaatgtggaaaagagtttagtgagttttag

SEQ ID NO: 236756 - DNA, 1032 bp, synthetic construct
  misc_feature 1..1032: note = Description of Artificial Sequence: Synthetic coding sequence
  source 1..1032: mol_type = other DNA
atggccagtaattcgtccgacgtcaaagagtttctagcaaaagccaaagaagactttctcaagaagtgggaatctcccgctcagaatacagctcatctcgaccagttcgaaagaatcaagacattaggcacaggttcttttggcagggtgatgctggtgaagcataaggagaccggaaaccactatgccatgaagatcctggataaacaaaaagttgtgaaactgaaacagatcgaacacaccctaaacgagaagagaatcctgcaagccgtaaatttccccttcctagttaagcttgagtttagtttcaaggataattccaatctgtatatggtaatggaatacgtgcctgggggagagatgttttctcacttacggaggatcggacgtttttctgaacctcacgcccgtttttatgctgcccaaattgtgctaacttttgagtatctacactccctcgatttaatctaccgagatctaaaaccagaaaatctgctgatcgaccagcaaggctacatccaagttacagattttggttttgccaaacgcgtcaagggtagaacctggacattgtgcggaactcctgagtatctggcccctgagattatccttagcaaaggttataataaggcagtagactggtgggccttgggggtcctgatctatgagatggcagcaggctaccctcctttcttcgctgatcagccaatccagatctacgagaagatcgtctccggaaaggtgcggttcccgtcccacttttcctccgatttaaaggatttactccgcaacttgcttcaggtggaccttactaaaaggtttggaaacctcaagaacggggtgaacgatataaagaaccacaagtggtttgcgacaaccgattggattgctatctaccagcgaaaagtggaggcaccttttatcccaaaattcaagggacctggagacacttccaacttcgacgactatgaggaagaagaaatccgtgtcagtattaatgagaagtgtgggaaggagtttagcgaattctag

SEQ ID NO: 236757 - DNA, 1056 bp, synthetic construct
  misc_feature 1..1056: note = Description of Artificial Sequence: Synthetic coding sequence
  source 1..1056: mol_type = other DNA
atggggaacgcggcagcggctaaaaaaggctctgagcaggagtctgtgaaggaatttctggccaaagcaaaggaagacttcctcaagaagtgggagtctcccgctcagaacactgctcacttggaccagttcgagcgcattaaaaccctgggtaccggcagtttcgggagagtaatgctggtcaagcacaaagaaacagggaaccattatgccatgaaaatactggataagcagaaggttgtgaaactcaagcagattgagcacacccttaatgagaagagaatactgcaggccgtgaattttcctttcctggttaaacttgagttctcctttaaggacaacagtaacctatatatggtgatggaatatgtcccgggaggggagatgttcagtcatctgaggaggataggcagattcagcgaacctcacgccaggttttacgccgctcaaattgtgctgacatttgaatatctgcactctctcgacttgatttatcgtgacctgaaacctgagaacctgctgatcgaccagcagggatatattcaagtgaccgactttggcttcgcaaagcgggtgaaagggagaacttggactttgtgtggtactccagagtacttagctcctgaaatcattctttccaagggctacaataaagcggtcgactggtgggctctcggagtgctgatatacgaaatggccgctggctatccccctttctttgccgaccagccaatccagatttatgaaaagattgttagcgggaaagtgaggttcccatctcacttcagctctgatcttaaggaccttctgagaaacctcttacaggtggatctcacaaaacgttttggcaaccttaaaaatggcgtcaacgatataaagaaccacaagtggtttgctacaacagactggattgctatctatcagaggaaagtagaagctccattcatcccaaagtttaagggcccaggcgatacgagcaactttgacgattacgaagaagaagagatccgggtgtccatcaacgaaaaatgcggcaaagaatttagtgagttttag

SEQ ID NO: 236758 - DNA, 693 bp, synthetic construct
  misc_feature 1..693: note = Description of Artificial Sequence: Synthetic coding sequence
  source 1..693: mol_type = other DNA
atgctcgtgaaacacaaggagaccggaaatcactatgctatgaaaatcctggacaaacagaaggttgtgaagctgaagcagatagagcataccctcaacgaaaagcgcatccttcaggctgtgaacttcccttttcttgttaaactagagttctccttcaaggacaattcaaatctttatatggtcatggagtacgtccctggaggcgagatgttcagccacctgaggcggattgggagattctccgaacctcacgctcgcttttatgcggctcagatagtgctcactttcgaatatctgcacagtcttgacttgatttatagggacttgaagccagagaacctgcttatcgaccagcaggggtacatccaggtgacagattttggcttcgccaaacgtgtgaagggcagaacttggacgctctgtggaactccagagtacctcgctcctgaaatcatcctttcaaaagggtacaacaaggccgtggattggtgggccttaggcgtactcatctatgagatggctgccggttatcctccgttcttcgccgatcagccaattcagatctacgaaaaaatcgtatccggtaaggttagaagcggatgtggagacaccgcactggaggaaactgatcgatccctccttactcaccccattccctggggggctttgctggtggtgcgtataatctag

SEQ ID NO: 236759 - DNA, 1074 bp, synthetic construct
  misc_feature 1..1074: note = Description of Artificial Sequence: Synthetic coding sequence
  source 1..1074: mol_type = other DNA
atgggtctgtctcggaagtcctcagacgcctctgcttgttcgagttctgaaatcagcgacttcgtgaaggaatttctggctaaggccaaagaggattttttgaagaagtgggaaaatccaacacagaataatgccggactcgaggacttcgagcgcaaaaaaactcttgggacaggcagcttcggtcgcgtcatgctggtgaagcacaaggcaacggagcagtattacgcaatgaaaatccttgacaagcagaaggtggtgaaattgaaacagatcgagcacaccctgaacgagaagcgaatcctgcaggctgtcaacttcccattccttgtgaggctggaatatgcgttcaaggataacagcaatctctatatggtaatggaatatgtcccgggaggagagatgttctcacatctacggcgtatcgggcgtttcagcgaacctcatgccagattctatgctgcccagatcgtgctcaccttcgaatacctgcactctctggacttgatttaccgcgacctgaagcctgagaacctgctgatcgatcaccaaggatatattcaggtgactgacttcggcttcgccaagagggttaaaggacgcacatggacactgtgcggcacacccgagtacctggcccctgaaatcattttatctaagggctataacaaggctgtagactggtgggccctcggggtgctgatatacgagatggctgctgggtacccccctttcttcgcggaccaacccattcagatatacgagaaaatcgtttccgggaaggtcagattccccagtcatttctccagtgatctgaaggatttgctgagaaatctgctgcaggtcgatttaactaagaggttcggaaaccttaaaaatggcgtctcagatattaaaacccataagtggttcgctaccacggactggatcgcaatttatcagaggaaggtcgaagccccatttattcctaaattccggggttctggagacaccagtaactttgacgactacgaggaggaagatatccgcgttagcatcactgagaagtgcgcaaaagagtttggagaattttag

SEQ ID NO: 236760 - DNA, 795 bp, synthetic construct
  misc_feature 1..795: note = Description of Artificial Sequence: Synthetic coding sequence
  source 1..795: mol_type = other DNA
atgagtgccaggaagtcctctgacgctagcgcctgttctagtagcgagatcagcgactcctttgtgaaagaattcctcgcaaaagccaaggaggatttccttaaaaaatgggaaaacccgacgcagaataacgcagggctggaagatttcgaaagaaaaaaaacccttggcacagggtcgttcggcagggtgatgttggtgaaacacaaagctactgagcagtattacgcgatgaaaatcctagataaacagaaagtcgtgaagctgaagcagatagagcacactttaaacgagaaaagaatcctacaggcggtgaatttcccatttctggtccgcttggagtacgcctttaaggataattccaatctttacatggtgatggaatacgtcccaggtggtgaaatgttcagccaccttcgaagaattggtaggttctctgagccgcatgcacgcttttacgcggctcaaattgtattaacttttgaatacttacactctctggatctgatctatagagatttaaagcctgaaaatctgttgatagaccaccagggctacattcaggttactgactttgggttcgctaagagagtgaagggcaggacttggaccctgtgcgggacccctgagtacctggctcctgaaattatactcagtaagggctataacaaagcggtggactggtgggcccttggagtactcatctatgagatggcagcaggctaccctcctttttttgctgatcagcccatccagatatatgagaagattgtctccgggaagcagaacttttag

SEQ ID NO: 236761 - DNA, 942 bp, synthetic construct
  misc_feature 1..942: note = Description of Artificial Sequence: Synthetic coding sequence
  source 1..942: mol_type = other DNA
atgccagatttgaagattctcaaggggaagactctcgggacaggctcgttcggtcgcgtaatgctggtgaagcataaggccactgagcaatactatgccatgaagatcctggacaaacagaaggtcgttaagcttaagcagatagagcacactctaaacgagaaacgaattctgcaggccgtgaacttcccattcctggtgagactcgaatacgcgtttaaggataatagcaatctatacatggtaatggagtacgtgcccggaggcgaaatgttttcgcaccttcgacggataggaaggtttagcgaaccacatgccagattctatgccgctcagattgtgctgaccttcgaatacctgcacagcttggacctcatttacagagaccttaagccagagaacctgctgatagaccatcaaggctacattcaggtgacagacttcggctttgccaaacgagtcaaggggaggacttggacactgtgcgggactccggagtatctggctcctgagattattttgagtaaagggtacaacaaggcggtggattggtgggcgttgggagtcctgatctacgaaatggccgctggttatccgcctttcttcgccgaccagcctattcagatttacgagaagatcgtgtccggcaaggtccgctttccttcccactttagttctgacctgaaagatctgctgaggaacttgctgcaggttgatctgaccaaacggtttgggaacctgaaaaatggggtgtccgatattaagacccacaagtggttcgcaacgacagactggattgccatatatcagcggaaagtggaggccccattcatcccaaaatttagaggcagcggcgacacttcaaatttcgatgattatgaggaagaggatatccgggtgagcatcactgaaaagtgtgcaaaagaattcggagagttctag

SEQ ID NO: 236762 - DNA, 1068 bp, synthetic construct
  misc_feature 1..1068: note = Description of Artificial Sequence: Synthetic coding sequence
  source 1..1068: mol_type = other DNA
atgggcctgtctaggaagtcatccgatgcaagtgcatgcagttcttccgagatctctgtcaaggagttcctggcaaaggccaaggaagacttcctcaagaaatgggaaaatcccactcaaaacaacgccggtctggaggattttgaacgaaagaaaaccctaggaaccggtagtttcggaagagttatgcttgtgaagcacaaggcgactgaacagtactacgctatgaaaatcctggataaacaaaaggtagtgaagctcaaacagatcgagcatacgctgaatgagaagcgaatactgcaggcagtcaatttcccatttttggtccggctagagtatgctttcaaggacaatagcaatctgtacatggttatggagtatgtgcctggaggagaaatgtttagccacctcaggcggatcggtagatttagcgaaccacacgctcgattttatgccgcacagattgtcttaacatttgaatatctacacagtttggatctgatctatcgtgacctgaaacccgagaacctcttaatcgatcaccagggatatattcaggtaacagacttcggatttgctaaacgtgtcaaaggcagaacctggactctttgcggcaccccagagtacttagctcctgagatcattttgtctaaaggatacaacaaggctgtcgattggtgggctctgggtgtgctgatctacgagatggccgcaggttacccacccttcttcgccgatcagcctattcagatctatgagaaaattgtaagcgggaaagttagatttccctcacactttagttctgacttgaaggacctcctgaggaacttgctccaggtcgatctcaccaagagattcggcaacctgaaaaatggagtgtcggatattaagactcataagtggtttgctactacagattggatcgctatctaccagcggaaggtcgaggcgccattcattcccaagttccggggaagtggggacacatcaaattttgatgattatgaggaggaggacattagagtgagcataaccgagaagtgcgctaaagaatttggggagttctag

SEQ ID NO: 236763 - DNA, 738 bp, synthetic construct
  misc_feature 1..738: note = Description of Artificial Sequence: Synthetic coding sequence
  source 1..738: mol_type = other DNA
atgggactactgaaagaattcctggccaaagcaaaagaagacttcttaaaaaagtgggaaaatccaacccagaataatgcagggttggaggactttgagaggaagaagacacttgggaccggatcctttggtagagtcatgctggtcaagcacaaagcgaccgaacaatactacgccatgaagattctggacaagcagaaggtggtgaagcttaaacagattgagcacaccctgaacgaaaaacgcatactgcaggcggtgaatttcccattcctggtgcgcttagaatacgccttcaaggacaattctaatctgtacatggtaatggagtacgtcccgggaggcgagatgttcagtcatttaagacggatcggccgtttcagcgagccccacgctcgtttttacgcggcacagattgtgttaacatttgagtatctccattccctggacctgatttaccgagatctaaagcctgagaacttgttgattgatcaccaaggctatatccaggtaactgatttcggcttcgcaaaaagggttaaaggtagaacgtggaccttgtgtgggacacctgagtaccttgctccggaaattatccttagcaaaggctataacaaggcggttgattggtgggctttgggagtgttgatctatgaaatggcggctgggtatccaccttttttcgctgaccaacccatccagatctatgagaagatcgttagcggcaaaaatttctag

SEQ ID NO: 236764 - DNA, 1197 bp, synthetic construct
  misc_feature 1..1197: note = Description of Artificial Sequence: Synthetic coding sequence
  source 1..1197: mol_type = other DNA
atggcagcttaccgcgagcctccctgcaatcaatatacaggaaccactaccgcgcttcagaagttggaggggttcgctagcaggctcttccatcgccattctaaaggcaccgctcacgaccagaagacagctctggaaaacgattccctccacttcagtgagcacactgctttgtgggatcggagcatgaaagaattcttagccaaggccaaagaggatttcctcaaaaaatgggagaatcctacccagaacaatgcagggcttgaagatttcgagagaaaaaagacactgggaactgggtcgtttgggagggtaatgctggtaaagcataaggctacagaacagtactacgccatgaaaatcctcgacaagcaaaaagtggtgaagctcaagcagattgaacacacactgaatgaaaagaggatccttcaggctgtgaatttcccattccttgtgcggctggaatatgcttttaaagataattcaaacttgtacatggttatggaatatgtccccggaggcgagatgttttctcacctgaggcgcataggcagatttagcgaacctcacgcgcgtttctacgcagcccagatagtattgacttttgaatacctgcactccctggacctcatataccgggatctgaaaccggagaatctgctcatagatcaccaaggatatattcaagttactgactttggtttcgctaaaagagtcaaaggtaggacctggactctatgcggaaccccggagtaccttgctcctgaaattatcttatccaaggggtacaataaagccgttgactggtgggccttgggtgtactgatctacgagatggctgctgggtaccctcctttctttgccgaccagcccattcagatctacgagaaaatcgtgtccggaaaggtccggttcccctctcatttttccagtgatttgaaggatttattgagaaatttgttgcaagtggatctaaccaagagatttggtaatctcaaaaacggcgtctctgatattaagacccacaaatggttcgcaaccaccgattggatcgccatctaccagagaaaggtggaggcccctttcatccctaagttccgtggtagcggggacacttctaatttcgatgattacgaagaggaggacattagagtttcaataactgagaagtgtgcaaaagagtttggggaattctag

SEQ ID NO: 236765 - DNA, 774 bp, synthetic construct
  misc_feature 1..774: note = Description of Artificial Sequence: Synthetic coding sequence
  source 1..774: mol_type = other DNA
atggggaatgctgctactgccaaaaagggttcagaggtcgaaagtgttaaggagtttctcgctaaggcaaaagaagacttcctgaagaaatgggagaacccaacacaaaacaacgcagggctggaggatttcgagcgcaagaagactttggggacggggtcctttgggagagtaatgcttgtgaagcacaaggccactgagcagtattacgcaatgaaaattctggataaacagaaggttgtgaaattaaagcagatcgagcacaccctgaatgagaagcggatactccaggcagtgaactttccttttctagtgcgtctcgagtatgcctttaaggataattccaatctgtatatggtcatggagtacgttccaggcggagaaatgtttagccatcttagaagaattggccgattcagcgaacctcatgctagattttacgccgctcagattgtgcttacttttgagtacctccatagccttgatcttatctaccgggatttgaagcccgagaacttgctcatcgaccatcaaggctacattcaggttacagattttgggttcgccaagcgggtcaagggcagaacatggaccctctgtggtaccccggaatatctggcgccagagattattttgagcaagggctacaacaaggcagtggactggtgggcattgggtgtactgatctacgaaatggcagccggatatccacctttctttgcggaccagcctattcaaatatatgagaagattgtgagcggtaagaacttttag

SEQ ID NO: 236766 - DNA, 1056 bp, synthetic construct
  misc_feature 1..1056: note = Description of Artificial Sequence: Synthetic coding sequence
  source 1..1056: mol_type = other DNA
atggggaacgcggcaaccgctaagaaagggtctgaagtggaatctgttaaggagttcctggccaaagctaaggaggactttctaaaaaaatgggagaatcccacccagaacaacgcaggactcgaggacttcgagagaaagaagacgctcggtactggttcgttcggacgggtaatgttggtgaagcataaggcaactgagcagtattacgccatgaaaatcctcgacaagcagaaggtggtgaaacttaagcaaatcgaacatacactgaacgagaaaagaatcctgcaagccgtgaattttcccttcctggtgaggctggaatatgccttcaaagataactctaacctgtatatggtgatggagtacgtgcctggcggtgagatgttttctcaccttcggaggattggacggttctccgagccacacgccaggttctacgcagctcagattgtgctgacctttgagtatctgcacagtctggatctcatctatcgggatctgaaaccagaaaatctgctgattgaccatcagggttatattcaggtgacggattttgggttcgccaagagggtaaaggggaggacatggacactctgcggcaccccagaatacctggcccctgagattatcttatccaagggttacaataaagccgtggactggtgggccctgggtgttctcatctacgaaatggctgcgggatatcccccatttttcgcggaccagcctatccaaatttatgaaaaaattgtctcaggtaaagtgaggtttccctcccacttttctagcgatctaaaggacttgctccgtaatttgctgcaggtggatcttaccaagagattcgggaacttgaagaacggggtaagcgatattaagactcacaaatggtttgccacaacagattggatcgcaatctatcagcggaaagtggaggcaccttttatcccaaagttccgtggttctggtgacacatccaacttcgatgattacgaagaagaggatatcagggtttcaatcactgaaaaatgcgctaaagagttcggcgagttttag

SEQ ID NO: 236767 - DNA, 1077 bp, synthetic construct
  misc_feature 1..1077: note = Description of Artificial Sequence: Synthetic coding sequence
  source 1..1077: mol_type = other DNA
atgggactgtctcgaaaatcttctgatgctagcgcatgctcatcctctgagatttcagattcattcgtaaaagagtttctggctaaggccaaagaggattttctgaagaagtgggagaatcccacacagaacaacgctggcctggaagattttgaaaggaaaaaaactctgggcacaggttcttttgggagggttatgttagtgaaacataaggccaccgagcagtactatgcgatgaagatactagacaagcagaaggtggtgaaactcaagcaaattgagcacacgctgaacgaaaagaggattcttcaggctgttaactttccctttctggtcaggctggagtatgccttcaaagacaactcaaatctctatatggtgatggagtatgttccgggtggagaaatgttctcccaccttagacggatcgggaggttctccgagccccacgccagattttatgcggcacagattgtgttgacattcgagtaccttcacagtctggatttaatatatcgggacctcaaacctgaaaaccttctgatcgatcatcagggatacatacaagtgaccgattttggatttgccaaaagagtaaaaggacgaacatggacactttgtggtactcccgaatacttggcccctgaaatcatcttgagtaagggatacaataaagccgtggactggtgggccttgggcgtgctgatctacgagatggctgctggataccccccattctttgctgaccagccaatacagatctacgagaagattgtctcgggcaaagtgcggttcccaagccattttagcagcgacctaaaggatctgctccggaacttattacaggtggacctcaccaaaaggtttggcaatctgaagaatggcgtgagcgatatcaaaacacataagtggtttgccactaccgactggatagccatctatcagcgaaaagtggaagccccatttataccgaaatttcgcggtagtggtgacacatcgaacttcgatgactacgaagaggaggacatccgagtgagcataacagaaaaatgcgccaaagagttcggcgagttttag

SEQ ID NO: 236768 - DNA, 966 bp, synthetic construct
  misc_feature 1..966: note = Description of Artificial Sequence: Synthetic coding sequence
  source 1..966: mol_type = other DNA
atgagtgctcgcaagagcagcgatgcaagtgcatgctcctctagcgagatatccgtgaaagagtttctggctaaagcgaaggaggattttctgaagaaatgggagaaccctacgcagaataatgcaggactggaggacttcgagcgcaagaagacattaggcacgggcagctttggaagggtcatgctcgtgaagcataaagccaccgagcaatactatgctatgaagatactggataagcaaaaagacaatagcaacctctatatggtaatggaatacgtgcctgggggagaaatgttcagccatctgcggagaattggtaggttcagtgaaccccatgcacggttctatgcagcgcagatcgtgttgacatttgagtaccttcatagtctggacctgatctacagagaccttaagcctgagaatctcttaattgatcaccaggggtatattcaggtcacagatttcggctttgccaagcgcgtaaaggggagaacttggaccctatgcgggacccccgaatatctggctcctgagattatcctgtccaaggggtacaacaaggccgtagactggtgggcgctgggcgttctgatttacgagatggctgctggctacccaccattttttgctgatcaaccaattcagatatatgaaaaaatagtatcaggcaaggtgcgcttcccttcccacttcagctccgaccttaaggacctgcttagaaacctgctccaggtagatctgaccaaaaggtttgggaatctcaaaaacggagtgagcgatataaagacgcataagtggttcgccacaaccgactggatcgcaatctaccagcggaaagtggaggccccatttattccaaagtttcgcggatccggcgatacctcgaattttgatgactatgaggaggaggatattcgtgtgagcatcacggagaaatgcgctaaggagttcggggaattctag

SEQ ID NO: 236769 - DNA, 630 bp, synthetic construct
  misc_feature 1..630: note = Description of Artificial Sequence: Synthetic coding sequence
  source 1..630: mol_type = other DNA
atgtctgcctgttcaagtagcgaaatctcagtcaaggaattcctcgctaaagccaaagaagattttctgaagaaatgggagaacccaactcagaacaacgctggactcgaagatttcgaaaggaagaaaaccctgggcactggctcatttgggcgtgtgatgttggttaaacataaggcaaccgagcaatactacgctatgaaaatcctggataagcaaaaagttgtaaaattaaagcaaatcgaacacaccctgaatgaaaagaggatcctgcaagcagtgaatttcccattcttagtccgcttagaatacgctttcaaggacaactccaatctgtacatggtcatggagtacgtcccgggaggagagatgttttcccacttgcgacgcattggtcggttctccgaacctcacgctcgattttacgcggcacagatagtcctaacgtttgaatacctccactccctagacttaatctatcgtgatttgaagcccgaaaaccttcttatcgatcatcagggatatatacaggtgaccgacttcggatttgcaaagcgagtgaaaggtagaacttggaccctgtgcgggacccccgaatacttggctcctgagataatcttgtcaaagtag

SEQ ID NO: 236770 - DNA, 594 bp, synthetic construct
  misc_feature 1..594: note = Description of Artificial Sequence: Synthetic coding sequence
  source 1..594: mol_type = other DNA
atgagtgtcaaggagttccttgcaaaggctaaagaggacttcttaaagaagtgggagaaccctacgcagaataatgctgggctggaagactttgagcgcaaaaagaccttaggcactggctcctttggtagggtgatgctggtgaagcataaggcgacggagcagtattatgctatgaaaattctcgacaaacaaaaagttgtgaagctgaagcaaatagaacacacccttaacgagaagagaattctccaagccgtaaatttcccctttctggtccggctcgaatacgccttcaaggacaacagtaatctgtatatggttatggagtatgtgccaggaggggaaatgttttcccatctacgacgcatcgggagattttctgaaccccacgctcggttctacgccgcacagattgtactaacatttgagtacctccacagcttggacttgatttatagggacttgaaacctgagaatctgcttattgatcaccagggctacatccaagttacagatttcggttttgcaaagagggtcaagggtcgcacctggacactatgtggcactcccgagtacttggcaccagaaatttag

SEQ ID NO: 236771 - DNA, 645 bp, synthetic construct
  misc_feature 1..645: note = Description of Artificial Sequence: Synthetic coding sequence
  source 1..645: mol_type = other DNA
atgggtctaagctgcagttcgtcagagatctccgtcaaagagtttcttgccaaggccaaggaggattttttgaaaaaatgggagaaccccacccaaaataatgccggtcttgaagactttgaacggaagaaaacacttgggactggtagtttcggcagagtgatgctggtgaagcacaaggccacagagcagtactacgccatgaagattctggacaaacagaaggtagtgaagttaaagcaaatcgaacatacgctgaacgagaagcgcatcttacaggccgtaaactttccttttctcgtgagactagaatacgcttttaaagacaactccaacttgtatatggttatggaatacgtcccgggaggcgaaatgttttcgcacctgaggagaatcgggagattcagcgaaccccatgctcgcttctacgctgcacagatagttctgacattcgagtacctgcatagcctcgatctgatttaccgggatttgaaacccgaaaatctgcttattgaccaccagggatatattcaggtaactgacttcgggttcgccaagagggtgaaaggcagaacctggactttatgtggaacacccgagtatctggctcctgaaatcattctgagcaagggatacaataagtag

SEQ ID NO: 236772 - DNA, 561 bp, synthetic construct
  misc_feature 1..561: note = Description of Artificial Sequence: Synthetic coding sequence
  source 1..561: mol_type = other DNA
atgggactctcccgcaagtcctccgatgccagcgcatgctctagctcggagataagtgtcaaggaatttttggcaaaggccaaagaagatttcctcaagaaatgggaaaaccctactcaaaataatgcaggcctcgaggatttcgagcgcaagaagactctggggaccggatcatttggcagagtgatgttggttaagcacaaggcaacggaacagtattatgccatgaaaattctggacaaacagaaagtagtcaagctaaaacagattgagcataccctgaacgaaaagcgaatactgcaggcagtgaatttcccttttctggtgaggctggaatacgcatttaaggataatagcaacttatatatggtcatggagtacgtgccaggaggagaaatgttctcccacctccgccgtatcgggcgtttctcagaaccccacgccagattttacgctgcgcagatcgtgctgacctttgagtatctgcactctcttgatctgatttaccgagacctcaagccagagaacttactgattgatcaccagggctacatccagtag

SEQ ID NO: 236773 - DNA, 528 bp, synthetic construct
  misc_feature 1..528: note = Description of Artificial Sequence: Synthetic coding sequence
  source 1..528: mol_type = other DNA
atggggttaagtagaaagagctcggatgcgtctgcctgcagcagttctgagatttccgatagcttcgtaaaagagtttctggccaaggccaaagaggattttttgaagaagtgggaaaatccaactcaaaacaatgcaggcctcgaagattttgagcgcaaaaagacgctcggtaccggctcatttggacgggttatgttggtaaaacacaaggctacagagcagtactatgcgatgaagatcctcgacaagcagaaggtggttaagctgaaacagattgagcatacgctgaatgagaaaaggatactgcaggcagtgaatttcccattcctcgttagactggagtacgcctttaaagataattccaacttgtatatggtgatggagtatgtcccaggcggagagatgtttagccatcttagacggataggcaggtttagcgagcctcacgcccgtttttatgccgcacagattgtgctaacgtttgaatacctacattcactggatctcatctaccgcgatttatag

SEQ ID NO: 236774 - DNA, 621 bp, synthetic construct
  misc_feature 1..621: note = Description of Artificial Sequence: Synthetic coding sequence
  source 1..621: mol_type = other DNA
atgtccgcgagaaagagctcggacgcatctgcgtgttcttcctccgaaatctccgtcaaggagtttttggccaaggcgaaagaggattttcttaagaaatgggaaaatcccacacagaacaacgctggacttgaagacttcgagcgtaagaagaccttagggacaggttccttcgggcgagttatgctagttaagcataaggctacggagcagtactacgccatgaaaattcttgataagcagaaggtggtgaaacttaaacagatcgaacatacactgaacgagaaaaggatcttacaggccgtgaattttccctttctggtgaggctcgagtacgcctttaaggacaactctaatttgtatatggtcatggaatacgtgccaggaggggaaatgttcagccatctcaggagaattgggagattcagcgagcctcacgcacgcttttatgccgctcagattgtccttactttcgagtatctgcattccctcgatctgatttacagagatctaaaacctgaaaatctgctcatagatcatcagggatatatccaggttactgatttcggcttcgcaaagagagttaaaggtaggacctggaccctctgtggcactccgtag

SEQ ID NO: 236775 - DNA, 1056 bp, synthetic construct
  misc_feature 1..1056: note = Description of Artificial Sequence: Synthetic coding sequence
  source 1..1056: mol_type = other DNA
atgggcaatgcgcctgccaagaaggacaccgagcaggaagagtccgtgaacgagttcctggccaaagcccgaggggactttctttaccggtggggtaatcccgcacaaaacactgcgtcttccgaccagttcgaaagattgaggaccttgggcatgggcagtttcggcagggtgatgctggttcgacaccaggaaaccggcggacattacgcgatgaagatcctcaacaagcagaaggtggtcaaaatgaaacaagtggagcacattcttaatgagaagcgaattttgcaggctatcgacttcccatttctcgtgaaacttcagttcagtttcaaagataactcttacttgtacctagtgatggagtacgtaccaggaggtgagatgttctcacgcctgcagagagtaggacgcttttctgaaccccatgcatgcttttatgctgcacaggtcgtgctcgcagtgcaatacctccacagtctggatcttattcacagggatttaaagcccgaaaacctgttgatagaccagcaggggtatctgcaggttacggacttcggcttcgccaagagagtgaaggggagaacctggactctttgtgggacccccgagtacctcgcaccagaaattattcttagcaaggggtataataaggcagtagactggtgggccttgggtgtgctgatttatgaaatggcagtgggctttccgcctttctacgccgaccagcccatccaaatttatgaaaagattgtgagcggtcgggttaggttcccaagtaagttatcttcggatttgaagcatctcctgagatctcttcttcaggtggatctcactaagcggttcggcaacctaagaaatggcgttggcgacatcaagaatcacaaatggttcgctaccacatcttggatcgcaatttacgagaagaaggtcgaggcccctttcatcccaaaatacacgggccctggcgacgcttcgaattttgatgactacgaagaggaggaactgcgaatctccattaatgagaagtgtgcgaaagagttctcagaattctag

SEQ ID NO: 236776 - DNA, 1146 bp, synthetic construct
  misc_feature 1..1146: note = Description of Artificial Sequence: Synthetic coding sequence
  source 1..1146: mol_type = other DNA
atggaatccggaagtacagcggcttccgaagaagctaggtctctcagggagtgcgaactttacgtccagaaacataatatccaggccctactaaaagacagtattgtgcagctctgcaccgcacggcctgaacgcccaatggccttcttacgagagtattttgagagattggaaaaagaagaagcaaagcagatacaaaaccttcagaaagcaggcacgagaactgactctcgggaggatgagatttccccgcctccacctaatcctgtggtaaaaggccgaaggcgcagaggagctatctccgcagaagtatacaccgaggaagacgccgcaagttatgtcaggaaggtgatccctaaagattacaaaaccatggccgctctagccaaggccatcgagaagaacgtcctcttttcccacttggacgataatgagagaagtgatatcttcgacgccatgttctcagtgagcttcattgccggtgaaacagtgatccaacaaggcgacgagggcgataacttctacgtgatagaccagggtgaaactgacgtctatgttaataatgagtgggctacctccgttggtgaagggggatcatttggagaattggccctaatctatggtacccctagggccgcaacagttaaggcaaagactaacgttaagctctggggaattgaccgagattcttatcggaggatcttaatgggatctactctgaggaagcgcaaaatgtacgaggagttcctgtccaaagtttcgattctggaaagccttgacaaatgggagagactgaccgtggcggacgcactggaaccggtgcagttcgaagatgggcagaaaattgtggtgcagggagaaccgggagacgagttctttattatactcgaaggcagcgccgctgtgcttcaacgcagatctgaaaacgaggaatttgtggaggttggcaggctgggcccaagtgactacttcggcgagatcgcactgctgatgaacaggccacgagcggctacggtggtcgctcggggacctctcaagtgtgtgaaactggacaggcctaggtttgagagggtcctgggaccatgcagcgacattctgaagcgcaatatccagcaatataacagctttgtgtcattgtcggtgtag

SEQ ID NO: 236777 - DNA, 1146 bp, synthetic construct
  misc_feature 1..1146: note = Description of Artificial Sequence: Synthetic coding sequence
  source 1..1146: mol_type = other DNA
atggaaagcggctccacagctgccagcgaggaggccaggtctctgagggagtgtgagttgtatgtgcagaagcacaacattcaagcactgcttaaggactctatcgtgcagttgtgcactgccaggccagaaaggcctatggctttcctcagggagtatttcgagcggctggagaaggaggaagcaaagcagattcaaaacctacagaaggctggaacacgcactgacagtagagaagacgagatctccccccctccaccaaatccggtcgtgaaggggaggaggaggaggggcgcaattagtgctgaggtttacaccgaagaggacgccgcaagctacgtgcgcaaagtgatacctaaagattacaagactatggccgctcttgcaaaagctattgagaaaaacgtacttttcagccaccttgatgataatgaaagaagcgacattttcgacgctatgttttcagtgtcgttcattgccggagagaccgtgatacagcagggcgatgaaggggacaatttctacgtgattgatcagggggagaccgatgtttacgtaaacaacgagtgggctactagcgtaggtgaggggggaagcttcggcgaactggcactgatatacggcacaccacgcgctgcgacggttaaagcgaagactaacgttaaactgtgggggatagatcgcgacagctatcggagaattctcatggggtcgactctcaggaagagaaagatgtatgaggagtttctgagtaaggtgagtatcctggagtcactggataaatgggagagactcacagtggccgacgccttggaacctgtgcagttcgaagatggtcagaagattgtggtgcagggagagcctggcgacgaattttttatcatcctggagggctccgccgctgtcctccagagacgcagtgaaaatgaggaattcgtggaggttggcaggttggggccatccgactatttcggagagattgccttattaatgaatcggccaagggcagccacagtagtggcgagagggcctttgaaatgtgtcaaactagatcgtcccaggttcgaacgggtgctgggcccatgctcagatattctcaagaggaatatacaacaatataactcgttcgtgagtcttagtgtgtag

SEQ ID NO: 236778 - DNA, 1146 bp, synthetic construct
  misc_feature 1..1146: note = Description of Artificial Sequence: Synthetic coding sequence
  source 1..1146: mol_type = other DNA
atggaaagcggctcaacggcggcatcagaggaagccaggagtctgcgggaatgcgagctgtacgttcagaagcacaatatccaggcattgttaaaggactccattgttcagttatgcactgctcgcccagagcggcctatggcctttcttcgcgagtacttcgagagactggagaaggaagaagccaagcagatccagaatctccaaaaagccggtacccggactgatagcagagaagacgaaatatcccccccacccccaaacccggtcgttaaaggcaggagacgcagaggggcaattagtgcggaggtctacacagaagaggacgccgctagctacgtgcgtaaagttatcccaaaggactacaaaacaatggctgctctggctaaggccatagaaaaaaatgtgctgttttcacatctggacgataatgaacgaagcgacatcttcgatgcaatgttcagcgtctcctttatcgccggtgagacagtcatccagcagggtgatgagggtgataacttctacgtaatcgatcaaggcgagaccgacgtgtacgtgaacaatgaatgggcaacatctgtgggggaaggcggatctttcggcgaacttgcactgatttacggaactcccagggctgctacagtaaaggccaagactaatgtcaaactctgggggatcgacagagattcctacaggaggattctcatggggagcaccttgagaaagcggaagatgtatgaggaattcctcagtaaggtctctatcctcgaaagccttgacaaatgggaacgtctgaccgttgcagacgcactggagcctgttcagttcgaagatggccagaagatcgtggttcagggggaacccggtgacgaattctttattattttggaggggtctgcggcagtactgcagcggagaagtgagaacgaggaatttgttgaggtgggaagattggggccatctgattactttggggagatcgccctgctgatgaacagacccagagccgcaacggtggtcgcgagaggtcctctgaagtgtgttaagctggatagaccccgtttcgaaagggtcctgggcccatgcagcgatattctgaagaggaacatccaacagtataacagcttcgtgtccctgagcgtgtag

SEQ ID NO: 236779 - DNA, 1146 bp, synthetic construct
  misc_feature 1..1146: note = Description of Artificial Sequence: Synthetic coding sequence
  source 1..1146: mol_type = other DNA
atggagagtggttcgaccgctgccagcgaagaggctcggagtctaagggaatgtgagctgtacgtccagaagcacaatatacaggctctgctgaaggatagcatagtacagctatgtactgctagaccagaacgacctatggccttcctgagagagtactttgagagattggaaaaagaagaggcaaagcagattcagaatttacaaaaggcaggaacccgcacggattctagggaggatgaaatttctccaccccctcccaatcccgtggttaaggggaggcggaggagaggagccatctcagctgaagtgtatacagaggaggacgctgcatcctatgtgcggaaggtcattccgaaggattacaagaccatggcggcactagccaaagcaattgagaaaaacgtactcttctctcacttggatgacaatgagaggagcgacatctttgacgcaatgttttcggtcagcttcatagcgggagagactgttatccaacagggcgatgaaggcgataatttttatgtaattgatcaaggagagaccgacgtttatgtgaataacgagtgggcaacatcagtcggtgagggcggttctttcggagagctggctcttatttacgggaccccgagggcagctaccgtgaaagccaaaacaaatgtgaagttgtggggaatcgaccgggacagttacaggcgaatcctcatgggcagtacactgagaaagaggaagatgtacgaagagttcctttccaaggtgagtatattggaatcactcgataaatgggaaagactgaccgtcgctgatgccctggagcccgttcaatttgaagatggacaaaagatcgtagttcagggggaacctggggacgagtttttcattatcttagaagggagcgcagccgtcctgcagcgtagatccgagaacgaagagttcgtggaggtcgggagactgggaccctcagattattttggagagatcgcactgctgatgaatcgtcccagagccgctacggtggtcgcacggggtccactgaagtgcgtgaagctggacagaccacgctttgaaagggttctgggaccatgttcagacattctcaaacgcaacattcagcaatataacagctttgtgagcctctctgtgtag

SEQ ID NO: 236780 - DNA, 243 bp, synthetic construct
  misc_feature 1..243: note = Description of Artificial Sequence: Synthetic coding sequence
  source 1..243: mol_type = other DNA
atgggctctacccttaggaaaaggaaaatgtatgaggagtttctttccaaggtgtccatcctggagtccctggaaaagtgggagcgattaaccgtggcagatgcactggagcctgtccagttcgaagatggcgagaaaatcgtcgtgcaaggcgagccgggtgatgacttctacatcatcactgagaagaacctgccaggcgtggttgcccacgcatgtaatccgtcttacctgggaggatag

SEQ ID NO: 236781 - DNA, 1146 bp, synthetic construct
  misc_feature 1..1146: note = Description of Artificial Sequence: Synthetic coding sequence
  source 1..1146: mol_type = other DNA
atggcttcaccaccggcatgtccaagcgaagaagacgagagtctgaaggggtgcgagctttatgtacagttgcacgggatacagcaggtactcaaggactgtattgtgcatctgtgcatttctaagcctgagcggcctatgaagtttctgcgcgagcacttcgagaagctggagaaggaagaaaacagacagattttggctagacagaagtctaattcccagtctgattcgcatgacgaagaggtgagtccgactcctcctaacccagtggtgaaggcgcgaaggaggcggggaggcgtgtccgctgaagtttataccgaggaagatgcagtcagctatgttcgcaaagtcatcccaaaggactacaaaactatgacagccctagctaaagcgattagcaagaatgtccttttcgctcacttagatgacaatgagaggagcgacattttcgacgccatgtttcccgttacacacattgccggagaaacagtgatccaacaggggaatgagggggacaatttctacgtggttgaccagggagaggtggacgtgtacgtgaatggtgaatgggtgactaacatttctgagggcggatcttttggagaacttgccttgatctacggaacgcccagggccgctacggtaaaggcgaagacagacctcaaactgtgggggatcgatagagactcataccggaggatcttaatggggtcaacactgcggaaacgtaagatgtatgaagaattcctgtcaaaagtgagtatccttgagtctctggagaagtgggaacgccttaccgtggcggacgcgttggagcccgtgcagttcgaagatggtgagaagatcgtggtccaaggagaaccaggcgacgacttttacattattacagaaggaactgcttccgtgctgcagagaaggagcccaaacgaagagtatgtggaggtcgggagattaggtccttccgactattttggcgaaatcgccctgctcctgaaccgaccacgagcggctaccgtagtggctaggggccctctgaagtgtgttaagttggaccggccacgcttcgaacgtgttctgggaccgtgctctgaaatactgaagcgcaacatccagcggtataattcatttatctctttgacggtgtag

SEQ ID NO: 236782 - DNA, 1146 bp, synthetic construct
  misc_feature 1..1146: note = Description of Artificial Sequence: Synthetic coding sequence
  source 1..1146: mol_type = other DNA
atggcatccccccctgcgtgcccttccgaagaggatgagagcctcaaaggctgtgaactttatgtgcagctgcacggaattcagcaggttttaaaggactgcatagtgcatctttgtatctcaaaaccggagcgcccaatgaagtttctgagggaacactttgagaagctggaaaaggaagagaaccggcaaatcttggcacggcagaaatccaatagccaaagcgacagtcacgatgaagaggtgagcccgactcctccaaacccagtagtgaaggccagaagaagaaggggtggagtcagcgcagaggtctatactgaggaggatgctgtgagttacgttaggaaggtgatacccaaagattataagacgatgaccgcccttgccaaggcaatcagcaaaaatgtactctttgcccatttagatgacaacgagagaagtgacattttcgacgccatgttccctgtcacgcatattgcaggcgagacagtgattcaacagggtaatgagggcgacaatttttacgtggttgatcaaggggaggtggatgtgtatgtgaacggagagtgggtgacaaacatttccgagggcggaagctttggcgaactggccctcatatacgggacaccacgcgctgcaaccgtgaaggcaaaaactgatctgaagctttggggcatcgaccgcgacagctatagacgaattttgatggggtccaccctgcgaaagagaaaaatgtatgaagagtttttgtctaaggtcagcatcctcgagagcttggagaagtgggagcgcttgacggtggccgatgccctcgaaccagtgcagttcgaggatggtgaaaagatagtagtgcaaggagaaccaggggatgatttttatattattactgaaggtaccgcctctgtccttcagcgcaggagccctaacgaagaatacgtggaagtgggtcggttgggacctagcgactatttcggcgagattgctctgctactgaatcgcccacgggcagctacggtggtcgccagggggcctttgaagtgcgtgaaactggaccgtccgagattcgaaagagtcctggggccatgttctgagattttaaaacggaacattcaacgatataactccttcatctctctgacagtctag

SEQ ID NO: 236783 - DNA, 1146 bp, synthetic construct
  misc_feature 1..1146: note = Description of Artificial Sequence: Synthetic coding sequence
  source 1..1146: mol_type = other DNA
atggcatcacccccagcttgcccctctgaggaagacgagtctctcaaaggctgtgaactctacgtgcaattacacggcatacaacaggttctgaaagactgcatcgtccacctgtgtatctctaaacctgagagacctatgaaatttttacgggagcatttcgaaaagcttgagaaagaagagaacagacagatccttgccaggcagaaaagcaattctcagagcgattcccacgacgaggaggtgagcccgacaccccctaaccccgtcgtaaaggccaggcggaggcggggaggcgtgagcgctgaagtgtataccgaagaagacgcagtaagttacgtaagaaaggtcatccctaaggattataaaacaatgaccgccctcgcaaaggcgatctctaagaatgtactgttcgcacacctcgatgacaacgaaaggagcgatatctttgatgccatgttcccggtgacccacatcgccggtgaaacggtgatccaacagggcaacgaaggcgacaatttctatgtcgtagatcaaggtgaggtcgacgtctacgtgaatggggaatgggtcacaaatatcagcgaggggggaagttttggagaattagctcttatttacggaacccctagggccgcaaccgtaaaggctaagacagatctaaaactatggggaatcgatcgggatagttacagacgaatcctcatgggcagcaccctgcgaaagaggaaaatgtacgaggaatttcttagtaaggtttctatcctggaatctctggagaagtgggaacggctgaccgtggccgacgccctggagcccgttcaattcgaggacggtgagaaaattgtcgttcagggagaacccggtgatgatttttatataattacagaaggtaccgcaagcgtgctgcagcgaaggtcccctaacgaagaatatgttgaagtcgggcgtctgggcccttcagattactttggtgagatcgccctgctactgaacagaccgcgtgcagccaccgttgtagctagaggtccactaaagtgtgtgaaactggaccggcctcgatttgagcgcgtgctcggcccttgcagtgagattctgaaacggaatattcaaagatacaatagctttataagcttaaccgtctag

SEQ ID NO: 236784 - DNA, 498 bp, synthetic construct
  misc_feature 1..498: note = Description of Artificial Sequence: Synthetic coding sequence
  source 1..498: mol_type = other DNA
atggcctcaccaccagcttgtccgtccgaggaggatgaatctttgaaaggatgcgagctgtatgtgcagctgcacggcatccaacaggtacttaaggattgcattgttcacttgtgcatctccaaacctgaacgccctatgaaatttctacgagaacacttcgagaaactggagaaagaggaaaatcgccagatcctcgccaggcagaagtcaaattcacagtccgacagtcatgacgaggaggtgtctcccacaccgccaaaccccgttgttaaggctaggcgcaggagggggggagttagtgcagaggtttatactgaagaagacgccgtctcttatgtgcgcaaagttattccaaaggattataaaaccatgacagccttggcgaaggccatcagcaaaaacgtgctctttgctcacctggacgataacgagcggtccgacatatttgatgcaatgtttcccgtcacacacatcgccggagaaacggtgatttag

SEQ ID NO: 236785 - DNA, 894 bp, synthetic construct
  misc_feature 1..894: note = Description of Artificial Sequence: Synthetic coding sequence
  source 1..894: mol_type = other DNA
atggctagccctcctgcctgcccttcagaggaggacgagtccctgaaggggtgcgagctatatgtccaactgcacggtatccagcaggtcctgaaagactgtatcgtgcacctgtgcatctccaaacccgagagacctatgaaattcctgagagaacatttcgagaagttagagaaggaggaaaacagacaaatcctagctcgtcagaagtccaactctcagagtgatagtcacgacgaagaggtatcaccaacgccgcctaaccctgtggtcaaggctcggaggcggaggggtggcgtctctgccgaggtctacaccgaagaagacgctgtttcttatgtccgcaaggtgatcccgaaggactacaaaaccatgacagcactggccaaggctatatccaaaaacgtacttttcgcccacctggacgataacgagcgttcagacatcttcgatgccatgtttcctgttacacatattgccggagagacagtgattcagcagggcaacgagggtgacaacttttatgtggtagatcagggtgaagttgatgtttacgtgaacggagagtgggtcactaacatcagtgaagggggatccttcggtgagctggcactgatttatggaacacctcgggctgcgactgtcaaggctaaaacggacctcaaactctgggggatagatcgcgatagttacagacggatccttatgggtagcaccctcagaaaaaggaagatgtacgaagaatttctatctaaggtgtcaatactggaaagcctggaaaaatgggaacgactgaccgtcgccgacgcactggaacccgtgcagttcgaagatggcgagaaaatcgtggtgcagggggaacccggagatgatttttacatcattaccgaatag

SEQ ID NO: 236786 - DNA, 177 bp, synthetic construct
  misc_feature 1..177: note = Description of Artificial Sequence: Synthetic coding sequence
  source 1..177: mol_type = other DNA
atggccagccccccagcttgcccaagcgaggaggacgaatcattgaagggatgcgagttgtacgtccagctccatggaatccagcaggtgcttaaggactgcatagtgcacctgtgcatctcgaaacccgaacggcctatgaagtttctccgcgagcatttcgagaagctggagtag

SEQ ID NO: 236787 - DNA, 1146 bp, synthetic construct
  misc_feature 1..1146: note = Description of Artificial Sequence: Synthetic coding sequence
  source 1..1146: mol_type = other DNA
atggccagtccgccagcctgcccctccgaagaggacgaaagcttgaagggctgcgaattgtacgtgcagcttcatggaattcaacaggtgctgaaggattgcattgttcacctgtgcatctcaaaaccagaaaggcccatgaagtttctccgggagcactttgaaaagcttgagaaggaagaaaaccgtcagatcctggctcggcagaaaagcaattcccagtccgactcgcatgacgaggaggtgagtcctacaccccctaaccccgttgtcaaagctcggaggcggcgtggtggggtttccgccgaagtctatacggaagaggatgctgtgtcctacgtacggaaagtcattcctaaggactataaaactatgacagcgttggcaaaggcaattagcaagaatgtgctctttgcccatctggatgacaatgagcgctcagatatcttcgacgctatgttcccagtgacccacatcgccggagagacagtcatccagcaggggaatgagggtgacaatttctatgtggtggaccagggggaagtggatgtgtacgtcaacggagaatgggtgactaatatcagcgagggcggatctttcggcgagctggccctaatctacggaaccccacgggctgccacggtgaaggccaaaaccgacctgaaactttggggaatcgatcgagactcctatagacgtatcctgatgggttccacattacgaaaacgcaaaatgtatgaagagttcctgtccaaggtaagtatcctggagagcctcgagaagtgggaacggctgacggtggcggacgctctcgagcccgtgcagtttgaagatggagagaaaatcgttgtccagggcgagccaggcgatgatttttatattatcaccgaaggtacagcctccgtgcttcaaaggcgctcgccaaacgaggaatacgtcgaagtgggaagattgggcccatccgactatttcggagagattgccttactgctgaataggccgagggccgcaactgtggtggccagaggacctctcaaatgtgtgaaattagatcggccacggttcgagcgcgtgctgggcccatgttctgagattctgaagagaaatatccaaagatataactccttcattagtctgaccgtttag

SEQ ID NO: 236788 - DNA, 1146 bp, synthetic construct
  misc_feature 1..1146: note = Description of Artificial Sequence: Synthetic coding sequence
  source 1..1146: mol_type = other DNA
atggcaagtcctcccgcatgccccagtgaagaggacgaatccttgaagggttgtgaactgtatgtgcaacttcacgggatccagcaggtactgaaagactgtatcgtccatctttgtattagcaagcctgagaggcccatgaaatttctaagagagcattttgagaagctagaaaaagaggagaataggcagatccttgccaggcaaaagagcaactcgcagtccgactcccacgatgaagaggtgagccccacccctcctaaccccgtggtcaaagcacgacgtcggcgtggcggagtatctgctgaagtgtacactgaagaagatgccgtctcctatgtgcgcaaggtaattcctaaggactataagactatgacggcactagcgaaagccattagcaaaaacgttctgttcgcccacctggacgataacgaacgtagtgatattttcgacgccatgtttcctgtcacccatatcgccggagaaacggttattcagcagggcaacgaaggagataatttctacgtcgtggaccagggggaagtcgatgtctatgtgaacggcgaatgggtaacaaacatcagtgaagggggatcctttggcgaactggcactcatctatggaaccccaagggccgcaaccgtgaaagccaagaccgacctgaaactctggggcatcgaccgggactcataccgcaggatcctgatgggtagcactctgcggaagcgcaaaatgtatgaggagtttctgtctaaagtatctatcctggagagtttggagaaatgggaaaggctgacagttgccgatgcgttagagcccgtccaatttgaagatggggagaaaattgtggtgcagggagagccaggtgacgacttttacatcattaccgaggggactgccagcgtcctgcagcgccgatccccaaatgaggaatatgtggaagtcggacgactggggccatctgactacttcggagaaatagctctactgttgaaccggccaagagccgcaacagtggtggctagaggacctttaaagtgtgtcaaactggatcgtccacggttcgagcgggtcttaggcccttgttcagagatcttgaaacgaaacatccagcggtacaacagcttcatctccctcaccgtctag

SEQ ID NO: 236789 - DNA, 1215 bp, synthetic construct
  misc_feature 1..1215: note = Description of Artificial Sequence: Synthetic coding sequence
  source 1..1215: mol_type = other DNA
atgtctcacatacagattcccccagggctgacagaactcctgcaaggctataccgtggaagtgcttcgccagcagcctcccgacttagttgaattcgctgtcgagtacttcacaaggctacgcgaggccagagcgccagcttccgttctcccagccgcaacccccaggcagtccttgggccatccaccgccagagccaggtcccgatcgagttgcggacgctaagggagactctgagtccgaagaggatgaggacctcgaggtgccagtgccttctaggttcaatcgccgagtcagtgtatgtgcggagacatacaaccctgatgaagaggaggaggatacagatccgagggtgatacaccccaaaacggacgagcaacgctgtcggttgcaagaggcttgtaaagatattttgctctttaaaaacctggaccaagaacagctgagccaggtccttgatgccatgtttgaacgtatagtaaaggctgatgaacatgtaatagatcagggggacgacggcgataatttttacgtgattgagcgagggacatacgacattttggtgacgaaggacaaccagactcgatctgttggacaatacgacaacagaggaagcttcggagagctggccttaatgtacaatacccccagagctgcaactatagtggccacttctgaaggtagcctatgggggttggatcgggttaccttccgcagaataattgttaagaacaacgcgaaaaagagaaaaatgttcgagtctttcatcgagagcgtgcccctgctcaaatctcttgaagtctccgagagaatgaagatcgtggatgtaataggggaaaagatctataaagatggggagagaataattacacagggtgagaaggctgattccttttacatcatcgagtctggggaggtctctatccttatcagaagccggacaaagagcaataaagatggcggtaatcaagaagtcgagattgcaagatgtcataagggtcagtattttggtgagttagcccttgtcactaacaagccaagggccgcaagcgcttacgctgtgggcgatgtcaagtgcctggttatggacgttcaggcatttgagaggctgctcggaccctgcatggatattatgaaaaggaacatttcccattatgaggaacagctggtgaaaatgttcggttcttccgtagacctgggaaatttggggcagtag

SEQ ID NO: 236790 - DNA, 1149 bp, synthetic construct
  misc_feature 1..1149: note = Description of Artificial Sequence: Synthetic coding sequence
  source 1..1149: mol_type = other DNA
atgtctcatatccagatcccaccgggtctgacagagctcctgcaggggtacactgttgaggttctccgacaacagccacctgacctggtggagttcgcagtagaatacttcacacgcctgcgggaggcacgcgctcctgcgtccgtgttaccagctgccacgccaaggcagtctttgggccatccccctcctgaaccaggaccagatagagtggctgatgccaaaggagactcagaatccgaggaggatgaagacctggaagtacccgtgccctcacgcttcaacaggagggtgtcagtctgtgccgagacatataacccggacgaggaggaagaagacacagatccaagggtgatccatccgaagaccgatgagcagcgatgccgcttacaggaggcatgcaaagacattctccttttcaaaaacctcgaccaagagcagctgtcacaggtcctggatgcaatgttcgagcggatcgtgaaggccgacgagcacgttattgaccagggcgacgacggcgacaatttttacgtaatcgagagagggacatacgacattttagtcacaaaggataaccagacgcgatctgtcggccagtacgataacaggggcagcttcggcgagctggctctgatgtataacactcccagggctgccaccatcgtcgcaacttccgaaggcagcctgtggggccttgatagagttacatttcgcaggatcattgtgaaaaataacgccaaaaaacgcaagatgtttgagagcttcatcgagtccgtacctctgctgaagagcttggaggtatccgaacgcatgaagattgtcgacgtcatcggtgagaagatctacaaagacggtgagcgaatcatcacccagaccaagtcgaataaggatggaggcaaccaagaggtcgagatcgccaggtgccacaaggggcaatactttggtgagcttgcgctggtcacaaataagccaagggcagcgtcagcgtatgctgtaggggatgtgaagtgcttggtcatggatgtccaggccttcgagcgtctgttggggccttgtatggatattatgaagaggaacatcagccactacgaggagcagctcgttaaaatgtttgggagctctgtggacctggggaatctgggacagtag

SEQ ID NO: 236791 - DNA, 1215 bp, synthetic construct
  misc_feature 1..1215: note = Description of Artificial Sequence: Synthetic coding sequence
  source 1..1215: mol_type = other DNA
atgtcccacatccaaataccacctggcttgaccgagctcctacagggttacactgtggaagttctgcgtcagcaacctccagatttagtggagtttgcagtcgagtactttactcggctcagagaggccagagccccagccagcgttctgcctgccgcaactccgagacagtctctgggccatcccccacccgaacccggacccgaccgggtagccgatgctaaaggagactctgaaagcgaggaagacgaagacctggaggtccccgtccccagcaggtttaacagacgcgtctcagtgtgcgccgagacctacaatccagacgaggaggaggaagacactgaccctagggtgatccatccaaagaccgatgagcagcgctgccggctgcaggaggcctgtaaggatattttgctcttcaagaacctcgaccaggaacagttatcacaagtcctcgacgccatgttcgaacggatcgtgaaagccgacgaacatgtgatcgatcaaggcgatgacggcgacaatttctacgtgatcgagagaggtacctatgatatactggtgaccaaagataaccagactcgctctgtcggccaatacgacaatagggggagctttggagaactcgctctcatgtataacacccctcgcgcagcaaccattgttgccactagcgaggggagcctgtgggggttggaccgggtgacctttaggaggattattgtgaaaaataacgcgaaaaagagaaaaatgtttgagagctttatcgagagtgtccccctgctgaagtctctggaagtgtcagaacggatgaagatcgtggacgtgattggcgagaaaatttacaaggatggagagcgaatcataacacaaggagagaaagccgacagtttttatatcattgagtccggcgaggtgtccattctgatcaggagtagaaccaagtctaataaagacggcggaaaccaagaagtggagatcgccagatgccataagggccaatatttcggagaactggcattggtgaccaacaaacctcgtgccgcatctgcctacgccgtaggcgacgtaaagtgccttgtgatggacgttcaagcattcgaaaggctgctgggcccttgcatggatatcatgaaaagaaacatctcacactatgaagagcagctggtgaagatgttcggaagttcagtggaccttggcaacctcggccagtag

SEQ ID NO: 236792 - DNA, 1257 bp, synthetic construct
  misc_feature 1..1257: note = Description of Artificial Sequence: Synthetic coding sequence
  source 1..1257: mol_type = other DNA
atgtccattgagattccagctggcctcacggagcttctacagggattcaccgtcgaggtgctcagacatcaacctgctgacctcttggaattcgccctgcagcattttacccggctccagcaggaaaacgaacggaaagggactgcgcgatttgggcatgaggggcgaacctggggtgatctgggggcagccgctggcggaggcacaccttcaaaaggcgtgaacttcgcggaagagccaatgcagagcgattctgaggatggcgaagaggaagaagccgcacccgctgacgcgggagccttcaatgccccagtgatcaaccgcttcacaaggcgtgcgagcgtgtgtgcagaggcctacaatccagacgaggaggaggatgatgctgaatctagaatcattcaccctaagacagatgaccagagaaatcgcttgcaggaagcgtgtaaagatatattattgtttaaaaatctggacccggagcagatgtcacaggtgttggacgctatgttcgagaagctggttaaggatggcgagcacgtaatcgatcagggagatgacggcgataatttttacgtaatcgataggggtaccttcgacatatatgtaaaatgcgacggggtggggcgatgcgtcggcaattacgacaatagaggatcctttggtgagttagctctgatgtacaacacaccccgagccgcaaccatcaccgctacaagcccaggagcactgtggggcctggaccgcgtaaccttcagaagaattatagtgaagaataacgccaaaaagcgaaaaatgtacgagagcttcattgagtcactgccctttttgaaaagcttagaattctctgaaaggttgaaagtggtcgatgtcatcggcaccaaggtgtataacgatggtgagcaaattatcgcccagggagattcagccgattcattctttattgttgaaagcggtgaagtcaaaattaccatgaaaagaaaaggcaagagtgaggtcgaagagaatggtgccgtagagatcgctcggtgttcccgcggacagtatttcggtgagcttgccctcgttacaaataagcccagggccgcaagcgcacatgccatcgggaccgttaaatgcttggccatggacgtgcaggccttcgaaagactgctggggccatgcatggaaattatgaaacgcaacatcgccacgtacgaagagcagttggtggcactcttcgggaccaacatggacattgtggagcccactgcttag

SEQ ID NO: 236793 - DNA, 1218 bp, synthetic construct
  misc_feature 1..1218: note = Description of Artificial Sequence: Synthetic coding sequence
  source 1..1218: mol_type = other DNA
atgtccattgagatcccagccggactcacagagctcctccagggtttcaccgtagaagttctgcggcaccagccagccgatctcttagagttcgccctgcagcacttcactagactgcaacaggagaatgagaggaaaggtactgcacgattcggccacgaagggcgtacttggggcgatctgggcgcagcagctggagggggaaccccgagtaaaggggttaatttcgcggaggaggcagctccagctgacgccggagcgttcaacgcgccagttatcaaccgctttactcggcgtgccagcgtgtgcgcagaagcatacaacccagatgaggaagaagatgacgctgaaagcagaattatccaccctaagaccgacgaccagaggaatagattgcaggaggcctgcaaggacatcttgttgtttaaaaatttggaccctgagcagatgtcccaggtcctggacgcaatgtttgagaaactagtgaaggacggagaacacgtgattgaccagggcgacgacggagacaacttctacgtaatagatcgcggaacatttgatatctacgtgaagtgcgatggagtgggcagatgtgtcggtaattacgacaatcgcggatcctttggcgagctggcactgatgtataacacccctagggcggcaacgatcactgccacctcccctggtgcactctggggactggaccgagtcacatttaggaggataatagtgaagaacaacgccaaaaaacgtaaaatgtatgaaagtttcattgaatccctgccctttctcaagtctttggagttctcggagcggctcaaggttgtagacgtgatcggaacaaaagtttataacgacggggagcagatcatcgctcagggcgatagcgcagattcattctttatcgttgagtctggcgaagtgaagattactatgaagagaaagggcaaatctgaagtcgaagaaaacggagccgtggagattgcgcgatgcagtcgcggtcaatatttcggggagctcgctctggttacaaacaaaccccgagcagcctcagcccacgccatcggcacagtaaagtgcctcgcaatggatgtgcaggctttcgagcggctgttagggccatgcatggaaatcatgaaacgaaacatcgcaacatacgaggagcagctggtcgcattgtttggaacgaatatggatattgtggagccaaccgcttag

SEQ ID NO: 236794 - DNA, 1257 bp, synthetic construct
  misc_feature 1..1257: note = Description of Artificial Sequence: Synthetic coding sequence
  source 1..1257: mol_type = other DNA
atgtcaattgaaattcctgcgggactcactgaactgctccaaggattcacagtcgaagttctgcgacatcagccggctgacttattagagttcgcactgcagcatttcacccgcttacagcaagaaaatgagcggaagggcaccgcacgttttggacacgagggcaggacttggggagacttgggcgcagcggcagggggagggaccccctctaaaggtgtgaactttgccgaggaacctatgcaaagcgactcagaagacggagaggaggaagaagccgcaccggcagatgcaggagcattcaacgctccggtcatcaacagattcacacgcagagcatctgtttgtgccgaggcctacaaccctgacgaggaggaggatgatgcggagtctcgcatcatccatccgaaaacggacgatcagcggaaccgccttcaggaagcttgcaaggacatcctcctgtttaagaacttggatcctgaacagatgtcccaggtcctggacgctatgtttgaaaagctggttaaagatggcgagcacgttatcgaccagggggatgatggggataacttttatgtgatagacaggggcacttttgacatctacgtgaagtgcgatggtgtgggcaggtgtgtgggaaactacgataaccggggatcgtttggggaacttgcgcttatgtataacacgcccagagccgcaacgatcactgccaccagtcccggagctctatggggactggacagagtgaccttcaggagaatcatcgttaagaacaatgctaaaaagcggaaaatgtatgaatcctttatcgagtccctaccttttctgaaatctctggaattcagcgagcgcttaaaagtggtcgacgtgattggaaccaaagtgtacaatgatggcgagcagatcattgcccagggtgattcagcagactctttctttatagtcgaaagtggcgaagtgaaaatcactatgaaacgaaagggcaagtctgaggtggaagagaacggcgctgtcgagattgctaggtgttcaaggggccagtattttggtgagcttgcattggtaacaaataaaccccgagctgccagtgcgcatgccattggcaccgtgaagtgcctggctatggatgttcaagccttcgagcgcctgctcggtccctgcatggaaattatgaagcggaacatagcaacatacgaagagcaactcgtggcgctctttggtacaaatatggatatcgtcgagcctactgcctag

SEQ ID NO: 236795 - DNA, 1170 bp, synthetic construct
  misc_feature 1..1170: note = Description of Artificial Sequence: Synthetic coding sequence
  source 1..1170: mol_type = other DNA
atggagaagcagaacatgtttctacacgggagttatattctgcgggaggacgtcagaactgccaatgtcatcgccgcagaggccgttacctgcctcgtgattgacagagacagctttaagcaccttattggaggcctggacgacgtatccaataaggcttacgaggacgctgaagcaaaagccaaatacgaagcagaggcagctttctttgctaacctgaagctgtccgactttaatataatagacacattgggggttggaggctttgggcgtgtggagctggttcagcttaagtcagaggagtccaagaccttcgccatgaagattcttaaaaagcggcacattgtcgacactcgacaacaggagcacattcgctcagaaaaacagatcatgcagggtgcccacagtgactttattgtcagactgtatcggacatttaaagatagtaagtacctctacatgttaatggaggcctgtctaggtggggagctgtggaccatcctgcgcgatcgaggctccttcgaggacagtaccactcggttttatactgcatgtgtggttgaagccttcgcttatctccactctaaaggtattatctatagagatttgaagcccgagaacctgattctagatcacagggggtacgcaaagctcgttgatttcggctttgctaaaaaaataggcttcggaaagaagacctggacgttctgtggaacccccgagtacgtagccccagagattatactcaataaaggccatgacatcagtgcagattactggtccctgggaatccttatgtacgagttgttgacgggcagcccacctttttccggaccagaccctatgaaaacttacaatataatccttcgcggaatcgatatgatcgagttcccgaaaaagattgctaaaaacgcagccaaccttattaagaagctctgcagggacaatccatctgaaaggctcgggaatctgaagaacggtgtcaaggatattcagaagcacaaatggttcgaaggatttaactgggagggattacggaagggcactttaacgccacctatcatcccgtcagtggcaagtcctactgatacatccaactttgacagcttccctgaggataacgatgagcctccaccagacgacaactctggttgggatattgacttttag

SEQ ID NO: 236796 - DNA, 852 bp, synthetic construct
  misc_feature 1..852: note = Description of Artificial Sequence: Synthetic coding sequence
  source 1..852: mol_type = other DNA
atgaaaatcttaaagaaaaggcatatcgtggacacacgccagcaagaacatattaggagtgaaaagcagatcatgcaaggggcacattccgacttcatcgttcgcctctacagaaccttcaaagatagcaaatatctctacatgctgatggaggcatgcctcggcggagagttgtggacgatactgcgcgaccggggttcgtttgaggactctaccacacggttttacactgcatgtgtggtagaggcctttgcctacctgcacagcaagggtattatctacagggacctcaaaccagaaaatctcattttggaccaccgcggatacgcaaaacttgttgatttcggatttgctaagaagatcggatttggtaagaaaacctggaccttttgcggaactcccgagtatgttgcgcctgagatcatcctaaacaaggggcacgatatatctgctgactattggtccctgggtatccttatgtatgaattattaacgggttcccctccttttagtggccctgaccctatgaagacctacaatatcatcctgagggggattgatatgatcgagtttccaaaaaagattgctaagaatgccgcaaacctgatcaaaaagctgtgcagagataacccctctgaacgtcttggcaatcttaaaaatggagtgaaggacatccagaagcacaaatggttcgaaggcttcaactgggagggattgagaaaaggaactcttactcctcctataattccctccgtggcgagccccaccgacacgagcaacttcgattcatttcccgaggataatgacgaaccaccccctgacgataatagcggttgggatatcgacttttag

SEQ ID NO: 236797 - DNA, 546 bp, synthetic construct
  misc_feature 1..546: note = Description of Artificial Sequence: Synthetic coding sequence
  source 1..546: mol_type = other DNA
tcttgtattatcaaggagggagacgtgggcagcttggtctacgtgatggaggacgggaaggttgaggtgaccaaagaaggagtgaaactatgtaccatgggccctggtaaagtattcggtgagctggcaattctgtataactgcacacgaacagccactgtgaagaccctggtcaacgttaagctgtgggctattgaccgccagtgtttccagactatcatgatgcggacaggtctgattaagcacacagaatatatggaattcctgaagtccgtacccacatttcagagtctgcctgaagagattttatcaaagctcgcagacgttttagaggaaacacactatgagaatggagagtatattattaggcagggagcccgaggggacacgttttttattatttcgaaaggcacggtgaacgtcaccagagaagactccccgtcagaagatcctgtgtttttgaggacgcttgggaaaggcgactggttcggggagaaagctcttcagggctggacctggaacctgttcgaatatgtggtcgagtag

SEQ ID NO: 236798 - DNA, 2061 bp, synthetic construct
  misc_feature 1..2061: note = Description of Artificial Sequence: Synthetic coding sequence
  source 1..2061: mol_type = other DNA
atggggacgctgagagacctgcagtatgctctgcaagaaaagatcgaggagcttcggcagagagacgctctgatagatgaactcgagctagaactagatcaaaaagatgagcttattcaaaaactgcaaaatgaactcgataagtatcgctcggttatccggccagccacacaacaggctcagaagcagtctgcctctacattgcagggggaacccagaacgaagcggcaagctatcagcgctgagcctacggcttttgacatacaggacctatcccacgtgacgctgccattctaccctaagagcccccagagcaaggatctgatcaaggaagcaatcctggacaatgactttatgaagaacctggaactttctcagatacaggagatcgtggactgtatgtatcccgtggagtacggcaaggattcctgcattataaaggaaggggatgttggatcacttgtatacgtgatggaagatggtaaggttgaggttaccaaggagggagtgaagctgtgtacgatgggccctggaaaggtattcggggagcttgcaatactttataattgtactcgaaccgcaacagtcaagaccctcgtaaacgtcaaactctgggccatagatcgacagtgctttcagacaatcatgatgcgaaccggtctgataaagcacaccgagtatatggagtttttgaaaagtgtgccaacctttcagtccctccccgaggaaatcctgtcgaaacttgctgatgtccttgaagaaactcattacgaaaatggcgaatatatcatccgccagggagcacgaggcgatactttcttcattattagcaagggcaccgtgaacgtgacaagggaagattccccctccgaagatcccgtatttttaagaacactgggcaagggcgattggtttggtgagaaggctctgcagggagaagacgtcagaactgctaacgtgatcgctgccgaggccgtcacgtgtctagtcattgaccgggattcttttaagcacctaattggaggcttggatgacgtgtccaataaagcttatgaagatgccgaggctaaggcaaagtacgaagctgaagctgcattttttgctaatctgaagctatctgatttcaacatcatcgatacccttggagtgggaggctttggccgagtggagctcgtccagctgaaaagtgaagaatcaaagaccttcgcgatgaaaatcctcaaaaagagacacattgtcgatactcggcagcaggagcacataaggagcgaaaaacagatcatgcagggcgcacattctgattttatcgtgagactctataggaccttcaaagatagtaaatacctgtatatgctaatggaagcgtgcctcggcggtgagctgtggacgatcctgcgtgatcgaggatcatttgaagacagcactactagattttacaccgcctgcgttgtggaggcattcgcttacctgcactccaagggcattatttaccgggatctgaagccagagaatctgatcctcgatcaccgagggtatgcgaagctggtggacttcggttttgcaaagaagattggctttggcaagaagacatggaccttctgcggcacaccagaatacgtggctcccgaaatcattctcaacaagggccacgacatctcggcagattactggagcttgggaatccttatgtacgaactcctcactggctctccacccttcagtggacccgacccaatgaagacttacaatattattctgagaggcatagatatgatcgaattcccaaaaaagatcgcaaaaaatgcagctaacctcattaagaagttatgccgcgataacccttcagaacgcctaggaaatttgaagaatggggtaaaggatattcagaagcacaagtggtttgaagggtttaattgggaagggctgcgaaagggtactcttacacctcccattatccctagcgttgcgtctcctacagatacctcaaactttgactctttcccggaggacaatgacgagcccccaccagacgataactcagggtgggacatcgatttttag

SEQ ID NO: 236799 - DNA, 1980 bp, synthetic construct
  misc_feature 1..1980: note = Description of Artificial Sequence: Synthetic coding sequence
  source 1..1980: mol_type = other DNA
atgctgaaggaggaacgaataaaagagctagagaaacgactgtccgagaaagaagaagaaatccaggaactcaagagaaagcttcataagtgtcagtcagtgctgcccgtccccagtacacacataggacccaggacaactagagcccagggcatatccgcagaaccacaaacgtaccgctctttccatgacctccggcaggcctttcggaagtttaccaagagcgagcgcagtaaggaccttatcaaagaggcaatcctggacaatgacttcatgaaaaatcttgaactgtcccagattcaggagatcgtcgattgtatgtatcctgttgaatacgggaaggactcttgcattattaaagaaggagatgtcggttctttagtatacgtgatggaagacggtaaggtggaggtcacaaaagaaggcgtgaagctgtgtactatgggacctggtaaggtgttcggagagctcgccatcttgtataattgcactcggacagccaccgtaaaaaccctggtgaacgttaagctctgggcaatcgaccggcagtgtttccaaacgataatgatgcgaactggtttaataaagcataccgagtacatggaattcttaaaatccgtgcctacgtttcagagtctccctgaggagatcttgtccaaactggcggacgtgctggaggagacgcattacgaaaacggggagtacataattaggcaaggggctaggggcgatactttttttattatttctaaaggaaccgtcaacgtgactcgggaagattcaccaagtgaggaccccgtcttcctgcgtactctgggaaagggtgattggtttggagagaaggctttacagggcgaggatgtgcgaacagccaacgtgattgctgccgaggcagtaacctgtcttgtgatagatcgggatagcttcaaacatctgattgggggtctagacgatgtttctaataaagcatatgaggatgccgaagctaaggccaaatatgaagcagaggcagccttctttgctaatcttaaattatccgatttcaatatcattgacacgctcggtgtggggggatttggtagggtggagctggtgcaactcaaatctgaagagagcaagacttttgccatgaaaatcctcaaaaagcgtcatattgtcgacacccggcagcaggaacacatccggagcgagaagcaaattatgcagggcgctcattccgacttcatcgtgcgtctgtatcgaacctttaaggattccaagtacctgtatatgctcatggaggcatgtctcggaggtgagttgtggactatcctaagagatagaggttcttttgaagacagtacaactcggttttacacagcatgtgttgtagaagccttcgcctatcttcacagtaagggtattatctatcgcgatctgaagcccgaaaatctgatccttgatcaccgagggtacgcgaagctggtcgactttgggttcgctaagaaaatcggttttgggaagaaaacatggacattctgcggaacgccagaatacgttgccccagagatcatccttaataagggacatgatatctccgccgattattggagcttgggtattcttatgtatgagctactgactggctctccgccattcagcgggccagatcctatgaagacctacaacattatattgcgcggtattgatatgatcgagttccctaaaaaaattgctaaaaatgcagcaaacctgatcaagaagctttgtagagacaacccctcagaacggttgggcaatctaaagaatggtgttaaagacatccagaagcacaaatggttcgagggattcaattgggaagggctgcggaagggcactcttacccctccaatcatcccctccgtggccagccctactgatacctccaatttcgatagcttcccagaggataacgacgaaccaccccctgatgacaactcaggctgggatattgacttttag

SEQ ID NO: 236800 - DNA, 2016 bp, synthetic construct
  misc_feature 1..2016: note = Description of Artificial Sequence: Synthetic coding sequence
  source 1..2016: mol_type = other DNA
atgtcagagttggaggaagattttgccaaaatcttaatgcttaaagaagagagaataaaagaactggagaaacgcctttccgagaaggaagaagaaatccaggaactgaagcggaagttacacaagtgtcaatctgttctacccgtcccctctacccacattgggcctcgaactacacgggctcagggcatttcagcagagcctcagacctatcgatcatttcacgatctacgtcaggcattcaggaagtttacaaagagcgagagatctaaagatctgattaaagaagccatcctcgacaacgacttcatgaagaatctagagctgtctcagattcaggaaattgtggactgcatgtacccagtggagtacgggaaggattcatgcattatcaaagaaggagacgtaggctcgcttgtgtatgttatggaagacggcaaggtggaggtgaccaaagaaggcgtgaagttgtgcacaatgggacctggcaaggtgtttggggaattggccatcctctataactgtaccaggaccgcgacagtaaaaacactggtgaacgtgaaactgtgggctattgaccggcagtgctttcagaccattatgatgcgcaccggcctgattaaacacactgagtacatggaatttctgaaatccgtacctaccttccagtccttgccagaggaaattttaagtaaactagctgacgtcctagaggagacccactatgagaacggggaatacattattcggcagggcgctcgtggcgacaccttctttatcatttctaaaggaactgtgaacgtgacgcgtgaagactccccaagtgaggatcctgtgtttctcagaacactggggaaaggggattggttcggcgagaaggccctccagggcgaggacgtcaggaccgccaatgtaatcgctgcagaggcggtcacttgtctggttatcgaccgggactcttttaaacacctgataggaggacttgacgatgtgtcaaataaggcttacgaagacgctgaagctaaggcaaaatatgaggcagaggcagcgttctttgctaatctgaagctgagtgacttcaatattatcgacacgctcggcgttgggggttttggtagagtggagctggtgcagctgaagtctgaagaaagcaagacttttgctatgaagatcctgaagaaaaggcacatcgtggatacgaggcagcaagagcatatcaggagcgaaaagcagattatgcagggggctcactcagactttatcgtccggctctataggacctttaaagactcaaaatacctgtatatgctcatggaagcttgcctggggggagagttgtggaccatcttgcgggacaggggatcctttgaagatagcaccacccggttctacaccgcctgcgtggtggaggcatttgcttatctccactcaaaaggcattatatatagagacttgaaacctgaaaacctgatcttggaccatagagggtacgccaaattggtggacttcggcttcgcaaaaaagattggtttcggaaaaaagacatggaccttctgcggaacacccgagtacgtggcaccagaaatcatcttgaacaagggacacgatattagcgctgactattggtctctaggcattcttatgtacgagctccttactggctctcctccgttttctggtcctgatccaatgaaaacatacaacatcatcctgcgcggaatcgatatgatcgagttcccgaagaagatcgccaagaatgccgcaaacctcatcaaaaagctttgtagagacaacccttccgagcggcttggtaaccttaaaaatggcgtgaaagacattcagaaacacaagtggttcgaagggtttaattgggagggactaagaaaaggcactctgacccccccaattattccgagcgtcgcgtctcctaccgacacatccaatttcgactcctttccagaggataacgacgagccccctcccgatgataactccgggtgggacatcgatttttag

SEQ ID NO: 236801 - DNA, 2289 bp, synthetic construct
  misc_feature 1..2289: note = Description of Artificial Sequence: Synthetic coding sequence
  source 1..2289: mol_type = other DNA
atgggaaacggttcggtcaaacctaagcattcaaagcatcctgacgggcattctggaaatctgactactgacgcgctgcggaacaaagttactgagttggaacgcgaactgagacgtaaggatgcggagattcaagagagagagtaccacctgaaggagcttagagagcaactgtctaagcagaccgtcgccatcgctgagctgaccgaggagttgcaaaacaaatgtattcagctgaacaaactccaggacgttgtgcatatgcagggtgggagcccactgcaagcttctcccgataaggttccattggaggtacaccgaaagacaagcggcctggtgtcgctacactcgcggcgtggtgcaaaggcaggagtttctgcagagcccacaacccgcacgtacgatttgaacaaaccacccgagttttcatttgaaaaagccagagtacggaaggattcctctgaaaagaaactgattaccgatgcgctgaataagaaccagtttctgaaaagactggacccgcagcaaattaaagacatggtcgagtgtatgtacgggcgtaactatcagcagggctcctatattatcaagcagggagagcccggtaaccacatttttgttctcgctgagggccgtcttgaagtgttccaaggggagaagctgctgtcaagcatccctatgtggacgacattcggagagctcgctattctttacaattgtactcgaaccgcctctgttaaggcaatcaccaacgtgaagacttgggcacttgaccgagaggtattccagaacatcatgagaagaacagcgcaggcgagagatgagcagtacagaaatttcctcaggagcgtctcgcttctgaaaaacttgcctgaggacaaacttaccaagattatcgattgtttggaagtcgagtattacgataaaggagactatatcatccgggagggagaggagggcagcacgttctttattctggctaaggggaaagttaaggtcactcagtctactgaggggcatgaccaaccccagcttatcaaaacccttcagaaaggcgagtacttcggcgaaaaagctttgatcagtgatgatgttcggtccgctaatatcattgccgaagaaaacgatgtcgcttgcctggtgattgatcgagagacgttcaaccagaccgtgggcaccttcgaagaactccaaaaatatctggagggttacgtggccaacctgaatagagatgacgaaaagaggcatgccaaacggagtatgagcaactggaagctgagcaaggctctgagtttggaaatgatccaactgaaggagaaggtggccagattctccagctcatcccctttccagaatttagagatcatcgctactttgggggtcggagggttcgggcgagtggagcttgtcaaggtcaagaacgaaaacgtggccttcgccatgaagtgcatcaggaagaagcatatcgttgacacaaaacagcaggagcacgtctacagcgagaagcgtatcttagaggagctgtgtagcccttttatcgtgaaactgtacaggaccttcaaggacaacaagtacgtgtatatgttgctcgaagcctgtctggggggagagctgtggtccattctgagagatcggggtagcttcgacgagccaacgagtaaattttgcgtggcctgcgttacggaggccttcgactacctccataggttgggtattatctatcgggacctgaaaccagaaaacctaatactggatgccgagggctatctgaaactggttgactttggattcgctaagaagattgggagcggacagaaaacgtggaccttctgcggcacccccgagtacgtggccccagaggtgatcctgaataaagggcatgactttagcgtcgacttttggtccctgggaatactggtgtacgagcttcttacaggcaatcccccattctcaggggtagaccaaatgatgacatacaacctgatccttaaaggaatcgagaagatggattttcctcgaaaaatcactcggcgtcctgaagacctcatcaggagactctgcaggcagaacccaaccgaacggctggggaatcttaaaaatggaataaacgacatcaaaaagcaccggtggctgaatgggtttaactgggaaggcctgaaggctagatcactgccctctccactccagcgcgaactcaagggcccaattgatcattcctactttgataaataccccccagagaaagggatgccccctgacgagctctcgggctgggataaagatttctag

SEQ ID NO: 236802 - DNA, 2289 bp, synthetic construct
  misc_feature 1..2289: note = Description of Artificial Sequence: Synthetic coding sequence
  source 1..2289: mol_type = other DNA
atgggcaatggatctgtgaaaccaaaacactcaaagcatccagatggtcactccggtaacctgacgaccgatgcattacggaataaagtcacggaacttgaaagagaactgagaagaaaggacgccgaaatccaggaaagagagtaccacctcaaggaactgagggaacagctctccaagcagacagtggccatcgccgaactgacagaagaactgcagaacaagtgtatacagctgaataagctgcaggatgtggtgcacatgcaagggggatccccactgcaggctagccctgataaggtccctcttgaagtgcacagaaaaacttcaggccttgtctccttgcacagtagaagaggcgctaaagccggtgtctccgctgagccgactactcgcacatatgacctgaataagcctcccgagttctctttcgaaaaggctagggtgcggaaggattcaagtgagaaaaagctgatcacggacgccctcaacaagaatcaatttcttaagaggctggacccccagcagatcaaggatatggtggaatgtatgtatgggcgaaactatcagcaagggagctatataataaagcagggcgaacccggaaatcatatcttcgttctggcggagggcaggctggaagtattccagggagaaaagctgctgtcgtccatccccatgtggaccacgttcggagaacttgccatcctgtataattgcactcgcacagcaagtgtgaaagccatcactaatgtcaaaacctgggcactggatagggaggtctttcagaacataatgcgcagaaccgcccaggcccgagacgagcagtaccgcaactttctgcggtctgtatcactgctgaagaatctccctgaggataaactgaccaaaatcatagattgcttggaggttgagtactacgataagggcgattacatcatccgcgagggagaagagggcagcacctttttcattctggccaaggggaaagttaaggtcacgcaaagcacagagggccatgaccaacctcaactgattaaaacactacagaagggcgagtacttcggagaaaaagctctgattagtgacgatgtgcgttcagcaaatataatcgctgaggagaatgatgtagcctgcctcgttattgacagggagaccttcaatcaaactgtgggaacatttgaagagctccagaaatacctggaaggctacgtcgcaaatctgaatagggatgatgagaagagacatgctaaacgaagtatgagcaattggaagctgtcgaaggccctgagcctggaaatgatacagcttaaggaaaaagtggctcgtttctcttcctcttcaccttttcaaaatcttgagatcatcgctaccttgggggtagggggtttcggacgcgtggagctggtcaaggttaaaaacgagaacgtagcatttgcaatgaaatgcatccgcaaaaaacatatcgtcgatacaaaacagcaggaacacgtgtactccgagaaacgcatactggaggagctctgcagtccattcatcgtcaagctgtaccgcacatttaaggacaacaagtacgtgtacatgctcctcgaggcgtgtctgggtggagagctttggagtatcctgagagaccggggatcatttgacgaacccacatccaaattctgcgtggcatgcgtaacggaggcgtttgattacttgcatagactgggtattatctacagggacctgaagcctgaaaacttgatcttggatgccgaagggtacctcaaactggttgatttcggcttcgccaagaagattggaagtggacagaaaacatggaccttctgcgggacacccgaatacgttgcacctgaagtcatcttgaataagggtcacgatttttcagttgatttttggtccttgggtatcttggtttacgagctcctgacaggcaaccctccattctccggtgtcgatcagatgatgacatataatctgattctgaaagggatcgagaagatggacttcccgcgaaagattactcgcagaccggaagaccttatccgaaggctgtgcaggcaaaatcccacggagcgtctgggcaacttgaagaacggcatcaatgatatcaaaaagcacaggtggctgaacgggttcaactgggagggtctgaaggcgcgaagcctgccctcccctttgcagcgcgaattgaaaggccctatcgatcatagctatttcgacaaatacccccctgaaaagggcatgccccctgacgagttgagcgggtgggataaggacttctag

SEQ ID NO: 236803 - DNA, 2202 bp, synthetic construct
  misc_feature 1..2202: note = Description of Artificial Sequence: Synthetic coding sequence
  source 1..2202: mol_type = other DNA
atgggcaacggatcagtgaaacccaagcactccaagcatcccgatgggcattctggaaacctcactactgatgctctaagaaataaggtgaccgagctggagagggagctacgcaggaaagatgcggagatccaggaacgagagtatcacctgaaggagctaagggagcaactgagtaagcagacagtggccatagcggaattaacggaagagttacaaaacaagtgtatccagctgaacaagctccaagatgttgtacacatgcaaggcggatctccacttcaggccagccccgacaaggttccactcgaggtgcaccggaagacatccggcctggtatccctgcacagcaggcggggagcgaaagctggggtgtccgccgagccgactaccagaacttatgacctaaacaaacccccagaattttcttttgaaaaggcccgagtaagaaaggactccagtgagaaaaagctaattacggatgcactaaacaagaaccagttcctgaaacgtcttgacccccaacagataaaggatatggtggagtgtatgtacggaagaaattatcagcagggttcttacatcattaaacagggagagcctggcaatcacatattcgttcttgcggaggggaggttggaggttttccagggcgagaagctgctgtccagcattccgatgtggactacctttggagagcttgctattctttataactgtacaaggacagcatctgtgaaagccatcaccaacgtgaagacctgggccttagacagagaggtgttccagaacatcatgcgacgcaccgctcaggctagggatgaacagtataggaatttcctccgcagcgtaagcctgctcaaaaacctgcccgaagacaaactgaccaagattatcgattgtttggaagtcgaatattatgataaaggagattatataatccgtgaaggtgaagaaggcagtactttctttatccttgccaaagggaaagtaaaggtcacgcagtccacagagggacatgatcagcctcagttaatcaagacactgcaaaagggcgagtacttcggggaaaaggctttaatctcagatgacgtgagatctgctaacatcatagccgaggagaacgatgtggcttgtttagtgattgaccgcgagacttttaaccagacagtcggcacattcgaggagcttcagaagtacctggaaggctacgtggccaaccttaaccgtgacgacgagaaacgacatgccaaaagatccatgagcaactggaagctctcaaaagctctgtcactggaaatgatccagctgaaggagaaagtgaaggttaagaacgagaacgtggcctttgcgatgaaatgcattcggaaaaagcacattgtagataccaagcagcaggagcatgtgtacagcgaaaagagaatcctcgaggaactgtgttctccctttattgtcaagttgtaccggacttttaaggacaataaatatgtctacatgctgctggaagcttgtttaggtggggaactgtggagcatcctgagagatagagggtccttcgacgagcctacatccaagttttgcgtcgcttgtgtgaccgaagcctttgactatctgcataggttggggattatctaccgggatttgaaaccagagaatctaatactagacgcagaaggatacctgaaactcgtggattttggttttgcaaagaagatcggttctggacagaaaacgtggactttctgcggcaccccggagtacgtggctcccgaggtaattctcaataagggccatgatttcagtgttgacttctggagcttgggaatcctggtttacgagttgctgaccggtaatcctcctttctccggcgtggatcagatgatgacctacaatctgattctcaaagggatagaaaaaatggacttcccacggaaaattacacgcagaccagaagacctgattcgaaggctgtgccgacagaatcctactgaaaggctaggaaatcttaaaaacggcattaacgacatcaagaaacaccgctggctgaacggctttaattgggagggtctgaaggctcgttctctcccttcacccctccagcgcgagcttaagggccctatagaccattcgtactttgacaagtaccctccagagaaaggcatgccacccgatgagctttctggatgggacaaggacttctag

SEQ ID NO: 236804 - DNA, 1029 bp, synthetic construct
  misc_feature 1..1029: note = Description of Artificial Sequence: Synthetic coding sequence
  source 1..1029: mol_type = other DNA
atgtctaattggaaattgtcgaaagccttgtccctcgagatgatccaactgaaggaaaaggtggctaggtttagtagttccagtcccttccagaacctcgagattatcgccaccctgggagtgggtggcttcgggagggtggaacttgtaaaggtgaaaaatgagaatgttgctttcgctatgaaatgcatccgcaagaagcatatcgttgatacgaagcagcaagaacacgtgtattccgaaaagagaatcctggaagaattatgttccccgttcattgtgaagctctacagaaccttcaaagacaacaagtacgtgtacatgttgctcgaagcttgtctgggaggcgaactctggtccatactgcgagataggggatcttttgatgagccgacttctaagttttgtgtcgcttgtgtcactgaagcctttgactatttgcatcggctgggaattatttaccgcgacctgaagcccgagaatctcatactggacgccgagggctacctcaagcttgtagactttggtttcgccaagaaaattggatcgggccaaaagacatggaccttctgtggaaccccagaatacgtcgctccggaggttattttaaataagggtcatgatttttctgttgacttttggtcgctgggtatccttgtgtatgagctgctgacaggcaatccgccattctctggcgttgatcaaatgatgacatataacttgattctgaaagggatcgaaaagatggatttccccagaaaaattaccaggagaccagaggatctgattagaaggctgtgccgccagaacccgactgagagactcgggaacttgaagaacggcatcaacgatattaagaaacaccgctggctgaacgggtttaactgggagggactcaaagcacggagcctgcctagtccccttcagagagagctgaaggggccaatcgaccactcttacttcgacaaatacccacccgagaagggcatgcctcccgatgagctttcaggatgggataaggacttctag

SEQ ID NO: 236805 - DNA, 942 bp, synthetic construct
  misc_feature 1..942: note = Description of Artificial Sequence: Synthetic coding sequence
  source 1..942: mol_type = other DNA
atgtcacagtccaggcaccgcgcagaggcacctccgctggagcgtgaggatagtggcacgttttcactggggaagatgatcaccgccaaacctggcaaaacccccatacaagtactccacgagtacggcatgaagaccaaaaacatacctgtatacgagtgcgagagatccgatgtccagattcacgtgccaacctttacgttccgcgtaacagtgggagacattacatgtactggcgaaggaacaagcaagaagctggccaagcacagagccgcagaggccgcaattaacattcttaaggcgaacgcgtctatctgtttcgctgtgcctgatccactaatgcctgaccccagtaagcaacctaagaatcagctgaatcctattgggtccctgcaggagctggcgatccaccacggctggcgcttacctgagtacaccctctcacaggagggtgggccagcccacaagcgagagtataccactatatgccgcttagagagtttcatggaaaccggcaaaggggcaagtaaaaaacaggcgaagagaaacgctgctgaaaagttcctagctaagtttagcaatatatctccagaaaaccacatctcactgacaaatgtggtaggccactctctggggtgtacctggcatagcctgcgtaattctcctggggagaagatcaatctcctgaagcgttcactcctgtcaatacctaatacagactatatacagctgttgtccgaaattgccaaggaacaaggcttcaatatcacatacttagatatcgacgagctgtccgcaaatgggcagtaccagtgtttggccgagctatccacctccccgattaccgtctgccatgggtctggaatatcttgcggtaatgcacagtcagacgctgcacataatgctctgcagtaccttaagattatcgcagagcgcaagtag

SEQ ID NO: 236806 - DNA, 909 bp, synthetic construct
  misc_feature 1..909: note = Description of Artificial Sequence: Synthetic coding sequence
  source 1..909: mol_type = other DNA
atgcagtccactcccttctgtggcttctgttccctcgggaagatgatcactgctaagccaggtaagacacccatccaggtgcttcacgagtacggcatgaaaaccaaaaatattccagtatacgaatgtgagagatcagacgtccagattcatgttccaacctttacctttagagttaccgtaggagatatcacctgtacaggcgaaggcacatccaagaaattggccaaacaccgggcagcagaagctgccatcaacatactgaaagccaacgcgtctatatgcttcgcagtgcctgaccctcttatgccagacccttctaaacagcctaagaaccagctgaaccccattgggtcactccaggaattggctatacaccacggctggcggctgcctgagtacacgctgagccaggaaggcggacccgcacataagagggaatatacgacgatctgtcggctggagtcctttatggagactgggaaaggcgcttccaagaagcaggccaaaaggaacgccgctgagaaattcctggccaagttctctaatatatctcctgagaaccacatttccctaacaaacgtggtgggacactccctgggttgcacgtggcattcccttagaaatagtccaggagaaaagatcaatctcttaaaaagaagcctgctgtctatccccaataccgactatattcagctgctcagtgagatagctaaggagcaggggttcaacattacatacttagatatcgacgagctgagcgccaatgggcaatatcagtgcctggctgagctgtcaacctcaccaatcacggtgtgtcacgggagcggcatttcctgtggcaacgcccagtccgacgcggctcataacgcccttcaatatctgaagattatcgccgaacgaaagtag

SEQ ID NO: 236807 - DNA, 603 bp, synthetic construct
  misc_feature 1..603: note = Description of Artificial Sequence: Synthetic coding sequence
  source 1..603: mol_type = other DNA
atgcccgatccttcaaagcaacccaaaaaccagctaaacccaatcgggtcattgcaggagctagctatccaccacggatggaggctgccagaatacactctgagccaggagggaggcccagcccacaaacgtgagtataccactatctgccgacttgaaagtttcatggaaacaggcaaaggcgcttccaagaagcaagccaagcgcaatgctgcagagaagtttttagcaaagttcagcaatatttctcccgaaaatcacatctctttgactaacgtggtcggccactcactaggctgcacatggcacagcctccgcaactcccctggggaaaagatcaacctcctgaagagatccctgttatctattcccaacaccgattacatccagctgttgtctgaaatcgccaaggagcaggggtttaatattacatatttagacatagacgagctttccgcaaacggacagtatcagtgccttgccgagctgtcaacgtctccaatcaccgtgtgtcacggtagcggcatctcatgcgggaatgcacagtcggacgcagcccacaatgcgctgcaatacctgaaaattatcgccgagcgcaagtag

SEQ ID NO: 236808 - DNA, 867 bp, synthetic construct
  misc_feature 1..867: note = Description of Artificial Sequence: Synthetic coding sequence
  source 1..867: mol_type = other DNA
atgataactgccaaacctggcaaaactcccatccaagtgctgcacgaatatggcatgaaaaccaaaaatatccctgtgtacgaatgtgaaagatccgacgtgcagattcatgtgcctacatttacctttcgcgtgacagtcggcgatataacctgtactggagaaggaacctctaagaagctggccaaacatagagctgcagaggcagctatcaatattctgaaggctaacgcctctatctgctttgccgtgcccgacccgctaatgccagacccttcaaaacagcctaaaaatcaattgaatcctattggatcccttcaggaactggctatccatcatggatggagacttccagagtacacattaagtcaggagggcggacctgctcacaagagagagtacactaccatctgtaggctggagagctttatggaaactggcaaaggagcctccaagaagcaggccaaaaggaatgccgctgagaaattcctggcaaaattttctaatatctccccggaaaatcacatttctctgaccaacgtcgtcggtcacagtttagggtgtacatggcattctctcagaaatagccccggagagaaaattaatctccttaagcgctctctactttccatcccgaacactgactatatccagctgctgtctgaaattgctaaagagcagggttttaacatcacgtacctggacatcgatgagctctccgccaatgggcagtaccagtgtttagcggaattgagcaccagccctataacagtctgtcatggatctggtatttcttgcggaaacgctcagtctgacgcggcacataatgctctgcagtacctgaagatcatagcggagagaaagtag

SEQ ID NO: 236809 - DNA, 1077 bp, synthetic construct
  misc_feature 1..1077: note = Description of Artificial Sequence: Synthetic coding sequence
  source 1..1077: mol_type = other DNA
atggaagctcctggcttggcacaggccgctgccgctgagagcgactcaaggaaagtggcagaggagactcctgacggggctcctgcgctctgcccctccccagaggcactgagtccagagcccccagtgtactcgctgcaggactttgacactcttgccactgtcggaactggcaccttcggtcgggtacacctggtcaaagaaaagacagcgaaacacttcttcgccttaaaggtcatgtctatccctgatgtgattaggctgaaacaagaacagcacgtgcataacgaaaaatccgtattaaaagaggtcagtcatcctttcctgattagattattttggacttggcatgatgaaaggtttctatatatgctgatggagtatgtgccaggcggtgagctgttctcttatctgcgtaatagggggcgtttcagtagcaccactggcctgttctactccgccgagatcatatgcgccatcgaatacctccattccaaagaaatagtttacagagacctgaaaccagagaatattctgctggatagggacggccacatcaagctgactgacttcgggttcgcaaagaaactcgttgataggacctggacactttgcggaacccccgaatacctggcacccgaggtgatccagtccaaaggtcacggaagagccgttgactggtgggccttgggaattctcatctttgagatgttgagtggattcccgccattcttcgatgacaatccctttgggatctaccagaagatcctcgcgggtaaaatagacttcccacgccacctggatttccacgtgaaagatctaatcaaaaagttattagtggttgacaggacccgacgcctagggaacatgaaaaacggagccaacgatgtaaaacaccatcggtggttcagaagcgtggactgggaggcagtgcctcagcgcaagctgaaacctccaatcgtaccaaaaatagccggagacggggatactagcaactttgagacatacccagagaatgattgggacacagccgctcccgtgccccagaaagatctggaaattttcaagaatttctag

SEQ ID NO: 236810 - DNA, 1983 bp, synthetic construct
  misc_feature 1..1983: note = Description of Artificial Sequence: Synthetic coding sequence
  source 1..1983: mol_type = other DNA
atggatgactggaagccctctcccctcattaaaccatttggtgccaggaagaagagatcctggtatttaacctggaaatacaagcttactaatcagcgggcactgcggcgattttgtcaaaccggcgcagtgctattcttacttgtcacagtgatcgttaatattaaattgattctggatactaggagagccatatctgaagctaacgaggatccagagcctgagcaggattacgatgaggcactcggaagattggagccaccacgtagaaggggttcaggtccacgccgagtcctcgatgtagaggtgtattcctcaagaagcaaagtgtatgtggctgtggacggtacaactgtgctggaggacgaagcaagagagcagggacgcggaatacacgttatcgtactgaaccaggctacaggacatgtgatggccaagcgcgtctttgacacatacagcccccacgaggatgaggctatggtgttgtttctgaacatggtggcacctggtcgcgtgcttatttgtactgtgaaggacgaggggtcctttcatctgaaggacaccgcaaaggcgctgctccgcagccttgggagtcaggcagggcctgctctcggttggcgtgacacctgggcgtttgtcggcagaaagggcggtcccgtctttggtgagaagcacagcaaatcacccgctctgagcagttggggcgatccggttcttctgaaaacggacgtcccactgagctcagcggaagaggccgagtgccactgggcagacacagaactgaacagaagaagacgcagattttgtagtaaagtcgagggttatggaagtgtttgttcctgcaaagatccaacaccgatcgagttttccccggatcctttgcccgataacaaagtccttaatgtaccggtggccgtgattgccggaaaccgccctaactacctatatcgtatgttgagatccctgctctcagcccagggcgtgagccctcaaatgattactgtttttatcgacggatactacgaagagcccatggatgtggtggccctcttcgggctacgcggtatccagcatacgcccatttctattaagaatgcccgtgtctcacaacattacaaagctagcctgactgccactttcaacttgttccccgaggctaagttcgccgtggttctggaggaggatctcgacatcgctgtcgactttttcagcttcttgtcgcagagcattcacttgctagaagaggacgatagcctgtattgtatcagtgcttggaatgatcaagggtacgaacacaccgcggaagaccccgctcttctatatagggtagaaaccatgcctggcctggggtgggttctacgacgaagcctgtacaaggaagaactggagcctaaatggccaactcctgaaaaactctgggactgggacatgtggatgcgtatgcccgaacaacggcgagggagagagtgcattatcccagacgtgagccgtagttaccactttggcatcgttggccttaacatgaacggctatttccatgaagcgtatttcaagaagcacaaattcaacaccgtgcctggagtacagctccggaacgtggatagcctgaaaaaagaggcctacgaggtcgaggtacaccggttgctcagcgaagcagaggtgctggatcattctaagaatccctgtgaggactcattcttacctgatacagaagggcacacatacgtggcctttataagaatggaaaaagacgatgacttcaccacctggactcagttggccaaatgcctccatatatgggacctcgatgtgcggggaaatcaccgcggactgtggcgactatttaggaaaaaaaaccacttccttatggtcggagtgcccgcatccccatactccgtaaaaaagcccccttcagttacccccatctttctggagcccccaccgaaagaggaaggagcgcctggcgctcccgagcagacgtag

SEQ ID NO: 236811 - DNA, 2247 bp, synthetic construct
  misc_feature 1..2247: note = Description of Artificial Sequence: Synthetic coding sequence
  source 1..2247: mol_type = other DNA
atggacgattggaagcctagcccattgatcaaaccttttggtgctaggaagaagcgctcatggtatctcacatggaagtacaaattgacaaatcaaagagcacttaggcggttctgccagactggcgctgtgctctttctgcttgtgaccgttattgtgaatataaagttgattttggatacacgccgagctatctccgaagccaacgaggaccccgagcccgagcaggattatgacgaagccctcggccgtctagagccccctaggcgtcgcggtagtggccctcgccgagtattggatgttgaggtctatagttcacgcagcaaagtctacgtcgccgttgacggcaccaccgtactggaagatgaggcacgggaacagggacgaggcatccacgtgattgtcctcaatcaggcgaccggacacgtgatggcaaagcgcgtgtttgacacatacagccctcatgaggacgaggcaatggtgttgttccttaacatggtcgcccctggtcgggtgcttatctgcactgtgaaagacgaagggtcattccacctgaaggatacagcaaaggcgctgctcagatctttgggtagccaagcgggacctgcactaggctggcgagatacatgggcattcgttggtaggaagggaggacccgtattcggtgagaaacatagcaaaagccctgccctgagttcttggggtgacccagtgcttcttaaaactgatgtgcctctgtccagcgcggaggaggcagaatgtcactgggctgacaccgagctgaacagaaggcggagaagattttgctccaaggtggaagggtatggctccgtctgcagctgcaaggatcctaccccgatcgagttcagtcccgatccgctgcctgataataaggttctgaatgtgccagttgccgtgatcgccggaaacagacccaactatttgtatagaatgctgcggtctttgttgtcggcgcagggtgtcagtccacaaatgattacagtcttcatcgatgggtattacgaggaacccatggatgtggttgccttatttggactgagagggatccagcacacaccaatctctataaaaaacgctcgggtctcccaacactacaaggcatcactcaccgcaacctttaacctatttcccgaggctaagtttgctgtcgtcctcgaagaagatctagatatcgctgttgacttcttctcattcttgagtcaatccattcacttattggaggaagacgacagtctctattgtatcagtgcttggaatgaccaggggtacgagcacactgcagaagatcccgcactcctttatcgcgttgagaccatgcctggcctgggatgggtcctgcgtagaagcctttataaagaggagctggaaccaaaatggccgacacccgaaaagctctgggattgggacatgtggatgcgtatgccggagcagcggagaggcagagagtgtatcatccctgatgtttcgaggagttatcatttcggcattgtgggactgaatatgaatggatacttccatgaagcctacttcaaaaagcacaaattcaacactgtgcctggggtgcagctaagaaacgttgattccttgaagaaagaggcctacgaagtggaggttcaccgcttgctctcagaggcagaagtgctcgatcactctaagaatccatgtgaagactcattccttccagataccgaggggcatacatacgtagcattcattcggatggagaaagacgatgacttcacaacctggactcagctggctaaatgtctccacatttgggacttagacgttcgtggaaatcaccggggactgtggcgacttttccgtaaaaagaatcactttctgatgagcgaggaggctactctgtcccacccgaattttcccggagccaccccaaaaggaggtgggtccccgcgttctcccagaaccgatatgcggccaccccctggtccatgcggagcagggccaggaagcgagagcaatttgtttatcgattgtcctgaaggccttgaaaacaggcctaatctcgaaggcttggacttctttctaggttggaatgccgctttgcgcgtgggcttagcgttgacccaggagacagcagttcccaacccgtggacgggccctgcaggcgcacacatgctcacacagacacatagtgaaactctgagacactggacgcggcctcctctctctctactttttgtccaaataagcaaagccggatag

SEQ ID NO: 236812 - DNA, 2247 bp, synthetic construct
  misc_feature 1..2247: note = Description of Artificial Sequence: Synthetic coding sequence
  source 1..2247: mol_type = other DNA
atggacgactggaaaccatcgcccctcattaagccttttggagcaagaaagaagcgatcctggtacctgacttggaaatacaaactgacaaaccaacgtgcacttaggcgattctgtcagaccggcgctgtccttttccttctagtgacagtgatcgtcaatataaagctgattctggacacgaggagagccatctccgaagcaaatgaggaccccgagcctgagcaggactatgatgaagccctgggcagactggagccccctagacgacgcggatcaggcccaagacgtgtactcgatgtcgaagtgtatagctcccgttccaaggtgtacgtggcagtggatgggactaccgtcctggaggacgaagccagggagcagggacgcggaatccacgtaatcgtgctcaaccaggccaccggacacgtcatggctaagcgggtttttgacacgtatagtccccatgaagatgaggccatggtacttttcctgaacatggttgctcccggaagggtccttatttgcacagtaaaagacgagggaagcttccaccttaaggacaccgccaaggctttgttgcgctcactgggctcccaagcgggacccgcattggggtggcgagatacctgggcctttgtcgggagaaaggggggtccagtgttcggcgagaagcattccaaatctccagctttatcaagttggggggatcctgtcctcttaaagacagacgtgccgttatcaagtgctgaggaagccgaatgccactgggctgacaccgagttgaaccggagaaggcgaaggttttgctctaaagtggaaggctatggtagcgtctgtagttgcaaagatccgacccctatcgaattttcgcccgatcctctgccggataataaagtactcaatgtgcctgtggccgtgatcgccggaaatagaccaaactatctctaccgtatgctcagaagtcttttgtctgcacagggcgtgagccctcagatgatcacagtgttcatagacggttattatgaggaaccaatggatgtggttgctctgttcggcctacggggaatccagcatacccccatttccatcaagaatgccagagtcagccagcattacaaggcctcactaaccgcaactttcaacctgtttcctgaggcaaagttcgccgtggttttggaggaggatttggacattgccgtggatttctttagcttcctcagccagagcatacatttgctcgaagaggatgactctctttactgtatcagtgcctggaacgaccaaggatatgagcacacagctgaagatccagcgctcctctaccgtgtcgagacgatgccgggtctgggttgggtgcttagaagatccctttataaagaagagctcgaacccaaatggcccacacccgagaagctgtgggactgggatatgtggatgaggatgccagaacagcgcagaggtcgcgagtgtatcattccagatgtctctcggtcataccacttcggcattgtgggcttgaacatgaatgggtacttccacgaagcctactttaagaagcataagttcaacacagtgccaggtgtgcagctccggaatgtggactccctgaagaaagaggcttacgaagtggaagtccatagactgctgagtgaagccgaagtgctggaccactcaaagaatccctgcgaggactcgttccttcctgacacagaggggcacacttacgttgccttcattcgtatggagaaggacgatgactttaccacatggacacagttagcgaaatgtctgcacatctgggaccttgatgtgcgaggaaaccacaggggactatggcgcttatttagaaagaagaaccactttctcatgagcgaagaggccaccctttcgcaccctaactttccgggtgcaacaccaaaaggaggtggcagcccgcgatcgccgagaacagatatgagaccccctccaggcccttgcggcgctggtccaggaagcgaatcaaatctcttcatagattgcccggaagggttagaaaacaggccaaacctggagggtctcgattttttccttgggtggaatgccgcactccgagtcggcctggccttaacacaggaaactgcggtgccgaatccttggacaggccctgctggggctcacatgctgacacagacccacagtgaaaccctgagacattggaccagaccccctttgtcacttctgttcgtgcaaatcagcaaggccggatag

SEQ ID NO: 236813 - DNA, 603 bp, synthetic construct
  misc_feature 1..603: note = Description of Artificial Sequence: Synthetic coding sequence
  source 1..603: mol_type = other DNA
atggacgactggaagccaagcccacttatcaagccctttggagcgcgaaagaagcggagctggtatctgacctggaagtacaaactgacaaaccagcgagccctccggagattttgccagacgggcgctgtgctcttcctcctggtgaccgtgatcgtaaatattaaactcatacttgacacaaggcgcgctataagtgaagcgaacgaggatcccgaacctgagcaagactatgatgaggcccttgggcgactagagccaccccgaagacgcggatcaggtccgagacgcgtgttggacgtggaagtttacagcagcagaagcaaggtgtacgtcgcagtagacggtactacagtgctggaagatgaggccagagaacaggggagaggcatacacgtgatcgtcctgaaccaggcaacagggcacgtgatggcgaaacgagtttttgatacatactcaccccacgaggatgaggctatggtgttgtttctgaacatggttgccccaggcagggtcttaatatgcaccgttaaagtgctgagttcgggcaggaacattctcaaccacctcccgtcactgcctggcggtacccagtcctgttag

SEQ ID NO: 236814 - DNA, 1917 bp, synthetic construct
  misc_feature 1..1917: note = Description of Artificial Sequence: Synthetic coding sequence
  source 1..1917: mol_type = other DNA
atggaaggcactaaggagataaaagttagcaaccgcaggattcaggaacattggaccggggctgtcctgttcctcctggtgacagtgatcgtgaatataaagttgattctggatacccggcgagccatatctgaagccaatgaggatcccgaaccggagcaggactacgatgaggctctgggacgcctggaacctccaaggagaaggggatctggccctcggcgagtattagatgtcgaggtgtatagttcaagatcaaaagtgtacgtggctgttgatggaactaccgtgttggaggatgaagcaagagaacagggacgcggaatccatgtcattgtactcaatcaggctactggccacgtcatggctaaacgcgtgtttgacacatattcccctcacgaagacgaggccatggtgctgtttctgaacatggtcgctcctggcagggtccttatttgcaccgttaaggatgagggttcatttcacctcaaggatacagctaaggccctgctgaggagtctggggagccaagctgggccagctctcggctggcgtgatacttgggcctttgtgggcaggaaaggtggccctgtatttggcgaaaaacacagcaaaagccctgctctgtcttcatggggagacccggttcttctgaaaaccgatgtgcccctctcatccgccgaggaggccgagtgccattgggctgataccgagttgaaccggaggcggcgaagattttgtagcaaagttgagggctatgggtctgtatgtagctgcaaggatccgacccccatcgaatttagccctgaccccctgcctgataacaaggtgctgaacgtgccagtcgctgtcattgccggtaaccgccctaattatctctaccggatgctgcggagcctgctatctgcccagggagtgagtccacagatgatcacagtgttcatcgatgggtattacgaagagcctatggatgtcgtcgctctgttcggcctcagggggatccagcataccccaatctccatcaagaacgcccgtgtgtcacagcattataaagcaagcctcacagctacgttcaatctgtttccagaggcaaagttcgccgtagtcctggaagaggacctggacattgccgtcgatttcttttcctttttaagccagtccatccacttactcgaggaggatgattcgttatactgtatatcggcttggaatgaccagggctacgagcacactgccgaggaccctgcgttgttgtacagggtagagaccatgccaggcttgggatgggtgttgaggcgcagcctgtacaaggaagagctggaacctaagtggccaacccctgagaaattgtgggattgggatatgtggatgaggatgccagaacaaagacgtggacgggaatgtatcataccagacgtgagtcgcagctaccacttcggaatcgttgggcttaacatgaatggctattttcacgaagcttattttaaaaagcacaagttcaacaccgtacctggcgtacagctccgtaatgtggatagtctgaagaaagaggcttatgaagtggaagtgcaccgcctcctgtccgaagctgaagtgctggaccactcgaagaatccgtgtgaggactcttttctgcccgatactgaaggccacacatatgtagcctttatccgcatggagaaagatgatgatttcactacatggacacagctggctaagtgtctgcacatttgggacctcgacgtgcgaggcaatcatagaggactttggaggctttttagaaaaaaaaaccattttctgatggtgggcgttccagcaagcccttactctgttaagaagcctccttcggtaactcccatcttccttgaacctccacccaaggaagagggcgctcccggagccccagaacagacttag

SEQ ID NO: 236815 - DNA, 861 bp, synthetic construct
  misc_feature 1..861: note = Description of Artificial Sequence: Synthetic coding sequence
  source 1..861: mol_type = other DNA
atgtctgactccgagaagttaaacctggacagtatcattggcagattgctggaaggggatattcacggccaatactacgatttgctacgcctgtttgaatatggaggctttccacccgaaagcaactatctgttcttgggcgattacgtggaccggggaaaacagagtctggaaacgatctgtcttttactcgcctataagattaaatatccggagaatttttttcttctcaggggaaaccacgagtgcgcctctatcaacaggatctatggtttctatgacgagtgcaagaggaggtataacattaaactgtggaagacctttacggactgctttaattgcctgcctatcgccgctatagtggacgaaaaaattttttgttgtcacggcggactgagccctgatctccagagcatggagcagatccggaggattatgagacccactgacgtacccgaccagggcttgctttgcgacctcttgtggtccgatcccgacaaggatgtgcagggctggggagagaatgataggggagtatcattcacattcggagcagaagtggtggcaaaatttctccacaagcatgatctggacctgatatgccgcgctcaccaggtagtggaagacggctacgaattttttgctaaacggcagctggtcaccctctttagcgcacctaactactgtggggaatttgacaatgccggagccatgatgtctgtggacgaaaccttgatgtgttccttccagatactgaagcctgcggacaagaataagggcaaatacgggcagtttagcggcctgaatcctgggggacggcctataaccccccctagaaactccgcaaaggcaaagaaatag

SEQ ID NO: 236816 - DNA, 1548 bp, synthetic construct
  misc_feature 1..1548: note = Description of Artificial Sequence: Synthetic coding sequence
  source 1..1548: mol_type = other DNA
atggcagaactggagcatctcggcggaaaacgcgctgagtcagcgcgtatgcgcagagccgagcagctgcgcaggtggcgcggatcccttacagagcaggaacctgctgaaaggagaggagccggacgtcaacctcttacacggagaggtagcccaagagtgcgctttgaagacggggcagtgtttttggccgcttgtagtagtggcgataccgatgaggtcagaaaacttctcgcaaggggtgctgacataaatactgtgaatgtagacggtctgaccgccctgcaccaagcctgcatagacgagaacttggatatggtaaagtttttagtggagaatcgcgctaatgttaatcaacaggacaatgaaggatggaccccactgcacgctgcagcctcgtgtggatacttaaacatagccgagtattttatcaatcacggagcttcagtgggcattgtgaactccgagggagaagttccttcagacctagcagaggagcccgcaatgaaggatttactgctagagcaagtcaagaaacaaggagtggacctagaacagtctcggaaggaggaggagcagcagatgctccaggatgcccgacagtggctgaattccgggaagatcgaggacgtaaggcaagcacggtcaggagctaccgccctgcacgtcgcggctgcaaaagggtactccgaagtgctgagactgcttatacaggccggttacgaattaaacgtgcaagactacgatggttggactcccttgcatgcagcggcacactggggagtgaaagaggcgtgctccatcctggctgaagcgctgtgcgacatggatatacgcaacaagcttggtcagacccctttcgatgtggccgacgagggtctggtggaacatttggaattactccagaaaaaacagaatgtccttcgcagtgagaaggagacaagaaacaaacttatcgaatccgatttaaacagtaagatccagtccggatttttcaaaaacaaagagaagatgttgtacgaggaagaaacccccaaatcgcaagagatggaggaagaaaacaaggaatcgtcatcaagctcttccgaggaagaagaaggcgaagatgaagcatcagaatcagaaacagaaaaggaggccgataaaaaaccggaggccttcgtgaaccattctaactctgaaagcaaaagcagtattaccgagcagataccagctcccgctcaaaatacttttagcgccagctctgccaggaggttctcctcagggctcttcaacaagccggaagagcctaaggacgagagtccttcctcctggcgcctgggcttgcgtaaaacaggttctcataatatgttgtccgaagtcgccaatagcagggagcccattagagacagaggcagcagcatttatcgctcgagcagcagcccgaggatcagtgccttgctagacaacaaagataaggttcaattcggcagggtctggggcaattctaaagccgttttcttctttcatgagaacagcattctcggaactaacgaaaacatcttctag

SEQ ID NO: 236817 - DNA, 4125 bp, synthetic construct
  misc_feature 1..4125: note = Description of Artificial Sequence: Synthetic coding sequence
  source 1..4125: mol_type = other DNA
atgttgaagacagaatcctccggggagaggacgactcttagaagtgccagtcctcaccggaacgcgtacagaacagagttccaagcactgaagagcacatttgataagccgaaaagcgacggggagcaaaaaacaaaggagggagagggcagccagcagagtcgcggacgcaaatatgggagtaacgtgaatcgcattaagaacctgttcatgcagatgggcatggaacctaatgaaaatgccgctgtgattgccaaaacgcgaggcaaaggaggtcattcatccccccagagacggatgaagcctaaagagttcctcgagaagactgacggttcagtggttaaacttgaaagctctgtctccgagcggatcagtcggttcgacacaatgtatgacggtccatcctactcaaagttcactgaaactaggaagatgtttgaaagatctgtccacgagagcgggcagaataacagatacagccctaagaaggagaaggccggagggagtgagccgcaggacgagtggggcggttctaaatccaatagagggtccactgactctttggattccctcagctccaggaccgaagcggtgtctcccactgtttctcagctgagtgcagtgttcgagaatacagatagcccatcagccatcatttcggaaaaggccgaaaataacgaatactcagttactggccactatcccctgaatcttccctccgtaacagtgacaaacctcgacacctttgggcacctaaaagactccaactcctggccaccaagcaacaaacgcggagtggacacagaagacgcccataaatcaaatgcgacgccggtaccggaggtggcgagcaaatctacgagtcttgcctcaatccccggagaggagattcaacagtcgaaggaaccggaagactctaccagtaaccagcaaacgcccgacagtattgataaagatggcccagaggaaccttgcgctgagtcaaaagccatgcccaaaagcgagattccatctccccagtcccagttgttagaagatgcagaagcaaatctggtggggagggaggccgcaaaacaacagcggaaagaactggccggtggcgattttacttcccccgacgcgtcagcctcctcgtgtgggaaggaggtaccggaagactcaaacaattttgacggctctcatgtgtacatgcactccgattataacgtgtacagagtgaggtctaggtacaatagcgactggggcgagaccggcactgagcaggacgaagaagaagattccgacgaaaacagctattatcagcccgacatggaatactccgagatcgttggcctgcccgaagaagaggagattcccgctaatcggaaaataaaattttccagtgcccctatcaaggtgtttaacacttactccaatgaagactacgacagacggaatgatgaggtggatccagtcgcagccagtgccgagtacgaacttgagaaacgcgtggaaaaactggaactgtttcccgtcgagctggagaaagacgaggacgggttgggaatatctattattgggatgggagtgggagctgatgcaggactggagaaactgggcatcttcgttaaaactgtcacagaagggggtgctgcccagcgcgatggccgaattcaggtgaatgatcagatcgttgaggtggacggcatatccctggtcggggtgacccagaacttcgcagccactgtccttcgtaacaccaagggtaacgtcagattcgtgattggcagagaaaagccaggccaggtctccgaggtggcacagctaattagccagacgttagagcaggaaaggcgccagagagaactcctcgaacagcactatgcacaatatgatgcggatgatgatgaaaacactgttgctgagttgcagggaatgtctggtaattgcaacaacaataataattactttctgaaaactggcgaatatgcgaccgacgaggaagaggacgaggtcggaccagtcctcccagggtctgatatggcgatcgaggtgtttgagctgccggaaaatgaggacatgttctcaccaagcgaattggacacctcaaaactgtcacataagttcaaggaacttcagatcaagcatgctgtcaccgaggccgaaatccagaagttgaagacaaagctgcaggctgctgaaaacgagaaggtccggtgggagctggagaagacccagttacaacagaatatagaggagaacaaggaacgtatgctgaaattggagagctactggatcgaagcacagactctttgccacaccgtgaatgagcacctaaaggagacccagagccagtatcaggccctggaaaaaaaatataataaagccaaaaaattaattaaagatttccagcagaaggagttagatttcattaagcgtcaggaggcggaaaggaaaaagatcgaagatctggagaaagcacacctggtggaggtccagggtctgcaggtgcgtatacgagacctcgaggccgaagtgtttaggctcctgaaacaaaatggaacacaagtgaacaataacaacaacatctttgagcgacgtacaagcttgggtgaagtttcaaagggagatacgatggagaatctcgacgggaaacaaacatcatgccaggatgggctctcacaggatctgaacgaagcagttccggaaactgaaagattggattctaaggcactgaaaacacgggcacagctctcagtgaagaacaggcgacagagaccgtcaagaacccgcctctatgactcggtgtcttccacggacggagaagacagcttggagcgtaagccttccaacagcttttataaccatatgcacatcaccaagttattaccccctaagggcttgcgtacaagcagccccgaaagcgattcaggcgtccctcctctgacccccgtggatagcaatgtgcctttctcctccgaccacatagcagagttccaggaagaacctctcgaccctgagatgggccctttgtcctctatgtggggagatacctcgctcttctctactagcaaaagtgaccatgacgtcgaagaatcaccctgtcaccaccagacaaccaacaagaaaattctcagagaaaaggacgacgccaaagaccccaagagtcttagagcttctagctctttggccgtgcaaggtggtaagattaagcgaaaatttgtggatttgggcgctcccctgcgtaggaacagctctaaaggcaagaagtggaaagagaaagagaaagaggctagccggtttagcgccggatcaaggatattccggggacggctagaaaactggaccccaaagccttgcagcacagcacagacctccactcgctccccctgcatgcccttcagctggtttaacgacagccgtaaggggtcctacagtttcaggaacctacccgctccaacctccagcctgcaaccatctcctgagacacttatctccgataaaaaaggcagtaaggtggaaaacacatggattaccaaagccaacaagcggaatcccaatccctcatcaagcagcatcttcgggagacattcacagctaatgtcagtggtttggatccaggaaacaaacaacttcacatttaacgatgacttttctccatcatctacctccagcgcagacttatcagggcttggcgcagagcctaagacacccggtctatcccagagccttgctctttcaagcgacgagattctggacgatggacaatcccccaagcatagtcaatgccagaaccgagccgttcaggagtggtccgtccagcaggtatcacattggcttatgtccttaaacctggaacagtatgtttccgaattcagcgcccagaacatcactggggagcagctcctgcaattagatgggaacaaactgaaagcactcggaatgaccgctagtcaggaccgcgcagtggtgaagaagaagttaaaagaaatgaagatgagcctggaaaaagccaggaaggcccaggagaagatggagaagcagcgggagaagttgagacgaaaggagcaggaacagatgcaaagaaagagcaagaagaccgagaagatgactagtactacagccgagggggcaggagagcaatag

SEQ ID NO: 236818 - DNA, 1026 bp, synthetic construct
  misc_feature 1..1026: note = Description of Artificial Sequence: Synthetic coding sequence
  source 1..1026: mol_type = other DNA
atgtctgacagcgagaaactgaacctggacagtattataggaagacttctggaaggatccagagttctgactcctcattgcgccccagtccagggctcccggccaggaaaaaacgtgcaactgactgagaacgagattcggggtctgtgcctgaagtccagggagattttcctcagccagcccattctgctggagctggaggcacctcttaagatctgcggcgacattcacggccagtattacgatctgttaagactgttcgaatacggaggattccctcctgaaagcaactacctttttcttggcgactacgtcgacagagggaagcagtcgctggagacaatttgcctgttgttggcatataagatcaagtatcccgaaaacttcttcttgttgagaggaaatcatgagtgtgcgtctattaacaggatttatgggttctacgatgaatgcaaacggaggtacaacatcaagttgtggaaaaccttcaccgattgctttaattgcctccctattgctgcaattgtggatgagaagattttctgctgccacggaggtttgtccccagatctccaaagtatggaacagattagacggatcatgcggccaaccgatgtcccagaccaggggctactctgcgatcttctctggtcagacccagacaaagatgtgcagggctggggggaaaatgaccgcggtgtgtcttttaccttcggcgcagaggtcgtggccaagtttctccacaaacatgatctggaccttatctgcagagctcaccaggtggtggaagatggctatgagttcttcgctaaacggcaactggtcaccctgtttagcgcacctaactattgcggcgaattcgacaatgctggagctatgatgagcgtggacgaaactctcatgtgttcttttcagatcttaaagcccgctgataaaaataagggaaagtacggacagttttccggtcttaaccccggtggacgccctattacaccccctagaaactccgcaaaagcaaaaaaatag

SEQ ID NO: 236819 - DNA, 993 bp, synthetic construct
  misc_feature 1..993: note = Description of Artificial Sequence: Synthetic coding sequence
  source 1..993: mol_type = other DNA
atgtcagattcagagaagctcaacctggatagtattatcggacgcctcctcgaagtacagggttctcgacccggtaagaacgtacagttgactgaaaacgagattcgaggcctttgtctaaagtcccgcgaaatttttctctcgcagcccatcctgctcgaattagaggcacccctgaagatctgcggggatattcacgggcagtattacgacttgctccgactttttgagtacgggggtttcccaccggaatccaactatcttttcctgggcgattatgtggatcgcggaaagcagtccctcgaaacaatctgcttactgctagcgtacaagattaagtaccctgagaatttttttcttctgcgtgggaaccacgaatgcgcttccattaatcggatatacggcttctacgatgagtgcaagagacgatacaatatcaagctgtggaagacctttaccgattgcttcaactgtctgccaatcgccgctattgtagacgagaaaatcttctgttgccatggcggtctgtcacctgacctccagagcatggagcagatcagacggatcatgcggccaactgacgtgccggatcaggggctcctgtgcgatctgctctggtcggatcctgacaaggacgtgcagggttggggtgaaaacgacaggggagtgtcattcaccttcggggctgaagtggtggcgaaattcctccataagcatgatctcgacctgatatgcagagctcaccaggtggttgaggacggatacgagtttttcgccaaaaggcaactggttacgctgttctctgctcctaattactgcggggagtttgacaacgccggtgcaatgatgtctgttgacgagaccctaatgtgctctttccagatactgaagcccgctgataagaataagggtaaatatggccaattctcaggcctgaatcccggtggacggccaattaccccgcctagaaactctgctaaagccaaaaaatag

SEQ ID NO: 236820 - DNA, 1245 bp, synthetic construct
  misc_feature 1..1245: note = Description of Artificial Sequence: Synthetic coding sequence
  source 1..1245: mol_type = other DNA
atgcggcagcgggctgacagacggagcatggtgtccacatcaggcgctgctaccgcttccagtgccgcaggaccaagtcgaggagccgctcattccccaagctcagcaccgcatgccagccggcacaggcctcctttcagcagcagggccaccggcctgctgcagcaacgccagcactgtgtccaccactgcacacagctctgtccaagagtccaaaccccctgtctacctccccctccagcccctgccactgaactccacagttatctacagcagggcggtgagagaggcttgctggacactactcctggaaccgctggttggggtactagcgctactggtgccgttcaaggttcccgcccaggcaaaaacgtgcagctgactgagaatgagataaggggcctgtgtctgaagtcccgggaaatctttcttagtcagcccatattgctcgagcttgaggcccctttgaaaatctgcggcgacatccacggccagtattatgatttgctgcggttattcgaatatggagggtttccgcctgagtcaaactatctgttcttaggtgattacgtagaccgcggaaagcagtccctggagactatatgcctgctgctcgcttacaagatcaaatatccggagaattttttcctgctgcggggtaaccatgagtgcgcctcgatcaatagaatttatgggttttacgatgagtgcaagaggaggtataacattaagctgtggaagacttttactgactgctttaattgtttaccaattgcagctatcgtggatgagaagattttttgttgccacgggggtctgtcacccgacttacagtccatggagcagatccgccgaatcatgcgtccaactgacgtgcctgaccagggcttactctgtgatttgctgtggagtgatccggacaaggacgtacagggttggggagagaatgaccggggtgtttcctttaccttcggcgcagaagtggtggctaaatttcttcacaagcatgatctagacctgatttgccgggctcatcaggttgtggaggacgggtacgaatttttcgctaaacgccagctggtgactcttttttcagctccgaactattgcggagagtttgataatgccggagccatgatgtccgttgacgagactttgatgtgctctttccagatcctgaaaccagccgacaagaataaggggaaatacggccagttttccggtctgaaccccggtggcaggtag

SEQ ID NO: 236821 - DNA, 984 bp, synthetic construct
  misc_feature 1..984: note = Description of Artificial Sequence: Synthetic coding sequence
  source 1..984: mol_type = other DNA
atggccgacggtgagttaaacgtagattcccttataacaaggttgttggaagtcaggggatgcaggcccggtaagatcgtgcaaatgactgaggccgaagtgcgcggactgtgcatcaagagcagggaaatttttctgagccagcccattttgctggagttggaagcccctctgaaaatatgcggtgatattcacggccagtacacggatcttctgcgcctgtttgagtatgggggatttccgcctgaggccaattacttgttcttgggtgactatgtcgaccgcggaaaacaaagcctggaaacgatttgtctattgcttgcgtataaaatcaagtatcccgagaacttttttctcttgaggggcaaccacgagtgtgcctccattaaccgcatctacggcttttacgacgaatgcaaacggagattcaacatcaagctgtggaagacctttacagattgctttaactgtctgccaatcgccgcaattgttgatgaaaagattttttgttgtcatggaggactcagccccgatctccagtcaatggagcaaatccgtcgcatcatgcggcctacggacgtccccgacaccggcctcttgtgtgatcttctgtggtctgatcctgataaagacgtgcaagggtggggagagaatgaccgcggagtatctttcacctttggggcagacgtggtcagcaaattcctcaaccggcatgacctcgatctgatctgcagggcccaccaggtcgtagaagatggttacgagtttttcgcgaagaggcagctagtgactctcttcagtgcccctaattactgcggggaatttgataacgccggaggaatgatgagtgtcgacgaaaccctcatgtgttcttttcagatcttgaaaccaagcgagaagaaggctaaatatcaatatggcggacttaactccggtcgaccagtcacgccacctagaaccgccaacccacccaagaaacggtag

SEQ ID NO: 236822 - DNA, 984 bp, synthetic construct
  misc_feature 1..984: note = Description of Artificial Sequence: Synthetic coding sequence
  source 1..984: mol_type = other DNA
atggcagacggcgaactgaacgttgattctcttattacaagactactggaggtacgaggctgcagacccggaaaaatagtccagatgacagaggcagaggttcgcggactgtgcatcaaatcaagagaaatattcctgtcccagcctatattgctggagctggaagctccactcaagatttgtggtgacattcatggacagtacaccgacctgcttcgactgttcgagtacgggggtttcccgcctgaagccaactatttgtttttgggagattacgtggatagaggaaaacagtctttggagacaatttgcctcctactcgcatacaagatcaagtatccagagaattttttcctgctacgcggaaaccacgagtgtgccagtatcaatcgcatttacgggttctatgacgagtgcaagcgccgattcaacataaagctctggaaaacgttcactgattgttttaattgcctgccaattgccgcaattgtcgatgaaaagatattctgctgccatgggggtctgagtcctgaccttcagtctatggagcaaatccggaggatcatgcggcctacggatgtccctgacacgggcctgctctgtgatcttctgtggagcgaccctgacaaagacgtgcagggttggggcgaaaacgaccggggtgtatcattcacattcggggctgacgtagtctcaaagtttcttaatcggcacgatctggatctgatctgccgggcacaccaagtagtggaggatgggtacgaattctttgccaagcgacaactcgtgacactcttcagcgctccaaattattgcggtgaatttgataatgcaggaggcatgatgtcagtcgacgaaactctcatgtgctccttccaaatcttgaaacccagcgagaagaaggccaaataccaatacggaggcttgaactccggccgtccggttacgcccccacgcactgccaaccccccaaagaagcgctag

SEQ ID NO: 236823 - DNA, 984 bp, synthetic construct
  misc_feature 1..984: note = Description of Artificial Sequence: Synthetic coding sequence
  source 1..984: mol_type = other DNA
atggctgatggtgagcttaatgtggatagtctaatcacccggcttttggaagtgcggggatgtcggcctggtaaaattgtgcagatgactgaggctgaggtcagaggcctgtgtattaaatcaagagagatcttcctgagccaacccatactgctagaacttgaagcaccgctgaaaatctgtggcgacatccatggccaatataccgacctcctgcgactgtttgagtacggcggattccctcctgaggcgaattatctttttctaggggattacgtggatcgaggtaaacagtcattagaaaccatatgtttgttattggcatataagataaaatatcccgagaacttcttccttctacgcggaaaccatgaatgcgcctctatcaatagaatctacggtttctacgatgagtgcaaacgaagattcaacatcaagctgtggaaaacatttactgactgcttcaactgcctgccaattgccgctattgtggacgagaaaattttttgctgccacggaggcctgtccccggacctgcaatctatggagcagatacgcaggataatgagaccaactgacgtgcccgacacaggcctgctgtgcgatctgttgtggagcgatccggataaagatgtccagggctggggagagaacgatcgcggagtctcgttcaccttcggagctgatgtggtcagcaagttccttaacagacacgacttggatttaatctgtcgagcccatcaagtggtggaggatggttacgagttctttgcgaagaggcagctggttaccctgttctcagcacccaattattgcggcgaattcgataatgctggtggcatgatgtcggtagacgagactttgatgtgtagttttcagatccttaaaccatccgagaagaaagctaaatatcagtacggagggctcaatagcggaagaccagttacgccaccgcgaacagctaatcctcccaaaaaaaggtag

SEQ ID NO: 236824 - DNA, 378 bp, synthetic construct
  misc_feature 1..378: note = Description of Artificial Sequence: Synthetic coding sequence
  source 1..378: mol_type = other DNA
atggccgatggcgagctgaacgtggacagcctgatcacgcgactgcttgaggtgcgcggatgtaggcccggaaagattgttcagatgaccgaggctgaagtgcggggtctgtgcattaaaagcagggaaatatttctctcacaaccaatattgcttgagctggaagcccctctaaagatctgtggagatatccacggtcaatatacagacttgctgaggctcttcgagtatggcggatttccccctgaggctaactacttatttctcggcgactacgtggataggggcaagcagagtcttgagaccatctgtctccttctagcttataagatcaagtaccccgagaattttttcttgcttcggggaaaccacgaatag

SEQ ID NO: 236825 - DNA, 417 bp, synthetic construct
  misc_feature 1..417: note = Description of Artificial Sequence: Synthetic coding sequence
  source 1..417: mol_type = other DNA
atggctgatggcgaactcaacgttgacagcttgatcactcgtctcttggaggtgagagggtgtaggcccggtaagattgtgcagatgaccgaggcagaggttcgcggactgtgtattaagtcaagagagatttttcttagccagcccattctcctagagttggaggccccattgaagatctgcggggatatacatggtcaatacacggatttacttcggctcttcgagtacggcggattccccccagaagcaaactatctgttcctcggtgactacgtggatcgcggtaagcagagcctggaaaccatctgtctgctcctggcttataagatcaagtaccctgaaaattttttcctgttgcgcggaaatcatgagtgtgcttcaataaatcgcatatatggattctatgacgaatag

SEQ ID NO: 236826 - DNA, 510 bp, synthetic construct
  misc_feature 1..510: note = Description of Artificial Sequence: Synthetic coding sequence
  source 1..510: mol_type = other DNA
atgaccgaagcagaggttagggggctgtgcatcaaaagtcgggaaatattcttgtcacagcccatactgctagaattggaggcccctctcaaaatatgcggagatatccacgggcagtatactgatcttctccgactctttgagtacggaggctttcctccagaagccaactatctctttcttggcgattacgtggaccggggaaaacagagtttagaaacaatttgtcttcttctggcttataagatcaaataccccgaaaattttttccttctgaggggtaatcacgagtgcgctagtataaacagaatttacggtttttacgatgagtgcaagcggcgtttcaatattaagctatggaaaacgttcaccgactgcttcaattgcctccctattgcagctattgtggacgagaaaatattttgttgccacggcggtttatctcctgatctacagtcgatggagcaaataagacgaatcatgcgtccaactgatgttccagacacttag

SEQ ID NO: 236827 - DNA, 972 bp, synthetic construct
  misc_feature 1..972: note = Description of Artificial Sequence: Synthetic coding sequence
  source 1..972: mol_type = other DNA
atggccgacctcgacaaattgaacattgatagcatcattcagaggctgttggaggtgcgtggctccaaacccggtaagaatgtgcagctgcaggaaaacgagattaggggactctgccttaaaagtcgcgagatcttcctgtcacaaccaatcttgctcgagctagaggctcccctgaagatctgtggagacattcatggccaatattacgacttactgcgcttgtttgagtacggagggttcccccctgaaagcaattacctgttcctgggtgactatgttgacagaggaaaacagtcactggagactatctgtcttctgcttgcctataaaatcaaataccccgagaatttcttcctcctcaggggtaaccatgaatgcgcgtcgatcaacagaatctacggcttttacgatgagtgtaaacggaggtacaacatcaaactgtggaagaccttcaccgattgtttcaactgtctacccatcgcagcaattgtggacgagaagatcttctgttgccacggaggactgagcccagatctccagtcaatggaacaaataaggcggattatgcgtccaacagacgttccagaccaaggcctgttgtgtgacctgctgtggtccgaccctgacaaggacgttctgggatggggcgaaaatgatcgtggggtcagctttacctttggcgctgaggttgttgccaaatttctccacaagcatgacttagatctcatttgtcgcgcacatcaagtagtggaagatggctacgagttcttcgctaaaagacagctggttactctgttttccgcacccaattactgtggcgaatttgacaacgccggtgctatgatgtcagtagatgagacgctcatgtgtagcttccagatcttgaaaccagcagaaaagaaaaagccaaatgcgactcggcctgtgactcccccacgaggcatgatcaccaaacaagctaaaaagtag

SEQ ID NO: 236828 - DNA, 1014 bp, synthetic construct
  misc_feature 1..1014: note = Description of Artificial Sequence: Synthetic coding sequence
  source 1..1014: mol_type = other DNA
atggcagatctcgataagctgaacattgactctataatccaacgcctcctcgaagtgcgaggatctaagcccggtaagaatgtgcagctgcaagaaaacgaaattcgaggcctttgtcttaaaagtagagaaatatttctgtctcagccgatcttgttagaactagaagcgcctctgaagatatgcggcgacattcatggacagtactatgacctgctccgactgtttgaatatggtggctttccaccagagtctaactacctgttcctgggggattatgtcgacaggggaaaacagtccttggagacaatctgtctgttattggcttataaaattaagtaccctgaaaacttctttcttctcagggggaaccacgagtgcgcttccattaatcgcatttacggcttttacgatgaatgtaaacgcagatacaatatcaaactctggaaaacgtttacagattgctttaattgcctgccaatcgcagctattgtcgacgagaagatattttgctgtcacggcggactgtcgcccgaccttcagtcaatggaacagatccggagaattatgagaccgacagatgtaccagatcagggccttctgtgcgatctgctgtggtctgatcctgataaagacgtcctgggctggggtgaaaacgatcggggagtctcattcaccttcggagccgaggtggtagccaaattcctgcataaacatgacctggacctgatctgccgtgcccaccaggtggtggaggacgggtatgaattctttgctaaacggcagttggtcacactgttctccgcccctaattattgcggcgaatttgataacgctggggcaatgatgagtgtagatgagacgctgatgtgttcattccagatcttgaagcccgcagaaaaaaagaagcctaacgctacccgaccggtgacgccacccagggtagctagtggtctgaatccatctattcagaaagccagcaactaccggaacaacactgtcttgtatgagtag

SEQ ID NO: 236829 - DNA, 999 bp, synthetic construct
  misc_feature 1..999: note = Description of Artificial Sequence: Synthetic coding sequence
  source 1..999: mol_type = other DNA
atgttcctccccctgtatctcaacctggtgctatattttgtattctggctccactggacaaactgcgacttctcattagcggtgcggggttctaaacccggaaaaaatgtgcaactgcaggagaatgagatccgaggcctctgtttgaaaagcagagagatattccttagccagccaatcctgctggagctcgaagctcctctcaaaatatgtggggacatccacgggcagtactacgacctgctaagattgttcgagtacggagggttcccccctgagagcaattatctgtttctgggggattatgtagacagaggtaagcaatccctggagacgatttgtctgctcctcgcctacaagatcaagtatccagagaattttttccttcttcggggaaaccacgaatgtgccagcatcaaccgaatctacggcttctacgatgagtgtaagcgccgttataacatcaagttatggaagacattcactgactgcttcaactgtctcccaattgcagccatcgtggacgagaaaatcttttgctgccacggagggctgtctcctgatctgcagtcaatggaacagatcaggcgaattatgcgcccaactgacgtgcccgatcaaggtctgctttgtgatttattgtggtcagatcccgacaaggacgtgctcgggtggggggagaacgacagaggggtgagcttcaccttcggcgctgaggttgtcgcaaaattcctgcataagcacgacttggacctgatctgccgagcccaccaggtggtagaggacggctacgagttttttgccaaaaggcagctcgtgacactgttcagcgctcccaattattgtggggagtttgacaacgctggcgcaatgatgtctgtagacgagactctgatgtgtagcttccaaatcctgaaacccgcagagaagaagaagcctaacgccacccggccagtgacgccccctaggggtatgattacgaagcaagctaaaaagtag

SEQ ID NO: 236830 - DNA, 426 bp, synthetic construct
  misc_feature 1..426: note = Description of Artificial Sequence: Synthetic coding sequence
  source 1..426: mol_type = other DNA
atggagcaaatccgaagaatcatgagaccaacagatgtgcctgatcaggggttactctgtgacctcctgtggtctgaccctgacaaggatgtccttggttggggagaaaatgataggggcgtgagctttaccttcggggcagaagtggtagcaaagttcctccataaacacgacttagacttgatatgccgtgctcaccaggtcgttgaagatggatacgagtttttcgcgaaacgtcagttggtcacacttttctccgccccaaattactgtggtgagttcgataacgccggagcaatgatgtcagtggacgagacattaatgtgctccttccagatactcaaacccgcagagaagaagaagcccaacgctaccaggccggtgacaccccctagagggatgattactaagcaggccaagaagtag

SEQ ID NO: 236831 - DNA, 225 bp, synthetic construct
  misc_feature 1..225: note = Description of Artificial Sequence: Synthetic coding sequence
  source 1..225: mol_type = other DNA
atggggagacgcagtagcaaatgctgttgtatttatgaaaaacctcgagcatttggcgagtcaagcacagagtccgacgaggaggaagaggaaggttgtggccacactcactgcgttagagggcatcggaaaggccgtcgtagggccactttgggcccaactcccactacgcccccacagccgccagacccgtctcagccaccgcctggccctatgcaacactag

SEQ ID NO: 236832 - DNA, 225 bp, synthetic construct
  misc_feature 1..225: note = Description of Artificial Sequence: Synthetic coding sequence
  source 1..225: mol_type = other DNA
atgggacgcagatcgagtaaatgttgttgcatatatgaaaagccaagggctttcggagagtcctctacggaatccgacgaagaagaagaggaaggctgtgggcacacccattgtgtccgcggacataggaagggaaggcggcgtgctacactcggccctactccaactacccctccacagcctccagatccaagccaacctccgcctgggcctatgcagcactag

SEQ ID NO: 236833 - DNA, 225 bp, synthetic construct
  misc_feature 1..225: note = Description of Artificial Sequence: Synthetic coding sequence
  source 1..225: mol_type = other DNA
atggggaggcgctcatctaaatgctgctgcatatacgagaagccgagagccttcggcgaatcctcgaccgagagcgatgaagaggaagaggagggctgtggccacacccactgcgtacgtggacataggaagggcaggcggagggcaactctcgggccaacacccaccactccaccacagccaccagaccctagtcagcctccgccaggacctatgcagcactag

SEQ ID NO: 236834 - DNA, 225 bp, synthetic construct
  misc_feature 1..225: note = Description of Artificial Sequence: Synthetic coding sequence
  source 1..225: mol_type = other DNA
atgggccgacgatcgtccaagtgctgctgcatctatgagaagccccgagcattcggagaatccagcactgagagtgacgaagaggaggaagaaggatgcggccacactcactgcgtgcgtgggcatcgaaaaggcaggaggcgcgcaacacttgggcctacgcctaccaccccacctcagccgcctgacccatcccagcctccccctggaccaatgcagcattag

SEQ ID NO: 236835 - DNA, 381 bp, synthetic construct
  misc_feature 1..381: note = Description of Artificial Sequence: Synthetic coding sequence
  source 1..381: mol_type = other DNA
atggctgaggccggagcaggactgtcagaaactgtcacagagaccaccgttaccgtcactaccgagcccgagaatcggagccttaccattaaactgcgcaagcgaaaacccgagaagaaagttgagtggacgtctgacaccgttgacaacgaacacatgggaagaaggtcttctaaatgctgctgcatttacgaaaagccgagagcattcggagaatcctccactgaaagtgacgaggaagaagaggaaggctgcggacacacccactgcgttagaggacacaggaaggggaggagaagagctaccttaggacctacacctacgacgccccctcaacccccagatccatctcaaccacctcccggtcctatgcagcattag

SEQ ID NO: 236836 - DNA, 225 bp, synthetic construct
  misc_feature 1..225: note = Description of Artificial Sequence: Synthetic coding sequence
  source 1..225: mol_type = other DNA
atgggccgtcgaagctccaagtgttgctgtatctatgaaaagcctcgtgcattcggagagtcttccacagagtcggatgaggaggaggaagagggctgtggacatacacattgtgtaagaggtcatagaaaaggacggagaagggcaacactaggcccaactcccaccacacctcctcagcctccagatcctagccagccacccccaggcccaatgcagcactag

SEQ ID NO: 236837 - DNA, 381 bp, synthetic construct
  misc_feature 1..381: note = Description of Artificial Sequence: Synthetic coding sequence
  source 1..381: mol_type = other DNA
atggccgaggcgggagcgggactgtccgagactgtcacagagaccaccgtcactgttaccacagagcctgaaaaccgcagtctgaccataaaactgcgcaagcggaaacctgagaagaaggtggagtggaccagcgacactgtcgacaacgaacatatggggagaaggagctctaaatgctgttgtatctatgagaagccaagagctttcggcgagagttccaccgaatcagatgaagaggaggaggagggttgcgggcacactcactgtgtccggggacatcgcaagggtaggaggcgcgcaactctggggcctacaccaacaaccccaccccagccaccagacccctctcagcctccccctggaccaatgcaacactag

SEQ ID NO: 236838 - DNA, 225 bp, synthetic construct
  misc_feature 1..225: note = Description of Artificial Sequence: Synthetic coding sequence
  source 1..225: mol_type = other DNA
atgggcagaagaagcagcaaatgttgttgcatctacgagaagccaagagcattcggcgagagtagtacagaatctgacgaggaagaagaggaaggatgtggccatacgcattgcgtcaggggacaccgcaagggaaggcggagagccacgctgggacctacaccaacaactcctccacagccccctgatccttcacagccccctcctggccctatgcagcactag

SEQ ID NO: 236839 - DNA, 225 bp, synthetic construct
  misc_feature 1..225: note = Description of Artificial Sequence: Synthetic coding sequence
  source 1..225: mol_type = other DNA
atgggcaggcggtctagtaagtgttgttgcatctacgagaagccgcgagcttttggcgagagctccactgagtctgatgaggaagaggaggagggttgcggacacacccactgcgtcaggggacatagaaaagggagaaggcgcgctacgttagggccaacacccaccacacctccacagccccctgacccatctcagccacctccgggtcctatgcagcactag

SEQ ID NO: 236840 - DNA, 225 bp, synthetic construct
  misc_feature 1..225: note = Description of Artificial Sequence: Synthetic coding sequence
  source 1..225: mol_type = other DNA
atgggacgccgaagctcgaagtgttgctgtatttacgagaagcctcgagctttcggggagtcatccaccgaatccgacgaagaggaggaagagggatgtgggcatacccattgcgtgcgcggacatcggaaaggtagacgtcgggctacgctcgggcctacacctaccacacctccccagccccctgacccgtcccagccgcctcccggaccaatgcaacactag

SEQ ID NO: 236841 - DNA, 225 bp, synthetic construct
  misc_feature 1..225: note = Description of Artificial Sequence: Synthetic coding sequence
  source 1..225: mol_type = other DNA
atggggaggagatcaagcaaatgctgctgcatttatgaaaaacccagagctttcggcgagtcctctactgaatctgacgaagaggaggaagaaggctgtggccacacacactgtgtccggggtcacaggaagggcagacggagagccacgctggggcctaccccaaccacccctcctcagccacctgacccctctcagccccctcctgggccaatgcagcattag

SEQ ID NO: 236842 - DNA, 225 bp, synthetic construct
  misc_feature 1..225: note = Description of Artificial Sequence: Synthetic coding sequence
  source 1..225: mol_type = other DNA
atgggtcgccgttcatctaaatgttgctgtatttacgaaaagccacgtgcctttggagaatctagcactgaatccgacgaggaggaagaggaggggtgtggccacacacactgcgtacgcggacatcggaaaggcaggcggagggcaacgctgggccctactcccaccactccgccacaaccgcctgaccccagtcagccacccccaggtccaatgcagcactag

SEQ ID NO: 236843 - DNA, 225 bp, synthetic construct
  misc_feature 1..225: note = Description of Artificial Sequence: Synthetic coding sequence
  source 1..225: mol_type = other DNA
atgggcagaaggagtagcaaatgctgctgtatctacgagaagccgagggctttcggagagtcttccaccgaatctgacgaggaagaagaggagggctgcgggcatacacattgtgttcgaggacaccggaaaggcagaaggcgcgcaactctgggccctactccaaccacaccacctcagcccccagatcctagccagcctccacctgggccaatgcagcactag

SEQ ID NO: 236844 - DNA, 225 bp, synthetic construct
  misc_feature 1..225: note = Description of Artificial Sequence: Synthetic coding sequence
  source 1..225: mol_type = other DNA
atggggagacgcagcagtaaatgttgttgtatttatgagaaacctcgggcttttggggagtcgtcaacagaaagcgacgaggaagaggaggaaggctgtggacacacacattgcgttcgtggtcaccgtaaaggacggcgtcgcgctactctggggccaacgccaaccacacctccccagccacctgacccatcccaaccacccccagggcctatgcaacactag

SEQ ID NO: 236845 - DNA, 225 bp, synthetic construct
  misc_feature 1..225: note = Description of Artificial Sequence: Synthetic coding sequence
  source 1..225: mol_type = other DNA
atgggaaggcgctcatctaagtgctgctgtatctatgagaagccacgggctttcggagaatcttccacagagtccgatgaggaagaggaagagggctgtgggcatacgcactgcgtgagaggacaccgcaaaggcagacggagagccacgttaggcccaacacccacgactccccctcagcctcctgaccctagccagcctcctccgggtcctatgcagcactag

SEQ ID NO: 236846 - DNA, 225 bp, synthetic construct
  misc_feature 1..225: note = Description of Artificial Sequence: Synthetic coding sequence
  source 1..225: mol_type = other DNA
atggggaggaggtccagcaagtgttgttgcatttatgagaagcccagggcttttggagagtcttctactgaatcggacgaagaggaggaggaaggctgtggccacacacactgtgtgagggggcatcggaagggcagacgccgtgctaccttgggtcctacgcccaccacacctccccagcccccagacccttcacaacctccaccaggcccaatgcaacattag

SEQ ID NO: 236847 - DNA, 225 bp, synthetic construct
  misc_feature 1..225: note = Description of Artificial Sequence: Synthetic coding sequence
  source 1..225: mol_type = other DNA
atgggacgcaggtcttctaagtgctgttgtatctatgagaagccacgagccttcggtgagtcctctacagaaagcgacgaggaggaggaagaaggatgtggacacacacattgtgtgcgtgggcaccgcaaggggaggcgaagagccacactaggccctacaccaactacacccccacagccacccgacccaagtcagcccccaccaggtcccatgcaacattag

SEQ ID NO: 236848 - DNA, 225 bp, synthetic construct
  misc_feature 1..225: note = Description of Artificial Sequence: Synthetic coding sequence
  source 1..225: mol_type = other DNA
atggggcgtagatcatctaaatgttgttgcatttatgaaaaacccagagctttcggggaatccagtacagagtctgacgaggaggaggaggagggatgcgggcatacccattgcgtgcggggtcaccggaaagggaggcgccgagccactctcggaccgacacctacgaccccaccacagcctccggatcctagtcaaccaccgccagggccaatgcagcactag

SEQ ID NO: 236849 - DNA, 225 bp, synthetic construct
  misc_feature 1..225: note = Description of Artificial Sequence: Synthetic coding sequence
  source 1..225: mol_type = other DNA
atgggacgcagatcctctaaatgttgctgtatctacgagaaacccagagcttttggcgagagttcaaccgaaagcgatgaggaagaagaggaaggctgcgggcacactcactgcgtaagaggtcatcgaaaaggtcgaagaagggcaacgttggggcctacacccactacacctcctcagccccctgacccatctcaacctccacccggacctatgcagcactag

SEQ ID NO: 236850 - DNA, 225 bp, synthetic construct
  misc_feature 1..225: note = Description of Artificial Sequence: Synthetic coding sequence
  source 1..225: mol_type = other DNA
atgggaaggaggtccagtaagtgttgctgcatctacgagaagccaagagcgttcggggagagctcaacagaatcagacgaggaggaagaagaagggtgcggccatactcactgcgttcgagggcaccgcaaaggtcgcaggcgggcaacacttgggccaacccctacaaccccaccacagccccctgacccctcacaacctccgccaggccctatgcagcattag

SEQ ID NO: 236851 - DNA, 225 bp, synthetic construct
  misc_feature 1..225: note = Description of Artificial Sequence: Synthetic coding sequence
  source 1..225: mol_type = other DNA
atgggcaggaggtcttcgaagtgttgctgtatctacgaaaagcctagagcctttggcgaatcttcaactgagtccgacgaagaagaggaggaaggatgcggccacacgcactgcgtgcgagggcataggaagggccgaagacgcgctacgcttggccctactcctacgactcctccgcagcctcccgatcccagccagccccctcccggacccatgcaacattag

SEQ ID NO: 236852 - DNA, 225 bp, synthetic construct
  misc_feature 1..225: note = Description of Artificial Sequence: Synthetic coding sequence
  source 1..225: mol_type = other DNA
atgggtagaagatccagcaaatgttgttgcatttacgaaaagcctagggcgttcggagagagctccacagaaagcgacgaagaagaagaagagggttgtggtcatacccattgcgtgaggggacacaggaagggccgtcggagggctaccctaggaccaactcctacgaccccgccacagccacccgatccttctcagccacctccaggcccaatgcagcattag

SEQ ID NO: 236853 - DNA, 381 bp, synthetic construct
  misc_feature 1..381: note = Description of Artificial Sequence: Synthetic coding sequence
  source 1..381: mol_type = other DNA
atggcggaagctggcgcagggctgagcgagaccgtgactgagacaacggtcaccgtcacaacggaacctgagaataggtctctgacaattaaactgcgcaagcgtaagcccgagaagaaagtcgaatggacatctgacactgtggataacgaacacatggggcgaaggtcatccaaatgttgctgcatttacgaaaaacccagagccttcggcgaatctagtaccgaaagcgatgaagaggaggaggaagggtgcgggcacacacactgcgtcaggggacacagaaaagggcgacgaagagcaacactcgggccaacccccactaccccaccacagcctccagatccttctcaaccacctcccggtcccatgcagcattag

SEQ ID NO: 236854 - DNA, 381 bp, synthetic construct
  misc_feature 1..381: note = Description of Artificial Sequence: Synthetic coding sequence
  source 1..381: mol_type = other DNA
atggcagaggccggtgctggcttaagcgagacggtgacagaaactaccgtgactgttacaactgaaccggagaaccgctcccttacgattaaactgcgcaagaggaagcccgagaagaaggtggaatggacttcagacaccgtagataatgaacacatggggagaagatcatccaagtgctgctgtatctacgaaaaaccacgggctttcggggagagttctacggaatccgacgaggaggaagaagaaggatgcggccacactcactgtgttcgaggtcaccgcaaaggccgaagaagggctacattgggacccactccaactacgccaccacagcctccggatccttcccagcccccaccaggacccatgcagcattag

SEQ ID NO: 236855 - DNA, 225 bp, synthetic construct
  misc_feature 1..225: note = Description of Artificial Sequence: Synthetic coding sequence
  source 1..225: mol_type = other DNA
atgggacgaagatcgtccaaatgttgttgtatttacgagaagccccgagctttcggcgagagttccacagagtctgacgaagaggaagaagagggatgtggccacactcactgcgttcgtggccatcgaaaaggccgaagaagggcaactctcggacccaccccaacgacgcccccacagcctcccgacccatctcagccaccccctggacccatgcaacactag

SEQ ID NO: 236856 - DNA, 225 bp, synthetic construct
  misc_feature 1..225: note = Description of Artificial Sequence: Synthetic coding sequence
  source 1..225: mol_type = other DNA
atgggtcggagatcttctaaatgctgttgcatttacgagaaaccccgagcctttggagagtcctctaccgaatctgatgaagaggaggaggaaggctgcgggcatacccactgcgtgcggggtcatcgaaagggacgacgtcgtgccacactgggacctacaccaactacaccacctcagcctcccgacccgtctcagcctcccccaggcccaatgcagcactag

SEQ ID NO: 236857 - DNA, 225 bp, synthetic construct
  misc_feature 1..225: note = Description of Artificial Sequence: Synthetic coding sequence
  source 1..225: mol_type = other DNA
atgggcagacgctcgtccaaatgttgctgcatttatgagaaaccgagagcattcggcgaaagttctacagaatccgatgaggaggaggaagaggggtgcggacatacccactgtgtacgagggcataggaaagggagacgccgagcaaccctgggacccaccccaacaacaccaccacaacccccagacccttcccagcctccacctgggccaatgcagcattag

SEQ ID NO: 236858 - DNA, 381 bp, synthetic construct
  misc_feature 1..381: note = Description of Artificial Sequence: Synthetic coding sequence
  source 1..381: mol_type = other DNA
atggccgaggctggagccggactgtccgagaccgttaccgagactactgtaacagtgacgacagagccagagaaccgcagcctgaccatcaagctcaggaaaaggaagccagaaaaaaaggtcgagtggacttctgacaccgttgacaacgaacatatgggcaggcggtcttcaaaatgctgttgcatctacgagaaacctcgtgcctttggcgagtcatctaccgagagtgacgaggaagaagaggaaggatgcggacacacccattgcgtgcgcggtcaccgcaagggcagacggagggctaccctgggcccaacaccaacaaccccccctcagccccctgacccctcccagcctcccccaggcccaatgcagcactag

SEQ ID NO: 236859 - DNA, 225 bp, synthetic construct
  misc_feature 1..225: note = Description of Artificial Sequence: Synthetic coding sequence
  source 1..225: mol_type = other DNA
atgggacggaggagcagcaagtgctgctgtatctacgaaaaacctagggcgttcggggaatcctcaaccgaatctgatgaggaggaggaggagggctgcggacatactcattgcgtgagaggacatagaaaaggaagaaggcgggctaccctgggaccaacacccacaactcctcctcagcccccagacccatctcaaccaccaccaggtccaatgcagcactag

SEQ ID NO: 236860 - DNA, 225 bp, synthetic construct
  misc_feature 1..225: note = Description of Artificial Sequence: Synthetic coding sequence
  source 1..225: mol_type = other DNA
atgggcaggcgttcaagcaaatgttgttgcatctatgagaagcccagggctttcggtgaatcttccacagagtccgatgaggaggaagaggaaggatgcggacatactcactgcgtgcgcggacacagaaaaggtcgtagacgggcaaccctcggcccaactcccacaacacctccgcagccccctgatcctagccagccacccccaggacctatgcagcattag

SEQ ID NO: 236861 - DNA, 381 bp, synthetic construct
  misc_feature 1..381: note = Description of Artificial Sequence: Synthetic coding sequence
  source 1..381: mol_type = other DNA
atggctgaggcaggcgcaggactgtccgaaaccgttacagaaaccactgtgaccgtgacaacagaaccagagaacaggagtctgacaatcaagttgcgcaaacgcaagccagagaagaaggtggaatggacctctgacaccgtcgacaacgaacacatgggcagacggagttcaaagtgttgttgtatctatgagaagccgagggccttcggagaatcttctacagagtcggacgaggaagaggaagagggctgtgggcatacacactgcgtccgcggtcacagaaagggccgtaggcgtgcgactctcggccctacgcctaccactccccctcagcccccagacccaagccagcccccacctggccctatgcagcactag

SEQ ID NO: 236862 - DNA, 225 bp, synthetic construct
  misc_feature 1..225: note = Description of Artificial Sequence: Synthetic coding sequence
  source 1..225: mol_type = other DNA
atgggtagacgcagtagcaaatgttgctgtatttacgaaaaaccacgcgcattcggggagagcagcaccgagagcgatgaagaggaggaagagggatgtggacacacccactgtgtgcgaggccatcggaagggacgaaggcgagccaccctcgggccaactccgaccacacctccacagccacctgatccatcccagccaccccctggcccaatgcagcattag

SEQ ID NO: 236863 - DNA, 225 bp, synthetic construct
  misc_feature 1..225: note = Description of Artificial Sequence: Synthetic coding sequence
  source 1..225: mol_type = other DNA
atgggtcgcaggtccagtaaatgctgctgtatctatgagaaacccagggccttcggtgagagtagcacagaatctgacgaggaggaggaggaagggtgtgggcatacacactgcgtcaggggccaccgcaaaggacgcaggcgtgcaaccttgggccctacccccacaactcccccacagcctccggacccctctcagccaccccctggaccaatgcaacactag

SEQ ID NO: 236864 - DNA, 225 bp, synthetic construct
  misc_feature 1..225: note = Description of Artificial Sequence: Synthetic coding sequence
  source 1..225: mol_type = other DNA
atggggagacgttcatccaaatgttgctgtatctatgaaaaaccgcgagcctttggagaaagtagcactgaaagtgacgaagaagaagaggagggatgtgggcatacacactgcgtgagaggtcaccgcaagggacggaggagagcaacactgggcccaacccctacgaccccacctcaaccacctgacccgagccagccaccacctggcccaatgcagcactag

SEQ ID NO: 236865 - DNA, 225 bp, synthetic construct
  misc_feature 1..225: note = Description of Artificial Sequence: Synthetic coding sequence
  source 1..225: mol_type = other DNA
atgggcaggcggtcttcgaaatgttgctgcatctatgaaaagcccagagcattcggcgaaagtagcactgagagtgacgaagaggaagaggaaggctgtggacacacgcactgtgttaggggccacaggaagggtcgaagacgggcaacattagggccaacccccacaactccccctcagcccccagatccatcccagcctccccctggacccatgcagcattag

SEQ ID NO: 236866 - DNA, 225 bp, synthetic construct
  misc_feature 1..225: note = Description of Artificial Sequence: Synthetic coding sequence
  source 1..225: mol_type = other DNA
atgggcaggagatccagcaaatgctgctgcatctacgagaagcccagggcgttcggcgagagtagcacagagtcagatgaagaggaggaagagggttgcggacacacccactgtgtacgcggacatcggaagggtcgcaggagggctactttaggccctacacccacgacgccacctcagccacctgacccatcccaacccccacctggaccaatgcagcattag

SEQ ID NO: 236867 - DNA, 225 bp, synthetic construct
  misc_feature 1..225: note = Description of Artificial Sequence: Synthetic coding sequence
  source 1..225: mol_type = other DNA
atgggcaggcggtcatctaagtgctgctgcatttacgagaagccccgagccttcggagaaagcagcactgagtcggacgaagaggaggaagaaggctgtggccatacgcactgcgtgcggggtcatcgcaaagggcgtcgaagggccacgctcgggcctactcctactacaccacctcagccaccagacccaagccagcccccaccaggtccgatgcagcactag

SEQ ID NO: 236868 - DNA, 381 bp, synthetic construct
  misc_feature 1..381: note = Description of Artificial Sequence: Synthetic coding sequence
  source 1..381: mol_type = other DNA
atggcggaggccggagctggcctatccgagaccgtgacggagacaactgtgaccgtaacaacagagcccgagaaccgcagtctcactataaaactcaggaagagaaagcctgagaagaaggtggagtggaccagcgatacggtagacaatgagcatatgggcaggaggtccagcaagtgctgctgcatatacgagaagccacgtgcgtttggagagtctagcacagagtctgacgaggaggaagaggaaggatgtggtcacacacattgcgtacgcggtcataggaaggggcgtcggcgtgcgaccttgggcccaacaccgactacccccccacagccacctgatccatctcagccaccaccaggcccaatgcaacattag

SEQ ID NO: 236869 - DNA, 225 bp, synthetic construct
  misc_feature 1..225: note = Description of Artificial Sequence: Synthetic coding sequence
  source 1..225: mol_type = other DNA
atggggcgacgtagttctaagtgctgctgtatctacgaaaaacccagagcttttggcgagtcctccacggaaagcgacgaagaggaggaggaagggtgtggccacacacattgcgttagaggtcatcgtaagggcaggcggagagccaccttgggaccaaccccgactactcccccacagccgcctgatccctctcagcctccacctgggcctatgcagcactag

SEQ ID NO: 236870 - DNA, 225 bp, synthetic construct
  misc_feature 1..225: note = Description of Artificial Sequence: Synthetic coding sequence
  source 1..225: mol_type = other DNA
atgggaagacggtcatccaagtgctgctgcatctacgagaaaccccgtgcattcggagagagctctaccgagagcgacgaggaggaggaagaaggatgcggccatacacactgcgtgcggggtcaccggaaaggaagacggagggccacccttggtcccacacccaccacgcctcctcaaccacctgacccttctcaacctccacccggtccgatgcaacactag

SEQ ID NO: 236871 - DNA, 225 bp, synthetic construct
  misc_feature 1..225: note = Description of Artificial Sequence: Synthetic coding sequence
  source 1..225: mol_type = other DNA
atggggcgtcgtagtagcaagtgttgttgcatctatgagaagccacgggcattcggagagagcagtaccgagtcagatgaagaagaggaagaaggttgtggacatacccattgtgtgcgagggcacagaaaaggtcggcgtagggcaactcttggacccacccccaccacgcctccacaaccccctgaccccagtcaacctcctcccggtcctatgcaacattag

SEQ ID NO: 236872 - DNA, 225 bp, synthetic construct
  misc_feature 1..225: note = Description of Artificial Sequence: Synthetic coding sequence
  source 1..225: mol_type = other DNA
atgggccgtcgaagcagcaaatgttgctgcatctacgaaaagcctcgggcttttggggagagttccactgagagtgacgaagaagaggaagaagggtgtggacatacccactgtgtccggggtcatagaaaaggcagaagaagagccacccttggaccaactcccaccacacctccgcaacctcccgatccatcacagccacctcctggacccatgcagcattag

SEQ ID NO: 236873 - DNA, 225 bp, synthetic construct
  misc_feature 1..225: note = Description of Artificial Sequence: Synthetic coding sequence
  source 1..225: mol_type = other DNA
atggggaggcgctcgtccaagtgttgttgtatttacgagaagccgagagcatttggcgaaagttcaacggaatccgatgaggaggaggaggaagggtgcggtcacacccactgcgtcagggggcacaggaagggcagaaggagagctacactggggccaacacctacgacccctcctcagcctccggacccctcccagcctcctcctgggcctatgcagcactag

SEQ ID NO: 236874 - DNA, 225 bp, synthetic construct
  misc_feature 1..225: note = Description of Artificial Sequence: Synthetic coding sequence
  source 1..225: mol_type = other DNA
atgggcagacgctcctctaagtgttgttgtatctacgagaagccgagggcctttggggagagctccaccgaaagtgatgaggaagaggaagagggctgtgggcacacccattgcgtgcggggtcatcggaagggaagaagacgggcaaccctgggtccaacccccacaacaccccctcagcctccggacccaagccagcccccacctggtcctatgcagcactag

SEQ ID NO: 236875 - DNA, 381 bp, synthetic construct
  misc_feature 1..381: note = Description of Artificial Sequence: Synthetic coding sequence
  source 1..381: mol_type = other DNA
atggccgaagccggagccggattgtctgaaaccgtgacagagacaacagtgacagttacaaccgaacctgagaatcggagcctgaccattaaattgaggaaacggaaacctgaaaagaaggttgagtggacatccgacaccgtagacaatgaacatatgggcaggcggtctagtaagtgctgttgcatctacgagaaacctagggctttcggagaaagtagtacagagtcagacgaggaagaagaggagggctgtggccacactcactgtgtacgcggtcacaggaaaggcaggcgacgggctaccctgggacccactccaacaaccccccctcaaccccctgacccctctcagcctcctcccggacccatgcaacactag

SEQ ID NO: 236876 - DNA, 225 bp, synthetic construct
  misc_feature 1..225: note = Description of Artificial Sequence: Synthetic coding sequence
  source 1..225: mol_type = other DNA
atggggagaagatcctcaaagtgttgctgcatttacgagaagcctagagccttcggagaatcttccactgaatctgacgaggaggaggaggagggctgtggtcacacgcactgtgtgagaggacaccggaagggcaggcggagagctactctgggccctacccctacaactccgcctcaacctcctgacccaagtcagccccctccgggacccatgcagcactag

SEQ ID NO: 236877 - DNA, 225 bp, synthetic construct
  misc_feature 1..225: note = Description of Artificial Sequence: Synthetic coding sequence
  source 1..225: mol_type = other DNA
atgggaaggagaagttctaaatgttgttgcatttatgagaagcccagggcatttggcgaatcatctacggaaagcgacgaagaggaggaggagggctgtgggcacacacattgcgtgcggggtcaccggaagggaaggaggcgcgcaaccctcgggccaacaccaacgactcccccacaacctccggacccatctcagcccccaccaggacccatgcaacactag

SEQ ID NO: 236878 - DNA, 225 bp, synthetic construct
  misc_feature 1..225: note = Description of Artificial Sequence: Synthetic coding sequence
  source 1..225: mol_type = other DNA
atgggaagaaggtcttccaaatgttgctgcatatatgagaaaccgagggcatttggtgaatcaagcaccgagtctgatgaggaagaggaagagggctgcgggcatacccactgcgtccgtggacacagaaagggcagacgtcgagccacacttggaccgaccccaactacaccaccacagcctcctgatccctctcagcccccacctggcccaatgcagcactag

SEQ ID NO: 236879 - DNA, 444 bp, synthetic construct
  misc_feature 1..444: note = Description of Artificial Sequence: Synthetic coding sequence
  source 1..444: mol_type = other DNA
atggccgactctggcaccgcaggcggagccgctctggccgctcccgctcctggacccggaagcggagggccaggtccacgggtgtacttccagtccccaccaggtgccgcaggcgaaggcccaggcggagccgatgacgaaggccctgtccgcagacagggtaaggtgacagtgaagtatgaccgcaaggagttgaggaagaggctgaatctggaagagtggatccttgaacaactgacccggctgtatgattgccaagaggaggagattcccgagcttgaaatcgacgtcgacgagctgctggatatggaatctgatgacgctagagccgcaagggtgaaggaattgcttgttgactgctataaacctaccgaggcatttataagcgggttgttagataagatcagggggatgcaaaaattgagtacaccccagaagaagtag

SEQ ID NO: 236880 - DNA, 498 bp, synthetic construct
  misc_feature 1..498: note = Description of Artificial Sequence: Synthetic coding sequence
  source 1..498: mol_type = other DNA
atgagcgttgccacgggcagcagcgaaaccgcgggaggcgcatctggaggcggagcccgtgtgttttttcagtctccaagaggcggagcgggaggctcaccaggttcaagcagtggttccgggtctagcagagaggattctgccccagttgctacagcagccgcagcaggtcaggtgcagcagcaacagcaaagaaggcaccagcagggcaaggtaactgtgaaatacgaccggaaagagctcagaaagaggctagttttggaggagtggatcgtcgagcagctggggcaactatatggatgcgaggaggaggaaatgcctgaggttgaaattgacatcgatgacctgctggacgccgatagtgacgaggagcgcgcttcaaagctccaggaggcgctggttgactgctacaaacctacagaggaattcatcaaagagctgctgtcccgaatcagaggaatgcggaaactgtctcctccacagaaaaaatccgtgtag

SEQ ID NO: 236881 - DNA, 438 bp, synthetic construct
  misc_feature 1..438: note = Description of Artificial Sequence: Synthetic coding sequence
  source 1..438: mol_type = other DNA
atgctgtcgtctagtccggcttcttgcacgtccccgtcaccggacggggaaaacccgtgtaaaaaggtgcactgggcctcgggtcgcagaaggactagtagtacagacagcgaatctaaaagccatcctgatagtagcaagatccctagaagcagacgaccctccagacttacagtcaagtatgacagaggccaattgcaacggtggctggagatggagcaatgggtggacgcacaagttcaggaactatttcaggatcaagctacgccatctgagccggaaattgatctggaggcccttatggacctaagcaccgaggagcagaaaacccaactagaagcgattttgggcaactgtcctagaccaactgaggcattcataagcgaattactgtctcaactcaagaagctgagaaggttatccaggccgcaaaagtag

SEQ ID NO: 236882 - DNA, 603 bp, synthetic construct
  misc_feature 1..603: note = Description of Artificial Sequence: Synthetic coding sequence
  source 1..603: mol_type = other DNA
atgttaagcagcagccccgcttcatgtacttcccctagccctgacggcgagaatccatgtaagaaggtgcattgggcctccggacgccgtcgcacatctagtactgatagtgagtccaaaagtcatcccgattctagtaaaattcccaggtcaaggaggccgtcaaggctaacagtcaagtacgatcgaggccagctccagcgctggttggagatggagcagtgggtcgatgcccaggttcaagagctgtttcagagtctcgcactgtccccacgcttggaatgttcgggagtgatccacagcctccagttgttgccgcctggctttaacagatttagttgcctgagcagctggagttcgtgggactatggtattaaacagcccctcctgagcctgaggctgacctggaaactgtcttggatatacccccaacggagtcgtcgattgtcctggcgcccattcctgggcactgcccctgcgccacagcggcttctgtcccttagttgctccgtcaattccagaaacagcggcgactctgctggcctgaggaacaaacccgagaggccatcgctggccgcttccgcccttcccggattgccctag

SEQ ID NO: 236883 - DNA, 516 bp, synthetic construct
  misc_feature 1..516: note = Description of Artificial Sequence: Synthetic coding sequence
  source 1..516: mol_type = other DNA
atggagcaggataacagcccgaggaagatccagtttacagtacctctactagagccccacctggatcctgaggcggctgaacagatcagacggaggaggcctacaccagccacactggtgctcacttccgaccagtcatcgcccgagatagacgaagacagaatccctaacccacatcttaagagcaccctcgccatgtctccaaggcagcggaagaaaatgactcggatcaccccaacaatgaaggaactgcagatgatggtcgaacatcacttgggacagcaacagcagggcgaggagccagagggcgctgcagaatccaccgagactcaagagtccagacctcccggaatcccagatacagaggtcgagagtagacttgggacaagtggaaccgctaagaagactgccgaatgcattcccaagacccatgagaggggttccaaggagccctctactaaggaaccctctacccacattcctcccctcgatagcaagggagctaattctgtgtag

SEQ ID NO: 236884 - DNA, 462 bp, synthetic construct
  misc_feature 1..462: note = Description of Artificial Sequence: Synthetic coding sequence
  source 1..462: mol_type = other DNA
atggaacaggataattcccctcgcaagatccaattcacggttccacttctcgaaccacacctggatcccgaggcagccgagcagattagaaggaggaggcccacccccgctacgctagtcctcaccagtgaccagagctcacccgagatcgatgaagatcggattcctaatccgcacctgaaaaaactgcagaatgcatcactcaagctgacacgagaggccgtacgtaaccccgcacagaaaaaccctcaacctatttatcaccattggatacctcgggaacccacacggtgtcacagacgaggcggtacaggtgggcagaagagcgtcggaggattcccctgctccactcatacactggcgccattttacgtgttcacgcgctctatcttgctgctaaagagaggggaaaggatgtcccatccgctcgagcctcgagacgatcccacaaagatgccttag

SEQ ID NO: 236885 - DNA, 330 bp, synthetic construct
  misc_feature 1..330: note = Description of Artificial Sequence: Synthetic coding sequence
  source 1..330: mol_type = other DNA
atggaacctaattcacctaagaagatccaattcgccgtgccggtgttccagtcacaaatcgcaccggaggctgcagagcagattaggaagcgcaggcctacccccgcttcactggtgatcctgaatgagcacaaccctcccgaaatcgatgacaagcgaggtccaaatacgcagggtgaactgcaaaacgcaagcccaaagcagcgtaaacagtctgtgtatacgcccccaaccatcaaaggtgtcaaacatctgaaaggccagaacgaatcagccttccccgaggaagaggaaggcactaacgaaagggaagaacagcgcgatcattag

SEQ ID NO: 236886 - DNA, 330 bp, synthetic construct
  misc_feature 1..330: note = Description of Artificial Sequence: Synthetic coding sequence
  source 1..330: mol_type = other DNA
atggaaccgaatagcccaaaaaagatccagttcgcagtgccagtgtttcagagccaaattgctcctgaagccgctgagcagatacgcaagcggagacctacgccggcttccctggtcatactgaacgagcacaacccgccagaaattgatgataagcgcggacccaatacccagggtgagctgcagaatgctagtccgaaacagcgcaagcaatcagtctacaccccaccaacgatcaaaggggttaagcacttgaaaggccaaaatgaaagcgcctttcccgaagaggaggagggaaccaacgaaagagaagaacagagggaccattag

SEQ ID NO: 236887 - DNA, 330 bp, synthetic construct
  misc_feature 1..330: note = Description of Artificial Sequence: Synthetic coding sequence
  source 1..330: mol_type = other DNA
atggagcccaacagcccgaaaaagatccagtttgccgtacccgtttttcaatcacagattgctccagaggcggctgagcagatacgcaaacgcagacctacacccgcatccttggtaattctgaatgagcacaatcctcccgagatagatgacaaaagaggaccaaacactcagggtgaattgcagaatgccagccctaaacagaggaagcagagcgtgtacacaccccctaccatcaagggcgtgaagcatctgaaaggccaaaacgagagtgccttccccgaggaggaagaggggacaaatgagcgagaggagcaaagagaccattag

SEQ ID NO: 236888 - DNA, 618 bp, synthetic construct
  misc_feature 1..618: note = Description of Artificial Sequence: Synthetic coding sequence
  source 1..618: mol_type = other DNA
atggccgcttccactgctagccaccggccaatcaaaggcattcttaagaacaagacatccacgacatcatctatggtcgctagcgccgaacagcctcggggtaacgttgatgaggaattaagcaaaaagagtcagaaatgggacgagatgaatattcttgccacctatcatcccgcagacaaggattacggacttatgaagatcgatgagccctccactccctatcattctatgatgggcgacgacgaagacgcctgcagcgatacagaggctaccgaggctatggcgcctgacatcctggcacgcaaattggcggctgcagaaggattggagcccaagtataggatccaggagcaggagtctagcggcgaggaggactctgacctcagccccgaggagagggagaaaaaacgccaatttgagatgaagcggaaattacactataacgagggcctcaacataaagctagcaagacagctgataagcaaagacctccacgacgatgatgaagacgaggagatgctcgagaccgctgacggagaatctatgaataccgaggagtcgaatcaggggagcaccccttctgatcagcaacagaataagttgaggagtagctag

SEQ ID NO: 236889 - DNA, 3093 bp, synthetic construct
  misc_feature 1..3093: note = Description of Artificial Sequence: Synthetic coding sequence
  source 1..3093: mol_type = other DNA
atgaaaatggccgacgcaaaacagaaacgcaacgagcagctgaagcgctggatagggtcagaaaccgacctcgagccgccagtagttaaacggcagaaaaccaaggttaaattcgacgatggcgcagtgttcttggccgcttgtagcagcggggacactgacgaggtgctcaagcttttacataggggagccgacataaactacgcaaacgtcgacggcctaacagcattgcaccaggcctgtatcgacgataatgtcgatatggtaaaattccttgtggaaaacggcgcaaacattaaccaacccgacaatgaggggtggatcccgcttcatgccgctgcatcatgcggctatctggatatcgccgaattccttattggccagggagcacacgtcggggcagttaacagcgaaggtgatacccctctcgacattgccgaagaggaggccatggaagagctattgcagaatgaggtgaaccgccagggagtggacattgaagccgctaggaaggaagaggagagaattatgctacgggatgctcggcagtggttgaacagcggtcatattaacgacgtgagacatgctaagagtgggggtacggctctgcacgtcgctgctgcaaaggggtacactgaagtcctcaagcttctcatccaggccggttacgatgtgaacatcaaggactacgacggttggactccgctacacgcagccgcacattggggtaaggaggaggcatgtcgcattctagtggataacctttgcgatatggagatggtgaacaaggttggacagactgctttcgacgtcgctgacgaggatattctgggctatttggaagagctacagaaaaaacagaatctcctgcactctgagaagcgggacaagaagagccccctcatcgagagtaccgccaatatggataacaaccagtcccagaagacattcaaaaataaggaaacccttattatcgagccagagaaaaatgcctctcggatcgaatctctggagcaggaaaaggtggatgaggaagaggaggggaagaaggatgagtcctcgtgcagctcagaagaagacgaggaagacgactccgagtctgaggctgagactgacaaaacgaaacctctggcctccgtaactaacgcgaatacgagctcgactcaggctgcccctgtggctgtaacgaccccaacggtcagtagcggacaggctactcctaccagtccaattaaaaaattcccaacaacagcgaccaaaataagcccgaaggaagaagaacggaaggacgaatccccggctacttggaggctggggttgagaaagactggctcctacggggcactggccgaaattacggcatccaaggaggggcaaaaagaaaaggatacagcaggcgtcaccagatccgcatcgtcgccccgtctaagttcctctctcgacaacaaggagaaggagaaggactcaaagggcactcgcttagcatatgttgcccctaccatcccgaggagattagcgtccacttcagacattgaggagaaggaaaacagggattcaagctccctgcgaacaagctcctcatatacccggagaaaatgggaagacgatttgaagaagaattcttccgtcaatgaaggaagcacgtaccacaaaagctgtagcttcggcaggcggcaggacgacctgatttcttcatcggtgccctcaacgacctctacacccactgtgacaagcgcggcaggcctccaaaagtctctcctgagtagcacatctacgacaacgaagataactaccggcagctcctcagctgggacccagtcaagtacctcaaatcgcctgtgggccgaagactccacagagaaggaaaaggactcggtaccaaccgctgtgactattcccgtggctccaaccgttgtgaatgccgctgcctcaacaaccactttgacaacaacaacagcagggacagttagctcaactaccgaagtgagggaaaggagacggtcgtatctgacccctgtgcgtgacgaagaatcagaaagtcagcgcaaggcacggagccgccaggctcgacagtcaaggcggtccacacaaggggtgaccctgaccgacctgcaggaagcggagaagaccattggtcgaagtagatccacaagaactagggagcaggagaatgaagaaaaggagaaagaggagaaagagaaacaggacaaagaaaaacaggaagagaagaaggagtctgaaacatctcgtgaggatgagtacaagcagaaatactctagaacttacgatgagacgtatcaaagatatcgaccagtctctaccagctccagcaccacaccatcatccagcctgtctacaatgtcctcaagtttatacgctagcagtcaacttaatcgccctaattccctagtgggaataacctcagcctatagccggggaattacaaaggaaaacgaacgagaaggcgagaaacgggaagaggaaaaggaaggcgaagacaaatcacagcccaaatccatccgtgagaggaggaggccaagggaaaagcgtagatctacaggggtctccttttggacccaggatagtgacgaaaacgagcaggaacagcagtcagacaccgaagaagggtccaataaaaaagaaacccaaaccgacagcatctctcgatacgagacctcatcaacaagcgcgggtgaccgatatgactctctcctcgggagaagcggctcatactcctacctggaagagagaaagccttattcctctcggctggagaaggacgatagtactgacttcaaaaaactctacgagcagattctggccgagaacgaaaagctgaaggctcagctgcacgacacaaacatggagttgacagacctgaaacttcagctggaaaaggctacccagagacaagaaagattcgctgatagatctctcctagaaatggagaaacgcgagcgaagggccttggagaggcgcatctcagaaatggaagaagaattaaaaatgctgcctgatctaaaagccgacaatcagcgacttaaggatgaaaatggagccctcatacgggtgataagcaagctttccaagtag

SEQ ID NO: 236890 - DNA, 2916 bp, synthetic construct
  misc_feature 1..2916: note = Description of Artificial Sequence: Synthetic coding sequence
  source 1..2916: mol_type = other DNA
atgaaaatggctgatgcaaaacagaaaagaaacgaacaattgaagcgctggataggatctgagaccgatttagagcctccggtggtcaagcgccagaagactaaggtcaagtttgatgacggagctgtgtttctcgctgcctgtagtagcggagacacagatgaagtactgaaattgttgcatagaggagccgacattaactatgccaatgtggacggtctcaccgctctgcatcaagcctgtatagacgacaatgtggacatggtgaagtttcttgtagaaaatggcgcaaatatcaaccaacccgacaatgaggggtggattcccctccatgccgctgccagctgtggatacctggacatagctgagtttctgatcggtcaaggagcacacgtgggtgccgtgaattcagagggcgatacgccattagatatcgcagaagaagaagctatggaagagctgttgcagaacgaggtaaatcggcagggcgtcgacattgaagccgcacgcaaggaagaagaaagaataatgttacgcgacgcccgacaatggctcaactcagggcatatcaatgatgttcgtcatgccaagtcaggcggtaccgctcttcacgtggcggcagccaaagggtacaccgaggtgctcaaactgctaattcaagctgggtatgatgtaaatattaaggactacgatggctggactccactgcacgccgcagcacattgggggaaagaagaagcatgtaggatccttgtggataatctgtgtgatatggaaatggttaataaggtggggcagacagcctttgacgtagccgatgaagacatcctgggatatctggaggaattgcaaaagaagcagaacctgcttcacagcgagaagcgtgataaaaagagcccactgatcgaaagtaccgcaaatatggacaacaaccagagccagaaaacatttaaaaataaagaaacacttataatagagccggagaagaatgcatcacgcattgaaagtctggaacaggagaaggtcgacgaagaggaggagggtaagaaagatgagagcagctgtagttctgaggaggacgaggaggatgactccgaaagcgaagccgagacggacaaaactaagcccctggccagcgtgaccaatgcgaacacatcctccactcaggcagctcccgtagcagtcacgactcccactgtgagctctggacaagccacacccacctcaccaataaagaagttccctacaaccgccacaaaaatcagtcccaaggaagaggagagaaaagatgaaagcccagcaacatggcggctggggctccggaagaccggcagttatggtgcactggccgaaattactgctagtaaagagggccagaaagaaaaggatactgcaggagtcactaggtcagcgtcaagtcccaggctgtcgtcttctctcgacaacaaagaaaaagagaaagactctaagggcacgcgtctagcttatgtcgctcctacgattcccaggaggctggcatctacttctgacatcgaagaaaaagaaaatcgcgacagttcctccctgcggacttcctctagctacacacgtcgaaaatgggaagacgatcttaagaaaaactctagtgttaacgaaggatccacgtaccacaaatcatgtagctttgggaggagacaagatgatttaatctcatcaagcgtgccatctaccacatccacaccaacagttacaagcgctgcaggcttacagaagagcctgctgtcttcaaccagtacgaccactaagatcaccaccggcagcagttcggcaggcacacagtctaggagctatctgactccagtgagagatgaggagagcgaatcccagaggaaagctcgctctagacaggctaggcagtcccgccgatccactcagggggtcaccttgactgacctccaagaggccgagaagaccattggacgttcccggtcaacaagaactcgggaacaggaaaatgaagaaaaagaaaaggaggaaaaggagaaacaggataaagaaaagcaggaggaaaaaaaggaatctgaaacaagtcgtgaggacgaatataagcagaaatacagcaggacctatgacgaaacataccagcgataccgaccagtgagcacatcttccagtacaaccccttccagttctctgtccactatgtccagcagtctttatgcttcttctcaactgaacaggccaaatagtctcgttggaatcacttctgcctatagcagaggcatcactaaggagaacgagcgagagggagagaagcgagaggaggagaaggaaggcgaggacaagtctcaacctaaatctatccgggaacgcaggagacccagagagaaacgtagatccacgggggtcagtttttggacacaggattctgatgagaacgagcaggagcaacagagcgacacagaggagggctccaataaaaaggagacgcaggtcaatacaatcaccttgtacgaaaccagctctacctcagcaggggacaggtacgattcactgctgggcaggagcgggtcttattcatacctagaggaacgaaaaccctatagttctaggctcgagaaagatgattccacagactttaagaagctctatgaacagatcctagctgagaacgagaagctgaaggcacagcttcatgacactaatatggagctgacggatttgaagctccagctggaaaaggccacccagagacaggaacgctttgcggaccggtcactactagaaatggaaaagcgcgaacgtagagcactcgagcgtagaatcagtgagatggaagaggaattaaaaatgctgcccgacctgaaagcagataaccagagactgaaagacgaaaatggcgctctgattcgagtcatctctaaactgtcaaagtag

SEQ ID NO: 236891 - DNA, 2925 bp, synthetic construct
  misc_feature 1..2925: note = Description of Artificial Sequence: Synthetic coding sequence
  source 1..2925: mol_type = other DNA
atgaaaatggctgatgctaaacaaaaaagaaatgagcaactgaaacggtggattggaagcgaaacagaccttgagccgccagtcgttaagcgacaaaagacgaaggtgaagtttgatgacggggcagtgttcctggcagcctgcagcagcggtgacactgatgaagtcctgaagctgttacatcgaggagcggacattaactatgccaacgtggacggcttgaccgctctccaccaggcctgtatcgacgataatgtggatatggtgaagtttctagtggaaaacggagccaatataaatcagcccgacaatgagggatggatccccctgcacgcagccgcttcatgcggatatttagacatagccgagtttctcattggccaaggcgctcacgtcggcgctgtgaattctgaaggggatacgcccctggacattgccgaagaggaagccatggaggagctgctgcaaaacgaagtgaacagacaaggggtggacatcgaagccgcacgaaaggaagaggagcggataatgctccgggacgctcggcagtggctaaactctggccacattaatgacgttcgccacgcgaaatctggcggaactgctctgcacgttgcggcagccaaagggtatactgaggtgttaaaattgctgatccaggccggttatgatgtaaatattaaggactatgatggatggacccccctgcatgctgcagcccattggggaaaggaagaagcctgccggattcttgtggacaacctttgtgatatggagatggtcaacaaggtgggccaaactgcgttcgacgtcgccgacgaagacatactgggttatctggaggagctgcagaagaagcaaaacctgctgcactcagagaaaagagataagaaaagccctctgatcgaatcaactgcgaatatggacaacaatcagagccagaagacattcaagaataaagagactctgatcattgagcctgaaaaaaatgcctcgcgcattgagagcctggaacaggaaaaggttgacgaagaagaggaaggtaaaaaggatgaaagctcttgctcatccgaggaggatgaagaagatgactcggagtcagaagcagaaactgataagaccaagccactcgcctcagtgaccaacgctaacacgtcatctacccaggctgctcccgttgcagttaccactccaacagtttcttcaggccaagcaacacctacctcaccaattaaaaagttcccaacaacagcgacgaagatctcccctaaggaggaggagaggaaagatgaaagtcctgctacttggcgcctgggcttaagaaaaacaggctcttacggagccttggcggagatcaccgcatctaaggaggggcagaaggagaaagacaccgcaggggtcacacgaagcgccagctccccaagactgagttcaagcctggataataaggaaaaagaaaaagacagcaaaggcacacgtcttgcatatgtggcacctaccatccctcggcgtttggcgtctacttctgatatcgaggagaaggagaatagagattccagctctctaaggacttcttcatcctacactcggaggaaatgggaggacgatctgaagaaaaacagtagcgtgaacgagggctccacctatcataagagcacctccaatcggctatgggcagaggactccacagagaaggagaaggatagcgttccgaccgccgttacaatccccgttgcccctactgtggtcaacgccgctgcttccaccacgacgttaaccaccaccacagctggtactgtgagtagtaccacagaagtgcgggagaggcgccgttcttacctgactccagtgagggacgaagagagcgaaagtcagaggaaggcccgttcacggcaggccaggcaatcccggagatcgacgcaaggtgtgacattgaccgatctgcaggaagctgaaaaaacaattggacggtccaggtcaacgcgcacacgcgaacaagagaatgaggaaaaggaaaaagaagaaaaggagaagcaggacaaggaaaaacaggaggagaaaaaagagtccgaaacttctcgggaagacgagtataagcagaagtactcccgcacttatgatgaaacataccagcgatacagacctgtttcaacaagtagctcgacgacacctagttccagtctttccacaatgagctcgtcattgtatgctagttcgcagctaaaccgacccaattctctagtggggatcacttccgcctacagccgcggaattacaaaggagaacgaaagagagggcgaaaaacgggaggaggagaaggaaggcgaggataaatcccagcctaagtcaattcgtgagaggcgcaggcctcgggaaaaaaggcggagtacaggagtgtcattttggacccaggactccgacgaaaatgagcaggaacagcagagcgatacggaagagggtagcaacaaaaaggagacccaggtcaataccattaccttgtatgaaactagttcaacctccgctggagacagatacgattctctcctggggaggagtggcagctacagttatttagaggaacgtaaaccatattcctctcgcctggagaaagatgattcaactgactttaaaaagctctacgaacagattttggcagaaaatgaaaaactgaaagcccaacttcacgataccaatatggaacttactgacctcaagctgcaacttgagaaggccacccaacgacaggaacgctttgccgataggagtctcctagagatggagaagcgcgaacgtcgcgcactggagcgcaggatatctgagatggaagaagagttaaaaatgctgcctgatcttaaagctgacaatcaaagactcaaggatgaaaatggggcattaattagagtgataagcaagctttctaaatag

SEQ ID NO: 236892 - DNA, 2988 bp, synthetic construct
  misc_feature 1..2988: note = Description of Artificial Sequence: Synthetic coding sequence
  source 1..2988: mol_type = other DNA
atgaagatggccgatgctaaacagaagcggaacgaacaattgaaaaggtggatcggttcagagactgacctcgagcctcccgtggtgaagcggcagaaaaccaaggtcaagtttgatgatggcgctgtattcctcgcagcctgctccagcggagataccgacgaggtactcaaactgctgcatagaggcgcagacataaattacgccaacgtcgacgggctcacggccctgcatcaagcttgcattgacgacaatgtcgacatggttaaatttctcgtcgaaaatggtgccaacatcaatcagcctgataacgagggatggattccactgcatgccgctgctagttgcggatacctggatatcgccgaattcttaatcggtcagggcgcacacgtcggagccgttaattcagaaggtgatacaccccttgatattgccgaggaggaggccatggaagaactcctgcagaacgaagtaaatcgtcagggcgtggatatcgaagccgcacggaaagaggaggagcgaataatgctccgagacgccaggcagtggctcaatagtggtcacatcaacgacgtgcgtcatgcaaaaagcggtggcacggccctgcacgtggccgcagctaagggttacaccgaggtactcaaactgcttatacaggctggatacgacgtcaatattaaagactacgacggatggactccgctccatgctgccgcacactgggggaaggaggaggcctgccgaattcttgtggataacctttgcgacatggaaatggttaacaaggtcggccagactgcgttcgatgtcgcagacgaagatatcctcggctacctagaagaactgcaaaaaaagcaaaatctgcttcactccgagaagagggataagaaaagtcccctgatcgaaagtacggctaacatggacaataatcagtctcaaaagacctttaagaataaggaaaccctgatcattgagccagagaagaatgcttcacgtattgagagcctggagcaagaaaaggttgatgaagaggaggagggcaagaaagatgagtcaagttgctctagcgaagaagacgaggaggacgactcagaatctgaagccgaaaccgataagacaaaaccgctagctagtgttacaaatgcgaacacttccagcacccaggccgcacctgttgccgtgaccactcctactgtgtcctctggccaggccacgcccacgtcccccataaagaagttccctaccactgcgaccaaaatcagccccaaagaggaggagcggaaagacgaaagccctgcgacttggcggcttgggctgcgaaaaacaggatcctacggggctttagcggagattacggctagtaaagaaggccagaaggaaaaggacacggcaggagtcacccgttctgctagcagccctaggctctctagcagtctggataataaagaaaaggagaaggattcaaagggcacgcggctggcttatgtggcaccaaccattccaagacgtcttgcaagtaccagtgatattgaagaaaaggagaatagggactctagctcacttcggactagctcttcctacaccaggcgcaaatgggaggatgacctcaaaaagaactcatccgtgaacgagggatccacttaccataaatcctgctctttcggaaggagacaggacgacttgattagcagcagcgtcccaagcactacttctacacccactgtaacctccgcggctggattgcagaaatcactcctatcgtctacatccaccacaactaagattacaacaggatcctcctcggcaggcacacaatctagcactagcaatcgcctgtgggcggaagatagtacagaaaaagagaaagatagtgtgccaacagcagtgacaattcctgtcgccccaaccgtggtgaacgcagcagcctccactacaacactgaccacgactacagccggtactgtgtccagtaccaccgaggtgagggagcggagacggtcatatttgacgcctgtgcgagatgaagagtcagaatcacagcgcaaagctcgctctcgccaggcccgtcagagtcgaagatcaacgcaaggagtcaccctcactgacctgcaggaggctgagaaaaccatcggccgttcccggtcaacaagaacccgggagcaggagaacgaggagaaggaaaaggaggaaaaggaaaaacaggataaggaaaaacaggaagagaaaaaggagagcgagaccagtagagaggatgaatacaaacaaaaatactctagaacctacgatgagacgtaccagagataccggcctgtaagcacatcatcaagcactactcccagtagttcactttctactatgagtagcagtctgtatgcaagcagccagctcaatcgccctaactcattagtgggtatcacatccgcctacagccgtgggattacaaaagagaatgagcgtgagggcgaaaagagagaggaagagaaagaaggagaggacaaatctcaacctaagtctattagagagcgcagacgacctagagagaaaaggagatccaccggagtgtccttctggactcaggatagcgacgaaaatgagcaggaacagcaatccgacaccgaagagggcagcaataaaaaagagacccaagtgaacaccattacactgtacgaaacgtccagtactagtgcaggcgacaggtatgacagtctgcttggccgatctggcagctacagttatctggaagaaagaaagccttactcttctcgcctcgagaaagacgatagcacagacttcaagaagcgacaggaacgctttgccgatcgctcacttctcgagatggagaagagagagcgacgtgctctggagcgtcggatttccgagatggaagaggagctcaaaatgcttcccgatcttaaagcggataatcagaggctaaaagacgagaacggagctctgattcgtgtaatctccaagttgtccaagtag

SEQ ID NO: 236893 - DNA, 2988 bp, synthetic construct
  misc_feature 1..2988: note = Description of Artificial Sequence: Synthetic coding sequence
  source 1..2988: mol_type = other DNA
atgaaaatggccgacgccaaacagaagagaaatgagcagcttaagagatggatcgggtccgaaactgatctagagcctccggtggtcaagcgccagaagaccaaagtcaagttcgacgatggtgctgtcttccttgctgcctgctcatccggcgacacagatgaagtccttaagttgcttcaccggggagctgatatcaactatgctaacgtcgacggcctaaccgcgctccaccaagcatgtattgacgataatgtggacatggtgaaatttctagtcgagaacggggcaaatatcaaccagccagacaacgagggctggattccgctgcatgccgctgcctcctgtggctacctagatatcgccgaattcttgatcggccagggggctcatgtgggagcagttaactcagaaggagacaccccactggatatcgccgaggaggaggccatggaggaactccttcagaacgaagttaatagacagggagtggacatcgaggctgctagaaaggaggaagaaagaatcatgcttagggacgccaggcaatggctcaactccggccacatcaatgacgtgcgacatgctaaatcagggggtacggcactgcatgtagccgcagctaaggggtatactgaagtcctgaaacttctaattcaggctggttacgatgttaacatcaaagactatgatgggtggacaccgctccatgccgcagcccattggggcaaagaggaagcttgcagaatcctggtggataacttatgtgatatggaaatggtcaacaaggtcggacagacggctttcgatgtggcagacgaggatatcttggggtacctggaagaattacagaaaaaacagaacctgttgcattcagaaaagcgtgataaaaagagtcctctgatcgagtctacagccaacatggacaacaaccagagccagaagaccttcaagaataaggaaaccctgattattgaacctgaaaaaaatgcctctaggatcgagtcactggaacaggagaaggtagatgaggaggaggaaggcaaaaaggacgagagttcatgctccagtgaggaagacgaggaggatgatagcgagtccgaggcggagactgacaagaccaaacctcttgcctccgtcactaatgctaatacaagcagtacccaggcggctccagtggcggtaaccaccccaaccgtgtcatcaggccaggctaccccaactagcccaattaagaaatttcccaccacagctaccaagattagcccaaaagaggaagagcgcaaggacgaaagccctgccacctggcgcctgggactgcgcaaaacgggttcctacggtgctctggccgagatcaccgctagcaaggaagggcagaaagagaaggacaccgccggagtgacccgctccgccagctctcctagattgtcgagttctctcgacaacaaggagaaggagaaggactccaagggcacaaggctcgcctatgtggctccaaccatccctcggagactcgcctctacatccgacatagaagagaaagaaaaccgcgacagctcttcactacggacctcctcttcctacacaagaaggaagtgggaagatgatcttaagaagaacagttccgttaacgagggctcaacttaccataaaagctgcagcttcggacgcaggcaggatgacttgatctcttcgtccgtgccgtcgaccaccagcactcctactgttaccagtgcggctgggctgcagaagtccctgctttcatccaccagcacaacaaccaaaatcaccacgggcagcagtagcgctggcacacaaagttctacatcgaaccgcttgtgggctgaggattcaactgagaaagaaaaagacagcgtgccaacggccgttaccataccagtggcgccaacagtggtgaatgccgctgcctccaccacaacacttacaaccacaacggccggtacagtgtcttcaactaccgaagtgagagagcgacgcaggtcatacctgaccccagttcgagatgaagagtccgaatcgcagcgcaaagcacgcagtaggcaagctagacaaagccgtcggagtactcaaggagtcacactcaccgatctgcaggaagctgagaaaaccattgggagatcacgttcaactcgcaccagggagcaggagaacgaagagaaggagaaggaagagaaagagaaacaggataaagagaagcaggaagagaagaaggagtcagaaaccagcagggaagatgagtataaacagaaatatagtcggacctacgatgagacctaccaaaggtatcggcctgtgtccacaagctcatctacaacgccaagttcgtccctgtcaacaatgagcagtagcctttacgcgagtagtcagttgaatcgcccaaacagccttgtgggcattaccagtgcatacagccgtggaatcaccaaagaaaatgaaagggaaggcgagaaacgcgaagaggagaaggagggggaggacaagtcgcagccgaagagcataagagagagacgtaggcccagggagaaaaggaggtccacgggggtcagtttttggacacaggacagcgacgaaaatgaacaggaacagcagagcgataccgaagaagggagcaataagaaggagacccagacagacagcatttccaggtacgaaacgtccagcactagcgctggagaccggtatgacagcctcctcggcagaagtggttcatatagctaccttgaagagcgaaaaccttatagcagtagactggaaaaagatgattcgacagacttcaagaagagacaggagcgatttgctgacagaagcttactggaaatggaaaaacgagaaaggcgagcgttggagcgccgaatttccgagatggaagaagaactgaaaatgcttcctgatctcaaggcagacaatcaacgcctgaaagatgaaaatggggcattgattcgagtcatatctaagctgtctaaatag

SEQ ID NO: 236894 - DNA, 3093 bp, synthetic construct
  misc_feature 1..3093: note = Description of Artificial Sequence: Synthetic coding sequence
  source 1..3093: mol_type = other DNA
atgaagatggccgatgccaaacagaagcgcaacgaacaactgaagcggtggatcgggagtgagacggacctggaacctcctgtagtcaagcgtcagaaaaccaaagtcaagttcgacgacggggcagtattcctggccgcttgctcgtctggagacactgatgaggtgctgaagttgctccatcgtggggctgatataaattacgctaacgtggatggactcaccgcattacaccaggcttgcatcgatgataatgtagatatggtgaaattcctggttgaaaatggcgcaaacatcaatcagccagataatgaggggtggattcccctacacgccgcagcctcttgcgggtacttggatatagccgaattcctaatcggccagggcgcacatgtgggagcggtgaactcagaaggagacacaccactggatatagcagaggaagaggccatggaggaactgctccagaatgaggtgaacaggcagggtgtcgatattgaagcagctcgaaaggaggaggagagaataatgttgcgcgacgctcggcagtggcttaactccggccacatcaacgacgttcgtcatgccaagagcggcggaaccgccctgcacgtggccgctgctaaagggtacactgaagtgcttaaacttttgattcaggcgggatatgatgtcaacatcaaagattatgatggttggaccccactgcacgctgcggctcactgggggaaagaagaagcttgtagaatcctggtcgataacttgtgcgatatggagatggtcaacaaagttggacagaccgcatttgatgtggcagatgaggacattctgggctatttagaggaactgcagaagaagcagaatcttttacatagtgagaaacgcgataagaaatcgccactgatcgaatccacagcaaatatggataacaatcagtcacagaaaaccttcaagaacaaggagactctcataatcgaacctgagaaaaacgcgtcgcgcattgaatcccttgaacaggaaaaggtcgatgaggaggaggaagggaagaaagacgaatcatcctgttcctcggaggaagacgaagaggacgatagcgagtctgaggccgagacagataaaacaaagccccttgcaagcgtcactaacgccaacacctcttctacccaggctgctccagtagccgttaccaccccaacggtgtcctccgggcaggcgactcccaccagccccataaagaaattcccaacaacagcaaccaagatttctccgaaagaagaggagcggaaagacgagtcaccggctacttggcgtctgggtctccggaaaaccggatcctacggcgctttggcagagataactgcaagcaaggaggggcaaaaggaaaaagataccgcgggagttacccgttccgcgagcagcccgagactttcatctagtctggataataaagagaaagagaaagacagtaaaggcaccagactggcatatgtggctcctactatcccacgcaggttagcttcaaccagtgacattgaggagaaggaaaacagagactcgtctagcctacggaccagttcctcttacaccagacgcaagtgggaagacgatttgaaaaagaactcgagtgtgaatgagggctctacctaccacaagagctgctcattcggcaggcgacaagacgatctgatttcctcctccgttccctccactacctctacccccacggtaacgtctgctgcaggacttcagaaatcactgttatcgagcacgtccacaacaaccaagatcaccacggggtcgtcctcagcaggtacgcagtcttcaacctccaataggctgtgggcagaagattccaccgagaaggaaaaggattcggttccgaccgccgtgaccatcccagtcgccccaactgttgtgaacgccgcagccagcactacgacgctgaccaccacgacagctggcacagtttccagcaccaccgaagtcagggaacgcaggcgctcttacctgaccccggtgcgggacgaagaatcagagagccagcgcaaagccaggtcccggcaggctcgccagtccagacggtcaactcagggggtcacactgaccgacctacaagaggccgagaaaactatcggacgatctaggtcaactagaacaagagaacaggagaacgaggagaaggagaaagaggagaaagaaaagcaagataaggagaaacaggaggaaaagaaggaatctgaaacttcccgggaagacgagtacaaacagaaatactcccgaacatacgacgaaacgtatcagcgctatcggcctgtgtccactagttcgtccactaccccaagcagcagcctatctactatgtcatcatccctgtacgcaagttcacagctgaacagaccaaatagcctggtggggataacttcagcctactccagagggatcacgaaggaaaatgaacgcgaaggggagaaaagagaagaggagaaagaaggggaggacaagagccagccaaagtctattcgggaacggaggcgtcctagggaaaagcgtagaagcacaggcgtaagcttttggacccaggattcagacgagaacgagcaggaacagcagtctgacacagaggagggctctaacaagaaagaaacacagacggactccatcagccgctacgagactagcagcacaagcgccggtgaccgttatgactcccttctgggaaggtcgggctcttattcctatttagaggagcgaaaaccctactcgagcaggttggaaaaggatgacagcactgactttaaaaaattgtatgaacagattcttgctgagaacgagaagctcaaggctcagttacacgacaccaatatggagctgactgatctaaaacttcagttagagaaggcaactcaacggcaggagaggttcgccgaccgctcactgcttgaaatggagaaacgagaaagacgggcactcgaacgccgaattagcgagatggaagaagagctaaaaatgttgcccgatctgaaagccgataatcagcggctaaaggatgagaacggagccctaattagagtcatcagtaaactttcaaagtag

SEQ ID NO: 236895 - DNA, 3093 bp, synthetic construct
  misc_feature 1..3093: note = Description of Artificial Sequence: Synthetic coding sequence
  source 1..3093: mol_type = other DNA
atgaagatggcggatgcaaagcaaaagcgcaacgaacagttgaaaagatggatcggttccgagactgacttagagccacctgttgtgaagcgtcagaagacaaaagtgaagtttgatgatggagccgtgtttctcgctgcttgctcatccggtgataccgacgaagtattgaaactcttgcataggggggctgatatcaactatgccaacgtggatggcctaacagccctccatcaggcttgtattgatgacaatgtggatatggtgaagttcttggtggagaacggtgccaatattaaccagccagacaatgaaggttggatacctctccacgccgcagctagctgcggctatttagatatcgctgaatttttaattggacagggagctcacgttggagccgttaattctgagggggacacccccctagacattgctgaagaggaggctatggaagagctgctgcaaaacgaagtgaaccgacagggggtggacatagaggccgcaagaaaagaagaggaaagaattatgctgagagacgcgaggcagtggctgaatagtggccacatcaacgatgtgcgtcatgcgaagtctggaggcaccgccctacacgtcgccgctgctaagggctacacagaagtcctgaagctgctgatacaggccggatatgatgtcaatatcaaagattacgacgggtggaccccattgcatgcagctgcccactggggcaaggaagaagcatgtcgcatcctggtggataacttatgtgatatggagatggttaataaagtgggacagactgcgtttgacgtggcagacgaagacatactgggctacttagaggagttgcagaagaagcagaatcttctgcacagcgaaaagcgtgataaaaagagccctcttatcgagtccacagcgaacatggacaataatcaatctcagaagacatttaaaaataaggagacactgatcattgaacctgaaaagaacgcatctagaattgaaagtctggagcaagagaaggtcgacgaggaagaagaggggaagaaggatgagtcatcatgttcttccgaggaggacgaagaagacgactcagaaagcgaagcggagaccgataaaaccaaacccctcgccagtgtgactaatgccaacacatcaagtacccaggcagctcctgtagctgtgacaacaccaacggtctcctctggccaggccacccctacctcgcctatcaagaaatttccaacgacagcaacaaagatcagccccaaggaagaagaacggaaagatgaatctcctgcgacttggcgcctcggactaaggaagaccggatcatacggtgccctggcggagataacagcctcaaaggaggggcaaaaagaaaaggacacagcgggagtgacccggagcgcttcaagcccacggctttcttcctccttggataacaaggaaaaagagaaggacagtaagggaacacgactcgcctatgtggcacctactattccacgcagactcgcaagcacatcagacattgaagagaaggagaatcgcgattctagttcactgaggacctcaagctcatacacaaggcggaaatgggaagacgatctgaaaaagaatagttcagtaaacgaaggttcaacctatcacaagagctgcagctttggccgaaggcaggacgacctaatttccagctctgtaccctctaccacctcaacacccacggtgacatctgccgcagggctgcagaaaagcctgctgtcctcaacttccacgaccacgaagattacaacgggttcaagctctgctggaactcagagcagtacttccaaccggctgtgggcagaagacagcaccgagaaggaaaaggactccgtcccaacagccgttaccattcccgtcgctccaaccgttgtgaacgccgcagcatccacgacgaccctgacgacaaccactgccggaactgtgtctagcacaaccgaggtccgcgaacgcaggaggagttaccttacccctgtcagagacgaggagagcgaaagccagcggaaagccagaagtcggcaggctagacaatcccggaggagtacccaaggagtgaccctcaccgacctccaggaggccgagaaaactattggcaggagtagaagtacacggacccgcgagcaggagaacgaagaaaaagaaaaagaagaaaaggagaaacaagataaggagaagcaggaagagaagaaagagtcggagacttccagggaagatgaatataaacaaaagtattccaggacatatgacgagacgtaccaacgctatcggcctgtgagcaccagctccagtacaacccctagcagctctctgtcaactatgtcatccagcttgtatgcctctagtcagttgaatcgcccaaactcactggtaggcatcacaagcgcctattctagaggcattacaaaagagaacgaacgagaaggcgagaagcgggaggaggaaaaagaaggggaagacaagtcccagccgaaaagtatccgtgaaagaagacgccctcgcgagaaacgaagatcgactggtgtaagcttttggacccaagacagtgacgaaaatgaacaggagcagcagtcggatactgaggaaggatcaaataagaaagagactcaagttaacactatcacactgtacgagaccagttcaacgagcgccggtgatcggtatgatagcctactaggacgctctggctcgtattcctatctcgaggagcgtaaaccgtactcctcacgccttgagaaggatgatagcactgatttcaagaagctctacgagcagattttagctgagaatgagaagctgaaagctcagctacatgatacaaacatggagctcacagacctaaaattgcagctggagaaggctacacaacgccaggaacgcttcgctgacagatcactgctggagatggaaaaacgggaaagaagagccctcgagaggagaatctcagagatggaagaggagctcaaaatgcttcctgacctgaaagcagacaaccagaggctaaaggatgaaaacggtgctctcatacgggtcatttccaagcttagcaaatag

SEQ ID NO: 236896 - DNA, 2832 bp, synthetic construct
  misc_feature 1..2832: note = Description of Artificial Sequence: Synthetic coding sequence
  source 1..2832: mol_type = other DNA
atggtcaagttcctcgtagagaatggggcaaacattaaccagccagataacgagggctggattcccctgcacgctgcagccagttgtgggtatctcgatatcgcagagttcttgatcggccaaggggcacacgtcggggctgttaactccgagggggatacacctctcgatattgcggaagaggaggccatggaagagttgctgcagaacgaggttaatcgacagggggtggatatcgaggccgcacgaaaagaggaagagaggataatgctcagggacgctaggcagtggcttaattccggacatatcaatgatgtcaggcacgctaaatctgggggtaccgcccttcacgtagccgcagctaaggggtatactgaggttctgaagctcttaatccaggcaggatacgacgtgaacataaaggattacgacggttggacacccttacatgctgccgctcactggggtaaggaagaggcatgccgaattctcgttgataacctgtgtgacatggaaatggtaaataaggttggtcaaacagctttcgacgtcgctgatgaagacattctgggctacctggaggaacttcagaagaagcagaatctcctgcattctgaaaaacgcgataagaagtctccgctcattgagagcacagccaacatggacaataatcagtcacaaaaaacattcaaaaacaaggaaaccctgatcattgagccagagaagaatgcctctcggatcgaatccttagagcaggagaaggtggacgaagaagaagagggcaagaaggatgagagcagttgcagcagcgaggaggatgaggaggatgacagcgaaagtgaagcagagacagataaaactaaacccctcgcgtctgttaccaatgctaacacttcaagcactcaggccgctcccgttgcggtcaccaccccgacggtcagtagtgggcaggcgaccccaactagccctattaagaaatttccgactaccgctacaaagattagcccaaaggaggaagagcggaaagatgaaagccccgcaacttggcggctgggcttgaggaaaacagggtcctacggcgctctggctgaaatcactgccagcaaggagggacagaaggaaaaagacaccgccggagtcactaggagcgcttcatcgccacgcctgagtagcagcttggataacaaggagaaggaaaaagacagcaagggaacacgcttagcctacgttgccccaactatcccacggagactggccagcacgtccgatattgaggaaaaagagaatagggattcctcatccctgagaacatcctctagttacaccaggcggaagtgggaggatgatctgaaaaagaattcctccgttaatgaagggagcacttatcataaaagctgcagctttgggcgtaggcaggacgacctcatcagctccagcgtcccctctactacctcaacaccaacggtgacatcggccgcaggattgcagaagagcctcttaagttccacaagcactaccacaaagatcactaccgggagcagcagcgccggaactcagagctctactagtaatcgcctctgggccgaggattctacagaaaaggaaaaggacagtgtgcccacagccgtgaccattcccgtggcaccaacggtggtaaacgcagcagctagcacgacaacacttaccactactaccgccggaaccgtctcttccacgaccgaggttcgggaacggcgacggagctatttaacacctgtacgggacgaagaatccgagtctcagcgtaaggccaggtcgaggcaggctcgtcagagtcgacgtagcactcagggcgttacactaaccgatctgcaagaagccgagaagacaattgggagatcacggtcaactcgcactcgtgaacaggaaaacgaagagaaggagaaagaggaaaaggaaaagcaggataaggagaaacaggaagagaaaaaagaatcggaaacaagccgggaggacgagtacaagcagaaatactcccgtacctacgacgaaacgtatcagagatacagaccagtaagtacaagttcctcaactactccttctagcagtctgtcaacaatgagctccagcctgtacgcaagctcacagttgaatagacctaatagcctagtgggcatcacatccgcttactcacggggtattaccaaggagaatgagcgagagggagagaaaagagaggaggagaaagaaggagaggacaaatcacagccaaaatccatccgagagaggcgcagaccaagggaaaagcgaaggtcaaccggcgtgtctttttggactcaagattctgatgagaatgaacaggagcagcaatctgacacagaagaggggtcgaataaaaaggaaacgcaaacagatagtattagccgttacgagaccagtagtacaagtgcaggcgatagatacgactccctgttggggcgatcgggatcctactcctacctggaagaaagaaagccatactcctctcgactggagaaggatgattcaacagatttcaaaaagctatacgaacagattttggctgagaacgaaaaactgaaggcccagttacatgacacaaacatggaattgactgacctcaagcttcagcttgaaaaagctacccagcgtcaagaaaggtttgcggaccgctctctcttagagatggagaaacgagaaaggagggcgctagagagaagaatcagtgagatggaagaagaattaaagatgttaccagatcttaaagccgacaatcagcgacttaaggatgaaaacggggcacttatcagggtaattagcaagctgtccaagtag

SEQ ID NO: 236897 - DNA, 2925 bp, synthetic construct
  misc_feature 1..2925: note = Description of Artificial Sequence: Synthetic coding sequence
  source 1..2925: mol_type = other DNA
atgaagatggcagatgccaaacaaaaacggaacgagcagttgaagagatggatcggcagcgagaccgacctggagccccctgtggtcaaaaggcagaaaacaaaggtgaagttcgacgatggtgcagtgttcctggccgcatgctcgtccggagacacagacgaggtgctcaaactgctccaccggggtgcagacatcaactatgccaacgttgatggccttaccgctctgcatcaggcctgtatcgatgataatgtggacatggttaagtttctggttgagaatggcgctaacatcaaccaacctgacaacgaggggtggatcccactccatgcggcagcctcctgtggatacctggatatagctgaattcttaattggccagggcgcacacgttggggcagtgaactctgagggagatacccctctggatattgccgaggaggaagctatggaagaactgttgcagaacgaagtaaataggcagggcgtggacatagaagctgctcgtaaggaggaggaacggatcatgcttcgggatgccaggcagtggctcaatagcggtcacattaacgacgtccgccatgccaagtctggaggaaccgcactccacgtggctgccgctaaaggatatacggaagtgcttaagctgctaatccaggcagggtacgacgtcaatataaaagactacgacgggtggaccccccttcatgccgctgcccattggggtaaggaagaggcctgtcggatcttagtagataacttgtgtgatatggaaatggtcaacaaggtaggccagactgcctttgacgtcgctgacgaagacattctgggctatctggaggagctgcagaaaaagcagaacctccttcacagcgagaagcgcgataaaaaaagtccactgattgagagcacggctaacatggataataatcagtcccaaaagacattcaaaaacaaagagacattaatcattgagcccgaaaaaaacgcaagccgtatcgagtctctggagcaggagaaagtagacgaagaagaggaaggcaagaaggacgaatccagttgctcttcagaagaggatgaagaagacgattcagagtctgaagcagaaactgataaaaccaaacctctggcttccgtaacaaacgccaacacaagttcaactcaggccgctccagttgccgtgactactccaacagtttctagtggccaagctacccccacatcccccatcaagaagtttcctacgaccgccacgaagattagtcctaaagaagaagagaggaaagatgagtcccccgctacatggagacttggtcttcgaaagacagggtcctacggcgcactcgctgaaatcactgctagcaaagaagggcagaaggagaaagacaccgcaggggttacccgcagcgccagcagccctcgactttcatcatctttggataataaagagaaagagaaggacagtaagggcacacggctagcctatgtggcccctacaatcccccgacgtctggcctcaacatctgacatcgaagagaaagaaaatcgggactcctccagccttcggacgtcttcatcctatacgcgcaggaagtgggaggacgatctgaagaaaaatagcagcgtgaatgaaggaagcacctaccacaagtcgacgtctaacaggttatgggctgaggacagcaccgaaaaagaaaaagattccgtccccaccgcggtaaccattcccgtggcaccgactgtcgtgaacgccgcagcatccacaactacattaactaccacaactgccggaaccgtgagcagcacaaccgaagtccgcgagcgccgacgctcctacctgacccctgttagggacgaagagagcgagtcccaacggaaggccagatctaggcaagcccgacaatccaggcgaagtacgcagggggtaaccctgactgatctgcaggaggcggagaaaacaattggacgctcccgatccaccagaactagagaacaggagaacgaagaaaaagagaaggaggaaaaggaaaagcaggacaaggaaaaacaggaggagaagaaagagagcgagaccagccgagaggatgaatataaacagaagtactcccggacttatgatgagacataccagcggtaccgcccagtgtctacaagtagttccacgacccccagttcctctcttagtaccatgagctcgagcctgtatgccagcagccagctcaataggccaaactccctcgtaggaatcacctccgcatacagtagaggcattactaaagagaatgaacgggaaggggaaaagagggaggaggaaaaggaaggggaggacaagagtcagcctaaatctattagggaacgacggaggccgcgagagaagaggaggtctactggtgtttcattctggacccaggatagcgacgagaatgagcaggagcaacagagcgatacagaggaaggttccaacaagaaggaaacccagaccgactccattagccggtacgagacttcaagtacttctgccggtgataggtatgacagtctgctcgggcgatctggcagttatagctacctcgaagagagaaagccttactcctcccgcttagagaaggatgactctacggatttcaagaaactgtatgagcagatccttgcggagaatgaaaagctgaaagctcaactacacgatactaatatggagcttactgatctaaaactccaactggagaaagcaactcagagacaggaacggttcgcagataggtcactgttggaaatggagaaaagggagcgcagagccttagagaggaggatctctgagatggaggaggaactgaagatgctcccagacttaaaggccgacaaccagcgactcaaggatgagaacggcgctttgatcagagtgattagcaaactgagtaagtag

SEQ ID NO: 236898 - DNA, 2949 bp, synthetic construct
  misc_feature 1..2949: note = Description of Artificial Sequence: Synthetic coding sequence
  source 1..2949: mol_type = other DNA
atggctgaactggagcatttgggtggaaaacgggctgagtccgccagaatgcgcagagccgaacagttacggagatggaggggtagtctgaccgagcaggaacctgcggagcgtaggggagccggtcggcagccactgactcgcagaggtagccccagagtgcgattcgaagacggggcagtcttccttgctgcatgcagctccggcgacacagatgaggtgaggaaactgctcgccaggggtgccgatattaatactgtgaacgtggatggtttgacggctttgcaccaggcttgtatagacgaaaaccttgatatggtcaagttcctagtggaaaaccgggcaaatgtgaaccagcaagataatgagggatggactcctctgcatgcagccgcatcctgtggatatcttaatatcgcagagtactttataaaccacggcgcatcggttggtatcgtgaactctgaaggggaggtcccatcagatcttgctgaggaacccgctatgaaagaccttcttttagagcaagtgaaaaagcagggtgtcgatctcgagcaaagcagaaaggaggaggagcagcagatgctgcaagacgcacggcaatggctgaattccggcaagatcgaagacgttcggcaagccaggagcggagccaccgctctgcacgtggctgctgcgaaaggatattccgaagtcctacgcctgctgatccaggcagggtacgaattgaacgttcaggactatgatgggtggacacctttgcacgccgcagcacactggggggtgaaagaggcttgctccatcctggctgaagctctgtgtgacatggacatcagaaacaagttgggccaaactcctttcgatgtcgcggatgaaggcttggtggagcatcttgagctattgcaaaaaaagcagaatgttctacgtagcgagaaggaaacgcgcaataagcttatagagtcggacctgaatagcaagatacaatcaggattcttcaaaaacaaggagaagatgctatatgaggaagaaacgccaaagtcccaagagatggaagaagagaacaaagaatcatcctctagtagtagcgaagaggaagagggtgaggatgaggccagtgaaagcgaaaccgagaaagaggcagataaaaagccagaagcatttgtgaatcactctaattcagaatccaaaagcagcatcaccgagcagattcctgctccagcacagaacacattctctgcgtcaagtgctcgccgatttagcagtggtttattcaacaaaccggaggaacccaaggatgagtctccaagttcttggaggctgggcctgcgcaagacaggttctcacaacatgctgagcgaagtagccaattcccgcgaaccaatccgggaccggggtagctccatataccgttccagttcctctccgagaatttctgctctgctggataacaaggataaggagagagagaataagtcatatatcagttccctggccccacggaaactgaatagtacctctgacatcgaggagaaggagaacagggagagtgccgttaacttagtgcggtcgggcagctacacgagacagctctggcgcgatgaggccaagggaaacgaaatcccccagaccattgctccatccacctatgtctccacctatctgaagaggacccctcataaaagtcaagctgacaccaccgctgagaagacggccgataacgtcagcagctcaactcctctgtgcgtgatcaccaacagaccacttcctagcacggctaatggagtcacggccacaccagttctctctataaccggaactgatagctctgttgaagctcgggaaaagagacggagctacctgacaccagtaagggacgaagaggccgaaagtctgcgtaaggcgcgttccagacaggccagacaaacccgaaggtccactcagggcgtcactctgaccgacttacaggaagcagagcggacctttagcagatccagagccgagaggcaggctcaggaacagcctagggagaaacctacagacacagaaggtttagagggatcccctgagaagcatgaaccttctgctgtgcctgctacagaggccggagaaggccagcagccatggggaaggagcctggatgaagaacccatttgtcaccggttaagatgtcccgctcagcctgacaaacccacaacgcctgcatctccatctacctcccgacccagcctttacactagtagtcatctgctctggaccaataggttcagcgtccctgatagcgagagtagcgaaaccacaacaaatactaccacggccaaggagatggataagaatgagaatgaagaagctgaccttgatgagcaatccagcaagcggctgagtattcgggaacgaagaagaccaaaggaaagacgcaggggtacaggcataaatttctggacaaaggatgaggacgaaaccgatggatccgaggaagtgaaggaaacctgggctgagaggttgaagagattggagagtggaggtagcaatccaactacctccgatagttacggggacagagcaagcgccagggccaggagagaggccagggaagctaggctggccactctgacctcacgtgtcgaggaggattcaaacagagattacaaaaaattgtacgaatccgctttaacagaaaaccagaagctaaaaacgaaactgcaggaggctcaactcgaactggctgacattaagagcaagctcgagaaagtggctcagcagaaacaggaaaaaacttctgatagatcttctgttcttgaaatggaaaaacgcgaaaggagggccctggagaggaagatgtctgaaatggaggaggaaatgaaggtcctgactgaattaaagtcggacaaccagcgcttaaaggatgagaatggtgccctgatcagagttatctccaagttgtcaaaatag

SEQ ID NO: 236899 - DNA, 1161 bp, synthetic construct
  misc_feature 1..1161: note = Description of Artificial Sequence: Synthetic coding sequence
  source 1..1161: mol_type = other DNA
atggctgaacttgaacacctagggggaaagcgggctgaaagcgctcggatgagacgagccgaacagctgcgcaggtggagaggaagcctgaccgaacaagagcccgcagagcgcagaggagctgggagacagcctcttacaaggcgtggcagcccaagggtacggtttgaagatggggcagtgtttctcgctgcatgctctagcggcgatactgatgaggtcaggaagctcttggctcgcggagctgatattaataccgtgaatgttgacggcctgactgctctgcaccaggcatgcattgatgaaaatctggatatggtcaagttcctggtagagaaccgcgctaatgtcaatcagcaggacaacgagggttggacacctctgcacgcagctgccagttgtgggtatcttaacattgcagaatactttattaatcatggcgcaagcgtgggcattgtaaattccgagggcgaagtccccagtgatcttgccgaagaaccggctatgaaggacctgttactggagcaagtgaaaaagcagggagtggacttagagcagtcacgcaaggaggaggaacagcaaatgctccaggacgctcggcaatggctgaatagtggcaaaatcgaggacgtgcgccaggcccgaagcggcgcaacggccctgcatgttgcagctgccaaaggatactctgaggtgctccggcttctcatccaggccggttatgagttgaacgttcaggactatgatgggtggacacctctgcatgctgctgcacattggggcgtaaaagaagcctgctccatccttgccgaagcgctctgcgatatggatataaggaacaagcttggccagacaccatttgacgtcgccgacgagggcctcgtggaacatctggagctcctgcagaagaagcagaacgttctgaggtcagagaaggagacgcgcaacaagttgatagagtctgacctcaattcaaagattcagtctggtttcttcaagaataaagagaaaatgttgtacgaagaggaaaccccgaagagccaggagatggaagaggagaataaagagtcttctagctcttccagcgaggaggaagaaggcgaagatgaggcaagcgaatccgagactgagaaggaggcagtgctcttttggcccttttag

SEQ ID NO: 236900 - DNA, 675 bp, synthetic construct
  misc_feature 1..675: note = Description of Artificial Sequence: Synthetic coding sequence
  source 1..675: mol_type = other DNA
atggacaagaatgaaaatgaagaggcagacttggatgaacaaagttccaagcggttaagcataagggaaagacggcgtcccaaagagaggagacggggaactggcatcaacttctggacaaaggatgaggatgaaacggacgggagcgaggaggtgaaggaaacctggcacgaacgactgagtcgattagagtctggaggctccaaccctacaacatctgattcttatggggacagggcgagtgctagagcgcgtagggaggcccgtgaagcccgactggctacacttacatcccgcgtggaagaagatagcaaccgcgattacaaaaagctgtacgagagcgccttgactgaaaaccagaaattgaaaactaaactgcaggaggctcaactggaacttgccgacattaaaagcaagctggagaaggttgcacagcaaaagcaggaaaagacatctgatcggagttctgttctcgagatggagaagagggaacgtagagcgctggagcggaagatgagcgagatggaggaggagatgaagaatttgcatcagcttaaacagatccagacgctgaaacagatgaacgagcagctgcaagctgaaaaccgggcattgacccgcgtggtggctaggctgtccgagagtatcgagtcctccgacacccaggagctttag

SEQ ID NO: 236901 - DNA, 627 bp, synthetic construct
  misc_feature 1..627: note = Description of Artificial Sequence: Synthetic coding sequence
  source 1..627: mol_type = other DNA
atggacaagaacgaaaatgaggaggccgacttggacgaacaatcctctaaaaggttaagcatccgggagcggagacgccctaaagagcgccgtcggggaaccggcattaatttttggaccaaagacgaggacgaaaccgacggttcagaagaagtaaaggaaacgtggcatgagcggctgagccgactagaatcggggggaagcaatcctacaacctccgacagttacggagaccgggcaagtgctcgtgccaggcgggaagctcgcgaggcaaggttggccactttaactagccgagttgaagaagactccaacagagattataaaaagctgtacgaatctgccctaactgaaaatcaaaaactcaagacaaagttacaagaagctcaattagaactcgccgacatcaagtccaagctggagaaggtggcacagcagaaacaggagaaaacttccgaccgtagcagcgtgctggagatggagaagcgggagcggcgtgcactggagaggaaaatgagcgagatggaggaagaaatgaaagtattaaccgaattgaagagtgataaccagcggctgaaagatgagaatggggctcttattcgggttataagtaagctgagcaagtag

SEQ ID NO: 236902 - DNA, 2949 bp, synthetic construct
  misc_feature 1..2949: note = Description of Artificial Sequence: Synthetic coding sequence
  source 1..2949: mol_type = other DNA
atggctgagctggaacatttggggggaaaacgagcagagagcgccaggatgaggagggccgagcagctgcgtaggtggaggggatctctgaccgagcaagaaccagctgaacgccgtggagcaggcaggcaacccctgacaagacgaggcagtccacgcgtccgcttcgaagacggcgcagtgtttctggctgcatgttcatcaggagataccgatgaagtgaggaagctcctggctaggggcgcagacatcaacacagtgaacgtcgatggcctcacggcgctgcatcaggcttgcatagatgaaaacctagatatggtgaagtttctcgtagagaaccgggctaatgtcaatcagcaagacaacgagggctggacccccctccatgcagcagcctcatgtggataccttaacattgccgagtattttattaaccacggcgcttccgttgggatagtaaattccgaaggggaagtccctagcgacctcgccgaagaaccagctatgaaagaccttctattggagcaggtgaagaagcagggcgtagacctggagcagtccaggaaggaggaggagcagcagatgcttcaggacgctcggcagtggctgaactctggaaagatagaggacgtgcgacaggcaagatcaggcgcaactgcccttcatgtcgcggctgccaagggttactccgaggtgctgcggctgctgatccaggccggatacgagctgaacgtccaggactacgacggatggaccccactgcatgccgctgcccactggggagtcaaggaagcttgcagcattttggctgaagcactttgcgatatggacatccgcaacaagctcgggcaaacaccgtttgatgttgctgatgagggtctcgtcgagcatctggagctactgcagaaaaaacagaatgtgcttaggtcggagaaagagactcggaataagttgattgagtctgacctgaattctaagatccaaagtggattcttcaaaaacaaggagaagatgctatacgaggaggagacacccaaatcccaggaaatggaagaagagaacaaagagtcctccagtagctcttcggaagaagaggaaggcgaagatgaggcctctgagtccgaaacggagaaagaggcagataaaaaacccgaagcctttgtcaaccatagtaactccgagagtaagagcagcatcactgagcaaatcccagcccctgctcagaataccttttcagcctcttcggctagacgcttttcgtcgggtttgtttaataagccagaagaaccaaaggatgaatccccgagctcatggcgccttggacttcgaaaaacggggagccacaatatgctctccgaggtagctaactctcgcgagcccattcgagaccggggatcttctatctatcgcagctcttcatctccacgcatcagcgccctgctcgacaataaggataaggaaagagaaaacaaatcctatatctctagtctcgcaccaaggaaactcaacagtacttctgatattgaggaaaaggagaaccgggaatctgctgtgaacttggtgaggtctgggtcatacactaggcagctttggcgtgatgaagcaaaggggaacgagattccccagacaatcgcacctagcacctatgtttccacctaccttaaaagaactccccataagtcgcaggctgacaccacagcggagaaaaccgccgacaatgtgtcatcctctacccccctctgcgtcataaccaacagaccgctcccctcgactgcaaacggcgttacagccacaccagttctttctattaccggaaccgacagcagcgttgaggctcgcgaaaaacgtcgcagctacctgactccagtgcgcgatgaagaggcagagtccctgcgtaaggcgcgaagccggcaggccaggcagacaagacgcagtacccaaggtgttactctgaccgacttacaggaggctgagcgcacctttagtcgctccagggcagaacggcaagcacaagagcaaccacgcgaaaaaccgacggatacggaaggcctggagggctcccccgagaaacacgaacctagtgcggtcccagcgactgaggcaggtgagggccaacagccctggggccgatcactcgatgaagaacccatctgtcatagactaagatgccccgctcagccagataagcccactacccctgcttccccctctacctcccgcccttccctatacacttctagtcatttgttatggaccaatagattcagtgtgcccgacagcgagtcatccgaaaccacgactaataccactacggctaaggagatggacaaaaatgagaatgaggaagccgatctagatgagcagagctccaagcgcctgagtattagggaacggagaaggcccaaggagcggagacgaggaaccggaatcaacttttggaccaaggatgaagatgaaacagacggttccgaagaggtgaaggaaacctggcatgagagattaagccgattggaatcaggagggtctaatccaacaacctcggatagttacggggaccgtgcctctgcgagagctagaagggaagctagagaggcgaggctggctaccctgacatctcgcgtggaggaagactccaatagggattacaaaaagctgtacgaatctgcactaacggaaaaccagaaattgaagaccaagctccaggaggctcagctcgagcttgcagacattaaaagtaaactggaaaaagtggcccagcaaaaacaggagaaaacgagcgatcgaagcagcgtcctggaaatggagaaacgggaacggcgagctttagagcgcaaaatgtctgagatggaggaggaaatgaaggtgctgaccgagctgaagtccgacaatcagaggctgaaagacgaaaatggcgcattgatccgggtgataagtaagctgtcaaagtag

SEQ ID NO: 236903 - DNA, 2349 bp, synthetic construct
  misc_feature 1..2349: note = Description of Artificial Sequence: Synthetic coding sequence
  source 1..2349: mol_type = other DNA
atgtccggagaggacggtcccgcagccggacctggggcagctgccgctgcagctcgggagagacgaagggaacaacttcggcaatggggcgctcgagccggtgccgagcctggaccaggcgagaggcgggcacggacagttcgctttgaaagagcagccgagttcttggcggcttgtgccggtggtgatttagatgaagcacggctgatgctccgggcagcagacccaggcccaggagcagaactagatcctgcagccccaccccctgctcgagcagttcttgacagcacgaatgcagatgggataagcgcccttcatcaggcttgcattgacgaaaatctcgaggtagtgaggtttcttgtggaacaaggtgctaccgtcaatcaggcagacaatgaaggctggaccccgttgcacgttgccgcttcatgcggctatctagatattgctagatatttgctgtctcatggtgcaaatatagctgctgtgaactctgacggcgacctccctttagatctagccgagtctgacgccatggaaggcctgttgaaagcggaaatcgccagacgtggggttgatgtggaggcagccaagcgcgctgaggaggaactgttgctgcacgacacaaggtgttggctgaacggtggcgcaatgcctgaggcgagacatcctaggaccggggcatctgccctgcatgtcgccgcagccaaaggatacatagaggtcatgaggctactactccaggccggttatgatcccgaactccgagacggcgatggctggacgccactgcacgccgcagctcactggggtgttgaagatgcctgtaggctgctggccgagcatgggggtggcatggattctctgactcatgcaggccagcgcccatgtgatcttgccgacgaggaagtattatcccttcttgaggagttggcccgaaaacaggaggacctccggaatcagaaggaagccagccagtcccgtggtcaggagccacaggctccttcctctagcaagcatcgccgaagctcagtatgcagactgtcatcaagggaaaagatctctctgcaggatctttctaaggaacggagacctggcggtgccggtggcccacccattcaggacgaggacgagggcgaggaaggcccaactgaacctcccccagccgagccacgaactcttaacggagtttcctccccgcctcatccctcacccaaatcccccgtccaactcgaggaggcccctttctcgaggcggttcggtctccttaagacaggcagcagcggggctctcgggccacctgagcgcaggacggccgaaggggctcctggtgccggacttcagagaagcgcatccagctcgtggttggaggggacctccacccaagccaaggaactcaggctggctcgcattaccccaactccttccccgaagttacctgagcccagcgtgcttagcgaggtgaccaagcctcctccgtgcctggaaaattcatcaccaccaagcaggattcccgaaccagaatctcctgccaaacccaatgtgccaaccgcctccaccgcccctccagccgactctagggatcggcgtcgctcctaccagatgcccgttagagatgaggagtcagagtctcagagaaaagccaggtccaggttaatgcggcagtcaaggcgcagcactcagggagtcacactcacggacctgaaggaggcagagaaggctgccggaaaggcacctgagtccgagaaacccgcacagtcactggatccttctaggagaccacgcgtcccaggtgttgagaattccgattcacctgcccagcgcgcagaggcgccagatgggcagggtcctggaccccaggccgctcgggagcaccgcaaagttgggaaggaatggagagggccagcagaaggcgaagaagccgagcccgcagacaggagccaggagagctccacccttgagggaggcccatccgccagacgccagagatggcagcgagacctgaaccccgagcctgaacccgagtcagaggagccagacggaggctttcggacgctgtatgctgaacttcgccgtgagaacgaacgcctccgcgaggctctgactgaaacaactcttcgccttgcccagctcaaagtggagctagagagggccacacagcggcaggagagattcgccgaaaggcctgctttactggaactggaacgatttgagcggagagcactggaaagaaaagctgcagagctggaggaagaattgaaagccttatcggatctgcgcgcagacaaccagcgcttaaaggacgagaatgcagcgctgattagagtgatttcgaaactctcaaagtag

SEQ ID NO: 236904 - DNA, 2160 bp, synthetic construct
  misc_feature 1..2160: note = Description of Artificial Sequence: Synthetic coding sequence
  source 1..2160: mol_type = other DNA
atgagcggcgaggacggccctgcagccggacctggagctgcagcggctgctgcgcgtgagagacggagggagcagctcaggcagtggggggcaagagcgggagccgagccgggtcctggggagcgtcgggcaagaaccgtccggttcgaacgcgctgcggaatttctagcggcttgcgctggaggagatctggacgaagcccgtcttatgttgcgggctgccgatcctgggcctggagctgagctggatcctgctgcgcctccccctgctcgggcagttctcgacagcaccaatgctgacggcatttctgctttgcatcaggcctgtatcgatgagaacctcgaagtcgttagatttttggttgaacaaggcgcaacagtcaaccaggctgacaatgaagggtggactccactgcatgtcgcagcttcctgcggatatctcgatatagcacggtacctgctgagccacggtgccaatattgccgctgtgaattccgatggagatcttccgctggatctggcagaatccgacgctatggaggggctgctaaaagcggagatcgccagaagaggcgtggacgtggaggccgcaaaacgagctgaggaagagttgttgctacacgatacccgctgttggctcaacgggggagctatgcccgaagcgcgtcatccgcgaacaggggcttcagctttacatgtggcagctgccaaggggtacatcgaggttatgcggcttctcttacaggcagggtatgatcccgaactcagggacggcgacggttggacccccctacacgccgcagcccactggggggtggaggacgcatgcaggctgctggcggaacatggcggaggaatggacagcctcactcatgccggacagaggccttgtgacctggcagacgaagaggtgctgtctctcttggaggagcttgctagaaaacaggaagacttacgtaaccagaaggaggccagccagtcacgcggacaagagccacaggccccatccagctcgaagcaccggcgatctagcgtgtgtagactcagctcccgcgagaagatttccctacaggatctgagcaaggaaaggagacctggtggagccggaggtccccctatccaggacgaggatgagggagaagaaggcccaactgagcctcctccagcggagcccagaaccctcaacggagtctccagccccccacatccctccccgaagagccccgtgcagttggaggaggcccctttctcaagacgcttcggcctgctcaaaactggcagcagtggggctctgggccctcccgaacgtcggaccgcagagggagccccaggagctggcctgcagaggagtgcttcttcctcatggctggaaggtacatcgacccaggcaaaggagttgcgtttggcccgaattactcccactcccagcccgaagctccctgaaccaagtgtgttgtctgaggtcacaaagccccctccctgcctggagaactcgagtcccccttccagaatccccgagccagagtctcctgcaaaaccgaacgttccaacagcctcgaccgctccccctgctgattcgcgtgatcgcagaaggtcataccagatgccggtgagagacgaagagtctgaatcacaacgaaaggctcggtcccgcctgatgcgccagtcccgtaggtccacacagggggtgacgctgacggacctgaaagaggctgagaaggccggtgaggaagctgagcccgcagaccggtcccaggaaagcagcacactagagggcggtccaagcgccagacgccagaggtggcagagagatttaaatccggaaccagagcccgagagcgaagagcctgatggagggtttaggaccttatacgctgagctgagacgggagaacgagcggttacgcgaagctctgaccgagactacactgcggttagctcagttaaaggttgagttggagcgagccacgcagcgtcaggagcggttcgccgaacgcccagccctgcttgaactggagaggtttgagagacgagcactagagcgcaaggccgcagagctggaggaggagctgaaggctctgagcgacctgagagccgataaccagagactaaaagacgagaatgctgccctgattcgagtgatttccaaactttccaaatag

SEQ ID NO: 236905 - DNA, 2124 bp, synthetic construct
  misc_feature 1..2124: note = Description of Artificial Sequence: Synthetic coding sequence
  source 1..2124: mol_type = other DNA
atgcggaatgggggtccctgtcagccactcgccgcagggcctcgcgctgagggggcaagcgtgaactggagcgtaaccgcttggggtccaggcacacaggcctgcatcgacgagaatctcgaggtggtgaggtttttagtcgagcagggtgctacagttaatcaagccgataatgaaggatggacacccctgcacgtcgctgctagctgtggctacttagatatcgccaggtatctgctgtcacacggcgcaaatattgccgctgtgaacagcgacggtgacctcccactggacctggctgaatctgatgcaatggagggcctgctcaaagcggaaattgccagaagaggggtggatgtcgaggccgctaagagagccgaagaggagctcttacttcacgacacccggtgctggctcaacggcggtgccatgccagaagctagacatcccagaaccggagccagtgctttgcacgtggccgctgccaagggttatatcgaggttatgcgcctgctgctgcaggctggatatgaccctgaactgcgcgatggagatggctggaccccgcttcacgccgcagcgcactggggagttgaggacgcttgccggctgctggctgaacatgggggtggcatggactcactcacccatgccggtcagaggccttgcgacttggccgacgaggaggtgctctccctgctcgaggagcttgcgagaaaacaggaggatctgcgcaaccagaaagaagcatctcagtcaagaggccaggagcctcaggcaccctcttccagtaaacatagaaggtcctcagtgtgtagacttagttcccgagagaagattagtttacaggacctgagtaaggaacggcgacctggaggcgctggcggtccccctatccaggacgaagacgaaggcgaggaggggcctacggagccaccacctgctgaacctcgcacccttaatggggtttcctcaccccctcacccttcaccgaaatcaccagtacaactggaggaagctccattctccagacgctttggcttgttaaagaccggaagctcaggtgcactgggacccccagaaagacgcacagcggagggggcacctggggctggtctccagagaagcgcctcctcaagctggttagaaggcacatctactcaggccaaagaattgcggctcgcacgcattacgccgacccccagtccgaaactgccagaaccttccgtcttgagtgaggtgacgaagccccctccttgcctcgagaacagtagcccaccctcccggattcccgaacctgagagcccagctaagcccaatgttcccactgcttctactgcccctcctgcagactccagagacaggcggaggtcgtaccagatgccagtgcgggacgaagaatcggagtcacagcgtaaggcaaggtcacgcctaatgagacagagccgcagaagtacacagggagtaacactgacagatctgaaggaggccgaaaaagctgccggtaaagcccctgagtcagaaaaacccgcacagtccttagatcctagccggcgtcctcgggtgcctggagttgagaattcagacagtccggcacaaagggaggcacctgacggccagggtcctggccctcaggccgctagagaacacagaaaagtaggtaaggagtggcgaggacctgcagaaggcgaggaggctgagcctgccgacagatcccaggagtcctctaccctggagggtgggccatccgcccgaaggcagaggtggcagagggatttgaacccagagcctgaaccagagtctgaagagcccgacggaggtttcaggactctgtatgccgaacttcggagagagaacgaaagactacgggaagctctgaccgagacaaccctcagactggcccagctgaaggtagaacttgagagagcaacgcagcgccaggaacgattcgccgagagaccagccctgttggaacttgagagatttgaaaggcgggctctcgaaaggaaagccgctgagcttgaggaggaacttaaagcgctcagtgacctgcgagcggataatcagcgcctgaaagacgaaaatgctgctctgattcgggtaatctctaagctgtcgaaatag

SEQ ID NO: 236906 - DNA, 2142 bp, synthetic construct
  misc_feature 1..2142: note = Description of Artificial Sequence: Synthetic coding sequence
  source 1..2142: mol_type = other DNA
atggagcccggaacaggagggagtcgcaagagactcggccctagggccggtttccggttttggcctcctttcttccccagaaggagtcaggcaggttcgtctaaatttccgactcctttaggccctgagaacagcggtaatcctacccttctgtccagcgcccagccagagaccagagtcagctactggaccaagctgctgtcccagctgctggccccactgccagggcttctacaaaaagtactgatatggtcccagctgtttgggggaatgttcccaaccaggtggctggatttcgccggagtgtattctgccctccgggcactcaagggacgggagaaacccgcagcacctaccgctcagaaatccctctcatccctgcagctggatagtagcgacccatccgtaacctcacctctcgactggctggaggagggaatccattggcagtattctccccctgaccttaagctagagctaaaagccaagggaagcgccctcgacccagcggctcaagcttttttgctggaacagcaactatggggggttgaactactgccctcctctctgcaatctagactctattcaaacagagagctgggatccagtccaagcggccctctcaatattcagcgcatagataactttagcgtcgtgtcatacctgcttaatcccagctacctcgactgcttccccaggctggaggttagttaccagaattccgacgggaatagcgaggtggttgggttccagactttgactcccgagagtagttgcctgcgcgaagaccattgtcatcctcaacctctcagcgcagaactcataccagcaagctggcaaggctgccccccactctcaaccgagggccttccagaaatccatcacctgagaatgaagagattggagttcctacagcaggcaaataaggggcaggacttgcctacccccgatcaagacaatggttatcattcactggaagaggagcacagtctgcttaggatggaccctaagcattgtcgcgataacccaacacagtttgtacccgctgccggagacataccgggaaatactcaagagagcacagaagagaaaatcgagctgctaactaccgaagtgcccctcgcactggaagaagaatccccttcagagggatgcccaagcagtgagatacccatggagaaggagcctggagagggccgtatcagtgtggtagattacagttacctcgagggggatcttcccattagcgctagacccgcatgtagtaataagctaattgattacattcttggaggtgccagcagcgatctagaaacgtcttctgacccagagggtgaagattgggacgaagaagccgaggacgatggctttgattctgactcatctctcagcgacagtgacctggagcaggatcctgaaggcctacatctttggaattccttctgttccgtggatccttacaaccctcagaatttcaccgcaactatccaaaccgccgctcggatcgtcccggaggaaccaagtgacagcgaaaaggatctgtccggaaagagcgacctggaaaattcctctcagtctgggtccctgccggagactcctgaacactcatccggtgaggaggacgactgggagtcgtcagccgacgaggcggagtccctgaagctgtggaattctttttgcaatagcgacgatccatataaccctctgaactttaaggccccatttcagaccagcggcgagaatgagaaaggctgccgtgattccaaaaccccctccgaatccatcgttgctattagtgaatgccatactttgctctcctgcaaagtgcagttgctaggatcccaggaatccgagtgccccgacagtgtccagcgggacgtactgagcggcggtagacacacccacgtcaaacgcaaaaaggtaacttttctggaggaggtgacagagtattacatctctggcgacgaagacagaaaggggccatgggaggagtttgcaagagacggctgtaggttccaaaagcggattcaggagaccgaggatgccatcggctactgtcttacattcgagcacagagaaagaatgttcaaccgacttcaagggacttgctttaaggggcttaatgtgttgaaacagtgctag

SEQ ID NO: 236907 - DNA, 1872 bp, synthetic construct
  misc_feature 1..1872: note = Description of Artificial Sequence: Synthetic coding sequence
  source 1..1872: mol_type = other DNA
atgttccctactcgatggctagatttcgccggagtgtactctgcccttagggcactcaaggggcgagaaaagcctgctgccccaactgcccagaagtctctttcctctctgcaactggattctagcgacccttcagtgacttcaccgctcgattggctggaggaaggcattcactggcagtattctcctcccgatctgaaactcgagctaaaggcgaagggatccgccctggaccctgcagcacaggcatttctcttagaacagcagttgtggggtgtggagctgctcccaagttcgttacaatctaggctgtatagcaatcgggagctcgggagttctccttcgggtcccctgaacattcagaggatagataatttttcagtggtgtcttatttgttgaacccgagctatctggactgttttccaaggttggaagtctcatatcagaattcggatggtaacagcgaagttgttggctttcaaacactgacccctgaaagtagctgtctgagggaggatcactgccatccccagcctttatcggcagaactaatcccagcttcttggcagggatgtcctccactgtccactgagggactgcctgaaattcaccatctccgcatgaagcgcctcgagtttctccagcaagccaataaaggacaggacctgcccacacctgaccaggataatggctatcacagcctcgaggaagagcattccctcttaagaatggatccaaagcactgccgagataaccccacacagttcgtccctgccgctggcgacataccaggaaacacccaagagagtaccgaggagaagatagaactcctcacaacagaagtacccctggctttagaggaagagtcccctagtgagggatgtccctcttccgagatcccaatggagaaagagcctggcgaggggcgaatctcagtagtcgattactcatacttagagggcgatcttccaatttctgcacgccctgcatgcagcaataaattgatagattatattctggggggagccagctcggacttggagacatcatcagatccagagggtgaagactgggacgaagaggctgaagatgacggcttcgatagtgattcttcgctgagcgatagtgaccttgagcaggatccagagggactgcatctgtggaactcattttgcagcgtcgatccgtacaacccacaaaactttaccgctacaattcagaccgcagcacgtattgttcccgaagagccctctgattccgagaaagacctgagtggaaaatcagatctggagaactcctcacagagcggctctctcccagagacccccgaacatagtagcggtgaggaggatgactgggagtcatcagccgatgaggccgaatctctcaaactttggaattcattttgtaatagcgacgacccttacaatcccctgaacttcaaggctcccttccagactagcggagagaatgaaaaaggatgccgggactcgaagacgccatccgagtccattgtggctatttccgagtgccacacactattgtcatgcaaggtgcagttgttaggaagccaagaatcagaatgccctgactctgtgcagcgcgacgtgctgagcgggggaagacatacccacgttaaaagaaagaaggtgactttcctagaagaagtgaccgaatattatatcagtggcgacgaggacagaaaagggccttgggaggagttcgccagagatggctgccgctttcagaaacgcatacaggaaaccgaagatgcaatcggctattgcctaaccttcgaacacagagagcgcatgttcaatcgcctccagggtacctgttttaagggcctgaatgtccttaagcagtgttag

SEQ ID NO: 236908 - DNA, 1704 bp, synthetic construct
  misc_feature 1..1704: note = Description of Artificial Sequence: Synthetic coding sequence
  source 1..1704: mol_type = other DNA
atggcgtctcatgtcgatctgctgactgaactgcagctgctggaaaaagttcccacacttgagcgtctccgtgctgcgcagaagaggagagcccaacagctgaagaagtgggctcaatacgagcaggatctccaacaccggaagcgaaaacacgagagaaagaggtcaacgggaggccgtaggaaaaaggtgagctttgaggcatcagtagccctgctagaagcttccttgcgaaatgacgcagaggaggtaagatacttcctgaaaaataaggtgtcacctgatctttgcaatgaagatggtcttacggctctgcaccagtgctgtatagataacttcgaggaaatagtgaagttgctactgtcacatggtgctaacgtcaacgccaaagacaatgagttatggacccctcttcacgctgctgccacttgcggacacattaacctggtgaagattctcgtccagtacggagccgaccttctcgctgtgaactccgacgggaacatgccttacgatctgtgtgaagatgagcccacactagacgtgatcgaaacctgtatggcttatcagggaattacacaggaaaaaataaacgagatgagggtagccccagagcagcagatgatagctgatatccactgtatgattgccgcagggcaggatcttgactggattgatgcccagggcgctactctgctgcacatagcaggagccaacgggtatctacgggcagccgaacttctgcttgaccacggggtgagagtagatgtgaaagactgggacggctgggagcccctacacgccgctgccttctgggggcaaatgcagatggctgaactgcttgtgagtcatggtgctagcctgtctgctaggacatcgatggacgagatgcctatagatctgtgcgaggaggaggagtttaaagtcctcctgctagaactgaagcacaagcacgatgtgatcatgaaatctcagctgaggcataaatcgtccctcagccgcaggactagctccgctgggtctcgaggcaaggtagttagacgtgcatctctgtctgatagaacgaatctttatcggaaggagtatgagggcgaggctatcctctggcagagaagtgccgcagaggatcagcggacttctacttacaatggggatattcgtgaaacccgcacagatcaggaaaacaaagatcccaacccacgtctggaaaagccagtgctgctcagcgagtttcctaccaaaattccacgcggtgagctggacatgccggtggagaacggcttgcgcgctcctgtcagtgcctaccaatacgccctagctaacggcgatgtctggaaagtgcatgaagtgccagactactctatggcctacgggaatcctggggtggccgacgctacgccaccttggtcctcttacaaagaacagtcgccccagacactgttggagctgaaacggcagcgggcagcagctaagctactttcccaccccttcctaagcacccatttggggagctcaatggcccgaactggtgagagctcctcggaaggaaaggcccctctgattggaggtcgtacatctccttattcttctaatggtactagcgtctactataccgtcacgtctggcgatcctccgttgctgaaattcaaagctcctatagaggagatggaggaaaaggtccacggttgctgccggatctcctag

SEQ ID NO: 236909 - DNA, 1578 bp, synthetic construct
  misc_feature 1..1578: note = Description of Artificial Sequence: Synthetic coding sequence
  source 1..1578: mol_type = other DNA
atggcaagccacgtagaccttctgaccgagttgcaactgctcgaaaaggtgcctactttagaaaggctccgcgcagcccagaagcgccgagcccagcagctgaaaaagtgggcccagtacgagcaggatctgcagcataggaagcgcaagcacgaacgtaagcggtctactggcggtcgaaggaaaaaggtcagcttcgaggcatcggtcgcgctcttagaggcatcactgagaaatgacgccgaggaagtgcgttattttttgaagaataaggtcagtccggacctgtgcaacgaggatgggctgactgccttacaccaatgttgcattgacaattttgaggagatcgtcaagctgctcctgagccatggagcgaatgtgaacgcaaaggacaacgaactgtggacaccactccatgcagcagcgacgtgcggccatatcaatctggttaagatcctcgttcaatatggtgcagacctcctggccgtgaactcggacggtaatatgccctacgacctttgcgaggacgagccaaccctcgatgtcattgagacctgcatggcctaccagggcattacccaggagaagattaatgagatgcgggtggcccctgagcaacagatgattgccgatatccattgtatgatagctgccggacaagatttagattggattgacgcacagggtgcaacactgatgcagatggccgagctgctggtgagccatggcgcttctctttcagcacgaacgagcatggacgaaatgccgatcgacttatgtgaggaagaggagttcaaagtgctccttttagagctaaagcataaacacgatgtgatcatgaaaagtcaactgaggcacaagtctagtctttcccgacgcacgagttcagcaggaagcagaggaaaagtggtgcggagggcatcactctccgaccggactaacttgtacagaaaagagtacgagggagaagcaattctgtggcagcgctcagctgccgaggaccagcgaacatccacctacaacggtgacattagagagacaagaactgatcaggagaacaaagaccccaatcccagattggagaagcctgtactattaagtgagttcccgaccaagattccgcgtggagaattagacatgcccgtagaaaacggactgcgtgccccagtaagcgcatatcagtacgctctcgccaacggtgatgtctggaaggttcacgaagtgccagactactctatggcttatggaaatccgggtgttgcggacgcaacccctccatggtccagttataaagagcaaagcccccagacactcctggagctgaagagacaaagagctgctgcaaagctgctcagccatccctttcttagtacgcatctcggctcatcaatggccaggaccggcgagagtagctctgagggcaaagctccccttatagggggacgcacaagtccatattcgtccaacggaacatcagtttattataccgtgaccagcggggaccccccactgctgaagttcaaggcacccatcgaagagatggaggaaaaggtgcacggctgttgccgcatcagctag

SEQ ID NO: 236910 - DNA, 3369 bp, synthetic construct
  misc_feature 1..3369: note = Description of Artificial Sequence: Synthetic coding sequence
  source 1..3369: mol_type = other DNA
atggagcctagcgaggtgccgtcacagattagcaaggataacttcctagaggtgcccaacctttccgactccctgtgcgaggatgaagaagtgacatttcagccgggtttcagcccacaaccttccagacgcggttccgattcttccgaggatatatatctggacacgccctctagcggtacccgccgagtgtcgtttgcagattcttttggttttaacctggtatccgtcaaggagttcgactgttgggagcttccatctgccagcacaacttttgaccttggaacggatatattccacactgaggagtatgttctggctccactttttgatctgccctcctctaaggaagatctgatgcagcagttacagattcagaaggctattctggaatccaccgagtccctgttgggctcaacgtcgattaagggtattataagggtgcttaacgtgtcattcgaaaagctcgtatatgttcgcatgagcctggacgactggcagacccattacgatatcctggctgaatatgtccccaacagttgcgacggagagacagaccagtttagttttaaaattgtgttggtccctccatatcaaaaggacgggtccaaggttgagttttgtattcgctacgaaacatccgttggcaccttctggtcaaacaacaacggaaccaattacacattcatttgccagaagaaagagcaagagcctgagcccgtaaaaccatggaaggaagtcccaaaccgacaaatcaaaggatgccttaaggtgaagagctcaaaagaggagtcctctgtcacttcggaggaaaacaactttgaaaatccaaagaacacagacacctacattccaacaatcatttgcagccacgaagacaaggaggatctcgaagccagtaaccgcaatgtgaaggatgtgaacagggagcacgacgagcacaatgaaaaggagttagagctgatgattaatcagcaccttattcggacgcgcagcacagctagtagagatgagcgcaataccttttctaccgatcctgtcaacttccccaacaaggccgaggggctggaaaaaaaacagatccatggtgaaatctgcacggacctctttcagagaagtttaagtccctcatcaagtgctgagtccagtgttaaaggagacttttactgcaatgagaaatattctagtggggacgactgcacccaccagccttccgaggagactacctctaacatgggggaaataaagccaagtctgggcgacacaagctccgatgagcttgtgcaactgcacacgggctcgaaggaagtgctcgatgacaacgccaatcctgctcatgggaatggcacagtacagataccttgccctagttcagatcagcttatggccggaaacctcaacaagaagcatgaaggaggggcaaaaaacatcgaagtcaaggaccttggctgtctgcggagagatttccacagtgatacctccgcttgcctaaaggaaagcacagaggagggcagttcaaaagaagattactatggaaatggcaaggatgatgaagagcagcggatctatctaggggtgaatgagaaacagcggaaaaacttccagaccatcctgcatgatcaggagaggaaaatggggaatccaaaaatatcagtcgccggaataggggcttcaaatcgggatcttgctacccttctgagcgagcacactgctatccccactcgggcaataacggccgatgtctcgcactcgccccgaaccaacctctcatgggaagaagccgtgttaacacccgaacatcaccacctcactagcgaggggagcgccctgggtggcataacggggcaggtctgtagctctcgtacaggaaacgtccttcgcaatgattaccttttccaggttgaagagaagtccgggggtatcaacagtgaggatcaggacaattcaccccagcacaaacagagttggaatgtgctggaaagccagggcaagtctagggaaaataagactaatataaccgaacatattaaaggccagaccgattgcgaggatgtctgggggaagcgggataacacgagatctctgaaagccactaccgaggagttgtttacctgccaggagactgtctgctgtgaacttagcagcctcgctgaccatgggattacagagaaagccgaggccggtacagcatatattattaagaccacctccgaaagcactcctgaaagtatgtcagctcgagaaaaggccatcatcgcaaagcttccccaagagaccgcacgctccgacaggccgatcgaggtcaaggaaaccgcctttgatcctcatgagggacggaacgacgatagccactacaccctctgccagagggacaccgtgggggtcatatacgacaacgactttgaaaaagaatcgcgcctcggcatttgcaacgtgagggttgatgagatggaaaaggaggagactatgtctatgtataatccacggaagactcacgacagagagaaatgtggcaccggaaatatcaccagtgtcgaggaatcgtcttgggtaatcaccgagtatcagaaggctaccagcaagctggatctgcagttagggatgttgcccacggataagaccgtcttctcagagaaccgggaccttcgtcaggtccaggagcttagtaaaaaaactgattcagacgccatagtgcattccgcattcaacagcgacaccaaccgagctccgcagaacagcagccccttctctaagcaccatactgaaattagcgtgagcacaaacgaacaggctatagcggtggagaacgcggtgaccacaatggcaagccagcccattagtactaagagcgagaatatatgcaacagcacgcgagagatccagggaattgaaaaacacccttacccagagtcgaaacccgaagaggtatccagatcatctggcatcgtgacttctgggagtagaaaagaaaggtgcatcggccaaatattccagacggaagaatactcggtagagaagtcactggggcctatgatcctcataaataagcccctggaaaacatggaagaagccagacacgaaaacgaggggctcgtttctagtggccagtccctttatacttcgggcgaaaaagaatccgactccagtgcaagcacatccctgcctgtggaggaaagccaggcgcagggtaacgagtctttgttttccaaatatacaaactccaaaattccctacttcttactcttcctgatcttcttgataacagtgtatcattacgacctcatgatcggattgactttttacgttctgtccctctcatggctgtcatgggaagaagggaggcaaaaggaaagtgtgaaaaaaaaatag

SEQ ID NO: 236911 - DNA, 954 bp, synthetic construct
  misc_feature 1..954: note = Description of Artificial Sequence: Synthetic coding sequence
  source 1..954: mol_type = other DNA
atgtcttgtacacgcatgatccaggttttggaccctaggcctttaacctcatcagtgatgcctgtggacgttgcgatgaggctatgtctggcgcacagcccgcctgtgaagtcatttttaggtccctatgatgaattccagagacgacatttcgtgaataaactcaagccactgaagagctgtctgaatataaagcataaagccaagagccagaacgattggaaatgtagccataatcaggcgaagaagcgagtggtgttcgccgattccaagggtttgagcctcacggctatccacgtgtttagtgacctgcccgaagagcctgcctgggacttgcaatttgatctgctggacttaaacgatatttctagcgccctaaagcaccacgaggaaaagaatctgatcttggactttcctcagccgagcactgattacctctcttttcgaagtcacttccagaaaaatttcgtctgtctggagaattgctcattgcaggagaggacggtgacaggaaccgtgaaagtgaagaatgtgtcattcgaaaagaaagtgcagatacgcattacatttgactcttggaaaaactacacagacgtcgactgtgtgtacatgaaaaatgtttatgggggaactgacagcgatacgttctcatttgccattgatctgccaccggtgatacctaccgagcaaaagatcgaattctgtatatcgtaccatgccaacgggcaggtcttctgggataataacgatggacagaattataggattgtccatgttcaatggaaacccgacggggtccagactcagatggctccccaagattgcgcgtttcaccagacatcaccaaagactgaactagaatcgactattttcggctcacccaggctggcctctggcctgtttcccgagtggcaatcctggggccgtatggagaatcttgccagttacaggtag

SEQ ID NO: 236912 - DNA, 894 bp, synthetic construct
  misc_feature 1..894: note = Description of Artificial Sequence: Synthetic coding sequence
  source 1..894: mol_type = other DNA
atgtcctgtaccagaatgatacaagtgttggatcctcgccctcttaccagtagcgttatgccagtggatgtggcaatgcgcctgtgtctcgcacactccccccctgtgaagtcctttctaggaccttacgacgagttccagcgcaggcactttgtcaacaagctgaagcccctgaaatcctgtctgaatattaaacataaggcaaaatcccagaacgactggaagtgtagccataaccaggctaagaagagggtcgtgttcgcagatagcaagggcctgtctttgacagccattcatgtcttctccgacctgcctgaagagccagcttgggacctgcaattcgacctgctagacttgaacgatatttcttccgccctgagttttcgatctcattttcaaaagaacttcgtctgtctggagaactgttctctgcaggagcgaaccgtgactggcaccgtgaaagtcaaaaacgtgtccttcgaaaaaaaagtgcagatcagaatcacattcgattcatggaagaactacaccgacgttgactgcgtatatatgaagaacgtgtacggcggaacggactccgacaccttttcttttgccatagatctgcctcccgtgattccaactgagcaaaagatcgaattttgcatttcctaccatgcgaatggccaagtgttctgggacaacaacgatggacagaactatcgaatcgtccacgtgcagtggaagccagatggtgtgcaaactcagatggcccctcaggattgtgcatttcatcagaccagtcccaagaccgaattggaatccacaatctttggctcccccaggcttgcgtcaggactgtttcctgagtggcagtcctggggacgcatggagaaccttgcgagctataggtag

SEQ ID NO: 236913 - DNA, 600 bp, synthetic construct
  misc_feature 1..600: note = Description of Artificial Sequence: Synthetic coding sequence
  source 1..600: mol_type = other DNA
atgagcagtcctactagccccctcaaacatcacgaggaaaagaatctgatactggactttccacaaccctcgacagattatttgtcgttcagaagtcacttccaaaagaactttgtgtgcctagagaactgtagccttcaggaaaggaccgttacagggactgttaaggtgaagaacgtgagttttgagaaaaaggtccaaattcggataacatttgattcatggaaaaactatacagatgtcgattgtgtttacatgaagaacgtgtacggagggacagactcagacacattctcatttgcaatcgatctgccacccgttattcctacagagcagaaaattgaattctgtatcagctatcacgctaacggacaagtgttctgggataacaacgacgggcagaactatagaatcgtgcatgttcagtggaaacccgacggggtgcagacccaaatggccccacaagactgcgcctttcatcaaaccagtccaaaaaccgagttggagtctactatctttggatcacctagactggcatctggattattcccagaatggcaaagctgggggaggatggaaaacctggccagctatcgatag

SEQ ID NO: 236914 - DNA, 900 bp, synthetic construct
  misc_feature 1..900: note = Description of Artificial Sequence: Synthetic coding sequence
  source 1..900: mol_type = other DNA
atgagtcggggaccctctagcgctgtactgccctccgctctggggtctcgtaaattaggcccaagatcactcagctgcctaagtgatttggatgggggagtggcacttgagccaagggcctgcaggccccctgggagtcctgggagggctccacctcctacacccgcaccctcggggtgtgatccacgcttgagaccaattatcctgcggagagcccgatcattaccctcctcacctgagcgtcgtcagaaagctgctggggctccgggtgctgcctgcaggccaggctgctcccaaaagctgagggtgcgcttcgccgacgctctcggtctggagctcgcacaggtgaaggtgtttaacgccggagatgatccaagcgtgccactgcacgtgctgtctaggctggctatcaactcagacctatgttgttcctctcaggatctggagttcaccttgcactgcctggtgcccgactttccccctcctgttgaggccgctgactttggagaaaggctgcaaaggcagttggtctgtttggaacgagtcacatgttcagacctgggtattagtggcaccgtgagagtgtgtaacgtcgccttcgagaaacaggtggcggtcagatacactttctctggctggcgctccacccatgaagcagtggcgaggtggcgcggtcccgcaggccctgaaggaacagaagacgtctttacgttcggatttcctgtgcccccatttttacttgagctcggaagccgcgtccattttgccgtcaggtatcaggtcgcaggcgctgagtattgggataacaatgatcatcgggattatagcctcacctgcagaaaccatgctctccacatgccacgcggtgagtgcgaggagagctggatccacttcatttag

SEQ ID NO: 236915 - DNA, 756 bp, synthetic construct
  misc_feature 1..756: note = Description of Artificial Sequence: Synthetic coding sequence
  source 1..756: mol_type = other DNA
atgacaagacttacagtattggcactgttggccggtctgttagcaagctcaagggctgggagtagtcccttgctggacatagtaggtggcaggaaggctcgccctcgccagttcccatttctagcttctattcagaaccagggaaggcatttttgtggtggagctctgattcatgctcggtttgtaatgaccgccgctagttgcttccagagccagaatcccggagtgtccactgtagtcctcggcgcatatgatctgcggagacgcgaacggcagtctcgacagacgttcagcatcagcagcatgtcggagaatggatacgacccacagcaaaatctgaatgacctgatgctgctgcagctggatcgagaggctaatctgactagcagtgtgaccattctgcctctcccactgcagaatgcaacagtggaggctggcacaagatgccaagtggccggatggggatcccagcgctccggcggtagacttagtcgcttcccgagattcgtcaacgtaacagttacccccgaagatcagtgccgtcctaataatgtgtgcacaggtgtgttaactagaagaggaggcatctgtaatggcgacggtggcactcctttggtgtgcgaaggcctagcacacggcgtagcgagtttttctctgggaccctgtgggcgaggcccagacttcttcacccgggtagctttatttagagattggatagacggtgtcctgaacaaccctggtcctggccctgcttag

SEQ ID NO: 236916 - DNA, 954 bp, synthetic construct
  misc_feature 1..954: note = Description of Artificial Sequence: Synthetic coding sequence
  source 1..954: mol_type = other DNA
atggctgccgagcggggagctggccaacagcagtcccaggagatgatggaggaggagcacgaactgcccgttgatatggaaaccattaatttggatcgggacgccgaggacgtggatctgaaccactacagaattggtaaaatcgagggattcgaggtgttgaaaaaagtaaaaacgctgtgtctgaggcagaatctgatcaagtgcatcgaaaatctggaggaattgcagtcactgcgggagcttgatctgtacgataaccagatcaaaaagatcgagaacctggaagcattgactgagctggagatcctcgacattagcttcaacctcctgcgaaatatcgagggggtcgacaagctcacacggctgaagaagttgttcctggtcaacaacaagattagcaagatcgaaaatctttctaatctacatcagctgcaaatgctggagctggggtccaatcgcattagggccatcgagaatatcgacaccctgactaacttggagagcttgtttctgggaaagaataaaatcacaaagctgcagaacttggacgccctaaccaacctgaccgtgctgagcatgcagagtaacagactcacaaagattgaaggattacaaaacctggttaacttaagggaactgtatctgtctcataatggtattgaggttatcgaaggcctcgagaataataacaagctgaccatgctggatatagcctctaatcgtataaagaaaatcgagaacatctctcacctgaccgaacttcaagaattttggatgaacgataacctcctggaatcttggtcagatctggacgaactgaagggcgctagatctttggaaaccgtgtacctggagcggaaccctttacagaaagatccgcaataccggaggaaggtaatgctggccttgccttccgtcaggcaaattgatgccacgttcgtcaggttctag

SEQ ID NO: 236917 - DNA, 714 bp, synthetic construct
  misc_feature 1..714: note = Description of Artificial Sequence: Synthetic coding sequence
  source 1..714: mol_type = other DNA
atggccgcagagaggggtgctggccagcagcagtctcaggagatgatggaggaagaacatgagctaccagtggacatggaaacaatcaacctggacagagacgcagaagatgttgacttgaatcactacaggatcggtaagattgagggttttgaagtgctcaaaaaggtcaaaactctgtgcctgcggcagaatctcattaaatgtattgaaaatttggaggaactgcagtccctccgcgagcttgacctctatgacaaccagattaagaaaattgaaaacctagaagctctgactgaactggaaattctggatatcagtttcaatctgctgagaaacatagagggggtagacaaattaacgcgcttgaagaagctgttcctggtaaacaataaaatcagcaagatcgagaacttgagtaacctgcaccaattacaaatgctcgagctgggcagtaacagaataagagccattgagaatattgataccttgaccaatttagagtccttgttccttggcaaaaacaaaatcaccaaactgcaaaaccttgatgccctcaccaacctgacagtgttgtccatgcaatcaaatcgacttaccaaaatagaggggttgcagaatttggtgaatttgcgcgagttatacctctctcacaacggcattgaggtcatcgagggccttgagaataatgtccaggacagcctgacctattag

SEQ ID NO: 236918 - DNA, 843 bp, synthetic construct
  misc_feature 1..843: note = Description of Artificial Sequence: Synthetic coding sequence
  source 1..843: mol_type = other DNA
atggctgcagaaagaggtgcgggtcagcaacaaagtcaggagatgatggaagtggacagacgagttgagagcgaggaatcaggtgatgaggaaggtaaaaaacactctagtggaattgtggccgacctctccgaacagtctttaaaggatggcgaggaacgcggagaagaagatcctgaagaggaacacgagcttcctgtggatatggaaacgattaatctagacagagacgctgaagacgttgacctaaaccattaccgcatcggcaagatcgaaggttttgaagtgctgaagaaagtcaagacactctgcttgagacagaatctcatcaagtgcatcgaaaatctggaggagctgcagtcactcagagagctggacctttatgataatcaaatcaaaaagatcgagaacctggaagccctcacagagctggaaattctggatatctcatttaaccttctgagaaacatcgagggcgtcgataagctgactaggctcaaaaagctgtttctggtgaataacaaaatatctaagattgaaaacttgagtaatctgcaccagctacagatgctggagttaggctccaatcgcattcgagccattgagaatatcgacactttgaccaatctcgagtcactgttcctcggcaagaacaagatcaccaagctgcagaatctggacgccctcacaaacctgaccgtcctttcgatgcagagcaataggctaacaaaaatagagggcttgcagaatctggtgaacttgcgggaactatacctctcccataacggaatagaggtgatcgagggccttgaaaacaacgtccaggattcgctcacatattag

SEQ ID NO: 236919 - DNA, 1083 bp, synthetic construct
  misc_feature 1..1083: note = Description of Artificial Sequence: Synthetic coding sequence
  source 1..1083: mol_type = other DNA
atggccgcagagcgtggtgcaggccaacaacagtctcaagaaatgatggaagtggaccgtagggtggaatcagaggagagtggcgacgaagaaggcaagaagcatagttcaggcatcgtggcggacctttccgagcagtctctgaaagacggtgaagaacgtggagaggaggaccccgaggaggagcacgagctgcctgtggatatggaaacaatcaacctggacagggatgcagaggatgtggacctgaaccactatcggattgggaagatcgaagggttcgaggtgcttaagaaggtgaagaccttatgcctacggcagaatctgattaagtgtatagagaatcttgaggaactgcagagcctgcgagaattggacctgtacgacaatcagatcaagaagatcgagaacctagaagccctgaccgagcttgaaatcctcgatatcagcttcaatctccttcggaatatcgagggcgtagacaagttaacccgcctcaaaaaactgtttctggttaataacaagatttccaaaatcgagaacctcagtaatttacatcaacttcagatgctggaacttggttctaatagaatccgagccatcgagaatatcgacacactgactaacctagagagtctcttcctcggtaaaaacaagattactaagctgcagaatctggatgccttgacgaacctgaccgtgttaagcatgcaatccaaccgcttaactaaaatcgagggtctgcaaaatttggtgaacctgcgagagctgtacctcagccacaatggaatcgaagtgatcgaggggttggaaaacaataataaattgactatgctcgatattgctagtaataggattaaaaaaatcgaaaatatctcgcacctgacagagctgcaggaattttggatgaacgataacttgctggaaagctggtccgatctggatgagcttaagggggcacgctcacttgagacagtttacctggagcgaaacccgcttcagaaggatccccagtatcgacgcaaagtcatgctcgccctgccctcagtgaggcagattgatgcgacctttgtcaggttctag

SEQ ID NO: 236920 - DNA, 384 bp, synthetic construct
  misc_feature 1..384: note = Description of Artificial Sequence: Synthetic coding sequence
  source 1..384: mol_type = other DNA
atggtgcaaacagcagtggtgccagtcaagaagaaacgggtcgaagggcctgggagcttagggctggaggaatctggatcccggaggatgcaaaatttcgctttctctgggggactttacggcggactgccccctacgcactcagaggccggttctcagccccacgggatccatggcacagccttgattggaggcctgcctatgccgtaccccaatctggcgcctgacgtcgacctgaccccggtagtcccaagcgccgtcaacatgaatcctgctcctaatcccgcagtctataatccggaagctgtgaatgagccaaagaaaaagaagtatgcgaaagaagcgtggccaggcaaaaaacctacaccatcattgctgatctag

SEQ ID NO: 236921 - DNA, 1056 bp, synthetic construct
  misc_feature 1..1056: note = Description of Artificial Sequence: Synthetic coding sequence
  source 1..1056: mol_type = other DNA
atggccgcagccgctaattccggcagcagtcttccacttttcgactgccccacttgggccggtaaaccacctcccggattgcacctggatgttgtcaagggggataaactcatagaaaaactaattattgacgaaaaaaagtactacctattcggacggaatcccgatttgtgtgattttaccattgaccatcagtcatgctcacgagtgcatgccgctctggtctatcataaacatcttaagagagtgtttctcattgatctgaattctacacacggcacctttctaggtcatatccgtctggagccccataaaccccagcagatccctatagacagtacagtgagcttcggggcttctaccagggcctataccttgcgagaaaaaccacagaccctaccatccgcagtcaaaggggacgagaagatggggggtgaagacgatgagttgaagggactacttggccttcccgaagaagagacggaactcgacaatcttaccgaattcaataccgcacataacaaacggattagtaccctcaccattgaggaaggaaatctggatattcaacgccctaagcggaaaagaaaaaactcccgggttacattctcagaagacgatgaaataattaatcctgaggacgttgatccatctgtcggtaggtttcgaaacatggttcagaccgctgtcgtgcctgtgaagaagaagagagtggagggtcctggctctctcggactggaagagtctggctcaagaagaatgcagaattttgccttttcgggagggctgtatgggggtctgcccccaactcacagcgaggctggaagccagccgcatggtatccatggtaccgcactgattggcggactgcctatgccttatccgaatctggccccagatgtagacttgacacccgttgtcccttctgcggtgaatatgaatcctgcccctaatcctgctgtttacaaccccgaggcggttaatgagcccaagaagaagaagtatgccaaggaggcttggcctggtaaaaagcccaccccttcgctccttatctag

SEQ ID NO: 236922 - DNA, 630 bp, synthetic construct
  misc_feature 1..630: note = Description of Artificial Sequence: Synthetic coding sequence
  source 1..630: mol_type = other DNA
atgggcggtgaggacgatgagctgaaggggctcctaggtctgccagaggaggaaacagaactggacaatctgacggaatttaacactgcacacaataagcgaatctcaacactgaccatcgaagagggtaatctggacatccagcgtccaaagcggaagcgcaagaattctagggtgacattttccgaagatgatgagatcataaatcccgaggatgtggacccaagtgtgggacgattccgaaacatggtgcagaccgccgtggtcccggtgaaaaaaaagagagtggagggcccaggatctttaggtctggaagagtccggatcccgaagaatgcagaatttcgcctttagtggagggctgtacggtgggctgccacctacccattctgaagctggctctcagccccatggtatacacgggaccgctctaatcgggggattaccaatgccctaccccaacctggcaccggatgtagacttgacgccagtggtgccaagtgcagtaaatatgaaccctgcgcctaatcccgctgtttacaacccagaggctgttaacgagccaaagaagaagaaatatgccaaggaagcttggcccggaaagaagcctacccctagcttgctgatctag

SEQ ID NO: 236923 - DNA, 711 bp, synthetic construct
  misc_feature 1..711: note = Description of Artificial Sequence: Synthetic coding sequence
  source 1..711: mol_type = other DNA
atgggtggcgaggatgacgaactgaagggcctactggggctgccagaagaagaaactgaactggataatttgacagaattcaatactgctcacaacaaacgcatcagcacgctgactatcgaagaaggtaaccttgatattcaaagacctaagcggaaacggaaaaactcacgtgttaccttctccgaggatgatgagatcattaacccagaagacgtcgatccttctgtgggtagattcagaaacatggtgcagactgccgtggtccccgttaagaagaaacgggtggaaggacctggttctcttggactggaggagagcggttcccgcaggatgcaaaattttgcctttagcggtggtctctatggagggctaccccctactcattccgaggccggatctcaacctcatgggatccacggcaccgccttaataggcggactcccgatgccctacccgaaccttgcccctgacgtcgaccttacgcccgtggttccctcagctgtgaacatgaatccagctcctaaccctgcagtgtacaatccggaagcggttaatgaaccaaaaaagaaaaagtatgcaaaggaagcctggcctggatgtgagtttgtttcacagtccctcatcgccactgctatctggaaatgcctgctgaaagcccagtccctcgggctcgggggaaatgcgccttcaccattgtactataaatag

SEQ ID NO: 236924 - DNA, 618 bp, synthetic construct
  misc_feature 1..618: note = Description of Artificial Sequence: Synthetic coding sequence
  source 1..618: mol_type = other DNA
atgggtggggaagatgatgagttgaaaggtctgctcggactgccggaggaggagactgagctggacaatttgacagaatttaatactgctcataataaaagaatttcaacacttacgatagaagaaggtaatcttgacattcaacggccaaaacgaaaacgaaagaactctagagtaacattttcagaggacgatgagataattaatccagaagacgtcgatcccagcgtaggtcggttccggaacatggtgcagactgcggttgtccctgtaaagaagaaacgagttgagggacctggctcactgggcctggaggaatccggttcccgtaggatgcagaacttcgccttttcagggggactgtatggcggactgccccctactcattctgaagctggttcccaaccccacgggattcacggaacagcactgatcggcggtctgccaatgccgtatcccaatctggccccagacgttgatcttactccagtagtgccttccgctgttaacatgaaccctgcaccgaacccagccgtatataaccccgaggctgtgaacgaaccgaagaagaagaagtacgcgaaagaggcttggcccggaaagaagcctaccccttag

SEQ ID NO: 236925 - DNA, 600 bp, synthetic construct
  misc_feature 1..600: note = Description of Artificial Sequence: Synthetic coding sequence
  source 1..600: mol_type = other DNA
atggctgccgcagccaatagcggcagttctctgcctctgtttgactgtcctacgtgggccggaaagcctccccctggtctgcatctcgacgtagttaaaggggacaagttgattgagaagctcatcatcgatgaaaaaaaatactacttgtttgggcgtaaccctgatttgtgcgacttcactatcgaccaccaatcatgtagtagggtccatgccgcattagtataccataaacacttgaagagggtgttcctcatagaccttaactccacccacggaacatttcttgggcacatcaggctggaacctcacaagccccagcagatcccaatcgattccacagtcagcttcggtgcctccacccgagcatacacactgcgagagaaacctcagaccctcccctctgccgttaagggtgatgagaagatgggcggtgaggacgatgagttgaaggggctgctgggattgccagaggaagagaccgaactcgataacttgactgagtttaacactgcacacaaccacatggcctccatgggacagcattcttccgttgcatgcccttgtcacacacagacactgccattaatgtggacctag

SEQ ID NO: 236926 - DNA, 3891 bp, synthetic construct
  misc_feature 1..3891: note = Description of Artificial Sequence: Synthetic coding sequence
  source 1..3891: mol_type = other DNA
atgctcaaaacagagtctagcggcgagcggactactttgagatctgcttcccctcatagaaatgcataccgaacagagtttcaggctcttaaaagcactttcgataaaccaaagtcagatggcgagcaaaagactaaagaaggggagggctctcaacagtctcgtggcaggaagtacgggagcaatgtgaacaggataaaaaacctgtttatgcagatgggcatggaacctaatgagaatgcggcagtcattgcaaagacacgcggaaagggaggtcactcatcccctcagagaaggatgaagccgaaggaatttttagaaaagactgacggatccgtggttaagctcgaaagtagcgtaagtgagcggatctcgcgctttgatactatgtacgacggtccttcgtactcaaaatttacagagacaagaaaaatgtttgaaagatctgtccacgagtctgggcagaacaatcggtactcacccaagaaggagaaggctggtggaagcgagccccaagatgaatggggcggaagtaaatcaaacagggggtccactgactcactcgactccctgtcttccaggacagaggccgtgtccccaacagtaagccagctgagtgcagtcttcgagaatacagatagcccgtcggccatcataagtgagaaggcagaaaacaacgagtactccgttacggggcactatcccctgaatctccccagcgtgaccgtgaccaacttagacacgttcggccacctcaaggactctaattcctggccgccttccaataaacgcggtgttgatacagaggatgcacacaaatccaacgcgacaccagtgcccgaagtcgcatctaagagcaccagcctggccagcattcctggtgaagagatccagcagagtaaagagcctgaagatagcacttccaaccagcagacccctgatagcatcgacaaggacggcccagaagagccttgcgccgaatccaaggcaatgcctaagtctgaaatccctagcccccagtctcagctgctagaggacgctgaggcaaacctagtgggcagagaggccgctaaacagcaacggaaggagttagcaggcggagatttcacatctccggacgccagtgctagcagctgtggcaaggaggttcctgaagatagtaataactttgacggttctcacgtgtacatgcatagcgattataatgtgtacagggttcggagccgttacaatagtgattggggagaaacaggaaccgagcaggatgaggaggaggattccgatgagaatagctattaccagccagacatggaatattccgagattgtggggctacctgaagaagaggagattcctgcaaatcggaagatcaagttttcctcagccccaatcaaagtgttcaatacttatagtaatgaggattacgacagacgtaacgacgaagttgacccggtggctgcttctgcggagtatgagttggaaaagagggtggaaaaactggagttattccctgtggagttagaaaaggatgaggacgggctgggaatctctatcatcggaatgggtgtcggtgccgacgccggactggaaaagctggggatcttcgtcaagactgtgacggaaggtggcgcagctcagagggatggacggattcaagtcaacgaccagatcgtcgaggtggacggcatatcgctggtaggtgtgacccaaaacttcgcagccactgtcctgaggaacaccaaaggtaatgtgaggtttgttatcggacgggaaaagcccggacaggtctctgaagtcgcacaactgatttcacagacattggagcaagagcgaagacagagggagctgttggagcagcattatgcgcaatatgatgccgacgacgatgaaaccggtgaatatgccaccgatgaagaagaagatgaagtgggacccgtacttccagggagcgatatggcaatcgaggtgttcgagttgccagaaaacgaggatatgttcagtccgtccgagctcgacacctcgaaactgtcacacaaattcaaggaacttcagataaaacacgccgttacggaagctgaaatccagaagctgaagactaagcttcaagccgcagaaaatgaaaaggttcgctgggagttagagaaaacccaactgcagcagaacatcgaggagaataaggaaaggatgctaaagcttgaatcctactggatcgaggctcaaacgttgtgccacaccgtgaatgaacaccttaaagagacacagtcacagtaccaggcattagagaagaaatataacaaagcgaagaagctcattaaagacttccaacagaaggagcttgatttcattaagagacaggaggctgagcgcaaaaaaattgaggatctcgagaaagcccatctggtggaggtgcaaggcctgcaagttcgcatcagggatcttgaggctgaggtcttcaggctcttgaagcagaatgggacccaggttaataataacaacaatatatttgaaagaaggacgtcactcggggaagtgtccaagggcgatactatggaaaatttggacggaaagcagacctcatgtcaagatggactcagccaagaccttaacgaagccgtcccggaaactgagagactggactcgaaagctcttaaaacaagggcccaactgagtgttaaaaataggaggcaaagaccaagtcgcaccagactctacgactcagtgtcatctactgacggagaagatagtctggagagaaaaggattgagaacttcctcacccgaatctgattcaggcgttcctcctctgactcccgtcgatagtaatgtgccattctccagcgatcacattgcagagttccaagaggagcctttagatccagagatgggcccactgtcctctatgtggggagacacttcactgttttccacctccaagtctgatcacgacgtagaagaatctccatgccaccaccagactacaaacaaaaaaatcctaagagagaaggacgatgccaaagatccgaaaagcctcagagcttcctcttccctcgcagtccagggtggtaagattaagcggaaattcgtggaccttggagctcccttgagacgaaattctagcaagggcaaaaaatggaaggagaaggaaaaggaagcatccaggttctctgccggttcacgcatttttagagggaggctggagaactggaccccaaaaccttgctccactgctcagaccagcactagatcgccttgcatgccattctcctggttcaacgatagtcgtaagggttcctattcattccgcaatcttcctgcccctaccagttctttgcagccttctcctgagaccttgatcagcgataagaaaggttctaagaatttcaccttcaacgacgattttagccctagctctaccagctccgctgacctctccggacttggcgcagagcccaaaactcccggactgtcccagagcctggcactgagctctgacgaaatcttggatgatggccaaagtcctaagcactctcaatgtcagaatcgcgcagtacaagagtggagtgtgcagcaggtgtctcattggcttatgagcctcaatctcgaacagtacgtgtcagaattttcagcccagaacattacgggcgaacaattgctgcagctggatgggaataagctgaaagctttgggaatgaccgccagccaagaccgtgccgtggtcaagaaaaagctgaaggagatgaagatgtctctggagaaggccagaaaggctcaggagaagatggaaaaacagcgtgagaaactgagaagaaaagaacaagagcaaatgcagcgcaagagtaagaagaccgaaaaaatgacttccactactgccgagggcgcaggcgagcagtag

SEQ ID NO: 236927 - DNA, 3297 bp, synthetic construct
  misc_feature 1..3297: note = Description of Artificial Sequence: Synthetic coding sequence
  source 1..3297: mol_type = other DNA
atgctgaaaacggaatcgagcggagagaggactaccttacgatcagcatctccacaccgcaacgcttataggactgaatttcaagccctgaaaagcacctttgataagcctaagtccgacggggagcaaaagacaaaggaaggcgaaggcagccagcagtcacgcggaaggaagtatgggtccaatgtcaaccgcattaagaacttattcatgcagatgggcatggagccaaacgagaatgcagcggttatcgcaaagactagaggaaaggggggacacagttctccccagagacgcatgaagcctaaagagttcctggagaagactgacgggtccgtggtgaagctggaatcaagcgtctcggagaggatctctaggttcgatactatgtacgatggcccaagctactccaagtttactgaaacccgcaagatgttcgaaagaagtgttcatgaaagcggacagaataaccggtattcgcccaaaaaggagaaagccggaggctcggaacctcaggatgagtggggtggctctaaatctaataggggttcaactgactctctcgatagtttatcaagtcggacggaggctgttagcccaaccgtctctcagctgagcgcggtgttcgaaaatactgattctcccagtgccataatctcagagaaggcagagaacaacgagtattctgtgactggccactaccccctgaacctgcccagtgttaccgtaaccaacttggatacctttggtcatctgaaagattctaattcctggcccccttctaataagcgaggggtggacactgaggacgcacacaaatcaaatgccactcctgtgcctgaggtagcatcgaagtcaacctcgctggcatccataccgggagaggagatccagcaatctaaagagccggaggattctacttctaatcaacaaacacccgatagtatcgataaagatggcccagaagaaccatgcgccgagtcgaaggccatgcctaaatctgagattccatcaccccaatctcaattgttggaggatgctgaagctaacctggttggtcgcgaagctgccaaacagcagagaaaggagctagccggaggagacttcacctccccagatgcctccgcttcttcatgcggaaaagaggtgcccgaggacagtaataactttgatgggagccatgtgtacatgcattcagactataatgtctatcgagtgcgatcccgatataattccgactggggggaaactggcactgagcaggacgaggaagaggattctgacgaaaacagctattaccaacctgacatggaatactctgaaatcgtgggactgcccgaggaggaggagatcccagctaatagaaaaattaaattctcctctgctccaattaaggtctttaacacatattccaatgaggactatgacagacgtaatgatgaagtggaccctgtcgcggcttccgctgagtacgaacttgaaaagcgggtcgagaagcttgagctattccctgttgagctggaaaaagacgaagatggcctggggatttccatcattggaatgggcgtgggtgcagatgccggtctggaaaaactgggaatctttgtgaaaacagtgaccgagggcggtgcggcacagcgcgacggccgtatccaagtcaatgaccagattgtggaggttgatggtatcagcctggtcggagttacccagaacttcgcggctactgtattacggaacactaagggaaatgtgagattcgtgattggaagggagaaaccgggtcaagttagcgaggttgctcaattgatatcacagacactagagcaagaacgcagacagagagagctgcttgagcaacactacgcccaatacgacgctgacgatgacgagacgggggaatatgcaactgatgaggaggaagacgaggtgggccctgtgctgcccggatcagatatggctatcgaagtattcgagctccctgaaaacgaggacatgttctcaccgagtgagctcgatacaagcaagttgagtcacaagtttaaagagctccagatcaaacacgctgttactgaagccgaaatccagaaactaaagactaagctgcaggcagcggagaatgagaaggtcagatgggaacttgagaagacccaactccaacaaaatatcgaagagaacaaagagagaatgctcaaactggaatcttattggatcgaggctcagactctgtgtcacaccgttaatgagcacctcaaggagacccagagccaatatcaagctttggagaaaaagtataataaagccaaaaaactcattaaagattttcaacagaaagagctggatttcataaaacgtcaagaggctgagcgaaagaaaatcgaggacctagagaaggcccatcttgtcgaggtgcagggcctacaggtccgcattcgcgacctggaggccgaggtgtttcgcctcctcaaacaaaatggcacgcaggtgaacaataataacaatatcttcgagcgacggaccagtttgggagaggttagcaaaggggacacaatggagaatctggacggcaaacagacctcatgccaggacggcttgtctcaggatctcaacgaagcggttcctgagacggaacggctcgattccaaggcgttaaaaacaagggcgcaattgagtgtgaaaaataggcgccaacggccatcaagaaccagactgtatgattctgtgtcgtctaccgatggagaagatagcctggagcgtaaaaactttacattcaacgacgacttctctccctcctccacatctagcgccgatctcagcggcctgggagctgaacccaaaacccccggactttcccagtcccttgccttgtctagtgatgaaagcctggacatgatcgacgatgagatcttagacgacggccagtcaccgaaacattcacagtgtcagaatagagccgtacaagagtggagtgtgcagcaggtgtctcactggcttatgagcctgaacctcgagcagtacgttagcgagttctccgcacagaatatcaccggcgaacagttactgcagcttgacggcaacaaactgaaggcactggggatgacagcaagccaggaccgggcagtggtgaagaagaaactcaaggagatgaagatgtcccttgagaaggcccgaaaagctcaggaaaagatggagaagcagagagagaagctgcgaagaaaggagcaagagcagatgcagcgaaagagtaagaagaccgagaagatgacatccacaaccgctgaaggagcaggtgagcagtag

SEQ ID NO: 236928 - DNA, 222 bp, synthetic construct
  misc_feature 1..222: note = Description of Artificial Sequence: Synthetic coding sequence
  source 1..222: mol_type = other DNA
atgctcaagacggagtcttctggggagcgaaccacacttcgctctgcatcacctcacaggaatgcatacaggacagaattccaggcgctgaaatccaccttcgataagcccaaaagcgatggagaacagaagactaaagagggtgagggcagtcagcagtctagagggagaaaatacgggagtaatgtgaaccggattaaaaacctgttcatgcagatgtag

SEQ ID NO: 236929 - DNA, 126 bp, synthetic construct
  misc_feature 1..126: note = Description of Artificial Sequence: Synthetic coding sequence
  source 1..126: mol_type = other DNA
atgttgaaaactgaatcgagtggcgagaggacaactctgcggagcgcctccccccacaggaatgcctataggacagagtttcaggctctcaagtctacatttgacaagccgaaatcagatgggtag

SEQ ID NO: 236930 - DNA, 3297 bp, synthetic construct
  misc_feature 1..3297: note = Description of Artificial Sequence: Synthetic coding sequence
  source 1..3297: mol_type = other DNA
atgctgaagaccgagagcagcggggagagaacaacgctgaggtctgcttctcctcataggaacgcttacaggactgaattccaggccctgaagtccaccttcgataaacccaagtccgacggggagcagaagactaaagagggtgagggttctcaacagagcaggggtcgcaaatatggatctaacgtgaatcggatcaaaaatctctttatgcagatgggtatggaacctaatgagaatgccgcagtgatcgcaaagactagaggcaaagggggacactctagcccccagcgaaggatgaaacccaaggaatttctggagaagactgacggatctgtggttaaactggagtccagcgtgagtgaaaggatcagccgctttgatactatgtacgacggtccgagctatagcaagtttacggagacaaggaagatgtttgagaggagtgtgcacgaatctggccagaataacaggtacagtccaaagaaagaaaaggccggtggctccgaacctcaggatgaatgggggggatccaaaagcaaccggggtagtactgattccctggacagcctatcctctagaactgaagcagtaagccccaccgtctcccagttaagtgccgtgttcgagaacaccgactccccgtcagcgattattagcgagaaggccgaaaataacgagtactccgtcacaggacattacccactaaacctgcccagcgtaactgtgaccaatctggatacatttgggcaccttaaggattccaattcatggcccccttccaacaagaggggggtcgacacagaggacgctcataaaagtaatgcaacacctgttcccgaggtggcgagtaagtcaactagcctggccagcattcctggagaagagatacagcagagcaaggaacccgaggattccacttctaaccagcagacgcccgacagtatcgacaaagatggcccagaagagccttgtgcggaatctaaggcgatgccaaagtccgaaatcccctcccctcagagccaactattggaggatgcagaggcaaatctggtgggccgagaggcggctaagcaacagagaaaggaacttgcaggcggagattttacttcaccggatgcttccgcctctagttgcgggaaagaagtaccagaggactcaaacaacttcgacggaagtcacgtttatatgcatagcgattataatgtgtatagagtcagatcccggtacaactcagattggggggagacagggacagagcaggacgaggaagaggacagtgacgaaaactcatattaccagcctgatatggaatactctgagatcgtgggactgccagaggaagaagagatccctgcaaatcgaaaaattaaatttagctccgctcccatcaaggtttttaatacctacagcaatgaagactatgacaggcgaaatgacgaggtggaccccgtggccgctagcgctgagtatgagttggaaaagcgggtcgaaaaactggaattattcccggtcgaactggaaaaagatgaagatggactgggtatctctataataggcatgggtgtcggggctgatgccggactagaaaagttgggcatatttgtaaagaccgtcactgagggaggtgccgctcagcgagacgggcgaattcaggttaacgaccaaatcgttgaggtggacggaattagcctggtgggggtcacccagaactttgctgctactgtgctacgcaatacaaagggcaacgtgcggttcgtcattggtagggagaaaccaggccaagtgtccgaagtggcccagctgatcagccagacactggagcaggaaaggagacagcgtgaactcctagaacagcattatgcacagtatgatgcggacgatgacgaaaccggggagtatgcaaccgatgaggaggaggacgaggtcggccctgtgctacctgggtcggatatggctatcgaggtgttcgaattgccggagaacgaagacatgtttagcccttctgagctcgacacaagcaaattgtcccacaagttcaaagagttgcaaattaaacacgctgtcactgaggctgagatacagaagcttaagaccaaattgcaagcagcggaaaacgaaaaggtgaggtgggaactagaaaagactcagcttcagcaaaacatagaagaaaataaagagcggatgctcaaattggagtcttactggatcgaggcgcagacactatgccatactgtgaacgaacacctgaaggagacccagtcgcagtaccaggcacttgagaagaaatacaacaaagcaaagaagctgatcaaagacttccaacaaaaagagcttgactttattaagcgccaagaagcagagaggaaaaaaatcgaagaccttgaaaaggcccacctggtcgaagtccagggccttcaggttaggatccgcgatctggaagccgaagtgttcaggctactcaaacaaaacggtacacaggtcaacaacaataacaatattttcgagagacggacaagcctgggcgaagtgagtaagggtgatacaatggaaaacctcgatggaaaacagacaagttgtcaagatggcctttcacaggacctcaacgaagccgtgcccgaaacagagaggcttgattctaaggccctgaagacaagggctcagctatccgttaaaaaccgcagacagaggccatcgcggacaagactctatgattctgtctcctcaaccgatggcgaagactccctggagaggaaaaatttcacctttaacgatgacttctccccaagctcaacctctagcgctgacctgtcaggattaggagctgaaccaaaaacacctggcctgagtcagagcctggctttatcttcagatgaatctcttgatatgatcgacgacgagatactcgacgacggccaatctcctaaacattcgcagtgccagaacagggctgtgcaggagtggtcggtccagcaagtgtctcactggctcatgagtctcaacctcgagcagtacgtgagcgagttcagcgctcaaaatatcacaggtgagcagctcctccagttggacggaaataaattgaaggccctgggcatgactgcctctcaggatagggccgtggtgaagaaaaaactcaaggagatgaagatgtcgctggaaaaggcccgaaaagcacaggaaaaaatggagaagcagagggagaagctgcgcagaaaagagcaagagcagatgcagagaaagagtaaaaagacagagaaaatgacctccaccacggcggagggcgctggtgaacaatag

SEQ ID NO: 236931 - DNA, 3762 bp, synthetic construct
  misc_feature 1..3762: note = Description of Artificial Sequence: Synthetic coding sequence
  source 1..3762: mol_type = other DNA
atgctgaaaacggaatcttcgggcgagagaaccactctcaggtcagctagcccccataggaatgcatatcgtacggaattccaggcccttaagtcgacattcgataaacctaagtctgatggagagcagaaaactaaggagggggagggtagccaacagagcagaggaaggaaatatgggtccaacgtaaacaggatcaagaacctgttcatgcagatgggcatggagccaaacgaaaatgcagcagtcatcgccaagacacggggaaaggggggtcatagctctccacagagaaggatgaaacctaaggaatttttggaaaagacagacggatctgtcgtgaaactcgagagcagcgtgtcggagaggatctcacgttttgacaccatgtatgacggcccttcatactctaagttcaccgaaaccagaaaaatgttcgaaaggagcgtccatgaaagcggacaaaataaccggtactcccccaaaaaggagaaggccggtggtagtgaaccccaggatgaatgggggggatcaaaatctaacagagggtccaccgacagcttagattcactatcctcccgcactgaggcagtttctcctactgtatcccagttaagcgctgtgtttgagaacactgattccccttctgcaatcatctcagagaaagctgagaataacgagtacagcgttacaggtcactacccattaaacctccccagtgtcactgtgacaaacctcgacaccttcggccatctgaaagacagcaatagttggcccccttccaataagaggggagtggacacagaggacgcccacaagtctaatgctacgcctgtccccgaggtggcctcaaagtccacctctctagcctctatacccggagaggagattcagcagtctaaagagcccgaggattcaacctcgaatcagcagaccccggatagcatagataaagacggacctgaggaaccttgcgctgaaagcaaggccatgcctaaatctgagatcccaagtccacagagccagttgttagaagacgccgaggcaaatcttgtcggcagagaagctgcaaagcagcagcggaaagagctagccggtggcgacttcacatccccggacgctagcgctagctcttgtggcaaggaggtgcctgaagacagtaataacttcgatggaagccacgtctacatgcattccgactacaacgtctacagagtcaggtccaggtataattcagactggggagagacaggaactgaacaggatgaggaagaagacagtgacgagaattcttactatcagccagatatggagtatagcgaaatcgtgggcctcccagaggaggaagagattcccgctaacagaaagattaagtttagctctgcacccatcaaggtatttaatacttactcaaatgaagactatgaccggaggaacgatgaggtggatccagtggctgcctccgcagagtacgagctcgagaagagggttgaaaagcttgaactttttcctgtggagctcgaaaaagacgaagatggccttggcattagtataatcgggatgggcgtgggcgcagacgccggattagaaaagctggggattttcgttaaaaccgtaacagaaggtggtgcagcacagcgagacgggagaatacaggtgaacgaccaaatcgtggaggtcgatggaatctcactcgtgggagttacgcaaaattttgcggcaacagtgctgcggaacactaaagggaatgttaggttcgttatcgggcgagagaaaccaggccaggtcagcgaagttgcacagttgatcagtcagacattggagcaggaacgacgtcagagagagcttctggaacaacactatgcccagtatgatgccgatgatgatgagaccggagagtatgctaccgacgaagaagaggatgaagtggggcctgtcctgccagggagcgatatggccatagaagtcttcgagttacccgaaaatgaggacatgttttcgccctccgaactggatacaagcaaactatctcataaattcaaagaactgcagataaagcacgccgtaacagaagccgaaattcagaaactcaagacaaagttgcaggccgctgagaacgaaaaggtgagatgggagcttgagaagactcagcttcagcagaatattgaagagaacaaggagcgtatgctgaagctcgagtcttactggatagaggcgcagactctttgccacaccgtgaatgaacacctgaaggaaacacagtctcagtatcaggcactggaaaaaaaatacaacaaagcaaagaagctgattaaagatttccagcaaaaagaactcgacttcatcaaacggcaagaggcagaacgcaagaaaatagaagatctggagaaagcccatctggtggaggtccagggcctgcaagtgcgcatacgagatttagaggcagaggtcttccgcctgcttaagcaaaacggtacacaggttaataataataataatattttcgagagaagaaccagcttaggcgaagtgtccaagggcgatacaatggaaaacttggacgggaaacaaacctcctgccaggacggactcagccaggatctcaacgaagctgtgccagagaccgagaggttggatagcaaagctctaaagacccgtgcccaattatctgtaaagaatcggagacagaggccttcacggacacgcctgtacgatagcgtgtcttccaccgatggggaggattccctcgagaggaagccctctaactccttttacaaccatatgcacattacaaaactgctccccccaaaaggtcttcgaaccagtagcccggagtcagattcgggggtgccacccctcacccccgtcgactccaatgtgccatttagttctgatcatatcgccgagtttcaggaagagccactcgatccagagatgggtccgttaagtagcatgtggggggatacatccttattttctacctccaagtcagaccatgatgtggaagagtccccatgccaccatcagactaccaataagaagatcctgagggaaaaggacgacgctaaggacccgaagagcttacgagccagctctagtttagccgtgcagggtggaaagatcaaaaggaaattcgtcgatctgggtgccccactgagacgcaactctagtaaggggaagaaatggaaggaaaaggaaaaggaagcctctcgatttagcgccggaagcaggatcttccgagggcgactcgagaactggactccgaaaccttgtagcactgcccagacatccacacgctcaccttgcatgccattttcatggtttaatgattctagaaaggggagctactcttttcgtaatcttccagctcccacctcaagtctacaacctagtccggaaactcttattagtgataagaaggggtccaaaaatttcacatttaacgatgacttctctcctagcagcactagctcagcagatctcagtggacttggcgctgaaccaaagaccccaggattaagccagtctcttgctctgtccagtgacgaagcactgggaatgacagcgtcacaggatcgcgctgtcgtgaaaaagaagctaaaggagatgaagatgagtctggaaaaggcgagaaaagctcaagaaaaaatggaaaagcaacgcgaaaaactccgccgaaaagaacaggagcagatgcagagaaagagtaagaaaactgagaagatgacctccacgacagccgaaggggctggcgagcaatag

SEQ ID NO: 236932 - DNA, 930 bp, synthetic construct
  misc_feature 1..930: note = Description of Artificial Sequence: Synthetic coding sequence
  source 1..930: mol_type = other DNA
atggacgagaaggtgtttaccaaagagctggatcagtggatcgagcagctaaatgaatgcaaacagctatccgaaagtcaggtcaaaagcctgtgtgagaaggccaaagaaatactgactaaggagagcaacgtccaggaggtgaggtgtccagtaacagtctgcggggatgttcatggtcagtttcacgaccttatggaacttttcaggatcgggggtaaatctccggatacaaactacctgttcatgggtgactacgttgatcggggttattacagcgtagagacagtgacactgctagtcgcactaaaggttaggtaccgagaacgtattaccattctgagaggaaaccacgagtcccgtcagataacacaggtgtacggattttacgatgagtgccttcgcaaatacgggaacgcaaacgtctggaagtattttaccgacctatttgactatctgcctctcaccgccctggttgatggacagatcttctgcttgcacgggggattatctccaagtattgatacactcgaccacattcgggctctcgacaggctgcaagaggtgccccacgaagggcctatgtgcgacttattatggtcggaccccgacgacagggggggatggggcatcagtccaagaggcgcagggtacaccttcggccaggacattagcgagacgtttaatcatgccaatggattaacccttgtctcacgtgcccaccaactagtgatggagggctacaattggtgtcacgataggaacgtggttactatcttttcagcacctaactattgttatagatgcggcaaccaggctgcgatcatggaactggacgatacgctgaaatactcttttctgcaatttgatccagctccacggcgaggagaaccccacgtcacacgcagaacacctgattatttcctctag

SEQ ID NO: 236933 - DNA, 1407 bp, synthetic construct
  misc_feature 1..1407: note = Description of Artificial Sequence: Synthetic coding sequence
  source 1..1407: mol_type = other DNA
atggctccacccccagccagagtccacctcggcgctttcttggctgtcacccccaaccccggtagcgccgctagcggaaccgaggctgctgctgcaacacccagcaaggtgtggggctctagtgccggtaggatagaaccacgcggtggaggaagaggggctttgcctacctctatgggccagcacggacccagtgcccgtgcgcgagcaggcagggcccctggaccacgacctgctagagaagctagtccgcgtctgcgagtgcacaaaactttcaagtttgtcgtggtaggagtgcttctacaggtcgtccctagttcagcggctacgatcaagctgcacgaccaaagcatcggaacacagcagtgggaacactcacccctaggagagctttgccccccaggttctcacagatccgaacacccaggagcttgtaataggtgtaccgagggagtcggctacactaatgcctctaacaacctgttcgcctgtctgccttgcaccgcctgtaaatctgatgaggaagagagatccccttgtactaccacccgaaacaccgcctgccagtgcaagcctgggaccttccgcaacgacaatagtgccgagatgtgtcgtaagtgtagtcggggatgccccagagggatggtcaaagtgaaggattgcaccccctggtccgacatcgaatgtgtgcataaggagtcgggcaacgggcacaatatctgggtgatacttgtcgtgaccctggtggtaccactgctcctggtcgccgtgctcattgtttgttgttgtatcggaagtggctgtggcggtgaccccaaatgcatggatcgagtatgtttctggcgcttggggcttctacgtggcccaggggcagaagacaacgcccataatgagatcctgagcaatgcggacagcctgagtacattcgtgtccgagcagcagatggagtcccaggaaccagctgatctgacgggtgtgacggtgcagagccccggagaggcacagtgcctgttagggccagcagaagctgagggctcccagagaagacgactgctggtgccggcaaacggggctgatccaaccgagacattgatgctgtttttcgacaagttcgcaaacatcgttccatttgatagctgggaccaacttatgcgccagttggacttgacaaagaatgaaatagatgtcgttagagcgggtaccgccggacccggagacgcactgtatgccatgcttatgaagtgggttaataaaaccggtcgtaacgctagcattcacacgcttctggacgccttggagcgcatggaagagcggcatgcccgagagaaaatccaggaccttctcgtcgacagcggtaaattcatctaccttgaggacgggacgggcagtgctgtgtcactggagtag

SEQ ID NO: 236934 - DNA, 930 bp, synthetic construct
  misc_feature 1..930: note = Description of Artificial Sequence: Synthetic coding sequence
  source 1..930: mol_type = other DNA
atggacgacaaggcctttaccaaggagctcgaccagtgggtggagcagctgaatgagtgtaaacagttaaacgagaatcaagtacgtactctgtgcgaaaaggccaaagagatccttacaaaagagagcaacgttcaagaggtgcgctgccctgtcaccgtgtgtggggacgtacatgggcaattccacgaccttatggaattgttccgaatcggcggaaagtccccagatactaattacctgttcatgggggactacgtggatcgcggttactacagtgtggagacggtgacattgttggtcgccctgaaggtccgatacccagaaaggatcacaatcctaaggggcaaccacgagtcgaggcagatcacgcaggtgtatggattctatgacgaatgcctgagaaaatacggaaatgcgaatgtgtggaaatactttacggatttgttcgactacttgcccctgacagctctcgtggacggacagatcttctgcttgcacggtggcctgtctccatctatcgacacattagaccacattcgagcactggatcggctacaagaagtaccccatgaaggaccaatgtgcgaccttctgtggtccgatcccgatgacagaggagggtggggaatctcacctcgaggcgcaggctacacctttggtcaggacatttctgaaactttcaatcacgctaacggcctgactctcgtgtcacgcgcacaccagttagtgatggaaggttacaactggtgtcacgatcgcaacgtggtgaccatctttagcgcaccaaattactgttatcgatgcgggaatcaagcagctatcatggaattggacgatacattgaagtattcgttcctgcagtttgatccggctccaagaaggggtgagccccacgtgactagacggacaccggactacttcttatag

SEQ ID NO: 236935 - DNA, 1461 bp, synthetic construct
  misc_feature 1..1461: note = Description of Artificial Sequence: Synthetic coding sequence
  source 1..1461: mol_type = other DNA
atgtcctctagcagtccccctgcaggcgcagcatctgcagcgatcagtgcctcggaaaaggtggacggctttactcgtaaaagtgtgaggaaggcccagcgccaaaagcgcagtcagggcagcagccagtttaggtctcaggggagccaggcagagctccaccctctcccccagctgaaagatgctacttccaatgaacagcaggaattgttctgccagaagttacagcagtgttgtattctatttgacttcatggactctgtgtctgacttaaagagcaaagaaattaagcgagcgaccttgaacgagcttgtcgagtacgtatctactaaccgaggggtgatcgtggaatctgcctactctgacatcgttaaaatgatctccgctaacatcttcagaactctgcccccttctgataatcctgattttgaccccgaagaggacgaacccacattggaggccagttggccacatatccagttagtatatgagttcttcctgcggttcctggagagccctgacttccaaccctctattgctaagcggtatattgatcagaaattcgtccagcagctactggagctgttcgattccgaggatccccgagagagggacttcctaaagacggttctccacagaatttatggcaaatttctgggcttgcgggcatttataagaaagcagattaataatatatttctgcggtttatctatgagaccgaacacttcaacggcgttgctgagttgctagaaattctcggctcgatcattaatggttttgctcttccgcttaaagccgaacacaagcagtttctgatgaaagtgctgatcccaatgcacaccgcgaagggcctcgccctctttcacgcccaactggcttactgtgtggtgcagttcctcgagaaagataccacgctaacagagccagttattagaggcttacttaagttctggcccaagacatgttctcagaaggaagtgatgtttttgggggagattgaagagattctggacgtgatcgagcccacccagttcaaaaagattgaggagcccctgttcaagcagatttcaaagtgtgtcagcagttctcactttcaggtcgccgagcgagccctttacttctggaataatgagtacattctaagtctgatagaggagaacatcgacaaaattctgcccatcatgtttgctagtttgtataagatcagtaaggagcactggaatccaacaattgtggctctggtttacaatgtccttaagacactgatggaaatgaatggaaaattgtttgacgatctgacatcctcatacaaggccgagcgccagcgagagaaaaagaaggagctagagagggaggagctgtggaagaaattagaggaattgaagttgaagaaggcacttgagaaacagaatagcgcctataacatgcattcaattctgtcgaacacaagcgcggagtag

SEQ ID NO: 236936 - DNA, 1290 bp, synthetic construct
  misc_feature 1..1290: note = Description of Artificial Sequence: Synthetic coding sequence
  source 1..1290: mol_type = other DNA
atgataatgaacgccacaagcaacgagcagcaggagctgttctgccagaaattgcaacagtgttgtatactcttcgattttatggattcagtctcagatctcaagtccaaggagatcaagcgcgctaccctgaacgagctagttgagtacgtcagcacaaataggggcgtcattgtggagtccgcatactccgacatcgtgaaaatgatcagtgcaaatatctttcgcacactccccccttctgacaatcccgattttgatcctgaggaagatgagcccaccctggaggcaagctggccccacattcagctcgtttacgagttcttcctaagattcctagaatcacctgatttccagccttccattgcaaagcgctacattgatcagaagttcgtccagcagttgctagagctttttgattcagaagaccccagagagcgggatttcttaaaaaccgtgttacacaggatctacggaaagtttctagggctccgtgcctttattcggaagcagatcaataatattttcctccgatttatctatgagacggagcacttcaatggtgtcgccgagttactggagatccttgggagtattataaacgggtttgccttacctctgaaagccgagcacaagcaatttttgatgaaggttcttatcccaatgcacaccgcgaagggcctagccctgtttcacgctcagctggcttattgtgtggtgcagtttttagaaaaggataccacattaaccgagccagtaatccgcggattgctaaagttctggccaaaaacttgttcacagaaggaggtgatgtttctgggggagattgaggagatcctcgacgtgattgagccgacacagtttaaaaaaatcgaagaacctctctttaaacagatatcaaagtgtgtttcaagctcccacttccaagtggccgagcgtgctctctatttctggaataacgagtatatactgtctctcatagaagaaaatatcgacaaaatcctgcccataatgttcgcctctctctataagatcagcaaagagcactggaacccaactatcgtggctttggtctataacgtgcttaagactctcatggaaatgaatgggaaattatttgatgacctgacatcctcctataaagcagaacggcagagggagaagaagaaggagctcgagagagaagaactctggaaaaagctggaggaattgaagctgaagaaggctcttgaaaagcagaatagtgcatacaacatgcatagtatactcagcaacacctcagctgaatag

SEQ ID NO: 236937 - DNA, 1461 bp, synthetic construct
  misc_feature 1..1461: note = Description of Artificial Sequence: Synthetic coding sequence
  source 1..1461: mol_type = other DNA
atgtcttcaagcagcccgccagccggtgctgcaagtgccgctatttcggcgtccgaaaaagtcgatgggttcacgcgcaaatccgtgcgtaaggcccagcgtcagaagagatctcagggaagctcccagttccggtcccaaggttctcaggcagagctccatcccctgccgcagttgaaggacgcgacatccaatgagcagcaggaactattttgtcaaaaactgcaacagtgttgcattttatttgactttatggattccgtgagtgaccttaagtccaaggagattaaacgcgcaacgctgaacgagcttgtagagtacgtaagcacgaacaggggggtcatagtcgagagtgcctattcagacatagtaaaaatgatatctgccaacatttttaggacgctcccaccttctgataatcctgatttcgacccggaggaagacgagcctaccctggaggccagctggcctcacatccagttggtttacgaatttttcttaagattcttagagtctcccgatttccagccgtctattgcgaagagatacatcgatcaaaaattcgtgcaacagcttctggaactgttcgactcagaagaccccagagaaagggatttcctgaaaactgtgctgcacaggatctatggaaaatttctgggcctccgtgcttttatccggaaacagatcaacaatatcttcctgaggtttatctatgaaacagaacattttaatggagttgctgagctgctagagattctgggatcaattataaacgggtttgctctccccctaaaggctgaacacaagcagtttctcatgaaagttctgatccccatgcacaccgctaagggcctggctctgttccatgcacaactggcttactgcgtggtgcagttccttgagaaggatacgacgctgacggaacctgtgattcgcggtctcttgaagttctggcccaagacttgttctcagaaagaagtgatgttcctaggggagattgaagagattcttgacgtcatagaacctacacagtttaaaaagattgaagaacccctatttaagcagatatccaaatgcgtgtcttcgtcccactttcaggtggctgagcgggcactgtacttttggaacaacgagtatatactgagtctcattgaggagaacattgacaagattctgccaataatgtttgcatcgctgtataagatctcaaaagagcattggaaccctacaatcgtggctctggtatacaatgtgctgaaaaccctgatggaaatgaatgggaaattattcgatgacctgacaagttcctacaaagcagagcgacaacgggaaaagaagaaagagctcgagcgcgaagaattgtggaagaagctggaggagcttaaactgaagaaggccttagagaaacagaacagcgcatacaacatgcactccatcctcagcaatacatccgcggagtag

SEQ ID NO: 236938 - DNA, 1341 bp, synthetic construct
  misc_feature 1..1341: note = Description of Artificial Sequence: Synthetic coding sequence
  source 1..1341: mol_type = other DNA
atgaagtgcttcagccgatatttgccttatatctttaggccccctaatacaattctttcttcctcttgccacacggaggctgatatcatctcaaccgtagagtttaaccataccggcgaactcttggctacaggggataagggagggagagttgtgatctttcaaagagaacaggaaagtaagaatcaggtgcaccgccgaggcgaatacaatgtctattcaacttttcagagccatgagccagagtttgattatctcaaaagtctggagatcgaggaaaaaattaataaaatccggtggctgccccagcagaacgctgcgtatttcctgctgagcacaaatgacaaaaccgtgaagctctggaaggtaagcgagagagataaacggcctgagggatataacttaaaagatgaggagggaaggttgcgggaccctgccaccatcactactttacgtgtgcccgtgctgcgaccaatggacctgatggttgaggccacacctagaagggtctttgccaatgcccatacctatcatattaattctattagcgtaaattctgattatgagacctacatgtctgccgatgatctgagaattaatctgtggaatttcgagatcacgaaccaaagttttaacatcgtagacatcaaacccgctaacatggaggagctgacagaagtaattacggccgctgagtttcacccccaccattgcaacacttttgtttatagtagcagcaaaggcacaatacgcctctgcgatatgcgtgccagtgccctgtgcgataggcataccaagttctttgaagagccagaagacccatcgaatcgctccttcttcagcgagattatatcctctatatccgatgtcaaatttagccatagtggacgctacatcatgacccgtgactaccttaccgtgaaagtctgggacctcaatatggaaaataggcctatcgaaacctaccaagtgcacgactacctgaggtcaaagctctgtagcctgtacgaaaacgattgcatcttcgacaaattcgagtgtgtctggaatggttcggactctgtgattatgacaggctcatacaacaacttcttccggatgttcgatcgaaacactaaacgggatgtaacccttgaagctagtagagaaaactctaaaccacgggcaatcctgaagccacggaaggtctgcgtgggaggaaaaagaagaaaagacgaaatcagtgtcgatagcttagatttttctaaaaagatcctccacaccgcttggcacccaagtgagaacatcattgctgtggcggctacgaacaacctctatatctttcaggacaaagtcaactag

SEQ ID NO: 236939 - DNA, 1332 bp, synthetic construct
  misc_feature 1..1332: note = Description of Artificial Sequence: Synthetic coding sequence
  source 1..1332: mol_type = other DNA
atggaagaggacatcgacacaagaaagatcaacaattcgtttctgagagatcatagctacgccactgaggcagatatcatttccaccgtggaatttaaccatactggtgaactgctagccaccggcgacaagggcggacgcgtcgtcatcttccagagggagcaggagtctaagaatcaggtgcacagaaggggcgagtacaatgtgtatagcacctttcagagccacgaacctgagttcgactatcttaaatctctggaaatcgaagagaagatcaacaaaatcagatggcttccgcagcagaacgccgcttactttttgctgtccactaacgataaaaccgtgaagctgtggaaagtgagcgagcgagataagagaccagagggctacaacctcaaggacgaggagggtcgcttgagagatcccgcaactatcactacccttcgggttccagtacttcggccaatggacctgatggttgaagccacaccccgtagagtctttgcaaatgcgcatacctatcacatcaattctatcagtgtaaattcagactacgagacatatatgtctgctgatgacctgaggattaacctttggaatttcgagatcaccaaccagagctttaatattgtcgacatcaaaccagccaacatggaagagctgaccgaggtgatcacggctgctgagttccatcctcaccactgcaacacatttgtgtacagctcgtcgaaaggcacgatacgactttgtgacatgagggccagtgcactgtgcgataggcacactaagtttttcgaagaaccggaggatccctcaaatagatctttcttttccgaaattatctcatctatctccgatgtgaaattttcacatagtggtaggtatattatgacgagagactatctcacggtgaaggtctgggatctgaacatggagaacagacctatcgaaacctaccaggtgcatgattacttgagatccaagctgtgtagcctgtacgagaatgattgcatttttgacaagttcgagtgtgtatggaacggttccgattctgtgatcatgaccggtagctataataacttcttccggatgttcgaccgtaatactaaacgcgacgtgactctggaagcctctcgagagaactctaagccaagagccattctgaaacccagaaaagtctgtgtgggcggtaagcgacgcaaggacgaaataagcgtggactcgttagacttttctaagaagattttgcatacagcatggcatccaagcgaaaatattatagccgtcgccgctactaataacctgtacatctttcaggacaaagttaactag

SEQ ID NO: 236940 - DNA, 1506 bp, synthetic construct
  misc_feature 1..1506: note = Description of Artificial Sequence: Synthetic coding sequence
  source 1..1506: mol_type = other DNA
atggtgctgcaaccgagcgaacgccattacagggattggaaccaccgacgccttggcccttggtgctctccaaccggatccccagcgcctctgtcttgcgagaccggatgcggtgaaggctcctggatcctcgtgtgtagactacttgttccaacccaggtgagtttactgtccatggaggaggacattgacactcgcaaaatcaataattcattcttgcgggatcattcctacgctaccgaagcggacatcatctctacagttgaattcaatcatacaggtgagctgttggccacaggggataaaggcggaagagttgtgatttttcagcgagaacaggaatctaaaaatcaggtgcaccgacgcggagaatacaatgtgtatagcactttccagtcccatgagcctgaattcgactacctgaaatctctcgaaatcgaggaaaagatcaataaaatccgctggctgccccagcagaatgccgcatacttcctgttatccacaaacgacaagaccgttaaactgtggaaagttagtgagagggataaacgacctgaaggatataatctcaaagacgaagaaggaagacttagagaccccgcaacaatcacgacccttagagttcctgtcctgaggcctatggacctgatggtagaagccacccccagacgcgtgttcgccaatgcacacacctatcacattaactccatctctgtgaacagtgactacgagacctatatgtcggccgacgatctgagaattaacctgtggaacttcgaaatcacgaaccagtcctttaatatcgtcgacatcaagccagctaacatggaagagttgactgaggtcatcacagctgctgagtttcatcctcatcattgcaatacattcgtgtactcttcaagcaagggcaccattcggctttgtgacatgagagccagcgcactctgtgaccgacacacaaagttcttcgaggagcccgaggatccgtccaacaggagcttcttcagcgaaataattagcagcatatcagatgtcaagttctcccactctgggcgatacataatgacaagggattacttgaccgttaaggtgtgggatctgaatatggagaataggccaattgagacctatcaggtccacgactacctgaggtctaagctgtgcagtctctatgaaaatgactgcatttttgacaaattcgaatgtgtctggaacggttccgactccgtgattatgacgggcagttacaacaatttttttcgcatgtttgataggaacactaagcgggatgtgacattggaggcctcccgtgaaaattcaaagcccagagcgattctcaaaccgaggaaagtgtgcgtcggaggcaaaaggagaaaggacgaaatcagtgtggattctctcgacttctctaagaaaatcttgcacactgcctggcatccgtcagaaaacattatcgctgtggcggctacgaataatctctatatattccaggataaggtgaactag

SEQ ID NO: 236941 - DNA, 1299 bp, synthetic construct
  misc_feature 1..1299: note = Description of Artificial Sequence: Synthetic coding sequence
  source 1..1299: mol_type = other DNA
atgaactatcccgacgagaacacctatggaaataaagctgacatcatcagtacagtggagtttaatcacacaggggagctgttagctaccggagacaaaggtggccgagttgtgatattccaaagagaacaagagtccaaaaaccaggttcatagacgtggcgagtacaacgtctactccactttccagtctcatgaaccagaattcgactacctcaaatcactggagatagaagagaagatcaataaaatccgatggctccctcaacaaaatgctgcatatttccttctcagtactaacgataaaactgttaagttgtggaaggtgtctgaaagagataaaagacccgaagggtataatctgaaggatgaagagggaagactccgagatcctgccaccattaccaccctgcgcgtgcctgtgctccggcctatggacctgatggtggaagcgacacctcggcgagtatttgctaacgctcatacctaccacatcaattcgatcagcgttaactctgattacgaaacctacatgtcagccgacgatctgagaatcaatctttggaattttgaaatcactaatcaatcctttaacattgtcgatataaaaccagctaacatggaggaactgacagaggtgattacagccgcagaatttcatcctcatcattgcaacacctttgtctactcttcctctaaagggactatccggttatgcgatatgagggcatctgccctgtgcgacaggcacacgaaattctttgaggaacctgaagatccaagcaaccggtctttcttctcagaaatcatatcctccatttcggacgtgaaattttctcactctggcagatatataatgacacgagactatttaacagtcaaggtgtgggaccttaacatggaaaataggcccatcgagacatatcaggtacatgactatctgcggtcaaagctgtgcagcctgtatgagaatgattgtatcttcgacaagttcgaatgtgtctggaatggcagtgactcagtcattatgaccggcagttataataatttcttcagaatgttcgatagaaacacgaaacgtgacgtcacactggaggcctcgcgcgaaaattccaagcccagggctatactgaaacccaggaaggtatgcgtgggcggaaaaagacgcaaagatgagatatctgtggattccctggacttctcaaagaaaattcttcacactgcatggcacccctccgagaacatcatcgctgttgctgcaaccaataacctctacattttccaggataaggttaactag

SEQ ID NO: 236942 - DNA, 1332 bp, synthetic construct
  misc_feature 1..1332: note = Description of Artificial Sequence: Synthetic coding sequence
  source 1..1332: mol_type = other DNA
atggaagaagatattgacacacggaaaattaacaactctttcctgagggaccactcctacgcgactgaggccgacatcatttcaactgtggagtttaaccacacaggagaactgctcgcaactggagataagggcggtcgggtcgtgattttccaaagggagcaggaaagcaaaaaccaggttcataggcggggagagtataacgtgtactcaacgttccagtcacacgaacctgaatttgattacctgaagagcctggagattgaggaaaaaatcaataagatcagatggttaccccagcaaaacgcggcttactttctcctgtctaccaacgacaagacagtgaaactgtggaaggtcagcgaacgggacaaacggccagaaggttacaacctgaaggacgaagaagggcgattgagggatccagcaactatcacaacactgagggtgccagtgttaagacccatggatctgatggtcgaggccacaccacgtcgcgttttcgcgaacgcccacacctaccacattaacagcatcagcgtaaactcagactacgagacctacatgtccgctgacgaccttcgcattaatctgtggaacttcgaaattaccaatcaatcattcaacatcgtggacatcaaacctgctaatatggaggagttgactgaagttattaccgccgctgagtttcatccccatcattgcaataccttcgtttattccagctcaaaggggaccatcagactgtgcgacatgcgggcttccgccctgtgcgaccgtcacaccaaatttttcgaggagccagaggacccctccaacagatctttcttctcggagatcatcagctctatcagcgacgtgaaattcagccattccgggagatatattatgacgcgcgattatctcacagtgaaggtgtgggatcttaacatggaaaataggccaatcgagacgtaccaggttcacgattacctgaggtctaaactgtgttccttgtatgagaacgactgtattttcgacaagttcgagtgcgtttggaacggctcagacagcgtcattatgaccgggagctacaacaacttttttcggatgttcgataggaacacaaagagagacgtgactctcgaagcatccagagaaaatagcaaaccacgagcaatactgaagcctaggaaggtctgtgtcggaggtaaacgtagaaaggacgaaatttcagttgacagcctggactttagtaaaaaaattctgcacaccgcatggcatcctagcgagaacatcatagctgtggccgctacaaataacctgtacatctttcaagataaagtaaattag

SEQ ID NO: 236943 - DNA, 1332 bp, synthetic construct
  misc_feature 1..1332: note = Description of Artificial Sequence: Synthetic coding sequence
  source 1..1332: mol_type = other DNA
atggaagaggatattgatacgcgtaagatcaacaacagcttccttcgcgatcattcttatgccactgaggctgacattatcagcactgtcgagtttaaccacaccggggagctgctggccacgggagataagggcggaagagtggtgatctttcaaagagaacaggagtctaagaatcaggtgcaccgcaggggagaatataacgtgtatagcacctttcagtcgcatgagcccgaatttgactacctgaagtccttggaaatagaggagaagatcaacaagattcgctggctgccacagcaaaatgcggcatactttctcctcagcaccaatgacaagacagtaaaactgtggaaagtgtcagagagagacaagcgacccgaggggtataacctgaaggatgaagaggggagattgagggatcctgcaactatcaccacactgcgggttccggtgctccggcctatggacttgatggttgaggctacccctcgacgcgtgttcgcaaacgcccatacctatcacatcaacagcatcagcgtcaactccgattacgaaacatatatgtcggcggatgatctgcgaattaacctatggaacttcgagattacaaatcagtcctttaatatcgtggacatcaagcccgctaacatggaagagctaactgaggtaatcacagctgcagaatttcatcctcatcactgcaacacttttgtttattcctccagtaaagggactatcagactgtgtgatatgcgagcttcagccctttgtgacaggcacaccaaatttttcgaagaacctgaggatccttcaaacaggagctttttcagcgagatcatctctagtattagcgacgtgaagtttagtcattctggacgctacatcatgacccgagattatctgacggtaaaggtctgggacctgaatatggagaatcgccctattgagacctatcaggtacatgattatttgagatcgaaattgtgtagtctttatgagaacgactgtatcttcgacaaatttgaatgcgtgtggaacggtagtgacagtgtgataatgaccggatcttacaacaacttcttccggatgtttgacagaaacaccaaacgcgacgtcacgctggaggcttcccgtgaaaattccaagccacgcgcaatcctgaagcctcgcaaggtgtgcgtgggaggcaagcgtcggaaggacgaaatatctgtggatagtcttgacttctccaagaagatattacacactgcgtggcatccatcagagaatatcatcgctgtagcagctaccaacaatctttatatttttcaagacaaggtcaactag

SEQ ID NO: 236944 - DNA, 1530 bp, synthetic construct
  misc_feature 1..1530: note = Description of Artificial Sequence: Synthetic coding sequence
  source 1..1530: mol_type = other DNA
atgttactgtccttacccgctctgcacctgcagactagtgagcaccacccattcttccagctcccacaccgccgtctcggcccatggtgttctcctactggatcccccgctcccctgtcatgtgaaacaggttgcggggaaggcagctggattctggtctgtcgactcctggtcccaacacaggtgtcattgttaagcatggaagaagatatagatactcggaaaattaacaattcattcctccgcgaccactcctacgctacggaagcagacattatctctacagtcgagtttaatcacaccggagagttattggcaactggggataagggcggtcgtgtggtaatttttcaaagggagcaggaaagcaagaatcaggtacacagacgaggcgagtacaacgtctacagcacctttcaatcccacgagccagagtttgactatcttaagtcactggagatcgaggaaaaaatcaacaaaatccggtggttgccacagcaaaacgccgcttactttctgttatctaccaacgacaagaccgtcaagttatggaaggttagtgaaagggataaacgacccgagggatataacctgaaagacgaggaaggcaggctgagagaccccgctacaatcaccactttgcgagtgccagtcctgcggccaatggatctgatggtcgaggccaccccccgacgagtgtttgccaatgctcacacctatcatataaacagtattagcgtgaatagcgattacgaaacttatatgtcggccgacgatctgcgcatcaatctgtggaactttgagattaccaatcagtctttcaatatcgtggacattaaaccagctaatatggaggaactgactgaggtgattactgccgctgagtttcacccacaccactgtaatacgtttgtatattctagctctaagggcactatccgtctgtgcgacatgagagcctctgcattgtgtgaccgccacaccaagttcttcgaggaaccggaagacccatctaataggtcttttttttcggagatcatatctagcattagtgacgtgaagttcagtcattccggaaggtacatcatgactcgggattacttaactgtgaaggtttgggacttaaacatggagaacaggcctatcgagacatatcaggtgcacgactacctaaggtcgaagctgtgttctctctatgaaaacgactgcatcttcgataagtttgaatgtgtttggaatgggagtgactctgtgatcatgaccggatcctataacaatttttttaggatgtttgaccgtaacacaaaacgagatgtaactctcgaagcatcccgcgaaaattccaagcccagggcgatcctcaagccgcgtaaagtctgtgtgggcggtaagcggaggaaggatgaaatcagcgtggattcccttgacttctctaagaagatcctccatacagcgtggcacccttctgagaacatcattgccgtggccgctacgaataacctatatatctttcaggacaaggtgaactag

SEQ ID NO: 236945 - DNA, 1332 bp, synthetic construct
  misc_feature 1..1332: note = Description of Artificial Sequence: Synthetic coding sequence
  source 1..1332: mol_type = other DNA
atggaggaagacattgatacgaggaagattaataattctttcctcagagatcacagctacgctacagaagcagacataatctctaccgtagagtttaatcacacaggggagctcctcgctaccggggacaagggtggaagagtggtgattttccagagggaacaggaatccaaaaaccaggtccaccgcagaggggaatacaacgtgtatagtacattccagagccacgaacccgaattcgactatttgaagtcgctggaaattgaggagaagatcaacaaaattcgctggctgcctcagcagaatgccgcatatttccttctgtctactaatgataaaaccgtaaagctgtggaaagtgtcagaaagggataagcggccagaggggtacaaccttaaagatgaagagggcaggcttagggatccagcgacaatcaccaccttgcgggttcctgtgctgagacccatggacttgatggtggaggccaccccacgtcgggtgttcgccaatgctcatacataccacatcaactccatttccgtcaatagcgactatgagacatacatgtccgcagacgatctgagaatcaatttgtggaatttcgagattacaaatcaaagcttcaatatagttgacattaaaccagctaacatggaggagctgactgaggtgattacagccgctgagttccatccccatcattgtaatacgttcgtctactcaagctctaagggcacaatcagactttgcgatatgcgagcctcggccctgtgtgatcggcataccaaattcttcgaggaacctgaggatccatccaaccggtctttcttttctgagattatttcatctatttcggatgtgaagtttagccacagtggcagatacatcatgacccgagattacctgaccgtgaaagtctgggatctgaatatggagaatcgcccaatcgaaacgtaccaggtccacgattacttgaggagcaaattgtgtagtctttacgagaacgactgcatcttcgataagttcgagtgcgtgtggaatggcagtgacagtgtaatcatgactggatcttataacaattttttccgaatgtttgatcggaacaccaaaagggacgtgactcttgaggcctcgagagaaaactccaagcctagagctatcctgaaaccccgtaaagtgtgtgtgggcggaaaacgccgaaaagatgagatctcggtggactcactcgattttagcaagaaaatattacacactgcttggcatccatcggagaatattattgctgttgccgctactaacaacctatatattttccaggacaaagtgaattag

SEQ ID NO: 236946 - DNA, 1350 bp, synthetic construct
  misc_feature 1..1350: note = Description of Artificial Sequence: Synthetic coding sequence
  source 1..1350: mol_type = other DNA
atgattccgggaataggcacactgactcaagacaccttgtggtgctttagccaagtgaagggcaccatcgaaattggcactaccgaggccgacatcatcagcactgtggaattcaatcatactggcgagctgctggcgacaggcgacaagggtggacgtgttgtgatcttccagagagagcaagagtcaaagaaccaggtgcacagaaggggagagtacaacgtctactcaacttttcagtcccacgagcctgaattcgattacttgaaaagcttggagatagaggagaagatcaacaaaattcgatggctcccccaacagaatgctgcctattttctgctgtcaaccaacgacaaaaccgtcaagctgtggaaagtgtccgagagggataagcgacctgagggctacaatctcaaggatgaggaaggcagactgagagatcctgctaccatcaccacccttcgtgtgcccgtgttgagacccatggatcttatggtcgaggctacgcctcgcagggtgttcgccaatgcacatacataccatattaatagcatcagcgtgaacagtgactacgagacttacatgtctgcagacgatctgaggataaacttgtggaattttgaaatcacaaatcagtcttttaatattgtcgacattaaaccagctaacatggaggaactgaccgaggtgattacagctgcggagtttcacccacatcactgtaatactttcgtctattctagtagcaaggggacaatcagactctgtgatatgagagctagcgccctttgcgatcgtcatacaaagttctttgaggaacccgaggaccccagcaatcgctccttcttttccgaaattatctcttcgatctccgacgtaaagtttagccatagtggaaggtacataatgaccagggactatctaactgtaaaagtttgggacttgaacatggagaacaggcctattgagacctaccaggtgcacgattacctgaggtctaaactgtgtagcctttatgaaaacgactgcatctttgacaagttcgaatgcgtgtggaacggctccgactccgtgatcatgactggaagctacaacaatttcttccgtatgttcgacaggaacactaagagagacgtgacccttgaagccagtagagaaaacagtaaaccgagagcaatcctcaagccacggaaagtatgcgtggggggtaagcgccgaaaagacgagatttctgtcgacagccttgacttcagtaaaaaaattttgcatacggcctggcatccctccgaaaacataattgcagtggcggcaacaaataatttgtatatttttcaggacaaagtgaactag

SEQ ID NO: 236947 - DNA, 1299 bp, synthetic construct
  misc_feature 1..1299: note = Description of Artificial Sequence: Synthetic coding sequence
  source 1..1299: mol_type = other DNA
atgaactaccctgacgaaaacacctatgggaataaggctgacataatctccactgttgagttcaaccacaccggcgagctgctggctaccggtgacaaagggggacgtgtggtcattttccagagggaacaggaaagtaaaaaccaggtccacaggcgaggagagtataacgtgtactccacattccaaagccacgagcccgaatttgattatctgaaatcgctggaaatagaagagaaaataaacaagatccgctggctccctcaacagaatgcagcctactttctgttgtccacgaatgataagactgtaaagctctggaaagtcagcgagcgggacaaacggccagagggctacaacctaaaggatgaagaaggacgcttacgcgacccagcaacaattaccacgctaagagtgcctgttctgagacccatggatctgatggtagaggctaccccgaggagagtgttcgctaacgcccacacataccatatcaactccatttccgttaatagcgactacgagacctatatgtcagctgacgacctccggattaacctttggaactttgagattacaaaccagtctttcaatattgtagatataaagccagccaacatggaagagctgactgaagtcatcacagccgcagagtttcatccccatcattgtaatacttttgtgtacagttcctctaagggtaccattcgcctgtgtgacatgcgcgcaagcgccctttgtgatcggcacacaaaattcttcgaagagcctgaggacccctccaacaggtccttcttcagcgagattatttcttccatttctgacgtgaagttttctcatagtggacggtacatcatgactcgtgattatctgaccgtgaaagtctgggacctgaacatggaaaatagaccaatagagacatatcaggttcacgattatctccggtctaagctctgttcgctttatgaaaatgattgtatattcgataagttcgaatgtgtatggaatgggtccgactccgtcatcatgactggttcttataacaacttcttcaggatgttcgaccggaatactaaaagagacgttacactcgaggcaagtagagagaattctaagcccagagcaatcctgaagccccgaaaagtttgcgtgggtggcaaacgtagaaaggacgagattagcgtcgactcgctggatttcagcaagaagattttgcacacagcatggcatccaagcgagaacataattgctgtggccgctacaaacaacctatatatttttcaagacaaggtgaactag

SEQ ID NO: 236948 - DNA, 1494 bp, synthetic construct
  misc_feature 1..1494: note = Description of Artificial Sequence: Synthetic coding sequence
  source 1..1494: mol_type = other DNA
atggaaacaaagctccccccagccagcactcctacgtctccatctagccccggtctatcaccagtgccgccaccagacaaagttgatggctttagtcgtcgctcgctacggagggctaggccgcgtcgaagccatagcagtagccaattcagataccagtctaatcaacaggaactaacacccctgccactcctcaaagacgtccccgcatctgaattacacgaactgctttctcgcaagctggcccagtgcggggtgatgttcgactttttggactgcgtggcagatcttaaaggaaaagaggtaaaaagggccgcactgaacgaactggtggagtgtgtgggctcaacaagaggcgtgctcattgaaccggtctacccggatataatccgcatgatttctgtcaatatttttcgtaccctgccgccatccgagaaccccgagttcgatccagaggaagacgaaccgaatctggagccaagttggcctcacctgcaactggtgtacgaattcttcctccgatttctggaatcccctgactttcagccatcagtcgccaaacggtacgttgaccagaagttcgtcctgatgctgttggaactgttcgactccgaagatcctcgcgagcgcgagtatctgaagacaatcctccaccgtgtgtatgggaagttcctcggcctgagagcctacatcagaaagcagtgtaaccatatctttctccgctttatctacgaattcgagcacttcaatggcgtagccgagcttttggaaatactgggaagtatcattaacgggttcgcactgccactgaagacagaacacaagcagtttctggtgcgcgttttgattcccctccactctgtgaaatccttatccgtttttcacgctcagctggcctattgcgtggtgcaattcttggagaaagatgcaaccctgaccgagcatgtaatcagaggcttgttgaagtattggcccaaaacttgcacgcagaaagaagtgatgtttctgggcgagatggaggaaatcctggatgtcatcgagcctagccaattcgtgaaaatccaggaaccattattcaagcaggttgcgcgatgtgtctctagtccccactttcaggtcgcggagcgggcactgtatttctggaacaacgagtacatcctgagcctcattgaggataattgtcatactgtactgcctgcagttttcgggacgctgtaccaggtcagtaaggaacattggaatcaaactattgtttctctcatatacaacgtactgaagactttcatggagatgaacggcaaactattcgacgaattgactgcctcatacaagttagaaaagcagcaggaacagcagaaagcccaagagaggcaggaactgtggcagggtctcgaggaactgagacttaggcgattgcaagggacccagggggcaaaggaggctccgttacaacgcttgacaccccaggtggcagctagtggcggacagtcctag

SEQ ID NO: 236949 - DNA, 1107 bp, synthetic construct
  misc_feature 1..1107: note = Description of Artificial Sequence: Synthetic coding sequence
  source 1..1107: mol_type = other DNA
tcagttcaatctcaccctgccccacctaggccgagagagaatcctagagggagcgagtccttgccgtgtcgccttaccgctatggagactaagcttccgcctgcatctactcccacctcaccatcctcccccggtttaagccctgtgccaccccctgataaggtggatggtttctcccgtcgctcacttcggcgagctagacctcgcagatctcatagcagcagtcagtttcggtatcagtctaaccagcaggaactgacccccttacccctgctgaaggacgtcccagcatcggagcttcatgaactgctgagtcggaagcttgcccaatgcggtgtgatgtttgattttctggactgcgtggcagacctcaagggaaaggaagtcaaacgtgcagctcttaacgagctggttgagtgtgtggggagcaccagaggggtgctgatagaaccggtctacccagatattataaggatgatttccgttaacatcttccggacccttcccccatccgagaatcctgaattcgatccagaggaggatgagcctaacctggagccgtcctggccacatcttcagctcgtgtacgagttcttcctccgatttctggaatcacctgatttccaacctagcgtcgccaagcggtacgtggaccagaagtttgtgctgatgttgctggagctattcgatagcgaggatcccagagagagagagtatttaaaaaccatcttacaccgcgtgtatggtaagttcttggggctgagggcatacatacggaagcagtgtaaccatattttccttaggtttatttatgagttcgagcatttcaatggcgtggccgaattgctcgaaatactgggttccatcattaacggcttcgccctgcctcttaaaacagagcacaaacccggttcaagaccagatccaccggcactctgccaagtcgctgtctgcctgccatgccctgctggcattctctgtggcgcagtgcccggagaaggttgtcatagtgatagagcccgagatccgggagccgcacagatcctcgccaagaacctgcatcccgaaggtggcgatgtgagcgggggtgatggccgtgactcctag

SEQ ID NO: 236950 - DNA, 582 bp, synthetic construct
  misc_feature 1..582: note = Description of Artificial Sequence: Synthetic coding sequence
  source 1..582: mol_type = other DNA
atggaaactaagctgcctcccgcatctacacccacctcgccttcatcccctggactgtctccagtgcctcctcctgacaaggtggatgggttttctaggcggagtttaagaagggcacgtcctcggagatcccactcttcctctcagttcaggtaccaatcaaaccaacaagagctcacaccgcttcctctcctcaaggacgtgcctgcctctgaactgcacgagcttctgtcacgaaagttggctcagtgcggcgttatgttcgactttctcgactgcgttgcagatttgaaagggaaggaggtgaagcgcgcagctctgaacgagctcgtggagtgcgtgggatctacacgtggtgtgttgatcgagcccgtctatcctgacataatacggatgattagcgtcaacatcttccggacattacccccttccgaaaacccagagtttgaccctgaggaggacgagccaaacctcgagccatcgtggccccatcttcagttggtgtacgagttctttctgcgcttcttagagtcacctgatttccagccttccgtagctaaacggtatgtagaccagaagtag

SEQ ID NO: 236951 - DNA, 1494 bp, synthetic construct
  misc_feature 1..1494: note = Description of Artificial Sequence: Synthetic coding sequence
  source 1..1494: mol_type = other DNA
atggagaccaagctcccgccagcctcaactcccacatctccttcaagccccggtctgtccccagttcctcccccagataaggtggacggcttttccagaaggtccctcaggagagcccgaccccgtaggtcccactcgagtagccagttccggtatcagagcaatcaacaggagttgacccccctgccactgctcaaggacgttccagcctccgagctgcacgagctgctgtctcgtaagttggcacagtgcggggtcatgttcgacttcctggattgtgtggctgacctgaaagggaaagaagtgaagcgcgctgccctgaacgaacttgtggagtgtgtcgggtcaacccgcggagtgctgattgagcccgtctacccggacatcattaggatgataagcgttaatatctttcgcacactgccccctagtgaaaatcctgaattcgatccagaggaggatgaacctaacttggaaccatcatggccccatttgcaactggtctacgagttcttcttgaggtttctggagagccctgatttccagcccagcgttgccaagcgatatgtggaccagaagtttgtgttaatgctgctggaattgttcgactccgaagaccccagggagcgcgaataccttaaaaccattctgcatcgcgtttacggtaagttcttgggccttagagcctatatccgcaaacagtgtaatcatatcttccttcgcttcatttatgagttcgagcacttcaatggtgtagctgaactgcttgaaattctcggctcaataatcaacggatttgccctccccctgaagaccgaacataagcagttcctggtgagggtgttgataccactgcatagcgtaaagtccctgtctgtgttccatgcccaactggcctattgtgtggtgcagttccttgagaaggatgctactcttactgagcatgtgatacggggactgttgaagtattggcctaagacctgtacgcagaaagaagtgatgtttctgggtgagatggaggaaatcctggacgtaatcgagccatcacagttcgtgaagatccaggagccactttttaaacaggtcgcacggtgtgtgtcgtccccccatttccaggtggccgaaagggctctgtatttctggaataacgagtatattttatctctaatcgaggataactgtcataccgtcctgcccgcagtatttggcaccctctatcaggtatctaaggagcactggaaccagaccatagtgtccttaatctacaacgtactgaagacattcatggagatgaacgggaaacttttcgatgaactcactgcaagctataaacttgagaagcagcaggagcagcagaaagcccaggagcggcaggagctatggcagggactcgaggagctgcgattgcgacgcttgcagggcactcaaggggctaaagaagcgcctctgcagagactcacacctcaggttgccgcttcgggaggccagtcctag

SEQ ID NO: 236952 - DNA, 408 bp, synthetic construct
  misc_feature 1..408: note = Description of Artificial Sequence: Synthetic coding sequence
  source 1..408: mol_type = other DNA
atggaggaactcaccgaggttatcacagccgcagaattccatcctcaccagtgtaacgtctttgtgtatagctcttccaagggcacaattcgcttatgtgacatgcggtcgagcgctctgtgtgatcgacattctaagttttttgaggagcctgaggatcccagttctaggtctttttttagcgaaatcatttcttcaattagcgacgtaaagttctcgcattctggcaggtacatgatgactcgagacccagtaggcgagggagtgggccctcaacaccgggcaggaagatggcggcctactcgctccacttccacctgtgcagcaagcagtgccctctcaatgagaactactgcaagtctgacctccctgagcgtggctggcactgtacgaatcgctccgagttag

SEQ ID NO: 236953 - DNA, 1269 bp, synthetic construct
  misc_feature 1..1269: note = Description of Artificial Sequence: Synthetic coding sequence
  source 1..1269: mol_type = other DNA
ctgaccgccgacattatatctaccgtcgaattcaattacagtggtgatctgcttgccaccggggataagggaggacgcgtcgtgattttccaaagagaacaggagaacaaatctaggccgcattctaggggggagtacaatgtgtatagtacattccaatctcatgagcccgagttcgactacctaaaatcactagagattgaggagaagatcaacaagattcgatggctgccccaacagaacgcagcccattttctgctgtccacaaacgataagacaattaaactctggaagatctcagagagagacaagagagctgaaggctataatcttaaggatgaggacggcaggttgcgagatcctttcagaattacggcgctaagagtgcctatcctgaagcctatggacctgatggtagaggcttcccccagaagaatattcgcaaacgcccatacttaccatattaactcaatctctgttaacagcgaccatgagacatatctcagcgctgatgatctgcgcatcaacttgtggcaccttgagattacagatcgttcattcaacattgtcgatatcaagcctgcaaacatggaagagcttacagaagtcatcaccgcagccgagtttcacccccaccaatgcaatgtgtttgtgtacagctcaagtaaaggaacaatcaggctctgtgacatgcgaagttccgccctctgtgatagacactctaagttcttcgaggaacccgaggacccatcatctcgaagcttcttcagtgagatcatcagtagtatctcggacgtgaagttcagccactcaggcaggtacatgatgacccgggattacctgagcgtgaaggtctgggatctcaatatggagtcccgtcctgtcgagacacaccaggtacacgagtatctcaggagtaagttgtgtagcctgtacgagaacgattgcattttcgacaagtttgagtgttgttggaatgggagcgactcagctattatgaccggatcctataacaacttctttagaatgtttgaccgtgatacaaggcgcgacgtaaccctggaggcttctagagaaagctctaagcctcgcgcatctctaaagccgcgaaaggtatgtaccggaggcaagagacgtaaggacgagatatccgtcgatagtcttgacttcaataagaaaatcctgcacactgcctggcatccagtggataacgtgatcgccgtggctgccaccaacaacttgtatatcttccaagacaagattaactag

SEQ ID NO: 236954 - DNA, 1713 bp, synthetic construct
  misc_feature 1..1713: note = Description of Artificial Sequence: Synthetic coding sequence
  source 1..1713: mol_type = other DNA
atgccttacaaactcaagaaagagaaggagcctccgaaggttgccaaatgcactgctaaaccgagtagctcagggaaggatggcggtggagaaaatactgaggaggcacagcctcaaccacagccgcagccacagccccaggctcagagccaaccccctagcagcaacaagcgcccttcaaattccacaccacctcctacacagctctcaaaaatcaaatactctggtggccctcagattgtcaaaaaggagctgtttattcagaaattgcgtcagtgctgtgtgctgttcgactttgtgagcgatccgctgagtgatctgaaatttaaagaggtcaagcgtgccggtctgaatgaaatggtcgagtacataacacattcccgcgacgttgtgacagaggccatatatcccgaagcagtgaccatgttcagtgtcaacttatttagaacgctgcccccaagctccaaccccacaggcgctgagtttgatccagaagaggatgagcccactctcgaggccgcttggccacacctccagttggtgtacgaattcttcttaaggttcctggagtcgcccgattttcagccaaacatcgcaaagaaatacattgatcagaagttcgtcctggctctgctggacctctttgattccgaggatccacgagagagggactttctcaaaacaattctgcaccgaatctatgggaagttcctcgggctgcgggcttacattagaaggcagatcaatcatattttctataggttcatctatgaaaccgagcatcataacggtatcgcagagctcctagagatcctgggatcaataataaacggcttcgcactgcctcttaaagaggagcataagatgtttctgattcgcgtcttactccctctacataaagtgaagtccctgagtgtataccatcctcagctggcctactgtgtcgtgcagttcctcgagaaagagagttccctcactgagcctgtcattgtgggcctactgaagttttggcccaaaacacatagcccaaaagaggtcatgtttctgaacgaactggaggaaatcctggacgtcatcgagccttccgagttcagcaaagtcatggagccgctgttcagacagctggcaaagtgcgtgagctcaccccatttccaagtggccgaaagggccctctactactggaacaatgaatacatcatgagcctgatctctgataatgctgctcgcgtgcttcctattatgttcccagccctgtatagaaattcgaaatcacactggaacaagaccattcacggcctgatatacaacgcgctaaagctgttcatggaaatgaatcagaagctgtttgacgattgtacacagcagtacaaggcagagaagcagaagggtcgatttcgcatgaaggagagggaagagatgtggcagaagatcgaagagttggcacgcctgaatcctcagtaccctatgttccgcgctccgcctccactgcccccagtatatagcatggagacagaaacccctaccgctgaagatattcaactgttgaagaggaccgtggaaaccgaagctgtccagatgctcaaggatatcaagaaagaaaaggttttgctccgcaggaagagtgagctgccacaggatgtctacactatcaaagctctagaggctcataagcgtgccgaagagtttctaacggcaagtcaggaagcattatag

SEQ ID NO: 236955 - DNA, 1491 bp, synthetic construct
  misc_feature 1..1491: note = Description of Artificial Sequence: Synthetic coding sequence
  source 1..1491: mol_type = other DNA
atgccatacaagttgaaaaaggaaaaggagctgttcatccagaaacttagacagtgttgcgtgctgtttgactttgtgagcgatcccctgtctgacctgaagttcaaggaggtgaagagagccggactgaatgaaatggtggagtacatcactcactccagagacgtagtgacagaggcaatctaccccgaggccgttactatgttctccgtaaatctctttagaacgttgccgccttctagcaatcccaccggagctgagtttgaccctgaggaggacgaacctacattagaagctgcgtggcctcacctgcagctcgtgtatgagttcttcctccgatttctggaatcgcccgacttccaacccaacattgctaaaaagtatatcgaccagaagtttgtgcttgctctacttgatctatttgactcggaagaccctcgtgaaagagatttcttgaaaactatactccatcgcatttatgggaaattcctgggactgcgggcttatatccgaagacagataaaccacatattctaccgcttcatttacgaaactgaacaccacaatggcattgcagagctgctggagattctcggaagtatcatcaatgggtttgccctccctttgaaggaggaacataaaatgtttttgatacgagtgctgctcccgttgcataaggtcaagagcctgagtgtttatcatccacagttggcatattgtgtggtacagtttcttgaaaaagagtcctcattgaccgagccagtgattgtgggtttgctcaagttttggccaaagactcactcgccaaaggaggtaatgttcctgaacgagctggaggaaattctggacgtgatagagcccagtgaatttagcaaagtgatggaacccttattcaggcagcttgccaaatgcgttagctctcctcatttccaggtggccgagcgcgcactctattattggaacaacgaatatatcatgtcacttataagtgacaacgccgcaagggtcctgccaattatgtttcctgctctctaccgcaattccaagtctcattggaacaaaactattcatggactcatttacaatgcccttaaactgtttatggaaatgaaccagaaactgtttgacgactgtacccaacaatataaagccgagaagcagaagggtaggtttaggatgaaggagcgggaggaaatgtggcagaagatagaggaactggccagactgaacccgcagtaccccatgttccgcgcaccccctcccttacctccagtctacagcatggagacagagaccccaacagcagaggatattcagctgctcaaaagaaccgttgagactgaggctgtgcaaatgctgaaagatataaagaaagagaaagttctgctcagaagaaagtcagagctgccacaggatgtttatactatcaaggcactggaggctcataaaagggccgaggagttcctgaccgccagtcaggaagccttatag

SEQ ID NO: 236956 - DNA, 1515 bp, synthetic construct
  misc_feature 1..1515: note = Description of Artificial Sequence: Synthetic coding sequence
  source 1..1515: mol_type = other DNA
tagaagaaggaacgtaggcaaagtagtagccgcttcaatcttagtaaaaatagagagctccagaagttgcctgctctgaaagatagtcctactcaagaacgtgaggagctgtttatacagaaattacgccagtgctgcgtgctgttcgactttgtgtcagacccccttagcgatttgaaattcaaagaagttaagagggccggtctcaacgagatggtggagtatattacacactctagggacgtcgtgaccgaggcgatctacccagaggctgtaaccatgttttctgtgaacctgtttcgcacacttccccctagctctaatcccactggagctgaatttgatccagaagaagacgagcctactctcgaggcagcctggccacatcttcagctggtctacgaattcttcttaagatttctcgagagccctgattttcaaccaaacattgctaaaaagtacatcgatcagaaattcgtcctggccttgctggatctctttgattccgaagaccctcgggaaagggacttccttaagaccattttgcatcgaatatatggaaaatttctggggctcagggcctatataaggcggcagatcaaccacatcttttatagattcatatatgaaacggagcaccataatggtatagcagaactcttggaaatactggggagcattattaacgggtttgcactgccacttaaggaggagcataagatgtttctcatccgggtcctgctccccttgcacaaggtgaagtcattgagcgtctaccacccccaggtgatcgtcgggctgctcaaattctggcccaaaactcactccccgaaggaagtgatgttcctaaatgaactggaagagatcctggacgttattgagccctccgagttctccaaggtgatggaaccgctgttcaggcagttggccaaatgcgtttcctctcctcactttcaagttgccgaaagggctctctattattggaataacgaatatattatgagccttatatcagataatgctgctcgtgtgttgcctattatgttccctgctctttaccgcaatagcaagagtcactggaataaaactattcatggacttatctataacgctctcaaactgttcatggagatgaatcagaaactcttcgacgactgcactcagcagtataaagccgagaaacagaaagggaggttcaggatgaaagaaagagaagagatgtggcagaaaatcgaggagctagccagactcaaccctcagtatccaatgttccgggctcctcctccactgccccctgtctactccatggagaccgaaactcccactgctgaagacatacaactgttgaagaggacagtcgagacggaggctgtgcagatgctcaaggatataaagaaggagaaggtactgttgcgtcggaaatccgagctgcctcaagacgtgtacacaatcaaggcactcgaggcccataagcgggctgaagagtttctaacagcttctcaggaagccctgtag

SEQ ID NO: 236957 - DNA, 1809 bp, synthetic construct
  misc_feature 1..1809: note = Description of Artificial Sequence: Synthetic coding sequence
  source 1..1809: mol_type = other DNA
atgccttataagctgaaaaaagagaaggagccaccaaaggtcgcaaaatgcaccgccaaacctagctcatcgggcaaagacggtggaggagagaacactgaagaagcccagccccagccacagcctcagcctcagccacaggcacagtcccagccaccatcctccaataagagaccaagcaactcaacccctccgcctacccaactgagcaaaataaagtactctggtggccctcagatcgtaaagaaagagagacgccagtccagcagcagatttaacctgagcaaaaatagggaactgcagaaactccctgctctgaaagacagccccacccaagagcgagaagagctcttcatccagaaattacgacaatgctgcgtgctgttcgatttcgtgtctgatccactgtctgacttgaaattcaaagaggtaaaacgggcaggcctaaacgaaatggtcgagtatatcacacacagccgcgatgtcgtcactgaagctatctacccagaagccgttactatgtttagtgtcaatcttttccgaactttacccccatcatctaaccccactggagctgaatttgatccagaggaagatgagcctacgctggaggctgcctggccacacctgcagctggtttatgagttcttcctgcgctttctggagtcacctgatttccagccaaatattgctaaaaagtacatagaccagaagttcgtgttggcactcctggacttgtttgattccgaagacccacgtgagagagacttcttgaaaacgattctgcaccgtatctatggcaaattcctagggcttcgcgcatacatccggaggcagatcaatcacatcttctataggttcatctatgaaacagaacaccataacggcatcgccgagctgcttgagatattaggcagcattattaacggattcgcgctccccctaaaggaagaacacaagatgtttttgataagggtgctgttgcctcttcataaggtcaagtcactgtcagtataccatccacagctcgcttattgtgtggttcagtttcttgagaaggaatcatccctaacagagcctgttatcgtggggctgttgaagttctggcccaagacccattctccgaaagaggtaatgtttttgaacgagttggaggagatcctggacgtgattgaaccctcggagttctctaaggtcatggagcccctgtttcgacagcttgccaagtgcgttagcagtccccattttcaggtcgcggagcgagccctctattactggaacaatgagtatattatgtctctgatcagtgacaatgccgctagggtgctcccaatcatgtttcccgctctctacagaaactccaagtcccactggaacaagaccatccacgggctcatatacaacgccctgaaactgtttatggagatgaaccagaagcttttcgacgattgtactcaacagtacaaagctgagaagcagaagggtcgatttaggatgaaagaacgtgaagaaatgtggcagaagattgaggaactggctcggctgaacccacagtatccaatgtttcgcgctcccccaccactgccacctgtgtatagcatggaaacggagacccccacagcagaagacattcagctgctgaagagaaccgttgaaaccgaggctgtgcagatgcttaaggatatcaaaaaggagaaagttttgctgcgaagaaaatcagaacttccccaagacgtgtatacaatcaaagcgctcgaggcacacaaacgtgctgaagaattcctgaccgcctcgcaagaggctctgtag

SEQ ID NO: 236958 - DNA, 1755 bp, synthetic construct
  misc_feature 1..1755: note = Description of Artificial Sequence: Synthetic coding sequence
  source 1..1755: mol_type = other DNA
atgccatacaaattaaaaaaagagaaggaaccacccaaagtggcgaagtgcacggccaagccgtcgtcaagtggtaaggacggaggcggagagaatacagaagaggcgcagccccagccccaacctcaacctcaaccgcaagctcagagtcagccaccttcaagtaataagagacctagcaatagcacgcccccaccaacacagctgtctaagatcaagtactctggcggacctcaaattgtcaaaaaggaacgccgtcagagcagcagccgcttcaacctgagcaagaatagagagctccagaaactgcctgccctgaaagattcccctactcaggagcgggaggaactgtttatacaaaagctcaggcaatgctgcgtcttgtttgatttcgtgagcgaccccctctctgacctgaagtttaaggaggtgaagagggctggtcttaacgaaatggttgaatatattacccactcacgggatgttgtcaccgaagctatctatcccgaagcggtgacgatgttctccgttaacctattcagaactctgcctccctcgagtaatcctaccggtgcggagtttgacccagaggaagacgagcccacactcgaggcagcttggccccacctgcagcttgtctacgaattctttctgagattcctcgagtccccagacttccagcctaatatcgccaagaaatatattgaccagaaatttgtcctcgcccttctggatctgtttgattccgaagatcctagagagcgcgactttctgaaaacgatcctgcaccgcatctacgggaagtttttgggactgagagcatacattcgcaggcaaattaaccatatcttctacagattcatctacgaaacagagcatcataatggcatcgctgaactgctcgaaatcctaggttccatcatcaatggctttgcactccctcttaaagaagagcataagatgttcctaatccgggtcctcctgcctttgcacaaggtcaagtctttatctgtgtatcaccctcaggtgattgtgggcctgcttaagttttggcctaaaacgcatagccccaaagaggttatgtttttgaacgagctggaggagatactagacgtgatagagccgtctgagttcagtaaagtgatggagcccctgtttcggcagttagctaagtgcgtgtccagtccacacttccaagtggccgagagagcattgtactattggaacaatgagtatataatgtccctgatctcggataatgcagcaagggtgttgcccatcatgtttcctgccctttacaggaactcaaaatctcattggaacaagacgattcacggcctgatatataacgccctcaagctctttatggaaatgaaccagaagctcttcgatgactgcacccagcagtacaaagcagaaaagcagaaaggtcgcttcagaatgaaggagcgggaggaaatgtggcagaagatcgaagagctggcaagattgaatcctcagtatcccatgttccgagctccaccgccattgcctcccgtttatagcatggagacagaaacacccaccgctgaagacattcaactcttgaaacgaaccgtggaaacagaagcggtgcaaatgctgaaagatattaaaaaggagaaagtgctccttcgcagaaaaagcgagctgcctcaggatgtttacacaataaaggcactggaagcccacaagcgcgcagaagaatttctgaccgccagccaggaggctctctag

SEQ ID NO: 236959 - DNA, 1404 bp, synthetic construct
  misc_feature 1..1404: note = Description of Artificial Sequence: Synthetic coding sequence
  source 1..1404: mol_type = other DNA
atgtcatcggcaccaacgaccccaccgtcggtggataaagtggatgggttctcccgaaagagcgtccgcaaggccagacagaaacggtctcaatcctcctcccaattccgcagccagggcaagcccatcgagctcactcctcttcctctcttaaaagacgttccatccagcgagcaacctgaactgtttctaaagaaactgcaacagtgttgtgttatttttgattttatggacactctgagcgacctgaaaatgaaggaatacaagaggtctacccttaacgagcttgtggattatataacaattagcagggggtgtctgacagagcaaacgtaccctgaggtcgtccggatggttagttgtaatatctttcggacactgccaccatccgatagcaatgaatttgatcctgaggaagatgaacctaccctggaagcatcttggcctcacctccaactggtctatgagtttttcatccggtttctggagtcgcaagagtttcaaccatctattgccaagaagtacattgatcagaaatttgtcctccagctgctggaactctttgattccgaggatccaagagaacgtgactatctcaagacggtgttgcatcgtatttatgggaagttcctcggcctgagggcctttattagaaaacagattaataacatctttctgcgcttcgtgtacgagactgaacattttaatggcgtggctgaacttctagaaatcctgggtagtatcataaatggattcgctctaccactcaaggcagaacataagcaattcctggtcaaggttctgatccctttgcatacggtacggagcctctcactgttccatgcccagctagcatattgcatcgtgcagttcctggaaaaggatcccagcctcaccgagcccgtgatccgcggtctgatgaagttttggcccaagacttgttcacaaaaggaggtgatgtttctgggagagctggaagagatattagatgtcattgagccttcacaattcgtgaagattcaggagccactattcaagcagatagcgaaatgcgtcagttccccccacttccaggtcgccgaacgcgctctttattactggaacaacgagtacatcatgtcccttatcgaagagaacagtaatgttatcctgcctatcatgtttagtagcctctaccgcatttctaaagagcattggaatcctgcaatagttgcacttgtctataacgtattaaaagcattcatggaaatgaatagcacgatgttcgacgaacttaccgcaacctacaagagcgatcggcaaagagagaaaaagaaggagaaggaacgcgaggagttgtggaaaaagctggaagaccttgagctgaagaggggacttcgtcgagatggcataattcccacctag

SEQ ID NO: 236960 - DNA, 1176 bp, synthetic construct
  misc_feature 1..1176: note = Description of Artificial Sequence: Synthetic coding sequence
  source 1..1176: mol_type = other DNA
atggacacgctgtctgacctcaagatgaaagaatataagaggtcaacgctgaacgaactggtggattacataactatttctaggggatgtctcactgaacagacctatccagaggttgtacggatggtctcatgtaatatctttagaacattgccgcctagcgacagcaacgaattcgacccggaagaggacgagcccaccttggaagcgtcctggccccacctgcaattagtttacgagttttttatcagattcctagagagccaagagtttcagccttccatcgccaagaaatatattgatcaaaagtttgtcctgcaactgttggagctcttcgacagcgaagaccccagagagagagattaccttaagactgtgttgcatagaatttatggtaagttcctcgggcttcgggcattcatccgtaaacagattaacaacatctttctgcgatttgtctatgagactgagcactttaatggcgtcgccgaattactggaaatcctaggctcgatcattaacggcttcgccctgccgttaaaagccgaacataagcagttcctcgtgaaggtgctaattcctcttcacaccgtccggagcttaagtctatttcacgctcagctcgcctactgcatcgtgcagtttcttgaaaaagacccctctcttaccgagcccgttattcgtggcctgatgaagttttggcctaaaacatgttcgcagaaggaggtgatgttcctgggcgaattggaggaaatcttggatgtaattgagccttctcagttcgtgaagatccaagaaccacttttcaagcagattgctaagtgcgttagcagtccacactttcaggtagctgagcgagccctgtattattggaacaatgagtatattatgagccttatcgaagaaaatagcaacgttattttacctatcatgttttcatcgctgtaccgaatctcaaaggagcattggaatccagcaattgttgcactagtatacaatgttctgaaggcctttatggagatgaatagcactatgtttgatgaactgaccgctacgtacaagagcgaccggcagagagagaaaaaaaaagaaaaggaaagagaggagctgtggaagaaactcgaggatctggagttgaagagaggtctgagacgggacgggatcatccccacttag

SEQ ID NO: 236961 - DNA, 1389 bp, synthetic construct
  misc_feature 1..1389: note = Description of Artificial Sequence: Synthetic coding sequence
  source 1..1389: mol_type = other DNA
atgtcaagtgcccctacaactcccccttctgtggacaaggtggacgggtttagtaggaagtcagtgagaaaagcccgtcagaaaagaagtcagtcatcttcccagtttagatcccagggaaagcccatcgaactgacgccgctgccactcctgaaggatgtcccctcttctgagcaaccggaactgtttttgaaaaaactgcaacaatgctgtgtgatttttgattttatggatacccttagcgacctgaaaatgaaggaatacaaaaggtcgacgctgaacgagctcgtcgactatattactatttctaggggatgtctgaccgaacaaacgtaccccgaggtcgtgcggatggtgtcctgcaatatctttaggacactccccccttccgattccaatgaattcgacccggaagaggatgaacctacgttggaggcctcttggcctcacctccagttggtttatgaattctttattcgctttttggagagtcaggagttccagccctctattgctaagaaatatatagaccagaaattcgtcctgcagctgttagagctattcgattctgaagaccctcgagagcgagattacttaaaaacagtcctccacagaatctacggaaaattcttaggcctccgggctttcattaggaagcagatcaataacatttttctcaggttcgtctatgagaccgaacacttcaacggcgtggccgaactgctcgagatcttgggcagcatcatcaacggattcgccctcccactgaaggccgaacataagcagtttttggtgaaggtactcataccccttcacactgtcaggtcgttgagtttgttccacgcccagttggcttattgcattgtccaatttctggaaaaagacccatcactgaccgagccggttatccggggactgatgaaattctggcctaagacctgcagtcagaaggaagtaatgttccttggcgagcttgaggaaatcttggacgtcatcgagcccagccagttcgtcaaaatacaagagcccctctttaagcaaatcgctaaatgtgtcagtagcccccattttcaggtcgccgaacgcgcactgtattactggaataatgagtacataatgagtcttatagaggaaaattctaacgtcatcctgcctatcatgttcagttccttataccgcattagtaaggaacactggaaccctgctatcgtggcactggtgtacaacgtgctgaaagcctttatggagatgaattcaaccatgtttgatgaactgacagcaacctacaacgagaagaagaaagaaaaagagcgagaggaactgtggaaaaagcttgaggaccttgagctgaaacgtggcttgagaagagacggaatcataccaacttag

SEQ ID NO: 236962 - DNA, 1344 bp, synthetic construct
  misc_feature 1..1344: note = Description of Artificial Sequence: Synthetic coding sequence
  source 1..1344: mol_type = other DNA
atgggtctgtccttcttctcaaagcaccttcccatacaggaggggcagccttgggcattgaaaacccccgctgacataatctcaacagtagagttcaaccatactggtgagctgctggccacaggtgacaagggaggtagggttgtcattttccagcgagagcccgagtctaaaaacgcacctcacagtcagggcgaatatgatgtctattctacattccagtcacacgagcctgagttcgactatttgaagagcttggagatagaggagaaaatcaacaagatcaagtggctaccccagcagaacgcagcacattccctgctaagtactaatgacaagacaatcaagttgtggaagatcactgaaagggacaagcgacccgaaggctacaacctaaaagacgaagagggcaagctgaaagatctgtctaccgtgacgtcactccaagtgcccgtgctcaagccgatggacttgatggttgaagtgtcgccacgtcgcatctttgccaatgggcatacataccacattaactccatttccgtcaatagcgattgtgaaacatacatgtccgcggacgatctaagaatcaatctctggcatctggcaataaccgaccgcagcttcaacattgtcgacatcaaaccagcgaacatggaggacctcaccgaagtaatcactgcatctgagtttcacccccaccactgtaacctgttcgtgtatagttcatccaagggctctctcaggctgtgtgatatgagagccgcagctctctgcgataagcacagtaagctgttcgaagaacccgaggatccctctaatcgcagtttcttttcggaaataatctcctctgtgtcagacgttaagttctcccactcagggaggtatatgcttactagagattacttaaccgtcaaggtttgggacctgaatatggaggcaaggccaatcgaaacataccaagtgcatgactatttgaggagtaagttatgcagtctctatgaaaatgactgcatttttgacaaattcgagtgcgcatggaacggatctgatagtgtaatcatgacaggagcatacaataacttcttcaggatgttcgaccggaatacaaagcgggacgtgaccttggaggcaagccgggaaagcagcaaaccgagagccgtactcaaacccaggcgcgtgtgcgtggggggaaaacgtaggcgagatgacatcagtgtggatagtctggacttcacaaaaaagatcctccacaccgcctggcaccctgccgaaaatatcatcgctattgccgcaactaacaacctgtacattttccaggacaaagtcaatagcgatatgcattag

SEQ ID NO: 236963 - DNA, 1344 bp, synthetic construct
  misc_feature 1..1344: note = Description of Artificial Sequence: Synthetic coding sequence
  source 1..1344: mol_type = other DNA
atgggcgaggatacggatactcggaaaatcaaccactcgttcctgcgggaccactcgtatgtcactgaggctgatatcatcagcaccgtcgagtttaatcataccggtgagctgctggctacaggggacaagggcggaagagtggtcatttttcaaagagagcctgagtccaagaacgcacctcactcccagggggagtatgatgtgtacagcacctttcaatcacacgagcccgaattcgattacctcaaaagcttggaaatcgaggagaagattaacaagatcaaatggctcccacagcagaacgctgcacacagcctcctgagcacaaacgacaaaaccattaagctgtggaagataacagagagggacaagcgcccagagggctacaatctgaaggacgaggaggggaagctaaaggatctgagtacggtgactagcttgcaggtgcccgtgctcaagccgatggacctgatggtggaagtttcgccaagacgcatttttgccaacggtcacacctaccatataaactccatctctgtgaactccgattgtgaaacctacatgagcgctgatgaccttaggattaatctctggcatctggctattaccgataggtcgtttaacatcgtcgacatcaaacccgcaaatatggaggatctgacggaagtcataacggccagcgaattccatccccatcattgtaacctcttcgtgtactcaagctcgaaaggctccctgcgcttgtgtgacatgcgggcagcagccttgtgtgataaacacagcaaattgtttgaagaaccagaggatccgtcaaaccgctctttctttagtgaaattatatctagcgtgagtgacgtgaagttttcccacagtgggaggtacatgttgacgagggattacctcactgtgaaggtgtgggatctgaacatggaggctaggccaatcgaaacttaccaggtccatgattacctgaggtcgaaactttgcagtctctacgaaaatgactgtatcttcgacaagttcgagtgcgcttggaacggtagtgattcggtgattatgactggtgcatacaataacttcttccggatgttcgataggaataccaagcgggatgtgaccctcgaagcatctagagagtcctccaaaccccgtgccgtgttgaagcccaggcgagtgtgcgttggtggcaagcgacgacgtgacgatatcagtgtggactccctcgactttaccaaaaagatcctgcataccgcatggcacccagcagagaacattattgcaattgccgctacaaacaatttgtacatatttcaagataaggtgaatagcgatatgcattag

SEQ ID NO: 236964 - DNA, 1323 bp, synthetic construct
  misc_feature 1..1323: note = Description of Artificial Sequence: Synthetic coding sequence
  source 1..1323: mol_type = other DNA
atgcgagaagcggatacactccgcccacctcagctgatggaagtgagcgctgacattatttcaaccgttgagtttaaccataccggtgagctgttggcgactggggataagggcggtagagttgtgatcttccagagagagccagagagcaagaatgcacctcactctcagggggagtatgatgtgtattccactttccaatcccacgagccagagtttgattatctcaaatctctggagattgaggagaagatcaacaagatcaagtggctcccacaacagaacgctgcccattctctcctgagtactaacgacaagacaatcaagctgtggaaaattactgaaagggacaagcgtccggagggctataatctcaaggatgaagagggtaagttaaaagacctgtctaccgtgaccagtctacaggtaccagtgctcaaacctatggacctgatggttgaagtgtctcccagaaggatttttgcaaacgggcacacttaccacatcaacagcatctctgtcaacagcgattgcgaaacatacatgagtgccgacgatttgcggattaatctttggcacctagccatcaccgatagatcatttaacatagtggatataaagcctgccaatatggaggaccttacggaggttattaccgcctcggaattccacccccaccattgcaacctgttcgtctactcttcatctaaaggatccctgcgattatgcgatatgcgcgcagcagcactctgcgacaagcattcaaaactgttcgaggaacccgaagatccttctaacaggagttttttctccgaaatcatctcttccgtcagtgatgtgaaattcagccatagcggaaggtacatgcttacccgggattatctgacggtcaaggtctgggatctaaatatggaagccaggcccatcgagacctaccaggtacatgactatctacggagcaagctttgctctctgtacgagaacgattgtattttcgacaaatttgaatgtgcatggaacggctccgacagcgtcatcatgacaggcgcatacaataatttcttccgcatgtttgacagaaacacaaaacgcgacgtgaccttggaagctagtcgggagtcatctaaaccgcgagctgtactcaagcccaggcgagtgtgcgtgggaggtaaacgcaggagggacgacatctctgtggattctctggattttacaaagaaaattctccacacggcctggcaccccgcagagaatatcatagcaatcgctgccacgaacaatctctacatattccaggataaagtcaatagcgatatgcattag

SEQ ID NO: 236965 - DNA, 1323 bp, synthetic construct
  misc_feature 1..1323: note = Description of Artificial Sequence: Synthetic coding sequence
  source 1..1323: mol_type = other DNA
atgagggaggctgacaccctgcggcctccgcagctgatggaggtatcggccgatattatcagtactgtggagtttaaccacaccggcgaacttctcgcgactggagacaaaggaggtagagtcgtcatttttcagcgggaaccggagtcgaagaatgcccctcacagtcagggagaatatgatgtctacagtacatttcaatctcacgagcccgagttcgactatctgaaatctttagaaatcgaggaaaagatcaataagattaagtggctcccccagcagaacgctgcccattctctactctccactaatgacaagactattaagctatggaagattacggaacgggataagcgtcctgaggggtacaacttaaaggatgaggaggggaagctcaaggacctgagtaccgttacttccttgcaggtcccggtgctcaagcctatggacttgatggttgaagtctccccaagaaggatttttgccaacggccacacgtaccatataaacagtatttccgtcaatagcgactgcgaaacatatatgtccgccgacgatctcaggattaacctctggcacctcgcgatcaccgataggtcatttaatatagtcgacatcaagccagccaatatggaggacctcacagaggttatcacggcaagcgagttccatccccaccactgcaacctctttgtgtattcctcgtccaaaggctcattacggctctgtgacatgagagccgcagcactatgtgacaagcattccaagctgttcgaggagcccgaggacccaagcaatcgcagtttcttcagcgaaatcatctccagcgtgagtgacgtcaagttcagccatagtggtcgctacatgctgacaagagattacctgacggtcaaagtctgggacttgaacatggaagccagaccaatcgaaacttatcaggtacatgattatttgaggtcaaagctctgcagcctgtatgaaaacgactgcatcttcgacaaatttgaatgtgcctggaacggcagcgatagcgtgataatgacaggggcatacaacaacttcttcaggatgttcgaccggaacaccaaacgcgacgtgacactagaagcaagtcgcgagagctctaagccacgtgctgtcctgaaacccaggagagtctgtgttgggggaaagcgccgacgcgatgacatctccgtagacagccttgattttactaaaaagattttacacaccgcatggcacccagcggagaacatcatcgccattgccgctaccaataatctctatatctttcaggacaaggtcaatagtgatatgcactag

SEQ ID NO: 236966 - DNA, 1293 bp, synthetic construct
  misc_feature 1..1293: note = Description of Artificial Sequence: Synthetic coding sequence
  source 1..1293: mol_type = other DNA
atgggtaaacgcgacacagcggatatcatttctaccgtggagttcaatcataccggggagcttctggcgacaggcgacaagggtggcagagtcgtgatttttcagcgcgaaccagaatccaaaaacgcaccccattcccagggtgaatacgacgtttatagcacttttcaatctcacgagcccgagtttgattatctcaaatcactcgaaattgaggaaaagataaacaaaattaaatggctcccacagcaaaatgctgctcactctttgctgagcaccaatgacaaaactattaagctgtggaagattacggagagggacaagcgtcctgagggatacaatctgaaggatgaagagggcaaactaaaggacctgagtacggtcacttccctgcaggtcccggtgctcaaaccaatggatctgatggtggaagtgtcaccacggagaatttttgctaacgggcacacctaccacatcaactctatatccgtgaattctgattgtgaaacatacatgtcagccgacgatctgcgaataaacctctggcaccttgctataactgacaggtccttcaatattgtggatataaagcccgctaacatggaagatcttacagaagtgatcacagcctcagaattccaccctcatcattgtaatctgttcgtatactcatcctcaaaggggtctttaaggttgtgtgacatgcgtgccgctgccctgtgtgacaagcactcaaaactgtttgaagagccagaagacccctccaatcgatcctttttttctgaaattatcagcagcgtgagtgacgtgaagtttagccacagcggcaggtatatgcttacaagagattaccttactgttaaggtttgggatctgaatatggaagctagacctattgagacctaccaggtgcatgattatctgaggtcaaaactttgctctctctacgagaacgactgcatattcgataagttcgaatgcgcttggaatgggtccgattccgtaataatgacaggggcatataacaatttctttagaatgttcgatcggaacacaaagagggacgttacactggaagcctcacgggagagctctaagccgagggccgtgctcaaaccaaggagggtttgtgtcggcggaaaacggcgtcgcgacgatataagtgttgatagccttgatttcacaaagaagatcttgcacacagcttggcaccctgctgagaacatcatcgcgatcgctgctacgaacaatctgtatatcttccaggacaaggtgaactctgacatgcactag

SEQ ID NO: 236967 - DNA, 1623 bp, synthetic construct
  misc_feature 1..1623: note = Description of Artificial Sequence: Synthetic coding sequence
  source 1..1623: mol_type = other DNA
atgcctaacaagaataagaaggagaaggaatcaccgaaagccggaaagtcagggaaatcatccaaagagggtcaggatactgtggaatccgagcagatatcagtgcggaagaacagtctggtcgctgttccatccactgtaagcgcgaagatcaaggtccccgtgtcccaacctattgtaaagaaggacaaacgacagaacagttctagatttagtgctagcaataatagggagctccagaagttgccttctctgaaagacgtgccgccagcggaccaggagaagctctttattcagaaactccgccagtgttgcgtgctgtttgatttcgttagcgacccactgtctgatttaaaatggaaggaagtgaagcgcgcagccctgagcgaaatggtggagtacatcacacataaccgtaatgtaattacagaacccatctatccagaggtcgtgcatatgttcgcagtgaacatgttccgtacactgccccctagttccaacccaaccggtgccgaattcgatcccgaagaagatgaaccaacgctggaggccgcatggccacacctgcaactggtatacgagttttttttgcgttttctagagagcccagatttccagccaaatattgccaaaaaatacattgatcagaagttcgtgcttcaacttctggagctgtttgactcagaggaccccagggagcgggatttcctgaaaacaacgctccatcggatttacggtaaattccttggcctcagggcctacatccggaagcaaattaacaatattttctacagatttatctacgaaaccgaacatcacaacggcattgcagaactgctcgagatcctggggtccatcatcaatggttttgcactgccactgaaagaggaacataaaattttcttgctcaaggttcttctgcccttacacaaagtcaagagcttatccgtgtaccacccacagctggcgtattgtgtggtgcagtttctcgaaaaggactctaccctgacagagccagtagtcatggctttgctgaagtattggccaaaaacccactctcctaaagaagtaatgttcctcaacgaactcgaagagatcctcgatgtcatagagccgagcgagtttgtgaagattatggaacctctcttccgccagctggccaagtgcgtaagtagccctcattttcaggttgcagagcgcgctctgtactattggaataacgaatacatcatgtctctgatctcagacaatgcagccaaaatcctgcccatcatgttcccaagcctctacaggaattctaagactcactggaacaagaccattcatggcctcatttataacgccctcaaacttttcatggagatgaaccaaaaactcttcgatgactgtacccagcaatttaaggctgaaaaactcaaggaaaaactgaaaatgaaagagcgggaagaggcttgggtgaaaatcgaaaatctcgctaaagcgaatccacaggcccagaaggaccctaaaaaagataggccgctggccagacggaagtccgaactgccacaggatccgcacaccaagaaggccctggaggctcactgtagagccgacgaactcgctagccaggacggccgttag

SEQ ID NO: 236968 - DNA, 1575 bp, synthetic construct
  misc_feature 1..1575: note = Description of Artificial Sequence: Synthetic coding sequence
  source 1..1575: mol_type = other DNA
atgctgacctgcaataaggcagggagtcgcatggtggttgatgcagccaatagcaacgggcctttccagcccgtagtgttgctacatatccgagacgtaccaccagctgaccaggagaaactgttcatccagaagctgcggcaatgttgtgtgctgttcgatttcgtcagcgacccactgagcgaccttaaatggaaggaggtaaagagagctgccctttcagagatggtcgagtacataactcacaacaggaatgtgatcaccgaaccaatctatcccgaggttgtgcatatgttcgccgttaatatgtttagaacgcttccgcctagctcgaacccgactggagctgagtttgacccagaagaggatgagcctaccttggaggcggcttggccacacctgcagctcgtatacgagttctttttacgttttctggagtcccctgatttccagcccaatattgcaaagaaatatattgatcagaagtttgtcttgcagcttctagagctctttgactccgaggacccgagagagagggacttcctgaagaccaccctgcatcgcatatatggcaagtttctcgggctaagggcttacatccgcaaacaaatcaataacattttctaccgctttatctacgaaaccgagcatcataacggtattgccgaacttctggagatccttggttccataataaatggattcgcccttcctctgaaagaggagcacaagatctttctgttaaaagtacttctgcccctgcacaaggtgaaaagtctgagcgtatatcaccctcagctggcctactgcgtcgtgcagttcctcgaaaaggattctacacttaccgagcccgtcgttatggctctgttaaaatactggccaaaaacgcatagcccaaaagaggtgatgttccttaatgaacttgaagagattctggacgtaattgaaccctctgaattcgtgaagatcatggagccactgttccgccaactagccaagtgcgtgtccagccctcacttccaggtggccgagagggcgctatattattggaacaatgagtacatcatgagcctgatctccgacaacgctgctaagatcttacctatcatgttccctagtctgtaccggaattccaaaacccattggaataagactatccacgggttgatttacaatgcccttaagcttttcatggaaatgaatcagaaactgttcgatgattgcacacagcagtttaaggccgagaaacttaaggaaaaactcaagatgaaggaaagggaggaagcatgggtgaagatcgagaatttggctaaggccaatccacagtacacagtctatagccaggccagcactatgtccatcccagttgccatggagacggatggccctctgtttgaggatgttcaaatgctgcgcaagactgtcaaagatgaggcgcatcaggcccagaaggatcccaagaaagaccgtccccttgcccgaagaaagtctgagctgccacaggacccccacacgaaaaaggcactcgaagcccattgccgagccgacgagctagcatcccaggacgggcgatag

SEQ ID NO: 236969 - DNA, 783 bp, synthetic construct
  misc_feature 1..783: note = Description of Artificial Sequence: Synthetic coding sequence
  source 1..783: mol_type = other DNA
atgttccggacattgcccccttctagtaatcccaccggtgctgagtttgaccccgaggaggacgagccaaccttagaagccgcatggccgcatttacagttagtttacgaattctttttgcgttttttagagtcacccgatttccagcctaacattgctaaaaaatacatcgatcagaagtttgtgttacagctgctcgagctgtttgatagtgaagaccctcgcgaaagggatttcttgaaaaccactctccaccgaatatacggaaagttcctcgggctgcgggcttacattagaaaacaaattaataacatattttaccggttcatctacgaaaccgagcaccacaatggcatcgcagaacttttggaaatcctaggcagcattatcaatggtttcgctttgccgcttaaagaagaacacaagatctttcttctcaaggtgctgctcccgttgcataaggttaaatccctgagcgtgtaccaccctcagctcgcgtactgtgttgtgcagtttcttgaaaaggatagcactttgacagagccggtggttatggcactgctgaaatactggccaaaaactcacagccctaaagaagtaatgttcctgaatgagcttgaggagatcttagacgtgattgaaccttccgaattcgtgaaaatcatggaacccctcttcagacagctggcaaagtgtgtgagtagccctcatttccaagacaatacgtggcttgatatccagaggccagaagccctgcacggcgacgaaccgaaagccatctag

SEQ ID NO: 236970 - DNA, 1458 bp, synthetic construct
  misc_feature 1..1458: note = Description of Artificial Sequence: Synthetic coding sequence
  source 1..1458: mol_type = other DNA
atgttgacatgcaataaggctggttcacgcatggtggtggatgccgcaaattccaacggtccttttcagcctgtcgtgttgctgcacatcagggacgtgcctccagctgaccaagagaaactatttattcagaagctgcggcagtgttgcgtgctgttcgactttgtctccgaccctcttagtgacctgaaatggaaggaagtgaagcgggcagccttgagcgaaatggtcgagtacatcacccataacaggaatgtcatcaccgaaccaatttaccccgaggtggttcatatgtttgccgtcaacatgttcaggaccttgccaccatcatcaaacccaactggggcagagttcgacccagaggaggacgagcctaccctagaggctgcgtggccccatctccaactggtgtacgaattctttctgaggttcctggaaagcccagacttccagcccaacatcgccaaaaaatatattgatcagaaatttgtgcttcaactcctagagctgttcgatagcgaggacccacgggagcgggattttctcaagactacacttcatagaatatatgggaaatttctcggcctgcgagcctatatccggaaacagataaacaatatcttttatcgattcatctatgagacagaacatcacaacggcattgcagagttgttggagatcctgggtagcatcatcaacggattcgccctgcctctcaaagaggaacacaaaatctttctgcttaaggtgctcctgccactccacaaggtgaaaagcctctcagtatatcacccgcaattagcgtactgtgtagtgcagtttctggaaaaggatagcaccctgaccgagcccgtcgtgatggcattgctgaaatactggccaaaaacccactcccccaaagaggtcatgtttctcaatgagctcgaagaaattttagacgtcattgagccatctgagttcgtgaagattatggagccgctcttcaggcagttggcaaagtgcgtgagctccccccatttccaggtggcagagcgagccctttactactggaataacgagtacatcatgtcgctgatatctgacaacgcagctaagatccttcctattatgttcccaagtttatatcgtaacagcaagacccactggaataaaaccatacacggtctcatctacaacgccctgaagctttttatggaaatgaatcagaagctttttgatgactgtacgcagcagtttaaagcagagaaattgaaagagaaacttaaaatgaaagaacgagaggaggcttgggttaaaatcgaaaatctcgccaaggcaaacccgcaggctcagaaggaccccaagaaagacaggccacttgctcgtagaaaatctgagctacctcaggatccacacacaaagaaagccctagaggcccattgcagagcagacgagctggccagccaggacgggcgatag

SEQ ID NO: 236971 - DNA, 1668 bp, synthetic construct
  misc_feature 1..1668: note = Description of Artificial Sequence: Synthetic coding sequence
  source 1..1668: mol_type = other DNA
atgccaaacaagaataagaaagagaaggagagccccaaagcaggaaaatccggtaagtccagtaaggaaggccaagacacagtggagagtgagggcacaagtcccgaagagcccagttcacctaaggtgccccctccactcctccccgagctcctagtgctcatatttggcggactccaggggagagatgtgccacctgcagatcaggagaaattgttcattcaaaagttgcggcagtgttgcgtactatttgactttgtctccgacccattgagtgacctcaagtggaaggaggtcaagcgcgctgccctttcagagatggtggagtatataacacataaccggaatgtgatcaccgagcccatctacccagaggtggtgcacatgttcgctgtgaatatgttccgtactcttcctccctcctctaatcccaccggagctgagtttgatcccgaagaggacgagcctaccttggaagccgcatggccacacctccaactggtctacgagttttttttgagattccttgagagcccagactttcagccaaatatcgccaaaaagtacatagatcagaaattcgtacttcagctgctggagctttttgacagtgaggacccaagagagagggacttcctgaaaacaaccctccacaggatctatggaaaattcctggggctgagggcatacattcggaaacaaatcaataatatattttatcgtttcatatacgaaactgaacaccacaatgggatcgccgaactcttagagatcctgggcagcatcataaacggctttgcactcccccttaaggaagaacacaaaattttcttactgaaggtgctcctgccactgcataaggttaagagcctgtccgtgtatcatccacagctagcctactgcgtcgtgcagtttcttgaaaaggacagtacactaactgaacctgtcgtgatggcattactcaaatattggcctaagactcacagccccaaggaggtgatgtttctcaacgaactggaggagatactggacgtcatcgaaccatccgagttcgtgaagatcatggaacctttatttaggcaacttgcaaagtgtgtgagcagtccccactttcaggtggccgagagagctttgtactactggaacaatgaatacattatgagcctcataagcgacaacgcagctaagattcttccgatcatgtttcctagtctctacaggaattccaagacacactggaacaaaaccatccatggccttatatataacgccctgaagctgtttatggagatgaaccagaagctgttcgatgactgcactcagcagttcaaggcagaaaaattgaaggaaaaactgaaaatgaaggaacgcgaggaagcatgggtgaaaatcgaaaacctggccaaggcgaacccccagtacaccgtgtacagccaggcctcaacgatgtccatccccgttgctatggaaactgacgggcctctgttcgaggatgtacagatgcttaggaagaccgttaaagacgaagcccaccaggcccagaaggatccaaagaaggataggcccctggcgcgaagaaagtcagagttaccccaggatccccacactaagaaagccctggaggcacattgcagagccgacgagctggccagtcaagatgggaggtag

SEQ ID NO: 236972 - DNA, 1350 bp, synthetic construct
  misc_feature 1..1350: note = Description of Artificial Sequence: Synthetic coding sequence
  source 1..1350: mol_type = other DNA
atgttgacttgcaacaaggctggctcgcggatggtggtcgatgctgcgaattccaatggcccttttcagccagtagttctcctccacatccgagatgttccacccgcagaccaagagaagttgttcatccagaagttaaggcagtgttgcgtactgtttgactttgtatctgaccctctgagcgatcttaagtggaaagaggtcaaacgcgcagcgctttccgagatggtcgagtatataacgcataaccgaaacgtcattacagagcctatataccctgaggtcgtgcatatgttcgccgtcaatatgttccgcaccctgccaccctcctctaacccaactggggctgagtttgatcctgaggaagacgaaccaactctggaagctgcctggccacacttgcagctggtctacgagttcttcctgcggtttctggagtcgcctgattttcagcctaatattgccaaaaagtacatagaccagaagtttgtcctgcagctgttggagctgtttgactcagaggatcctagagagcgcgacttccttaagacaaccctgcacaggatctacggaaagtttcttggtctcagagcctatattcggaaacaaataaataatattttttacaggttcatatatgaaacagagcatcataatggcatagccgaattactcgaaatcctgggttccattatcaatggcttcgccctgcccctgaaagaagagcacaagatctttctgctcaaggtgctgcttcctctacataaagttaagagtctgtctgtataccacccgcagttggcttattgcgtcgtgcagttcctggagaaagactcaacgttgaccgaaccggtggtgatggcactgctgaaatattggcctaaaactcatagtccaaaagaggtaatgttcctcaacgaattggaggaaattttggacgtgatcgaaccttccgagtttgtcaaaattatggaacccttgtttcggcagcttgcaaagtgcgtgagtagtcctcacttccaagtggccgaacgagccctatattattggaacaacgaatatattatgagcctcatctcggataatgccgcaaagattctgcctattatgttcccctccctttatcggaactcaaaaacccattggaataaaacaattcacgggttgatttacaatgcactgaagctgttcatggaaatgaaccaaaaactgtttgatgactgcactcaacagtttaaagctgagaagctgaaagagaaactcaaaatgaaggagcgcgaggaagcatgggtcaaaatcgagaatctggctaaagccaacccccaagttttgaaaaagcggatcacctag

SEQ ID NO: 236973 - DNA, 1155 bp, synthetic construct
  misc_feature 1..1155: note = Description of Artificial Sequence: Synthetic coding sequence
  source 1..1155: mol_type = other DNA
atgctgacctgcaataaggccggatcaaggatggtcgtggacgctgcaaacagtaacggcccatttcagcccgtggtgctgcttcacattagagatgttcctcctgcagatcaggagaagctttttattcagaagctgagacagtgctgtgtcttattcgatttcgtcagtgatcctctttctgatctcaaatggaaggaggtaaaaagagccgcattaagcgagatggtggagtatatcacacataacaggaatgtaatcaccgagcctatctatcctgaggtcgttcacatgtttgccgtgaacatgtttaggacacttcctccctcttccaaccccaccggcgctgagtttgacccagaagaggacgagccgacgctcgaagctgcctggccccatcttcagctggtgtacgagtttttcctacgctttctggagagtccagactttcagccgaacatcgccaagaaatacattgaccagaagttcgtgctccagctgctggaattattcgatagcgaggacccaagggagcgtgatttcctcaaaacaacgttacaccgaatatacggcaagtttctgggactcagggcctacattcggaaacaaatcaataacatcttttatagattcatttatgagacagaacatcacaacgggatcgccgaactcctcgagattttgggctcaataattaacggattcgcactgcccctgaaagaagaacataaaatattcttattgaaggttctattacccctgcataaggtcaagtcgctgtctgtgtaccacccacagctggcttattgtgtagtccagttcctggaaaaagactctactctgactgagcctgtcgttatggccctgctgaagtactggcccaaaacacattctcccaaggaagttatgttcctcaacgagctggaagagatcctggacgttatcgaaccgtcggaattcgtgaaaatcatggagcccttgtttaggcaacttgccaagtgtgtatcttctccccatttccaggtggccgaacgtgcgctctactattggaacaatgagtacatcatgtctttaatctccgataacgctgctaaaatcctgcccatcatgtttccttctctatataggaattcaaagacccactggaacaaatag

SEQ ID NO: 236974 - DNA, 1662 bp, synthetic construct
  misc_feature 1..1662: note = Description of Artificial Sequence: Synthetic coding sequence
  source 1..1662: mol_type = other DNA
aataaaaataaaaaagagaaggagtcacccaaagccggtaaatctggcaaaagctctaaagagggccaggacaccgtcgagagcgaaggtacttccccagaggaaccatcaagtcctaaggtaccccctcccctcctgcccgagttgctcgttctgattttcgggggtctacaggggcgagatgttcctcctgccgatcaggaaaagttgttcattcagaaacttagacagtgttgcgtcttattcgactttgtctccgatccactatctgacctgaagtggaaagaggtcaaacgagcggctttgagtgagatggtagagtatataacccacaatcggaatgtgattaccgaacctatttacccggaggtggtgcacatgtttgccgtaaacatgttccgcacccttcccccttctagtaaccctacaggtgctgagttcgatcccgaggaggatgagcccactctggaggctgcttggccacacctccagctcgtatatgagttcttcttgcggtttctcgagtctccggattttcagcccaatatcgctaagaagtatattgatcagaagtttgtgcttcagttgcttgagctgtttgatagtgaagatccacgcgagcgcgacttcttgaagaccacactacataggatttacgggaaattcctgggactgagggcctatatcagaaagcaaatcaacaatattttttaccgttttatctatgaaaccgagcaccataacggaatagcggaattgttggaaatcctcggttccattatcaacgggtttgcactccctcttaaagaagagcacaaaatttttttactaaaagtgctcctgcctttgcacaaggtcaaaagtctttctgtataccatccccagctcgcctactgtgtcgtgcagtttttggaaaaagactccacattaactgaacccgtcgtgatggcactgctaaaatactggcctaagactcactctccaaaagaagtcatgtttcttaacgagctggaagagatattagatgtgattgagcctagtgagtttgttaaaattatggaacctctgttccgacagctcgctaagtgtgtatcttccccccatttccaggtggcagaaagagcactgtattattggaacaacgaatatatcatgagtcttatttcagataacgccgctaagattctgcctataatgtttccaagcctctatagaaactccaagactcattggaacaaaacaatccacggtctcatttataatgctttgaagctgttcatggagatgaaccaaaaactgttcgacgactgcacacagcaattcaaggcggagaaactgaaagaaaaattgaagatgaaggaaagggaggaagcctgggtgaaaatcgagaacttagctaaagcgaacccgcagtacactgtttactcccaggcatcgaccatgtcaatccccgttgctatggagacagatggcccactctttgaagacgttcagatgctgcgcaagacagttaaagatgaagcacaccaagctcagaaggaccccaagaaggatcggcctcttgccagacgtaaaagtgaactcccacaggacccccacactaagaaagctctagaagcccactgtcgagcagacgagctggcatcccaggatggacgttag

SEQ ID NO: 236975 - DNA, 1077 bp, synthetic construct
  misc_feature 1..1077: note = Description of Artificial Sequence: Synthetic coding sequence
  source 1..1077: mol_type = other DNA
atggctgagggggaacgccagcctcctccggactctagtgaggaggccccacccgcaacgcagaacttcatcatacccaagaaggaaattcacactgttcccgacatgggaaagtggaaacgttctcaagcatatgcggactacatcggttttatcttgacacttaacgagggcgtgaaaggcaaaaagctcacttttgagtacagggtgtctgagatgtggaacgaagtccacgaggagaaagaacaggctgcaaaacaatcagtatcctgcgacgagtgtataccactgcctagggccggacactgtgccccatccgaggccatcgaaaagttagtggcattgctgaatacactggaccgatggatcgacgagactccccctgtagatcagccaagccgctttggcaataaggcatatagaacctggtacgctaagttagacgaagaggctgagaatttagtggctacagttgttcctactcatttagctgcggctgtacccgaagtagcggtgtatctaaaagaatctgtagggaatagtacgaggatcgactacggcacaggccacgaggccgctttcgcagccttcttgtgttgtctgtgtaagatcggggtgctgcgtgtggacgaccaaatcgctatcgtgttcaaagtatttaacaggtatcttgaggtgatgcggaagctgcagaaaacctacaggatggaaccagcgggatcccagggcgtgtgggggctcgacgacttccagtttctgcctttcatatgggggtcttctcagctcattgaccacccctatctggaaccccgacacttcgtggatgagaaagcggttaatgagaaccacaaggattacatgttcctcgaatgtatcctttttatcacagagatgaagactggcccattcgctgagcacagtaaccagttgtggaatatttctgcagtcccctcatggtctaaagttaaccagggcctgatccgcatgtacaaggccgagtgtttggagaaattcccggtgattcagcacttcaaattcggttcccttctgcctatacacccagtgacatccggctag

SEQ ID NO: 236976 - DNA, 990 bp, synthetic construct
  misc_feature 1..990: note = Description of Artificial Sequence: Synthetic coding sequence
  source 1..990: mol_type = other DNA
atggccgaaggggagcgccagccaccacctgattcatcagaagaggcacctcccgctacgcagaacttcatcattccaaaaaaagagattcacaccgtacctgacatgggaaagtggaagagatctcaagtgcctttcggtaccgtagcctatgccgactatatcgggtttattctgaccttgaatgagggtgtgaagggaaaaaagctaacattcgagtatagagtaagcgaggctatagagaaattggttgcactgctcaatactctagacaggtggatcgatgagactccccctgtggatcaaccctccagattcgggaataaagcataccggacatggtacgctaagctggacgaggaagctgagaacctggtggcaacggttgtgccaacccacttggcggcagccgtacccgaagttgctgtgtatttgaaggagagcgttggaaacagtactcgtattgactacggcacgggtcacgaggccgcttttgccgcattcctgtgctgcctgtgcaagatcggtgtcctgcgagtagacgaccagatagctatagtgttcaaggtgtttaacagatacttggaagttatgcgaaagctgcagaagacctatcgcatggaacctgccggatcccaaggagtatggggcctggatgactttcaattccttccattcatctgggggtcttctcagctgatcgaccacccttatctggaacctcgccatttcgttgacgagaaggctgtgaacgaaaaccacaaagattatatgtttctggagtgcatattgttcattaccgaaatgaagaccggccctttcgcagagcactccaaccaactgtggaacatttccgcagtaccttcctggtctaaagtaaaccagggcctaattcgaatgtataaggcagaatgcctggaaaaatttcccgtgattcaacatttcaaattcggatctttgctgcctatccaccccgtaacatccgggtag

SEQ ID NO: 236977 - DNA, 846 bp, synthetic construct
  misc_feature 1..846: note = Description of Artificial Sequence: Synthetic coding sequence
  source 1..846: mol_type = other DNA
atggctgagggggagagacagcccccaccagactcctcagaagaagcacccccagctacacagaacttcattatacccaagaaggagatccacacagtgccagatatgggcaaatggaagagaagccaagcttacgccgattatatagggtttatcttgactttaaatgaaggtgttaaggggaagaaattaacgtttgaataccgcgtaagcgaggaagccgaaaacctggtggccacagtggtgccaactcatcttgccgctgcggtgcctgaagtcgccgtgtacctaaaagaatctgttggaaattccacaagaatagactacggaactggtcacgaagctgcctttgccgcattcctctgctgcctatgtaagatcggggttcttagggtggatgaccagatcgcaattgtgttcaaggtattcaacaggtacttggaagttatgcgtaagctgcagaaaacttatagaatggaaccagccggttcccagggagtttggggtctggacgatttccagtttctcccctttatttggggctcaagtcagctgatagatcacccgtacctggagcctaggcatttcgttgacgagaaagccgtcaatgaaaaccacaaggactatatgtttttagagtgcattctttttattaccgagatgaagacaggcccatttgctgaacactcaaaccagctgtggaacatcagcgcagtgccatcctggtccaaagtgaaccagggcctgatccgcatgtacaaggcggaatgcctggaaaagttcccagtgatccaacacttcaaatttggctctctccttcctattcacccagttaccagtggctag

SEQ ID NO: 236978 - DNA, 885 bp, synthetic construct
  misc_feature 1..885: note = Description of Artificial Sequence: Synthetic coding sequence
  source 1..885: mol_type = other DNA
atggctgagggtgagaggcaaccacccccagacagtagcgaggaagcccctcccgcaacccagaactttattataccaaaaaaagagattcacaccgtgccggatatgggtaaatggaagaggtcccaggctattgagaagctggtagccctgcttaacactctagacaggtggatcgacgagacccctccagtggatcaaccctcacgctttggcaacaaagcttacaggacgtggtacgcgaagctcgatgaggaggccgaaaatctagttgctacagtggtccccactcacctggctgcagccgtgcccgaagttgcggtgtacctgaaggagagtgtgggaaatagcaccaggattgattacggcacaggacatgaggccgctttcgcggcttttctgtgttgcttgtgcaaaatcggtgtcctccgggtagacgatcaaattgccatcgtcttcaaagtctttaatagatatctcgaggtcatgcggaagctgcagaaaacataccgaatggaaccagctggctcacaaggcgtttggggcctggacgactttcaatttttacccttcatttggggttcaagccagctcattgaccatccctatctggagcctcgccatttcgttgacgagaaggctgtaaatgagaaccacaaggattacatgtttctggaatgtatcctcttcattacggagatgaagaccggcccttttgccgagcacagtaaccaactctggaatatatccgctgtgcctagctggtcaaaggtgaaccagggtctgattcgaatgtacaaggccgagtgcctggaaaagtttcccgtgatccagcacttcaagtttgggtctttactgcccattcacccagttacttctgggtag

SEQ ID NO: 236979 - DNA, 972 bp, synthetic construct
  misc_feature 1..972: note = Description of Artificial Sequence: Synthetic coding sequence
  source 1..972: mol_type = other DNA
atggcagagggcgaaaggcagccgcctcctgactcttctgaggaagccccacccgcaactcagaatttcataattccaaaaaaagaaattcacaccgtccccgatatgggcaaatggaagaggagtcaggcctatgctgattatatcgggttcattcttactcttaacgagggcgtgaaaggaaaaaagttgacattcgagtatcgggtgagcgaagccatagagaagctagttgccctcctgaatacgctcgaccggtggatcgacgagaccccccctgttgatcagcccagcaggttcgggaataaggcttatagaacttggtacgccaaactggacgaggaagcggagaacctggtcgccacagtggttccgacgcacctagctgccgcagtgcccgaggtcgcagtgtaccttaaagagtcagtcggaaattctactaggattgactatggcaccggccacgaagctgcctttgctgcctttttgtgctgcctatgtaagataggggtgctgcgggttgacgatcaaattgccattgtatttaaggttttcaaccgttatttagaagtaatgcgcaagctgcagaagacatatcgaatggagccggctggatcccaaggcgtctgggggctggacgacttccagttcttgccatttatctgggggagttctcagctaattgaccacccgtacctggagccacgccacttcgtggatgaaaaggcagtcaacgaaaaccacaaagattacatgttccttgagtgcatcctcttcataactgagatgaagaccggaccatttgctgaacacagcaatcaactatggaacatcagcgcggtgcctagctggtcgaaggtcaatcagggtctgattaggatgtacaaggcggaatgcctggagaagttccccgttatccagcattttaagtttggctctcttctgccaatccatccggttaccagcggctag

SEQ ID NO: 236980 - DNA, 972 bp, synthetic construct
  misc_feature 1..972: note = Description of Artificial Sequence: Synthetic coding sequence
  source 1..972: mol_type = other DNA
atggccgagggggagcggcaacctcctccagacagttcagaagaagcgcctccggcaactcaaaatttcatcataccgaaaaaggaaatccacacagttcctgatatgggaaagtggaaacgaagtcaggcctatgcggactacattggctttatactcaccctgaacgaaggtgtgaagggcaagaaattgactttcgagtaccgtgtctcagaagccattgagaagctcgtggcgttgttaaatacactggatagatggatcgacgaaacccctccagtcgatcagcctagtcggtttggaaacaaagcatatcgtacttggtatgctaagctagacgaagaagcagagaacttggtggcaactgtggtgcccacccacctggctgccgctgttcccgaggtggccgtgtatctgaaagagtctgtgggcaacagtactagaattgattatggcacaggtcatgaagctgctttcgccgcttttttatgctgcctctgcaagattggagtgctgagagtagatgaccagatcgccatcgttttcaaggtttttaaccgctatttggaggtgatgcggaaacttcagaagacgtaccgaatggagccagccggatctcaaggagtctgggggctagatgactttcagtttttgccttttatttggggctcaagccagctaattgatcacccctacctagaacccaggcacttcgtggacgagaaggctgtgaatgagaaccacaaagattatatgttcctagagtgcatactgttcattactgaaatgaagaccggtccgttcgctgagcacagcaatcagctctggaatatctcggctgtgccgtcctggtccaaagtcaatcagggtttgatcaggatgtacaaagccgaatgcctcgagaaatttccagtgatccagcatttcaagttcggctcacttttacccatacaccccgtgacaagtggatag

SEQ ID NO: 236981 - DNA, 792 bp, synthetic construct
  misc_feature 1..792: note = Description of Artificial Sequence: Synthetic coding sequence
  source 1..792: mol_type = other DNA
atgggcaagtggaaaaggtctcaggcttatgccgattatatcggcttcattctgactctgaacgagggggtcaaggggaaaaaactgacttttgagtaccgcgtctctgaggccatcgagaaactggtcgcgctgctgaacaccctggatcgctggattgatgaaactcctcctgtagaccaaccatctcgtttcggcaacaaagcataccggacctggtacgcaaagcttgatgaagaagccgaaaaccttgtagctaccgtggtgcctactcatttggcagcagccgtacccgaagtcgccgtctatttaaaggagtcggtgggcaattctacgaggattgattacggcacaggtcacgaagcggcatttgccgcatttttgtgctgcttatgtaagattggcgtcctcagagttgatgaccagatcgcgatcgtgttcaaagtgtttaacagatacctagaagtgatgagaaagctgcagaagacgtaccgcatggaacccgctggcagccagggcgtctggggcctggacgactttcaattcctaccgtttatctggggaagcagtcaacttattgatcacccttatttagagccccgacactttgtggatgaaaaggctgtcaatgagaatcataaggactatatgtttttggaatgcatccttttcataaccgagatgaaaactggcccattcgctgaacacagtaatcagctgtggaatatctctgccgtccccagctggagcaaagttaaccaagggctgatccgaatgtacaaagccgaatag

SEQ ID NO: 236982 - DNA, 1125 bp, synthetic construct
  misc_feature 1..1125: note = Description of Artificial Sequence: Synthetic coding sequence
  source 1..1125: mol_type = other DNA
atggcagagggcgaacgtcagccaccccctgatagttccgaagaagccccaccggcaactcagaacttcatcatcccaaagaaagagattcatactgtcccagacatgggaaaatggaagagatcccaggcatatgctgattatatcgggttcattctcactctgaatgagggcgtcaagggtaagaagctcacatttgaatatcgcgtctcagagatgtggaatgaggttcacgaagagaaagaacaggccgctaagcagagtgtgagttgcgatgagtgtatccctctcccaagggctgggcactgtgcaccttctgaagccatcgaaaagcttgtggcattgctcaacacgctcgatcggtggattgacgagacaccgccagtagaccaaccaagtaggtttggtaacaaagcataccgaacctggtacgccaaattggatgaggaagccgaaaatttagtggctactgttgtccctacacacctggccgcagcggtgcctgaagtagcagtctacctgaaagagtcggtgggcaattctacccgtatcgattatggaaccggccatgaggccgcattcgctgccttcctctgctgcctctgtaaaatcggggtgctaagagtggatgaccagatcgctattgtgttcaaagtgttcaaccggtatttggaagtgatgaggaagcttcagaagacgtacaggatggaaccggctggcagccagggggtttgggggctcgacgactttcagttccttccttttatctgggggtcatctcagctcatcgaccacccatatctagagccaagacactttgtggacgaaaaggcagtcaatgaaaatcacaaagattatatgttcctcgaatgtattctctttataacagaaatgaagaccggcccattcgcagagcatagtaaccagctgtggaatatctccgctgttccgtcatggtctaaggttaaccaaggcctcattaggatgtacaaagcagaggcaagcccttcggatacatggggactggggatcagccatcttggacatgggcagtcggaaaaacatcaacctccacagccacgcaaggctgctgttcagctctgccccgacgaactaggcggatag

SEQ ID NO: 236983 - DNA, 456 bp, synthetic construct
  misc_feature 1..456: note = Description of Artificial Sequence: Synthetic coding sequence
  source 1..456: mol_type = other DNA
atgaagacggggcctttcgcggagcacagtaaccaactgtggaatatatccgctgtgcctagttggtcaaaggtgaaccagggattgatacgcatgtataaagcggaagtgagcgggggatggcctgtatgtccttcactattacctcacttggtgttggggtggggccaaagcaagaggtgtgggacatggggttcctgcttcctgctcccccattgcttcgcgctgaatttaagaccagcccctctgaccctcggagcatcagagtcacccatatggggtatgggttcccagcgcagcacctcgcaccccagccctgaaaaactccagtcttctagcgtgcttatgtctctcgaggccgaagctcggacttgttgcatggggagcggaggcgacgggggactgcccagccccttgtccagcggacagagattgctcaaagcgcgtgctgtgtag

SEQ ID NO: 236984 - DNA, 2802 bp, synthetic construct
  misc_feature 1..2802: note = Description of Artificial Sequence: Synthetic coding sequence
  source 1..2802: mol_type = other DNA
atggccgatctgtctttgttacaggaggaccttcaggaggacgctgatggctccctggatttcgtgagtcaagatgagatgctcactcccctggggagactggataagtacgctgctagtgagaacatatttaaccgacagatggtggcgcgatccctcttggatactctgagggaagtttgcgatgacgagcgggactgtatcgccgttcttgaacgtatcagccggttggccgatgattcggagcccaccgttagggccgaactgatggaacaagtgcctcacatcgcgctgttttgtcaagagaatcgcccatccataccgtacgcattctcaaagttcctgctgccaattgtcgtgcgttacctggccgaccagaacaaccaggtcagaaaaacaagccaagcagcactcctggccttgctagagcaggagctcattgagcgctttgatgtcgagacaaaagtctgtcccgttctgatagaattgaccgcgccagattccaacgatgacgtcaagactgaagccgttgccattatgtgtaagatggctcccatggtcggaaaggacattacggagcggctcattttaccaagattctgtgaaatgtgctgtgactgtaggatgttccatgtccgcaaggtctgcgcggctaattttggcgatatttgtagcgtggtgggccagcaggctaccgaagagatgcttctgcccagattctttcagctctgcagtgataacgtgtggggcgtgagaaaggcctgtgctgaatgctttatggcagtgagttgcgccacatgtcaggagataaggcgcactaaactttcggccttgttcataaatttgatatccgatccaagccggtgggtgcgccaggccgcttttcagtcactggggccattcatcagcacattcgccaatcctagcagcagcggacaatacttcaaagaggaaagtaagagttccgaagagatgtcagtggagaacaagaaccgaactcgagaccaggaagctccagaggatgtgcaggttagaccagaggatactccttccgacttatcagtctccaactcatccgtgatcctagaaaacactatggaggaccacgccgctgaggcatccggcaagcccctcggggaaatttctgtgccactcgactcttctctgctctgtacactttctagcgaaagccatcaagaagcagcttctaatgaaaacgacaagaaacccggaaactataagagcatgctgaggccggaggttggcacgacctcccaggattccgcactgctggaccaggaactgtacaatagcttccacttttggcgtaccccgctcccggaaattgacttagacatcgagctcgaacaaaactctgggggtaagccttcacctgagggaccagaggaggaatcagaagggcctgtgccgtcaagtccaaatatcactatggccaccagaaaagaactggaggagatgatcgaaaacctagagccgcatatcgacgaccccgacgtcaaggcacaagttgaggtcttgagtgccgcactgcgtgcctcatctctggatgcccatgaggagaccatctcaattgagaaacggagcgatttgcaagacgaattggacatcaatgagctgcccaactgcaagattaatcaggaagacagtgtacctctcattagcgatgcagtcgaaaatatggattctaccctgcactatatccactccgactcagacctgagtaataactcctcttttagtcccgacgaagagcgtaggaccaaagtgcaagatgtggtgcctcaggctcttttagatcaatatctgtctatgaccgatccctccagagcgcagaccgtggacaccgagatagccaaacactgtgcctactctcttcctggtgttgcactcacactgggcaggcagaactggcattgtctcagggagacgtatgagacactcgcttccgatatgcaatggaaggttcgcagaaccttggcattcagcatacacgagcttgccgtcatcctgggcgaccagcttactgccgcagacctggtgcccatcttcaatggctttctgaaggatctagacgaggtgaggatcggagtactcaaacatctgcatgatttcctgaagcttctgcatattgacaaacgtagggagtatctgtaccagctccaagagttcctcgtcaccgacaacagcaggaattggaggtttcgagccgagttagctgagcagctcatactacttctcgagctgtactccccgagggatgtgtacgactatctgcggccaattgcattaaacctgtgcgccgataaagtcagttccgttcggtggatcagctacaagctcgtttcggagatggtgaagaaactccacgctgctactccacctacgtttggggtggacctgatcaacgagctggtggagaacttcggcaggtgccccaagtggtccggcagacaggccttcgtctttgtttgtcagaccgtgatcgaggatgactgtctgccaatggaccagtttgcagtgcatctgatgcctcatctgttaactctggccaacgacagagtaccaaacgtaagagtgctgctcgccaaaaccctgaggcagacattgttagaaaaggactacttcctcgcctcggcttcatgccatcaggaggcagtggagcaaaccatcatggccttacaaatggaccgcgatagcgatgtgaagtacttcgcatctatccaccccgcttcaaccaaaatctcagaagacgctatgagcactgcctctagtacctattag

SEQ ID NO: 236985 - DNA, 924 bp, synthetic construct
  misc_feature 1..924: note = Description of Artificial Sequence: Synthetic coding sequence
  source 1..924: mol_type = other DNA
atggctgagatctcagacctggataggcagatcgaacagctccgacgatgcgaacttataaaggaatcggaagtgaaagccctctgtgccaaagccagagaaatattagttgaagaaagtaacgtgcagagagtcgactctcctgtcacagtgtgtggcgacatccacggacagttctacgacttgaaggaactattcagagtaggcggtgatgtgccagagacaaattatctgtttatgggggattttgttgaccgcggtttctactctgtggaaacattcctgctcctcttggcactcaaggtccgctatcccgatcggataaccctgatccggggaaatcatgagtcaagacaaattacccaagtgtacggcttctatgatgagtgtctgaggaagtacggcagtgtcaccgtgtggaggtattgcaccgaaattttcgattacctgtctctaagcgcgattatcgatggaaaaatcttttgcgttcacgggggactgagcccaagcatacagacactggatcaaattaggacaatagaccggaagcaggaggtccctcacgacggacctatgtgcgatctcctgtggtctgaccccgaagatactacaggatggggcgtaagtcctagaggggcaggctacttatttggaagcgacgttgtggcccagtttaatgcagccaatgatattgacatgatctgccgggctcaccagctggtgatggagggctacaaatggcattttaatgagaccgtgctaaccgtgtggtctgctccaaattactgctatcgatgcgggaacgttgccgctatcctcgaactggatgagcatttgcagaaagactttattattttcgaggcagcccctcaggaaacgagggggatcccctccaagaaacctgtcgccgattatttcctgtag

SEQ ID NO: 236986 - DNA, 1413 bp, synthetic construct
  misc_feature 1..1413: note = Description of Artificial Sequence: Synthetic coding sequence
  source 1..1413: mol_type = other DNA
atgttacaggttcgcacctatcttactgaaccaacagtgcgcgctgaattgatggagcaggtaccgcacattgctctgttttgtcaagagaatcgcccatccatcccatacgcattttccaaattcttgctacccatcgtggttagatacctggccgaccagaacaaccaggttcggaagacttcacaggccgcactgctggcactgctggaacaggagctgatcgaaagattcgacgtggaaacaaaagtgtgtccagtgctgatcgaactgactgcgccagacagcaatgatgatgtgaaaaccgaagccgtggctatcatgtgcaagatggcgcctatggtcggcaaggacatcacagagaggctgatcttacctaggttctgcgaaatgtgctgtgattgtagaatgtttcatgtgcggaaagtctgtgcagcgaactttggggatatctgttctgtagtgggccagcaggccaccgaggagatgctcctgcccagattcttccaactttgctcagataacgtgtggggggtccggaaagcctgcgcagaatgtttcatggcagtgtcatgcgcgacctgtcaggagataagaaggacaaagttgtccgccctgttcatcaatttaatttccgacccatcccggtgggttcgtcaggctgccttccagtctctgggaccttttatatctacgtttgctaatcctagttcgagcggacagtattttaaggaggagtcaaaatcgagtgaagaaatgtctgtggaaaacaagaacagaacccgggaccaagaggcccctgaagacgtccaggtacgtcccgaagatacccctagcgatctgagcgtgtccaactcaagcgtcatcttggaaaataccatggaggaccacgctgccgaagcctctgggaaacctttaggggagatctctgtgcctttggactcatcgctattgtgtacattgtcttccgagtctcatcaggaggctgccagcaacgaaaatgacaagaagcccggaaattacaaaagcatgctcagacccgaagttggcacaacttctcaggatagtgctctgctggatcaagagctgtataatagctttcatttctggcgaacacccttgccggaaatcgatctggatatcgagctggagcaaaactcaggtggtaagccgagccctgaggggcctgaagaagagtccgagggaccagttccttcttcccccaacataacaatggcaacccgcaaagaactagaggagatgatcgaaaatctggaacctcatatcgatgatcctgacgtcaaggctcaggtagaggtccttagcgccgcattgagggcttcttcgctggatgcccatgaagaaaccatctcaatcaagagagaggtgatctgcaaaatgaattggatctag

SEQ ID NO: 236987 - DNA, 2853 bp, synthetic construct
  misc_feature 1..2853: note = Description of Artificial Sequence: Synthetic coding sequence
  source 1..2853: mol_type = other DNA
atggcggatctctcactgctacaggaagatctgcaggaagacgcagacggcttcggcgtggacgattactcgagtgaatcggacgtcattatcattccaagcgccctggacttcgttagccaggatgaaatgctgacacccctgggcagacttgacaagtatgcagcaagcgagaacattttcaaccgccagatggtcgcacgctccctgctggacacactgcgcgaggtgtgtgacgatgaacgggattgcatcgcagtgctggagcgcatttcacggctggcagacgattctgagccaactgtgcgggcagagctgatggaacaggtgcctcatatcgctctgttttgccaggagaatcggcctagcattccttacgcattttccaagtttctcctacctatcgttgtgcgctatttagcggaccagaataaccaggtgagaaaaacgtcccaagctgcattactggctcttttggaacaagaactcatcgagaggttcgacgtggagaccaaggtgtgccctgtgctgatcgagcttacagctcctgactcaaacgacgacgtaaagacggaggcggtggccatcatgtgtaagatggccccaatggtggggaaggacataaccgagcgcctgatccttccgcgtttttgtgagatgtgctgcgattgcagaatgtttcatgtgagaaaggtttgtgccgctaactttggcgacatctgcagtgtggtcggccaacaggcgaccgaagagatgctgttgcctcgcttctttcaactgtgtagtgacaatgtctggggcgtgcgcaaggcctgcgccgagtgcttcatggccgtgtcctgcgcaacatgccaggaaataaggcggaccaagttgtcagcactgttcattaatttgatcagtgatccttcccggtgggtcaggcaggcagccttccagagcctcggaccattcatctcgacttttgcgaacccctctagctctggacagtactttaaggaggagagtaagtcctctgaagagatgtctgtggagaacaagaacagaacgagagaccaggaagcccctgaggacgtgcaggtgagacccgaagatactcccagcgacttgagcgtgagcaatagtagcgtgatccttgaaaatacaatggaggaccatgctgcagaggctagtggtaaacctctcggggaaatatctgttccacttgatagctcattgctgtgcactctgagtagcgagtcccaccaggaggccgcatcaaatgagaatgacaagaagccagggaactacaaaagtatgctgcgacccgaggttgggaccacctctcaagactcagctttgctggaccaggagctttataactccttccacttttggcgcacccccctccccgagatcgacctcgatatcgaattggaacaaaactcaggtggcaaaccatcccccgagggccctgaagaggaatccgaaggccctgtgccaagctctcctaatatcacaatggcgacgcgtaaggagcttgaggagatgatcgaaaatcttgaacctcacatcgacgacccggacgttaaggcccaggtggaggttctgtccgcggctctccgggcatcaagtcttgatgcgcacgaggaaaccatctccattgagaaacgctctgatctgcaagacgaactcgacattaatgaactgcccaactgcaagattaatcaggaagattcagtgcccctcatatcggacgcagtggaaaatatggattcgacattgcactatatccacagtgatagtgacctgagtaacaacagttctttctctccagatgaggagcggagaacaaaagtgcaagatgtggttccacaggcactcctcgatcagtacctcagtatgacggacccgtctagggcgcagacggtggataccgaaatcgctaaacattgtgcttactcattgccaggagtggctctaacactcgggaggcagaactggcactgcctcagagagacatatgagaccctggccagcgacatgcagtggaaggtcagaaggaccctcgctttctcgatacacgagctagctgtgattctcggtgatcagctgacagctgctgacttggttccaatctttaacggcttccttaaagacttggacgaggtgcgcatcggcgtcctaaagcacctgcatgatttcctgaagctgctccatatcgacaagcggcgagagtacctgtatcagctgcaggaatttttggtgaccgacaactccagaaattggcggtttagggccgagctggccgaacagctaatacttttacttgaactatactctcccagagacgtgtacgactacctgcgccctatcgccctcaatctatgcgcagacaaagttagttctgtccgctggatatcctacaaacttgtgtccgagatggtgaaaaaactccacgcagccactccccctacgttcggggtcgatctgatcaatgagctggtcgaaaatttcggacggtgccctaagtggtcaggtaggcaggccttcgtatttgtctgccagaccgtcatagaagacgattgcctgcccatggatcagttcgcagtccacttaatgccccatctcttaactctagccaatgatagagtcccaaacgtacgagtccttttggccaaaaccttgaggcagacactccttgagaaagattactttctggcttctgcttcctgccaccaggaagccgtcgaacagaccatcatggcgctccaaatggatcgggattctgatgtgaagtactttgcctctatccatcctgccagcactaagatctcagaggacgcaatgtcgactgcgtcttccacttactag

SEQ ID NO: 236988 - DNA, 1086 bp, synthetic construct
  misc_feature 1..1086: note = Description of Artificial Sequence: Synthetic coding sequence
  source 1..1086: mol_type = other DNA
atggacgacttccggaccagtgccccagagcctagagggcctcctaatcccaacgtcgagtacatcccattcgacgagatgaaagagcgcatacttaaaatcgtcacagggtttaatggtattccatttaccatacagaggctttgcgagcttttgactgatccacgacgcaattacacaggtacagacaagttcctcaggggagtcgagaagaatgtcatggtggtcagctgcgtgtacccctcatccgaaaaaaataacagcaactcacttaacaggatgaacggggtgatgtttccagggaatagtcctagttacaccgaaaggtccaatattaatggcccaggcactccaagacccttaaaccggccaaaagtatcgctgtcagcccctatgaccaccaacggccttccagaatccactgattcaaaagaggccaatcttcaacagaacgaggaaaagaatcacagcgattctagtacttccgaaagcgaggtttcatcagtaagcccacttaaaaataaacatccggatgaggacgccgtggaagccgagggccacgaagtcaaaaggctcaggtttgacaaagaaggagaggtcagggaaactgcttcacaaactacctcttcagagattagtagcgtcatggtgggggagactgaggcatcaagtagctctcaggacaaggataaggattctagatgcacaagacaacactgtaccgaagaagacgaagaggaggacgaagaggaagaagaggaatctttcatgacgagtagggagatgatccccgagaggaaaaaccaggagaaggaaagtgacgatgccctcacagtcaacgaagagacctcggaggagaacaaccagatggaagagtctgacgtcagccaggcagaaaaggaccttctccattccgaaggatccgaaaatgaaggccctgtatctagctcatccagcgattgtagggaaaccgaggagctggttggttccaattcgagtaagaccggcgagattctctcagaaagctcaatggagaacgacgacgaagccaccgaagtcactgacgagccaatggaacaggactag

SEQ ID NO: 236989 - DNA, 1254 bp, synthetic construct
  misc_feature 1..1254: note = Description of Artificial Sequence: Synthetic coding sequence
  source 1..1254: mol_type = other DNA
atggatgtggagagactgcaagaagcgctaaaggatttcgagaagcgcggtaagaaagaagtctgtcctgttctggaccagttcctttgccacgtcgcaaaaacaggagagactatgatccagtggagtcagttcaagggatacttcatctttaaacttgagaaggtgatggatgattttagaacctcagctccagagccaagaggcccacctaatcccaatgtggaatacatcccgttcgatgagatgaaggagaggatcctaaagatcgttactggattcaatggtattccttttaccatccagaggctgtgtgaacttctgaccgaccctaggagaaactacacaggaacagataaatttctacgaggagtggaaaagaatgttatggtagtgtcctgtgtgtatccttcgtcagaaaaaaacaactcgaattctcttaataggatgaacggcgttatgttccccggtaactcccccagctacactgaacgcagcaacataaacggccctggcacccctcgaccactgaatagacctaaagtgtctctatctgcacccatgacaaccaatggattgccagaatctactgactctaaagaagcaaatctccagcaaaatgaggaaaaaaatcacagtgactcatcaactagtgagtctgaggtaagctcggtgagcccactgaaaaacaaacacccagatgaggatgctgtcgaggccgagggtcatgaggtgaagcgcctgaggtttgataaagaaggagaagtaagggagacagcgtcgcaaacaacctcctccgaaatctcgagcgtaatggtcggggaaacagaggcttcctcctccagtcaggataaggataaggatagccgctgcactagacaacattgcacggaagaggacgaggaggaagatgaagaggaagaggaagaatcatttatgacgtcaagagagatgatacccgaaaggaaaaaccaagagaaggaaagcgatgacgcccttaccgtgaacgaagagacatccgaagagaataaccagatggaagaatctgatgtcagtcaggcggagaaagatttgctgcacagtgaagggagcgaaaacgagggcccagtgtccagctcctctagtgattgccgggagacagaggagcttgttggatcaaactcctccaagaccggggagatcctctcggagtcttccatggaaaacgatgatgaggctacggaggtgacggatgagcccatggagcaggattag

SEQ ID NO: 236990 - DNA, 1083 bp, synthetic construct
  misc_feature 1..1083: note = Description of Artificial Sequence: Synthetic coding sequence
  source 1..1083: mol_type = other DNA
atggatgtcgagcggctgcaggaagctctgaaagacttcgaaaagcgcggaaagaaagaagtgtgtcccgtcttggaccagttcctgtgccatgtagccaagactggagagacgatcatccccttcactatacagaggctctgcgagcttctgaccgacccccgaagaaattatactgggactgataaattcctcagaggtgtggagaaaaacgttatggtggtctcatgcgtgtacccaagctccgagaaaaataatagcaatagtctcaaccggatgaatggcgtcatgtttcccggaaactctccctcgtacactgaaaggtctaatatcaacggcccaggcaccccacgcccattaaacagacctaaagtttccctgagtgctcctatgacgacaaatggcctgcctgaatccacagatagcaaggaggccaacctgcagcagaatgaggagaaaaaccacagcgatagttctacctctgaaagcgaggtgtctagcgtttcaccgctcaagaacaaacatcccgacgaggatgcagttgaagcagaaggccacgaggtaaaaaggctgagattcgataaggaaggtgaagtgagggaaaccgcctctcaaacgactagttccgagattagctctgtcatggttggcgagactgaagcatccagttcctctcaggataaggataaagactctagatgcactcggcaacactgtaccgaggaagacgaggaagaggatgaggaggaggaagaggaaagtttcatgacctcgcgggaaatgatacccgaaaggaagaaccaggaaaaggaaagcgatgatgctttgaccgtgaatgaagaaacttcggaggagaacaaccagatggaggagtccgatgtgtctcaggctgagaaggacctactccattcagaagggagcgagaacgaaggcccagtgtcctcttctagtagcgattgcagggaaacggaggaactcgtgggaagtaatagctcgaagactggcgaaatcttgagtgaaagctctatggagaacgatgacgaggctactgaagtcaccgatgaaccaatggaacaggattag

SEQ ID NO: 236991 - DNA, 1116 bp, synthetic construct
  misc_feature 1..1116: note = Description of Artificial Sequence: Synthetic coding sequence
  source 1..1116: mol_type = other DNA
atggcgcttgggaaattcagggcagccctgagggactatgaaacagtggtgaaagtcaagccccacgacaaggatgctaagatgaagtaccaggagtgtaacaaaatagttaagcaaaaggcctttgagcgagctattgcaggcgatgagcataagaggtcagtcgtggacagtctcgacatcgaatccatgacaattgaagatgaatattcggggcctaaactggaagatggcaaagttaccatttcgttcatgaaggagctgatgcagtggtacaaggaccagaaaaagctgcaccgtaagtgcgcatatcagaccgaaaagatcaccgtctgcggagacacccacggccagttctatgacctcctgaacatttttgaacttaatggtcttccgagtgaaactaatccctacatcttcaacggcgatttcgtggacagggggtctttttcagtcgaagtgattttaacactgtttggcttcaagttgctgtatccggatcatttccacctgttaagaggaaaccacgagacggacaacatgaatcagatctacggcttcgagggagaagtcaaagcaaaatacaccgctcagatgtatgaactgttctcagaggtctttgaatggctgcccctagcccagtgtattaacggtaaggttctgattatgcacgggggactgttctccgaggacggggttacactggatgacatccggaaaatcgaaagaaaccgccagccaccggactctggtcctatgtgtgatctgctgtggtcagacccacagccacagaatggcagaagtatctctaaacggggagtgagctgccaattcggcccagacgtaactaaagccttccttgaggaaaacaacctggattacattattagatcccatgaagtgaaagctgagggctacgaagtggcccacgggggtcggtgtgtaaccgtgttttcagcacccaattactgtgaccaaatgggcaataaagcctcctatatccacctccaaggctcagacctgagaccacagtttcatcaatttaccgccgtgccacaccctaacgtgaagcccatggcctacgcaaatacccttctacagcttggtatgatgtag

SEQ ID NO: 236992 - DNA, 1500 bp, synthetic construct
  misc_feature 1..1500: note = Description of Artificial Sequence: Synthetic coding sequence
  source 1..1500: mol_type = other DNA
atggccatggccgagggagagagaaccgagtgtgctgaaccccctcgcgatgagccaccggcagacggcgctctcaagcgggcagaggagctgaaaactcaggcaaatgactatttcaaagctaaagactacgaaaacgccattaagttctatagccaggcaattgagttgaacccttcgaacgcaatatattatggcaacaggtcccttgcttacttacggaccgagtgttatggttatgcactaggggatgccacacgggctatcgagctggataagaagtacataaagggctattaccgacgagcggcttcaaatatggcactgggtaagttccgcgctgccctgcgggattacgagacggttgtgaaggtcaagccccacgacaaagacgctaaaatgaagtaccaggagtgcaacaagatagtcaaacagaaggcctttgaacgtgcaatcgctggtgatgagcataagcgtagtgtggtggactcattagacattgaatctatgaccatcgaagatgagtattcaggacctaagcttgaagacgggaaggtgacaatcagcttcatgaaggaactgatgcagtggtacaaagaccaaaagaagctgcacagaaagtgtgcataccagattctggtgcaggtaaaggaggttttatctaagctgtcaacattggtggaaaccaccctgaaagagacagaaaaaatcacagtctgtggcgacacccacggccaattttacgacctcctcaacatcttcgagctcaacggccttccctctgagacaaacccctacatcttcaacggcgattttgtcgaccgcggatctttctctgtcgaagtgatcctgacattgtttgggttcaagctgttataccctgatcacttccacctgctgagaggtaaccacgagacagacaacatgaaccagatctacggctttgagggtgaagtcaaggccaaatacaccgctcaaatgtacgaacttttctcagaagtgtttgagtggctgcccctggcccagtgtatcaacggcaaggtcctcattatgcacggaggcctgttttctgaggatggtgtgactcttgatgacattaggaaaattgagcgtaaccgccagccccctgactctggcccaatgtgtgaccttctgtggagtgacccacagccacagaacggccgatctatctctaagcgcggagtcagttgccaattcggcccagacgttacaaaggcttttctcgaagaaaacaaccttgactatattatcagatcccacgaggtcaaagctgaggggtacgaggtggcccatggtggtcggtgcgtgacagtatttagtgccccaaattactgtgatcaaatgggaaataaagcttcctatatccatttacagggatctgacctgcgaccacagtttcaccagtttacagccgtgcctcacccaaatgtcaagccaatggcatatgcgaataccctcctgcagctgggcatgatgtag

SEQ ID NO: 236993 - DNA, 1461 bp, synthetic construct
  misc_feature 1..1461: note = Description of Artificial Sequence: Synthetic coding sequence
  source 1..1461: mol_type = other DNA
atggcgatggccgaaggagaacgaacggagtgtgctgagcctccacgagacgaaccccctgccgacggggctcttaagagagcagaagaactgaagacacaagctaacgactattttaaagccaaggattatgagaatgctatcaagttttactcacaagccattgaactcaatccctccaacgcgatctactatggttacgcgctcggggacgcaacaagggcaattgagttggacaagaaatatatcaagggatactacaggcgagcagcaagcaacatggcgttgggcaaattccgggctgctctgagggattacgagacagtggtcaaagtgaaaccccacgataaggacgcaaagatgaagtaccaagagtgcaacaaaatcgtgaagcagaaggcttttgagcgtgcaatcgcaggcgatgaacacaagaggagcgttgttgacagcctggacatagagtctatgacgatcgaagacgaatatagcggacccaaacttgaggatgggaaagtgaccatctctttcatgaaagagttaatgcagtggtataaggaccagaaaaagctgcacagaaagtgcgcctaccagattctggtacaggtcaaggaagttctctcaaaactgtctaccctggtcgaaaccacactcaaggagaccgagaagatcactgtttgtggcgatacccacggtcaattctatgacttgctgaatatttttgagctcaacgggctcccttctgaaaccaacccttatatttttaatggggactttgtagatcggggaagtttttccgtggaggttattcttactctcttcggcttcaaactactgtacccagaccactttcatctccttcgagggaatcacgagactgacaatatgaaccagatatatggctttgaaggagaagtcaaggcgaaatataccgcccagatgtacgagctgttctctgaggtgtttgagtggttgcctctggcccaatgtataaatgggaaggttcttataatgcacggtgggctgttctctgaggatggagtaaccttagatgacatcagaaagatcgaaagaaacaggcagccccctgactctggtccaatgtgcgacctgctgtggtcagatccacagccccagaatggccgttcaatctccaagcggggagtcagctgccagtttgggccagacgtgacaaaggctttcctggaagagaacaatctggattatatcatccgtagccatgaagtaaaggccgagggttacgaggtggcccacgggggacggtgtgtgacagtgtttagtgctcccaattactgcgaccagatggggaataaagcctcgtatattcacctccaggggtcagacttgcggcctcagttccaccagttcactgccgtgccgcatcctaacgtgaaacccatggcttatgctaatacacttcttcaactcggcatgatgtag

SEQ ID NO: 236994 - DNA, 1458 bp, synthetic construct
  misc_feature 1..1458: note = Description of Artificial Sequence: Synthetic coding sequence
  source 1..1458: mol_type = other DNA
tagatggcagaaggcgagagaaccgaatgcgctgagcccccaagagatgagccacctgccgacggggctctgaaacgcgctgaagaactgaaaactcaggccaacgattacttcaaagcaaaggactatgagaatgcaatcaagttctactcccaggcgatcgaactgaacccatccaatgccatctattacggaaatagatcacttgcttacctgcgtaccgaatgttacggatatgccctcggggatgctactcgcgctatagagctcgacaagaagtacatcaaggggtattatagaagagctgcctccaacatggcgcttggtaagttcagagctgctttacgcgattatgaaaccgttgtgaaggtaaagccacacgataaggatgcaaagatgaaataccaagaatgtaacaagatagtgaagcaaaaagcctttgagcgggcaatagctggagatgaacataagcgctcagtggtcgacagcctggatatagaatctatgaccattgaggatgaatactccggaccaaagctggaggacggtaaggtcaccattagctttatgaaggaactgatgcagtggtacaaagaccagaaaaagctacacaggaagtgcgcctaccagatattggttcaggtgaaggaggtcctgagcaagctgtctaccttggtggagaccacattgaaggagaccgagaagatcacggtctgcggggacacacatggacaattctatgacctacttaatatcttcgagctaaatgggctgcccagcgagaccaacccttacatcttcaatggggattttgtggaccgtggtagcttctccgtggaggttatcctcactctgttcggctttaagcttctctaccctgaccattttcacctcctgcggggaaaccacgagaccgacaatatgaaccagatttacggctttgagggagaggtcaaagccaaatacactgcccaaatgtacgaactgtttagcgaggtttttgaatggttgccactggcccaatgtatcaatggaaaggttctgatcatgcatggaggtctgttcagtgaagatggagtcactctggatgacatccgaaagattgagcggaatagacagccacccgactcaggcccaatgtgcgacctgctgtggtccgatcctcagccccagaatggtcgatctatctcaaagcgcggagtttcttgccaattcggaccagacgttacaaaagcctttttggaggaaaacaatttagactatatcatcaggagccatgaagttaaagccgaggggtacgaggtcgcccacggcggtagatgtgtgactgtgttctcggccccaaactactgcgatcagatgggtaacaaagccagctacattcacttgcagggtagcgatctccgcccacaatttcaccagttcaccgctgttggccgaccctcctcgggttcttag

SEQ ID NO: 236995 - DNA, 477 bp, synthetic construct
  misc_feature 1..477: note = Description of Artificial Sequence: Synthetic coding sequence
  source 1..477: mol_type = other DNA
atgttgactgtggctgcactgattgacgagcagattctgtgcgtgcacggcggactgagtcctgacatcaagacattggatcagatccgtacaattgaacggaatcaggaaatcccacacaagggcgctttctgcgatttggtgtggagtgaccccgaggatgtggatacctgggcaattagccctcggggagccggatggttatttggtgctaaggtgacaaatgaatttgtgcacatcaacaacctaaaattgatctgccgggctcaccagttggtgcacgaagggtacaagtttatgtttgatgagaaacttgtgacggtctggagcgctcccaactattgctacagatgtgggaatatcgcgtctatcatggtattcaaggatgtcaacaccagagaacccaaattatttcgggcagtgccagactcggaacgggttatccctcctcgtaccacaacaccctacttcctgtag

SEQ ID NO: 236996 - DNA, 918 bp, synthetic construct
  misc_feature 1..918: note = Description of Artificial Sequence: Synthetic coding sequence
  source 1..918: mol_type = other DNA
atggccccactggacctggacaagtacgtggagatcgcacgtctttgtaagtatctgccggaaaatgacctgaagcgtctatgtgactatgtgtgcgatctgttattagaagagagtaacgtgcaacctgtgtccactcccgttacagtgtgtggggacattcacggacagttttacgatctgtgcgagcttttcagaacagggggacaggtgcctgacaccaattacattttcatgggtgacttcgttgatcgcggatattactctctggagacatttacctacctcttagccctcaaggccaagtggccagataggattacattactaaggggtaaccatgagagcaggcagatcacccaggtctacggattctatgatgagtgccagaccaaatacgggaatgccaacgcatggcggtattgtactaaggtgtttgatatgctcacagtcgcagctcttattgacgagcagattctctgtgtgcacggcggactttcacctgacatcaagactcttgaccaaatcaggacgatagaacggaaccaggagattccccacaagggtgctttttgcgatctcgtgtggtcagacccggaggatgtggacacctgggcaatctcaccccgaggcgcaggctggctgttcggcgcaaaagttaccaacgaatttgtacacattaataacctgaaactaatctgtcgcgcacaccagctcgtgcacgagggttacaaatttatgtttgatgagaagctggtgaccgtctggtccgcccctaactattgctatagatgcggaaatatcgcttcaattatggtgtttaaggatgtcaacacccgagagccaaaactgttcagggctgttcccgatagcgaacgagtgatcccccctagaaccacaaccccctactttctctag

SEQ ID NO: 236997 - DNA, 852 bp, synthetic construct
  misc_feature 1..852: note = Description of Artificial Sequence: Synthetic coding sequence
  source 1..852: mol_type = other DNA
atggctccactggacctggataagtacgttgaaatagccaggctgtgtaaatacctgccagagaatgaccttaagcgcctgtgtgactatgtgtgcgatctcctcctggaggaaagtaatgtgcaacctgtctccaccccagtaacagtatgcggagacatccatgggcagggcgactttgttgaccggggttactatagcctggaaactttcacgtacctgttggccttgaaggccaagtggcccgaccgtattacactgctgagaggaaatcacgaaagtaggcagattactcaagtgtatgggttttatgatgagtgccagacaaagtacggcaacgctaatgcctggcgctactgcaccaaggtatttgacatgctgaccgtggccgcacttattgacgaacaaattctgtgcgtgcatggcggactgtcccctgatattaagacactggaccaaattcggaccatcgagagaaatcaggaaattcctcataagggcgctttctgcgatctcgtctggagcgatccagaggatgtcgacacatgggccataagccccagaggcgcaggatggctgtttggggcaaaagttacgaatgagtttgttcacattaataatctaaagctgatctgtcgggctcaccagctggtgcacgaaggctataagttcatgttcgatgagaagttggtgaccgtgtggtctgcaccaaactactgctatcggtgcggcaatattgccagcatcatggttttcaaggacgtcaacactagggagccgaagctgttcagggccgtgccagattccgaaagagtcattcccccacggaccactaccccttatttcttgtag

SEQ ID NO: 236998 - DNA, 1029 bp, synthetic construct
  misc_feature 1..1029: note = Description of Artificial Sequence: Synthetic coding sequence
  source 1..1029: mol_type = other DNA
atggccccactggatctcgacaagtacgtggagatcgctagactctgtaagtacctacctgagaatgacctaaaagttagcccaatctgcggccttgctcccagtgggtgcggggctccggcaggtcgcccttttctgagtcccggtccccctcctgtgttccacttccttcggttccttaaggaaagactgtgcgattacgtctgtgaccttttgttggaggaatccaatgtccaaccagtctccacacccgtcacagtgtgtggcgacattcacgggcaattttacgacctttgtgagctctttagaaccggcggtcaagtgcctgacaccaactacatctttatgggcgatttcgtggacagaggttattactcattagaaacattcacgtacctcttggcactcaaagcaaaatggcctgacaggataaccctactccgagggaaccatgagtccagacagataacacaagtgtacggtttctacgacgagtgtcagaccaaatacggtaacgccaatgcctggagatattgcacgaaggtctttgacatgctgaccgttgcagccctgattgatgaacagatcttgtgcgtccatggcggactcagccctgatatcaagacgctggatcaaattcgtacaatagaacgtaaccaggaaataccccataaaggggctttctgcgacttggtgtggtcggaccccgaagacgtggacacatgggcaataagtcctaggggcgcaggatggctttttggtgcaaaagttacgaacgagttcgttcacatcaacaacctgaagctcatatgccgcgcacatcagctggtccacgagggatataagttcatgtttgacgagaagcttgttacggtctggtcagcaccgaactattgttaccgctgcggcaacatcgcctccattatggtatttaaagatgtgaatacaagggagccaaagctgttcagggctgtgcctgactctgagcgcgtcattccgcctcgcacaacgaccccctacttcctctag

SEQ ID NO: 236999 - DNA, 378 bp, synthetic construct
  misc_feature 1..378: note = Description of Artificial Sequence: Synthetic coding sequence
  source 1..378: mol_type = other DNA
atgttcctgttgcctcgtctccagctactaggtcagatgcgcttatgtgactacgtttgtgacctgttgctggaggagtcaaatgtgcaacctgtctccactcctgttacagtttgcggagacatccacgggcagttttacgatttgtgtgaattgttccggaccggcggtcaggttccagatacaaactatatttttatgggagactttgttgaccgcggatactactccctggagacctttacatacctgctggccttgaaagcaaaatggcccgacagaataacactcctgcgcggtaatcacgagtcccgccagattactcaagtgtacgggttttatgacgagtgccagactaaatacggcaacgccaattag

SEQ ID NO: 237000 - DNA, 1161 bp, synthetic construct
  misc_feature 1..1161: note = Description of Artificial Sequence: Synthetic coding sequence
  source 1..1161: mol_type = other DNA
atgagcgccttggagaaatccatgcacctcggaaggctgcctagtcggccacctttacctggatctggaggatctcagagcggagccaagatgcgtatggggcctggcaggaaacgtgactttagccctgtcccatggtcgcagtatttcgagtccatggaggatgtcgaggtggagaacgaaacaggcaaagacacatttagggtgtataaaagcggctctgagggcccagttcttttgctgcttcacgggggaggccactccgcactgtcctgggcggtgttcacagcggcaatcattagccgtgtgcagtgcaggatagtcgcattagacctccgctcccatggggagacaaaggtcaaaaatccagaggacctgtccgccgaaacaatggcgaaggatgtggggaatgtggtggaagccatgtatggggacctcccaccaccaataatgcttattggacactccatggggggagcgatcgccgtgcatactgcctcatccaatcttgtgcccagcctgctgggcctgtgtatgattgatgtggtagagggcacagcaatggacgccctgaactcaatgcaaaatttcttgaggggcaggccaaaaactttcaaatccttggagaatgccattgagtggtccgtgaaaagcggacaaattcgcaacctggaatccgcgagggtgtcaatggtcggccaggtcaaacagtgcgaagggattacatcccctgagggcagcaagagtattgttgagggcatcattgaagaggaggaggaggacgaagaaggatctgagagcattagtaagaggaaaaaagaagacgatatggagacaaaaaaggaccacccctacacatggagaattgagctggcaaagactgagaaatattgggatggatggttccgtggcctgtcaaatctgttcctttcgtgccctatcccaaagttgctcttactcgccggagtggaccgccttgataaggatctaaccatcggacagatgcagggcaaattccagatgcaagttttaccccaatgtggccacgccgtgcacgaggacgcaccagacaaagtcgctgaggccgtcgctaccttcctcattcggcatcggttcgccgagcctataggcggattccaatgtgtgttcccaggctgctag

SEQ ID NO: 237001 - DNA, 600 bp, synthetic construct
  misc_feature 1..600: note = Description of Artificial Sequence: Synthetic coding sequence
  source 1..600: mol_type = other DNA
atggatgctctgaacagcatgcagaacttccttagagggcgacctaagaccttcaaaagccttgagaatgccatagagtggtcagtgaaatcggggcagatcaggaacctggagagtgcacgggtgtcaatggtgggacaggtgaaacagtgcgagggaatcacgagtcctgaagggagcaagtcaatcgtggagggaattatcgaagaggaggaggaagacgaggaaggcagtgaatcaatcagtaaaagaaagaaagaggacgacatggaaactaagaaggatcacccctatacatggagaatcgaactcgcaaaaacggagaagtattgggacggctggttccggggattgtctaatctctttctcagttgtcccattcctaaactcttgctgctggcgggtgtggacagactggataaagatctgacgattggacagatgcagggcaagttccagatgcaagtgctccctcagtgcggacacgccgtccatgaggatgcaccagacaaagtggccgaggcagtggcaaccttccttattcgacatagatttgccgaacctatcggcggattccagtgcgtttttcctggatgctag

SEQ ID NO: 237002 - DNA, 1203 bp, synthetic construct
  misc_feature 1..1203: note = Description of Artificial Sequence: Synthetic coding sequence
  source 1..1203: mol_type = other DNA
atgagcgccttagagaagtcgatgcacctgggacggttgccgtctagaccaccgttaccgggtagtggcggaagccagtctggcgctaagatgagaatggggcctgggcgaaagcgggacttttctcccgtgccatggtcgcagtatttcgagtccatggaggacgtcgaagtggagaatgagacagggaaggacactttccgcgtttacaagtcaggctcagaagggccagtgctcctattgttgcatggtggaggccatagtgccctttcatgggcagtatttaccgccgcaatcattagtagggtgcagtgccgcatagttgccctcgacctccggtcccacggcgaaactaaagttaagaatccggaggatctgagcgctgaaaccatggccaaagatgttggcaacgtcgtggaggcaatgtacggggacctgccgccacctattatgctgataggacattcaatgggcggagcgattgccgttcataccgcgagcagtaatcttgttccatcactactgggactctgtatgattgatgtggtggagggcactgccatggacgcactgaacagtatgcagaattttctccgagggagacccaagacatttaagagcttagaaaacgccattgagtggagcgtcaagtccggccagataaggaacctcgaatccgctagggtgtcaatggttgggcaagtgaaacagtgtgaggggatcacctccccggagggtagtaaatccatagtcgagggtatcattgaggaggaggaagaggatgaggaagggagtgaatcgatctcgaagcggaagaaggaggacgacatggaaggcttaccctctgagacacagaatttactgctcttcctacagacaaaaaaggaccacccctatacttggcgtattgagctagcaaagactgagaaatactgggatggatggttccgcggactctctaacctgtttttgtcatgcccaatccctaaactgcttctgctggccggagttgataggctcgataaggatctcactatagggcaaatgcagggcaagttccaaatgcaggtgctgccacagtgcggccacgccgtgcatgaggacgctcctgacaaggttgctgaagctgtggccacctttttgatcaggcatcgattcgccgagcctataggtggtttccagtgcgtgtttcccggatgttag

SEQ ID NO: 237003 - DNA, 1776 bp, synthetic construct
  misc_feature 1..1776: note = Description of Artificial Sequence: Synthetic coding sequence
  source 1..1776: mol_type = other DNA
atgggatgctctagtagttccactaaaactagacgaagcgataccagcctccgggcagccctcattattcaaaattggtatcgcggttacaaggcgagattgaaagccaggcagcattatgccctaactatttttcagagcatagagtacgctgatgaacagggccagatgcagctctccaccttcttttctttcatgcttgaaaattacacccacatccacaaagaagaactagaactccgtaaccaaagccttgagagcgagcaagacatgcgcgacagatgggattacgtagactctattgacgtacctgattcatataatgggccacgcctgcaattccccctgacctgtacagatatcgatttactacttgaggcctttaaagagcagcaaatcctgcatgcccattacgttctggaagtgctgtttgagaccaaaaaggttttgaaacagatgcctaactttacacacattcagacctccccatcgaaagaagtaactatctgtggggacctgcacggaaaactggatgatctgttcctaattttctacaagaacggcctgcctagtgaacggaatccctacgttttcaacggagacttcgtggacagaggcaaaaattcgattgagatccttatgatcctgtgtgtctcattcctggtctaccctaatgacctgcacctgaaccggggaaaccatgaagatttcatgatgaaccttagatatggattcactaaggagattctgcacaaatacaaactccatggaaaacgcatcctgcagatcctcgaagagttttacgcctggctcccgatcggaaccattgtcgacaacgagattttggtcatccacggagggatttccgaaactacagacttgaacctgttacaccgggtcgaacgtaataaaatgaaatctgtgctcatccctccaactgaaacaaaccgggaccatgacaccgactccaagcacaataaggtaggtgtcacattcaatgctcatggacggattaagacaaacggaagccccacagaacacctcaccgaacacgagtgggagcaggtggtgaccattttttctgcctccaactactacgaagaagggtccaacagaggcgcatatataaagctgtgttcagggacgacgcccaggttcttccagtaccaggtgactaaagccacgtgttttcagcccctgagacagagggtagacactatggaaaatagtgccatcaagattctccgagagcgcgtgatctccagaaagtccgatctgacccgcgcttttcagctacaggaccatcggaaaagcggaaaactctctgtgtcccagtgggctttttgcatggaaaacatcctaggccttaacttaccatggcgctcgctcagctcaaacctggttaacattgaccaaaatggcaatgtggaatacatgagctcttttcagaatatcagaattgagaaacccgtccaggaagcccacagcacccttgtggaaacactctatcggtatcgatcagatctggagatcatattcaacgctattgacaccgaccattcgggcttgatatcagtagaggagtttcgggctatgtggaaactgttcagcagccattataatgtccatattgacgattctcaagtgaacaagctcgccaacataatggatttgaacaaggacggatctatagacttcaatgaattcttaaaggccttttacgttgtgcacaggtatgaagacctcatgaagcccgacgttactaatcttggctag

SEQ ID NO: 237004 - DNA, 1803 bp, synthetic construct
  misc_feature 1..1803: note = Description of Artificial Sequence: Synthetic coding sequence
  source 1..1803: mol_type = other DNA
atggggtgcagcagcagcagtacaaagaccagacggtccgatacatcactgcgggcagctctgatcattcagaattggtaccgtgggtacaaagcgaggttgaaggctaggcagcactatgctctgacaatcttccagagcatcgagtacgccgatgagcagggccaaatgcagttgtccaccttcttttcatttatgctcgagaattatactcacattcataaggaggagctggaaattctgcatgcccattacgttctggaagtgctgttcgagactaagaaggtgctaaaacagatgcctaatttcactcatattcagacttctccctcaaaggaagtcaccatatgcggtgatttacacggtaagctggacgatttgttcctgatcttttacaaaaacggactgcccagcgagaggaacccttacgtatttaacggagattttgtagataggggcaagaattctattgagatcttaatgatcctgtgtgtctcatttctggtttatcccaatgacctacatctgaatcgtggaaaccacgaggattttatgatgaacctccgttacggatttactaaggaaatcctccataaatacaagctccacgggaagcgtattctccagatactcgaggagttctatgcatggctgcccatcggtacaatcgtggacaacgaaatcctggtcattcatggtggcatttctgagacaactgatcttaatctgctacatcgtgtggaacgcaacaagatgaagagtgtactgatcccccctactgagaccaaccgcgaccacgacacagatagcaagcacaacaaggtaggcgtgaccttcaacgcgcacggcagaattaaaacaaatgggtctcctaccgagcacctcaccgagcacgagtgggaacagatcatcgatattctgtggagcgatccccgagggaaaaatgggtgctttccaaacacctgtcgaggagggggatgctactttggcccagacgtgacatcgaagatcctcaataagtatcagctgaagatgctcatccggtcgcatgagtgtaaacctgaaggttacgagatatgtcacgatgggaaagtggtgaccatatttagcgcttcgaattactatgaagagggctccaaccgcggtgcatatatcaaactgtgctcaggcacaacacccagattttttcagtaccaagtgacaaaggcaacatgcttccagccactccgacagcgcgtggatacaatggagaattcagccataaagatcctgagggagagggtcatttcccgcaagtctgacctcacaagggcgttccagttgcaagaccataggaaatcgggaaaactaagtgtcagtcagtgggctttctgcatggagaacatcctagggttgaacctgccttggcgtagcctctcttccaaccttgtcaacatagatcaaaatggcaacgttgagtacatgtcctccttccagaatattaggatagagaagccagtccaggaagcccactctactctggtggaaaccctgtacagatatagatcggatttagagattatatttaacgccatcgataccgatcatagtgggttgatatctgtcgaagaatttcgcgcaatgtggaagctcttctcctctcattacaatgtgcatatagatgactcacaggtgaataagctagccaacataatggacctgaacaaggatgggagcatcgactttaatgagttccttaaggcattttacgtggtgcatcgctacgaggatctgatgaaaccagatgtgactaaccttggctag

SEQ ID NO: 237005 - DNA, 1962 bp, synthetic construct
  misc_feature 1..1962: note = Description of Artificial Sequence: Synthetic coding sequence
  source 1..1962: mol_type = other DNA
atgggctgtagctcttcgagtaccaaaacccggaggtccgatacctccttgagagcagccctcataatccagaattggtaccgtgggtataaggctaggctgaaggctcggcaacactatgccctgacaatcttccagagtattgaatacgccgatgagcaggggcagatgcagctgtcgacgttcttttcgttcatgctggagaattatacccatattcataaggaagaactggagctgaggaaccagagcctcgaaagtgaacaagacatgcgtgacaggtgggattatgtggattctatcgacgtccccgacagctacaacggtccacgactgcagtttcctcttacctgtaccgacattgacctcctgctggaagccttcaaggaacagcagattctgcacgcccactacgtgctcgaggtgctgtttgaaacaaaaaaagtgctgaagcagatgcccaatttcacccacatccagactagcccatctaaagaagtgactatttgcggtgatctgcacggcaagcttgatgatcttttcctaatattctataaaaacgggctgccaagtgaacgaaacccttacgtattcaacggggactttgttgatcgcggaaagaatagtatcgaaattctgatgatcctgtgtgttagtttcctcgtgtaccctaacgacctgcacctgaatcgcggaaaccacgaagacttcatgatgaacctgaggtacggatttactaaggaaattttgcataagtataaactgcatggaaagagaatactgcaaattctcgaggagttttatgcctggctgccaatcggaaccatagtggataacgagatcctggtgattcacggaggtatctcagagacaacggatttgaaccttctgcatagggttgaaagaaacaaaatgaaatccgtccttattccacctacggagaccaatagggaccatgacacagatagcaaacataacaaggtgggtgttacctttaacgctcacgggaggatcaaaactaatggcagccctactgagcacctcaccgagcatgagtgggaacagattattgatattctgtggtcagatcctaggggcaaaaacggctgctttccaaatacatgtcggggaggcggatgctacttcgggcctgacgttactagcaagattttaaataaatatcaactgaagatgctgatccgcagccacgaatgtaaacctgaaggatacgaaatctgccacgatgggaaggtggtgaccatcttctccgcctcaaactattacgaagaggggtctaataggggtgcctacattaaattgtgctccggaactacgccccgtttcttccagtatcaggtcacgaaagccacgtgttttcagcctctccggcagagagtggacacaatggagaattctgccatcaagatactccgagagcgggtgattagccgcaaatcagacttgacacgagctttccagctacaggaccaccgtaagtctggaaagctcagcgtgagccagtgggcattttgcatggagaacattctggggttgaacttgccatggcgctctctgagcagcaatctggtcaacatcgaccagaatgggaatgtcgagtacatgagctcatttcagaacatccgtatcgagaagcccgtgcaggaggcacatagtacccttgtcgagacattatatcggtacagaagcgatctcgaaatcatctttaacgcaatcgatacagaccattccggactaatctccgtggaggagtttagagctatgtggaagctattttcatcccattacaacgttcacattgatgattctcaggttaataagctggctaacattatggatctcaataaagacgggtccattgacttcaacgagttcctgaaggctttttatgtggtgcaccgctatgaagatttaatgaagcccgatgtgaccaacctcggctag

SEQ ID NO: 237006 - DNA, 1131 bp, synthetic construct
  misc_feature 1..1131: note = Description of Artificial Sequence: Synthetic coding sequence
  source 1..1131: mol_type = other DNA
atgggatgcagttcgagttctacaaagaccaggaggtcagacacttccttgcgcgctgctctcataatccagaattggtacaggggatataaggcacgccttaaggctcggcagcactacgcccttacaatcttccaatcgatcgagtatgccgacgagcagggccagatgcaattgtccacattcttctccttcatgctcgagaattacacgcatatacacaaagaggaacttgagttgcgcaatcaaagtctcgagtccgagcaagacatgagggataggtgggattacgttgacagcatcgacgtcccggacagctacaatggtcctaggctgcagttccctctaacctgcacagacatagacttgcttctcgaagcatttaaggagcagcagattctgcatgcgcattacgtcctggaggtactgtttgaaacaaagaaggttctgaaacaaatgcctaacttcacacacattcaaaccagcccaagtaaagaagtgactatctgtggcgacctccatggaaaattggacgatttatttctgattttctataagaatggtttacccagcgaaaggaacccttatgtcttcaacggggacttcgtcgatagaggcaaaaacagcatcgagatcctgatgattttgtgtgtaagctttttggtctatcctaacgacttgcacctgaaccgtgggaaccacgaggattttatgatgaatttgcggtatggcttcactaaagagattcttcacaagtataagctgcacgggaagagaattctccaaatcctggaggaattctacgcctggctccccattggaacaattgtagacaacgagattttggttattcatggaggaattagcgaaaccactgacctaaacctgcttcaccgagtggagagaaataaaatgaaatccgtcttgattccaccaactgagaccaatcgggaccacgacacggattctaagcacaacaaagtgggagtcaccttcaacgcgcacgggagaattaagactaacggttctcctacagagcatctgacagagcatgagtgggaacagagtgggtattatggtaaacaaagacaccaggacatcaagcgcgagtccgacttcacaaagaagtag

SEQ ID NO: 237007 - DNA, 1767 bp, synthetic construct
  misc_feature 1..1767: note = Description of Artificial Sequence: Synthetic coding sequence
  source 1..1767: mol_type = other DNA
atgctcgagaactacacgcacatacacaaggaggaactagagcttcggaaccagagccttgaaagtgagcaagacatgcgtgatcgctgggattacgtggacagcattgacgtcccagactcatacaacggccctcgcctgcagtttcctctgacttgtaccgacatagatttgttgttggaggcgttcaaagagcagcagatcttgcacgcacattatgttctggaggtgctttttgaaacaaaaaaggtcttgaagcagatgccaaacttcacccatatacagacaagccctagcaaggaggtgaccatttgtggagatctacacggcaagttagacgacttgttcctgattttctacaaaaacggattgccttccgagcgcaacccgtacgtctttaatggcgacttcgtggacaggggaaagaattcgatcgagattctgatgatcctgtgtgtgagttttctggtatatcctaacgatctccatttgaatagaggaaaccacgaagactttatgatgaatttgcgctacggctttactaaagaaatactgcacaaatacaaactgcatgggaaacgcattctacagatcttggaggagttctacgcgtggctgcccattggcaccatcgtggacaacgagatactggtgatacacggaggaattagtgagacgacagacctgaatctccttcaccgcgttgaaagaaataaaatgaaatcagtgctgattcctccaacagagacaaatcgcgaccatgataccgacagtaagcacaacaaggtgggcgtaacctttaacgcccacggacgcatcaagacaaatggatccccgactgagcacctcaccgagcatgagtgggaacaaataattgatatcctctggagcgatccacgtggcaagaatggatgttttccaaatacatgcagggggggtggctgttactttggccctgacgttacttccaagatccttaataaatatcagcttaaaatgctgatccgaagccatgagtgcaaacctgaagggtatgagatttgccatgatgggaaagtcgtgaccatattttctgccagcaactattatgaagagggctccaacagaggggcttacattaagctgtgctctgggacaaccccacgcttttttcaataccaggtaaccaaggccacctgctttcagcctctgcgacagagggttgataccatggagaactccgcgattaagattctcagggaacgggtgatttcacgtaagtccgatctcacaagagcattccagctccaggaccatcgcaagagcggaaaattgtctgttagccagtgggctttctgtatggaaaatatccttggcttaaacctgccgtggagatcattgtcttcaaaccttgtcaacattgaccagaatggaaatgtcgagtacatgagttcctttcagaatattagaatcgagaagccggtacaggaagcacactctacacttgtggagaccctttatcgttatcgaagtgatctcgagatcatctttaacgcgatcgatacagatcacagcggtctcatttctgtcgaggagtttagggccatgtggaaactgtttagctcgcattataatgtgcatattgatgatagtcaagttaataaactggccaacatcatggatttaaacaaggatggcagcatcgatttcaacgagttcctgaaggccttttatgtcgttcaccgttatgaggatttaatgaaaccagatgtcacaaacctgggttag

SEQ ID NO: 237008 - DNA, 2262 bp, synthetic construct
  misc_feature 1..2262: note = Description of Artificial Sequence: Synthetic coding sequence
  source 1..2262: mol_type = other DNA
atgggcagcgggacctctactcaacaccacttcgctttccagaacgccgagcgggctttcaaagccgctgcgctgatccagcgttggtacagacggtacgtggcgaggctggaaatgagacgcaggtgcacatggtcaatttttcaaagcattgaatatgcagggcagcaagatcaggttaagctgcacgacttcttctcctacctgatggatcattttattccctctagccataacgaccgagacttcctgacccgcatcttcactgaggacagatttgcccaggatagcgagatgaaaaagtgcagtgattacgagagtatcgaggtgccggactcatataccggtcctcgcctctcctttccactgcttcccgatcatgctaccgctctggtggaagccttcagattgaagcaacaactacatgctcggtacgttcttaacctgctatacgaaactaaaaaacacttggttcagctccccaacattaatcgggtttccacgtgctacagcgaggagattacagtttgtggggacctccatggacagctggatgatctgatcttcattttttataagaacggcctcccttctcccgagcgaagttacgtattcaacggcgattttgtcgatcggggaaaggacagcgtcgaaatcctgatgatcctctttgcctttatgctagtttatccaaaagagttccaccttaaccgaggaaatcatgaagatcacatggtcaatcttcgttacggctttacaaaagaagtcatgaacaaatacaaggttcatggaaaagaaattctgcgcaccctccaagatgttttctgctggctgcccctggctacactgattgatgaaaaggtcttaatcttgcatgggggtgtgtcagacattactgatctcgagctcttggacaagatcgagcggtctaagattgtgtccacgatgagatgtaaaacccgccagaaatccgaaaagcagatggaagagaaaagacgcgcaaatcagaagtccagcgcacaggggcctatcccctggttcttgcccgaaagtcggagtctaccctcctcgccgctcagactgggatcctataaggcccagaagactagtcgttcgtccagcataccttgtagcggctcactggacggacgcgagttatcgcggcaagtgcgtagtagcgttgaacttgaactagagcggtgccggcagcaggctggactgttagtgacgggggaaaaggaggaacccagtcgtagcgctagtgaggcagatagcgaggccggagaattgcgcaagcctactcaggaagagtggcgacaggtcgtggatattttgtggtccgatcccatggcccaggaagggtgtaaagccaataccatccgcggaggaggatgctattttggccctgacgtgactcagcagttgttgcagaagtacaacatgcaatttcttatccggtcccatgagtgcaagcccgagggatacgaattctgccacaacaggaaggttttaacgattttcagtgcctccaactattatgaggtaggcagcaatcggggagcatatgtgaaactaggtccagccttgactccccacattgtgcagtaccaggcgaacaaggttacacacactcttaccatgcgccagagaatcagtcgggtcgaggagtctgctcttcgagccctgagggagaagctgttcgctcatagctcagatttgctttctgagttcaaaaagcacgatgcggataaggtgggattgattactctttctgattgggcggcagctgtcgaatctgtcctgcaccttgggctgccgtggcgcatgttacgaccacagctggtgaacagtagcgcagacaatatgcttgagtataagtcttggctgaagaacttggcaaaggagcagctttcccgagagaacatacagagctcgctgctggaaacactttatcgcaacagatctaatctagaaactatatttcgaatcattgacagcgaccactccgggttcatatcgctggatgagttccggcaaacatggaagcttttctcctcccatatgaacatagacattactgatgactgcatctgcgacttggcccgttcaatcgacttcaacaaagatgggcacatcgatatcaacgagttcctggaagctttccgcctggttgaaaagtcctgcccagagggcgatgcatccgagtgtccccaggcgactaatgctaaagatagtggctgttcaagccctggcgctcactag

SEQ ID NO: 237009 - DNA, 1797 bp, synthetic construct
  misc_feature 1..1797: note = Description of Artificial Sequence: Synthetic coding sequence
  source 1..1797: mol_type = other DNA
atggggtctggaaccagcactcaacatcacttcgcatttcagaacgcagagagagctttcaaggccgctgcactcattcagcgctggtaccgccgttacgtcgctcgcctagaaatgcgtaggcgatgtacctggagcatttttcagtccatagagtacgccggtcaacaagatcaagtgaaacttcacgacttcttctcctacttgatggatcattttatccccagtagtcacaatgaccgcgacttcctaaccaggatcttcactgaggaccggttcgcccaagactctgaaatgaaaaaatgtagcgactacgaatctatcgaggtgccggatagctacacgggtccccgtctctctttcccactcctaccagatcacgccactgctctggtagaggcttttcgtctcaaacagcagcttcatgctcggtacgttctcaacctgctctacgagaccaagaaacacttggtgcagctgcctaatattaaccgggtctccacctgctattcagaagagataactgtctgcggagatttacatggccaattagatgatcttatctttatcttctataaaaacggactcccctcgccagagcgatcctacgtcttcaacggcgatttcgtggaccggggaaaggattctgtggaaatattgatgattctcttcgcctttatgctggtgtatcctaaggaatttcatctgaatcggggaaaccatgaagaccatatggtgaatttgcggtatggattcacaaaggaggtgatgaataagtacaaagtacacggaaaagagatattaaggacgttacaagatgtcttctgctggctgccattagccactctcatcgatgagaaagtgctaattctgcacgggggtgtgtcagacatcaccgatcttgaactgctggacaagatcgagagatctaagattgtaagcaccatgcgctgcaaaacccggcagaaatccgagaagcagatggaagagaagaggagggcaaaccagaaatcaagtgctcagggacccatcccttggtttctgcctgaatcacggtctcttccttcttcacccctccgtttaggcagctacaaggcccaaaagaccagccggagctcatctattccttgttctggaagcctggacggtagagagctttcaaggcaggtgagaagcagcgtcgaactagagctcgagagatgccgccagcaggcaggcctcctcgtgactggggaaaaggaagagccatccagaagtgcttcggaggcggactccgaggcaggcgagctacgtaagcctacccaagaggaatggaggcaagtggtggatatcctgtggagcgatccaatggcacaggaggggtgcaaggcgaacacgattcgcggaggagggtgctactttggccctgatgtgactcagcaactgctgcagaagtataacatgcagtttctgatcagatcccacgagtgtaaacccgaagggtatgagttctgccataatcggaaggtattgactattttcagtgcttcaaattactacgaggtggggagcaaccggggagcctatgtgaagttggggccagcccttacaccccacatcgtccagtatcaggctaataaggtgacccacacactcaccatgcggcagcggatcagccgcgtcgaagagtccgctctgcgtgcactgagagaaaaacttttcgcccattcaagtgatttgctgagcgaatttaagaagcacgacgccgacaaggtcggcctcgcatcgtcccaattgtgttactaccagcaaaaatag

SEQ ID NO: 237010 - DNA, 1440 bp, synthetic construct
  misc_feature 1..1440: note = Description of Artificial Sequence: Synthetic coding sequence
  source 1..1440: mol_type = other DNA
atgggtgcatttcttgacaagccaaagaccgagaaacacaatgcacacggggcaggcaacggtctgcggtacggcctgtctagcatgcaggggtggcgagtcgaaatggaggacgcgcacacagccgtggtcggaattccacatggactagaagattggtctttttttgcagtgtatgacggccacgcaggcagccgggtggccaattactgttccacacatttgctggagcacattaccaccaatgaggactttagagcggcaggaaagtctggttccgcactggagttgtctgttgagaacgtcaagaacggtataaggacagggttcctcaagatcgatgagtacatgcggaatttctctgatctcagaaacggtatggaccgatccgggtccaccgccgtaggtgtgatgataagccccaagcacatatattttatcaattgcggtgactcccgcgctgtattgtacagaaacgggcaggtgtgctttagcacccaggatcacaaaccttgtaacccacgggaaaaggagcgcattcagaacgccggaggcagcgttatgatccaaagagttaatggtagtctggcagtgtcccgggctttaggcgattacgattataagtgtgttgatggcaaagggcctaccgagcagctagttagtccagagccggaggtgtacgagatcctacgggctgaagaagatgagttcataatactggcatgcgatgggatatgggacgtgatgagtaatgaggagctgtgcgagtatgtcaaaagtaggctggaggtgtccgacgatctggagaatgtttgtaattgggtagtggatacttgcctgcacaagggctcaagagacaacatgtccattgtgctcgtgtgcttctccaacgccccaaaggtatccgacgaggctgtaaagaaagattctgaacttgacaaacatttggaaagcagagtggaggaaattatggaaaagtcaggagaagagggaatgcctgacctggcacatgtgatgcgcatcctttctgccgagaacatcccgaatttgccaccgggaggcggattggctggcaaacgcaatgtgatagaagccgtgtattctaggttaaacccccatcgtgagtccgatggagctagtgacgaggcagaggagagtgggtcacagggcaaactcgttgaggctctgcgtcagatgcgcattaatcacaggggcaattaccggcagctgctggaggaaatgctgacaagctataggctggctaaagttgagggggaagaatcccctgccgagcccgctgccactgctacctcatctaattctgacgcaggaaatcccgttactatgcaggaatcgcataccgaatcagaaagcggccttgccgaactagatagttccaatgaagacgccggtacaaagatgtctggagagaagatatag

SEQ ID NO: 237011 - DNA, 579 bp, synthetic construct
  misc_feature 1..579: note = Description of Artificial Sequence: Synthetic coding sequence
  source 1..579: mol_type = other DNA
atgagcatcgtgttggtgtgtttcagcaatgcccctaaggtgagcgatgaggccgtaaagaaagatagcgagttggacaaacatttggaatcaagggtggaagagatcatggagaagtcaggggaggagggtatgccggacctcgctcatgtaatgaggatcctcagtgccgaaaacattcccaatctgcctcctggcggtggcttggctggcaaacggaacgtcatcgaggccgtttactcacgcctgaatccacaccgggagtccgacggcgcttctgatgaagcagaagagtcaggttctcaggggaaactcgtggaagccttaagacagatgaggatcaaccatagaggtaactatcgtcagctgctggaagaaatgctgacatcataccggctggcaaaggtggaaggggaggagagtcccgctgaacctgccgcaactgccaccagctccaatagtgacgccggaaatccagtcacaatgcaggaatctcacactgaaagtgagtcggggctagcagaactggactcttctaatgaagacgccggtacaaaaatgtcaggcgagaaaatatag

SEQ ID NO: 237012 - DNA, 1164 bp, synthetic construct
  misc_feature 1..1164: note = Description of Artificial Sequence: Synthetic coding sequence
  source 1..1164: mol_type = other DNA
atgggggctttcctggacaaacctaaaaccgagaaacataacgcacatggggctggaaacggtctgcgatatggtctgtctagcatgcagggttggcgcgtggagatggaagatgcacacaccgctgtggtgggcatccctcacgggctggaagactggagtttcttcgcggtgtatgacggtcatgcaggcagcagggtcgcgaactactgtagtacccatctgctggagcatatcaccactaacgaggactttcgcgctgctggtaagtccggaagtgccttagagttatcagttgagaacgtcaaaaacgggatccgcactggtttcttaaagatcgacgaatacatgaggaacttttcagatctacgcaatggaatggatcgatctgggtccaccgctgtcggggtgatgatcagcccaaagcacatatacttcatcaattgcggggattcacgcgcagttctttacagaaatggccaggtctgcttttcaacgcaggaccacaagccctgcaatccccgagagaaggaacgcatacagaatgcagggggtagcgtgatgattcaacgggtgaatggctctctagccgtaagcagggccttgggagattacgactataagtgtgtcgatggcaagggaccaaccgagcaactggttagcccagagcctgaagtgtacgaaattctgcgggctgaagaagatgagtttattattctcgcctgtgacggcatctgggatgtcatgagcaacgaggagctgtgcgagtatgtaaagtctcgcctcgaggtgagcgatgatctagagaatgtctgcaactgggtggtagatacttgcctgcacaaagggtcccgcgataatatgtccattgtacttgtgtgcttctccaatgcacctaaagtgagcgacgaggctgtcaagaaagactcagaactggataagcatctggaaagccgggtggaggagattatggaaaaatccggcgaggagggtatgccggatcttgcccacgtgatgcgaattctcagcgccgaaaacatccccaatctgccacctggaggcggactcgcaggaaagcggaacgtcatcgaggcagtgtacagcaggctcaaccctcatcgagaaagcgatggcggagcgggagacctggaagatccttggtag

SEQ ID NO: 237013 - DNA, 1143 bp, synthetic construct
  misc_feature 1..1143: note = Description of Artificial Sequence: Synthetic coding sequence
  source 1..1143: mol_type = other DNA
atgggtgcatttctagataagccaaaaactgagaagcacaacgcacatggagccggaaatggcctgcgctacggactgagcagcatgcagggctggcgagtagagatggaagatgcccacactgccgttgtgggaatccctcatggcctcgaggactggtccttttttgctgtctatgacgggcatgcgggatctagagtggccaactattgttctacacacctgctggaacatataaccacaaacgaggacttccgagccgcagggaaatcgggaagtgccctcgagctttctgttgaaaacgtgaagaatgggattcggaccgggttcctgaagatagatgagtacatgcggaactttagcgatctacgtaatggcatggataggagcggaagtaccgctgtaggcgtgatgattagccctaagcatatttacttcattaattgcggtgactcccgggcagttctgtacaggaacggccaggtgtgcttcagcacccaagaccataagccgtgcaacccacgggaaaaggagagaatccagaacgctggaggcagcgtgatgattcaacgagttaatggtagcctggccgtaagccgcgcactgggcgattacgactacaaatgtgttgacgggaagggtccaactgaacaattagtgtctccagaacctgaggtttacgaaattctgcgagccgaggaagatgagtttatcatactggcctgtgacgggatttgggacgtcatgagtaacgaagagctgtgtgagtatgttaagtcgaggctggaggtgagcgatgacctggagaacgtgtgcaattgggtagtagacacatgtctgcacaagggctcacgtgataatatgtcgatagttctggtttgtttcagtaacgcgcctaaagtgtctgatgaagctgttaaaaaagacagtgagctcgacaaacacctcgagtccagggtcgaagaaataatggagaagagtggggaagaggggatgcccgacctcgcccatgtgatgcgcatcctctccgccgaaaatatcccgaatctacccccagggggtgggctagccggtaaacggaacgttatcgaagctgtctactccagactgaatccacaccgggagagcgatggccagaagtag

SEQ ID NO: 237014 - DNA, 984 bp, synthetic construct
  misc_feature 1..984: note = Description of Artificial Sequence: Synthetic coding sequence
  source 1..984: mol_type = other DNA
atgggagcctttctggacaaaccaaagacagagaagcacaatgctcatggggctgggaatggcctgaggtacggtttgtcatccatgcaaggttggcgcgtagagatggaagatgcccacaccgccgtagtcggaatcccgcacggactagaggattggtcctttttcgcagtgtacgacgggcacgccggtagtagggtggccaactattgcagcacccacctcctggaacatattactacaaacgaggacttccgagctgctggaaaatcaggctcagctcttgagttgtctgttgagaatgtgaagaacggcattcgcacaggttttctcaagattgacgaatacatgcgtaatttctcggatttaagaaatgggatggaccggagtggcagtacggcagttggcgtgatgatatctccgaaacacatctactttattaattgtggggacagccgtgccgtgctgtatcggaatgggcaagtgtgtttttcaacccaggatcataagccttgcaatccaagagaaaaagaaagaattcagaacgccggaggctcagttatgatccagcgcgtcaacggttccctggcggtgagccgggctcttggggattacgactacaagtgtgttgatggtaaaggaccaactgagcagttagtctccccggagccagaggtttacgaaattctcagagcagaggaggatgaatttattattcttgcatgtgatggtatctgggacgtgatgagcaacgaagagctgtgtgagtatgttaagtcccgacttgaggtgtccgacgatctggagaatgtgtgcaactgggtcgtagacacctgtttgcacaaggggagtagggataacatgagtatagttctggtgtgtttctccaacgcccctaaggtgtcagacgaggcagttaaaaaggattctgagctagacaagcacctggagtctcgcgtggagggaaagacaaacgcgttctag

SEQ ID NO: 237015 - DNA, 1137 bp, synthetic construct
  misc_feature 1..1137: note = Description of Artificial Sequence: Synthetic coding sequence
  source 1..1137: mol_type = other DNA
atgggcgcatttctggataagcctaagacagaaaagcacaacgcccatggcgcagggaatggattacgatacggcctgtccagtatgcagggctggcgggtggagatggaggacgcgcatactgccgttgttggaataccacacggccttgaagactggagttttttcgccgtgtacgatgggcatgcagggtcacgcgtggcaaactactgctccactcatcttctcgaacacattactaccaatgaagacttccgagcagccggtaaatcgggcagtgcgctggagctgtctgtggagaatgtcaaaaacgggattagaaccggcttcctgaagattgatgagtatatgcggaacttctccgacttgaggaacggtatggatagatcagggagtaccgctgtaggagtgatgatcagcccaaagcatatctacttcataaactgtggagacagcagggccgtgctgtacagaaacggacaggtgtgcttttccacacaggaccataagccctgcaatccaagagaaaaggaacgaattcaaaacgccggaggctctgtcatgatacagagggtgaatggcagtcttgcagtttctagggcactaggcgattatgattacaagtgcgtcgatggaaaagggcctaccgagcaactggtctcccctgaacctgaagtgtatgagatattacgagctgaagaggacgagtttattattttggcctgtgatggaatttgggacgtgatgtccaatgaggaactatgcgaatacgtcaagagccgccttgaggtgtccgatgacttggagaacgtgtgcaactgggtggttgacacgtgcttgcacaagggatcccgggataatatgagcatcgtgctggtctgttttagtaatgcccctaaagtgtccgacgaggccgtgaaaaaggattccgaattagacaagcacctggaatcaagagtcgaggagataatggagaagagcggggaagagggtatgccagacctggcccatgtgatgcggatcctgtctgcggagaatatcccaaatctgcctcccggaggcggactggccggaaagcgaaacgtgattgaagctgtgtacagccgcctgaacccccaccgcgaatcagacgggtag

SEQ ID NO: 237016 - DNA, 1518 bp, synthetic construct
  misc_feature 1..1518: note = Description of Artificial Sequence: Synthetic coding sequence
  source 1..1518: mol_type = other DNA
atgctgaaccgagttcgtagtgccgtcgcacatctcgtctcatccgggggtgctccccctcctaggcctaaatcgcccgatctgcccaacgctgctagcgcacctccagccgctgcacctgaggctcctaggtcccctccggctaaagccggtagcggtagcgctacacctgctaaggctgtggaagctagagcctccttttcacgtccgacctttctccaactttctcccggaggactcaggagagcagacgaccatgctgggcgagccgtccagagcccacccgacacgggccgacggttgccctggtccaccggatacgcggaggtgatcaacgccggaaaaagtcgccacaacgaggatcaggcttgctgcgaggtggtttacgtagaaggcaggagatcagtgaccggcgtgccacgtgaacctagcaggggacagggcctgtgcttctattattggggactgttcgatggccatgctgggggtggcgctgccgagatggcctctagactgttgcatcgacatatcagagaacagctcaaggacctggtggagatactccaagatccatcccctccacctctgtgcctgcccacaactcccggtacccctgattcaagcgatcctagccacttgttgggtccccagtcatgctggtctagccagaaggaagtctcgcatgagagtctggtcgtgggagccgttgaaaatgcctttcagctaatggacgagcagatggctagggaacgacgaggccatcaagtcgaagggggttgttgtgccctggtagtgatctacctgctcgggaaggtctacgtagcaaacgccggagatagcagagcaattattgtgaggaatggtgagattataccaatgtccagggagtttactccagaaaccgaaagacagaggctacagcttctggggtttctgaagccagaattgctgggatctgaatttactcacctggagtttccacggcgagttctccctaaggagctgggccagagaatgctgtatagggaccagaacatgaccggctgggcctacaaaaagatcgaattggaagatctcagatttcccttagtctgcggtgaaggcaaaaaggcaagggtgatggccacaattggcgttacaagaggattgggcgatcacagcttgaaggtttgcagctcaacccttcccattaagccttttttgtcatgtttccctgaagttcgggtttatgatctgacgcagtatgagcactgcccagatgacgttctggttctcgggaccgacggtctgtgggatgtgaccaccgattgcgaggtagccgcaaccgttgacagggttcttagcgcctacgagcccaatgaccactccagatacaccgccctggcacaagccctggtgctgggtgcccgaggtactcctcgtgatagagggtggcgattgccgaataacaagttaggctctggcgacgatatcagcgtatttgttatacccctggggggaccaggctcatactcttag

SEQ ID NO: 237017 - DNA, 900 bp, synthetic construct
  misc_feature 1..900: note = Description of Artificial Sequence: Synthetic coding sequence
  source 1..900: mol_type = other DNA
atggcatcaaggctgctgcatcggcacatcagagaacagctgaaggacttgaaagaagtctcccacgaatcgctggtggtgggcgcagtggagaacgcattccaactcatggatgaacagatggccagggagcggcgtggtcaccaagttgagggcggttgttgcgccctggtggtcatatatctgctgggcaaagtatacgtagcgaacgcgggagatagccgtgcgattattgtgcgcaacggggaaataattccgatgtcacgcgagttcacacctgaaactgagaggcagcggctgcaactactgggatttttaaagcctgagcttctgggaagcgagttcacacatctggagtttccaagaagggtcctccctaaggagctcgggcagcgaatgctgtacagggaccagaacatgacggggtgggcctataaaaaaattgagttagaggatttgcgatttccactcgtttgtggcgagggcaaaaaagcgagggtgatggccacaataggcgtcacaaggggcctgggcgaccactctctgaaggtctgctctagcacactgcctatcaaacccttcttgagttgtttcccggaagtaagagtatacgatctgacacagtatgaacattgcccagatgatgtgttggtcctcgggactgacggtctgtgggatgtcacaacggactgcgaagtagcagccacagttgatcgggtgctgtctgcttacgagccaaatgaccactccaggtatactgcactggcgcaggcgttggtgctaggggcacgtggtacacccagagaccgaggatggcggctgccaaataacaagctcggctcaggagatgacatcagtgtattcgttatcccactcgggggacctggcagctattcatag

SEQ ID NO: 237018 - DNA, 1119 bp, synthetic construct
  misc_feature 1..1119: note = Description of Artificial Sequence: Synthetic coding sequence
  source 1..1119: mol_type = other DNA
atgagtacagcagctcttattaccctggtccgcagcggtgggaaccaagtgcgcaggagggtgctcctttctagcagactcctgcaggatgatagacgcgttacgcctacctgtcacagttcaacttccgaaccccgatgctcacgctttgaccctgatgggtccggcagcccggcaacgtgggataactttggcatttgggacaacagaatcgatgaacccattctgctgccaccaagcatcaaatatggtaaacccattccaaagatttcactggagaacgtgggttgcgctagccaaatcggaaaaaggaaggaaaatgaggaccggtttgactttgctcaactcaccgacgaagttctgtatttcgcagtgtacgacgggcacgggggtcctgcggcagcggatttctgtcatacgcacatggagaagtgcattatggatctgctcccgaaggagaaaaacctggagactctcttgaccttggccttcctggaaattgacaaggcgttttcatcacacgcaaggctgagcgccgatgccacattattgacttccgggactactgctactgttgctctgctgcgcgatggaatcgaactggttgttgcaagtgtcggagattctcgagccattctatgtcgcaaaggcaaacctatgaagctaacaattgatcacacgcccgagcgaaaagatgagaaggagcgaatcaagaagtgcgggggatttgtggcttggaattcgcttggtcagccgcatgtcaatggacgactggctatgacaagaagcatcggcgatctagatcttaaaacttccggtgtaatcgcagagcctgagactaagcgcattaagctgcaccacgcagatgactcattccttgtactgaccactgacggaattaatttcatggtgaactcccaggagatctgtgacttcgtcaaccagtgtcacgacccaaatgaggccgctcacgccgtgacagaacaggctattcagtacggtacggaggataattccacagcagtggtcgtaccctttggcgcatgggggaagtataaaaatagcgaaataaatttttcattctctaggtcatttgcaagctccggcagatgggcctag

SEQ ID NO: 237019 - DNA, 702 bp, synthetic construct
  misc_feature 1..702: note = Description of Artificial Sequence: Synthetic coding sequence
  source 1..702: mol_type = other DNA
atgtccaccgcagctctgatcacactggtgagaagtgggggtaaccaggtgcgacgtcgagtcctgctgagctctcggctgctgcaggatgaccggagggttacccctacatgccacagcagcactagcgaacctaggtgctcccgcttcgacccggacggcagcgggtctcccgctacatgggacaattttggtatctgggataataggatcgatgaacctatcttgcttccaccctctattaaatatggtaaaccaatcccgaaaattagcttggagaacgtaggttgcgcttctcagatcgggaaaaggaaggaaaacgaagacaggttcgactttgctcagctcaccgatgaggtactgtacttcgccgtttatgatggtcacgggggacccgctgctgctgatttctgccacacacacatggaaaagtgcatcatggatctcttgcccaaggagaagaatctagagactttgcttacacttgctttcctggaaattgataaggctttttcctcccacgcacgtctatctgcagatgaaaattgcgcctggagcgctgctctggatctggaaccagtcgataccatttgtggagcgtctgtcgagcgggagatctgtctcatcctttctcaggtcaaagagagcagtggcagttatccaggcctccgcgaaggaagccacatcagccttagccactag

SEQ ID NO: 237020 - DNA, 702 bp, synthetic construct
  misc_feature 1..702: note = Description of Artificial Sequence: Synthetic coding sequence
  source 1..702: mol_type = other DNA
atgtcgactgcggctctgatcaccttggtacgatcgggtggcaaccaagttaggcgccgagtgctattatccagtcggctcctccaagatgatcgaagagtcacacctacatgtcattctagcacatccgaacccaggtgttcgcggtttgatccggatggcagtggatcccctgccacctgggataacttcggcatctgggataatcggattgacgaaccaatcctactcccaccatcaatcaaatacggcaagcccatacccaagattagtcttgaaaacgttggctgtgcgtcacagatcggaaagaggaaggagaatgaagatcggttcgatttcgcccagttaaccgatgaggtcctatattttgccgtgtacgatggccacgggggacctgcagcagccgatttttgccacactcatatggagaagtgtattatggacttattaccaaaagagaaaaacctggagacgctgctcacattggcatttctggaaatcgataaagccttttcctcacacgctagactgtctgcagacgagaactgcgcctggagcgcagctcttgacctggaacccgtcgacacaatttgcggcgcttccgtagaaagggagatttgtctcattttatcccaggtgaaagaaagttccgggtcctatccgggactgagggagggctcacatatctcattgagccattag

SEQ ID NO: 237021 - DNA, 585 bp, synthetic construct
  misc_feature 1..585: note = Description of Artificial Sequence: Synthetic coding sequence
  source 1..585: mol_type = other DNA
atgattgaagataccatgacactgcttagcttgcttggaagaatcatgcggtacttcctgctgcgtcctgagacactgttcctgctatgtatcagccttgccctgtggagctatttttttcacacggacgaagtgaagactattgtcaagagcagccgagatgctgtgaagatggtgaaaggtaaagtggcagagatcatgcagaacgatagattggggggactggacgtgctggaagctgaattcagcaaaacctgggagtttaagaatcacaatgtggctgtgtacagtatccaggggagaagggatcacatggaggataggttcgaggtgctgaccgaccttgcgaataaaacacacccatcgatcttcggcatattcgatggccacggaggcgagaccgcagccgagtatgttaagtctcgccttcccgaagcattaaaacagcatttgcaggactacgagaaggataaggaaaattccgttctgtcttaccagaccatcctcgagcagcagatcctgtcgattgatcgtgagatgctcgaaaagctaaccgtgtcttacgatgaggctgtgaccttttag

SEQ ID NO: 237022 - DNA, 1083 bp, synthetic construct
  misc_feature 1..1083: note = Description of Artificial Sequence: Synthetic coding sequence
  source 1..1083: mol_type = other DNA
atgattgaagataccatgactttgctcagcctcctgggtagaattatgagatactttctgctacgcccagaaacgttgtttcttctctgtatctccctcgctctgtggagctatttctttcatacagacgaggtgaagacgattgttaagagttcccgagatgcagtgaagatggtgaagggtaaagtggcagaaatcatgcagaacgataggcttggtggtctggatgtcctcgaagctgagttttctaagacatgggagtttaagaatcataatgttgccgtctacagcatccagggtagacgcgatcacatggaagatcgatttgaggtgctgacggacctcgccaacaagactcacccttctatctttggcatctttgatgggcatggcggtgagaccgcagccgaatacgtgaagagcagacttcctgaggcactgaagcagcatcttcaagactacgaaaaggacaaagagaattccgttctgagttatcaaacaattttggagcaacagatattatccatcgaccgtgaaatgctcgagaagctcaccgtaagctatgacgaggctggaaccacctgtttgatagccctcttgagcgataaggatcttacggtagcaaatgttggcgacagtcgtggcgtactctgcgataaggacgggaatgccatccctctgtcccacgatcacaagccttatcaactgaaagagagaaaacgcatcaaaagagcagggggtttcatcagtttcaacgggtcttggcgggtgcaggggatcttggctatgtcccgctcattaggagactatcctctaaaaaacctgaatgtggtgattccagatccagatatccttactttcgatcttgacaagcttcagccagagttcatgatactcgcctccgatgggctctgggacgctttctccaatgaagaagcagtgcgctttatcaaggagaggctggacgagccccacttcggcgcaaaaagcattgtgctgcagtctttctatagaggatgtccagataacattactgttatggttgtgaagtttagaaatagtagtaagaccgaggagcagtag

SEQ ID NO: 237023 - DNA, 813 bp, synthetic construct
  misc_feature 1..813: note = Description of Artificial Sequence: Synthetic coding sequence
  source 1..813: mol_type = other DNA
atgcaccttaatggccgatgcatttgcccatccgatcctcaatttgttgaggagaaaggcattcgagcggaagacctggtaattggggcactggaatccgccttccaggaatgtgatgaggtaatcggcagagaactagaggccagcggtcagatggggggttgtaccgctcttgtagctgtgagccttcagggcaagctatatatggccaatgcaggagattccagggctatcctcgtgcggagagacgaaatccgccctttgtcgttcgaattcacccccgagactgagaggcagcgaatccagcagctggccttcgtgtatcctgagctgttagcaggggaattcacacgtctggaattccccaggaggttgaaaggtgatgacctggggcagaaggtgctcttccgcgatcatcacatgtcagggtggagctataaaagagtggaaaagagtgaccttaagtaccctctaattcatggccaaggtcgtcaggcacggttgttgggaaccctcgcagtatctcgcggtctgggagaccatcagctaagagtgctcgacaccaacatccaattaaaaccttttctgctgtctgtcccgcaagtcaccgtgctggatgttgatcagttagagttgcaggaagacgacgtggtggtgatggccactgatggtctgtgggacgttctttctaacgagcaggtggcctggcttgttcgcagttttttaccaggaaaccaggaggatccacaccggtactgtagctgctggggacccgcttgggcctgggtcggcgctagttcaaagcccaaatag

SEQ ID NO: 237024 - DNA, 897 bp, synthetic construct
  misc_feature 1..897: note = Description of Artificial Sequence: Synthetic coding sequence
  source 1..897: mol_type = other DNA
atgcacctcaacggcaggtgcatatgtccctctgaccctcaatttgtggaggaaaaaggtatcagggcggaggatctcgtgatcggggctcttgaatcggccttccaggaatgcgacgaggtgatcgggagggagctcgaggcatccggtcagatgggtggctgcaccgccttagtcgccgtatcccttcaaggaaaactgtatatggctaacgcgggagatagtagagccatcctagtgagaagagatgaaatcagacctttgtcatttgaattcacgcccgagaccgagcgtcagcgaatccaacagttagcattcgtctaccctgagctgctcgcaggagagttcactcggttggagtttccgagacgactaaagggagatgacttagggcagaaagtcctatttcgggatcatcacatgtccggctggtcctacaagagagtagagaaatcggatctgaagtaccctcttattcatgggcaggggcgacaggcccgtctcctcggcactcttgctgtgtccagggggctgggcgatcatcagctccgcgttctggatactaatattcagctgaagcccttcctcctcagcgtgccccaagtgaccgtgcttgacgtggaccagcttgaactgcaggaagacgatgtggttgttatggctaccgacgggctgtgggacgtcttgagcaacgaacaggttgcctggctggtacgtagcttcttaccaggtaaccaggaggatcctcaccgcttctcaaagctggcacagatgttgatccacagcacccagggtaaggaggattcactgactgaggagggtcaggtgtcctatgacgacgtgtcagtcttcgttatcccacttcactcacagggacaagagagctctgaccactag

SEQ ID NO: 237025 - DNA, 744 bp, synthetic construct
  misc_feature 1..744: note = Description of Artificial Sequence: Synthetic coding sequence
  source 1..744: mol_type = other DNA
atggggggttgcaccgccctcgtagccgtcagcctccaggggaagctctacatggccaacgccggagactcccgagcgatcctggtgagaagggacgaaatcaggccactgtcatttgagttcactcccgagaccgagcggcagcgcattcagcaacttgccttcgtatatcctgaattacttgcgggagagtttactcggctggagtttcctcggagactgaaaggtgacgacctgggtcagaaggtcctattccgcgatcaccacatgtccggatggtcctataaaagagtagagaagtctgacctgaaatatccactcatacacggccagggcaggcaggccaggctcctgggaacactggccgtgtctcgagggctcggtgatcatcagctccgcgtgctcgacactaatatccaacttaagccctttttactgagcgtgccccaggtcacagtacttgatgttgaccagctcgagctgcaggaggacgatgttgtagtgatggctactgatggtctgtgggacgtcttgagcaatgaacaggtcgcttggctggttcgtagcttcctgccaggcaatcaagaagacccacaccggttctctaaactggcccaaatgctcatccacagcacccagggcaaagaagatagcctgacagaagagggacaagtctcttacgacgatgtgtctgtcttcgtgatccctcttcattcccagggacaggaaagctcggaccattag

SEQ ID NO: 237026 - DNA, 1380 bp, synthetic construct
  misc_feature 1..1380: note = Description of Artificial Sequence: Synthetic coding sequence
  source 1..1380: mol_type = other DNA
atgtctgctggctggtttcgccgacgattcctccctggggaaccactaccagctcccaggccaccgggtccgcacgccagtcctgtgccttataggagaccgaggtttctccgagggtcatcctcgagtcccggtgcggcagatgcaagccgacggcctgactcacgaccagtccggtcacctgccaggggcaggaccctgccatggaatgcaggctacgctgaaataattaacgcagaaaaatctgagttcaacgaagatcaggctgcatgcggtaagctttgtattcgcagatgtgagtttggggcagaagaggaatggcttacactttgccccgaagagttcctgacaggacattactgggcgctgttcgatggccatggcggtccggcagctgctatcctggctgctaacacccttcactcttgtctacgaagacagttggaggccgtggtggaagggctggtggcaacccagccaccaatgcatctgaatggcagatgcatttgtccctcagacccacagttcgtggaggaaaaagggataagggctgaagacctcgtgattggggctctggagtcagcctttcaggagtgcgacgaggtcatcggccgagagctcgaagcatctggacagatgggtgggtgtacagccctggtcgcggttagtctgcaaggaaaactgtacatggctaatgcgggagactcgcgagctattctagtgcgaagagatgagattagacctctcagtttcgaatttacacccgaaaccgagcgacagcgcattcagcagctggcattcgtatacccagagctccttgccggagagtttacacgacttgagtttcctcgccgactgaaaggcgatgacctcgggcagaaggtgttattccgtgatcatcatatgtccggttggtcctacaagcgggtggaaaaaagcgaccttaaatacccactcatccacggtcaagggcgtcaagcaagactgcttggtacactggcggtgagccgaggcctgggggatcaccagcttagggtgctggataccaatatccagctgaaaccatttctactgagtgtgccgcaggttactgtgttagacgtggaccaactggaactgcaggaggacgacgtggtagtcatggcaacagacggtctgtgggacgttctctctaacgaacaagtcgcgtggctcgtgaggagtttcctgccagggaaccaagaagaccctcaccggtttagcaaactcgcccagatgctaattcattcaacccagggaaaagaagacagccttactgaggagggacaggtcagttatgacgacgtgtccgtgtttgtgatcccactacattcacaaggtcaggagtcctctgatcactag

SEQ ID NO: 237027 - DNA, 1821 bp, synthetic construct
  misc_feature 1..1821: note = Description of Artificial Sequence: Synthetic coding sequence
  source 1..1821: mol_type = other DNA
atgcggaggtccgaggtgcttgcagaggagtcgatagtctgtctgcaaaaggccctcaaccatctgagagagatttgggagctcatcgggatccctgaggatcagaggcttcaacggaccgaggtcgtcaagaagcacatcaaagagctcttagatatgatgattgctgaggaggaatccttgaaggaaagactcataaagagcattagcgtgtgccagaaggaattgaacaccctatgttccgagctccacgttgaacccttccaggaagaaggcgagaccaccatactgcaacttgaaaaagacctgcgcactcaggttgaactgatgagaaaacagaagaaagagcggaagcaggaactgaaacttcttcaggaacaggaccaagaactctgcgaaatcttgtgtatgccccactatgacatcgactctgcatcagtacctagtctcgaggagttaaaccagtttcggcagcatgtcactaccctccgggagaccaaagcctctaggagagaggaattcgtgtccatcaagcggcagataatcctatgcatggaagccctggaccacactcccgatacctctttcgaacgggatgttgtgtgcgaagacgaggacgcgttttgtctttcgttggaaaatattgcaactctgcagaagctgctgaggcaactggagatgcagaagtctcaaaacgaagctgtctgcgaggggctgaggacccagatcagggaactgtgggatagacttcagatacccgaggaggaacgcgaagcagttgctaccatcatgtccggatctaaagcgaaggtacggaaggccctccaattggaggttgatcgtctggaggaacttaagatgcagaacatgaaaaaggtgatagaagcaataagagtagaattggttcaatactgggatcaatgtttctacagccaagagcagcggcaggcgttcgctccgttctgcgctgaggattacacggagtcccttctgcagctacacgatgccgagatcgtgaggcttaaaaactactatgaagtgcacaaggagctgttcgaaggggtgcagaaatgggaagagacgtggcgactgtttctcgagtttgagaggaaagcctcagatcctaataggtttacgaacagaggaggcaacctcctgaaggaagagaaacagagagctaaactccagaagatgctccctaaactggaagaggaactgaaggcaaggatcgagctatgggaacaggagcactccaaggcatttatggtaaacggccagaagttcatggagtatgtcgcagaacagtgggaaatgcaccggcttgagaaggaacgggctaaacaagagcgacaactaaagaataaaaagcaaactgaaactgagatgttatatggttccgctcctcgcaccccatcgaagaggcggggtttagccccaaacacgcccggaaaggctcggaaattaaacacaaccacgatgagtaatgcaactgccaacagttctatcaggcccatttttggcggaactgtgtaccacagtcctgtgagtcggctaccacccagcggctccaagcctgtggcagccagcacgtgctccgggaagaaaactcctcgcaccggacgccatggagctaataaagaaaacctggaattgaatgggagtatcttgtccggtggttatcctggctctgcccctctgcagcgaaacttcagcattaattctgtggcatccacttactctgagttcgcgagagaacttagcaaagccagtaagtcagatgccacatccggcattctaaactccactaacatccagagctag

SEQ ID NO: 237028 - DNA, 1701 bp, synthetic construct
  misc_feature 1..1701: note = Description of Artificial Sequence: Synthetic coding sequence
  source 1..1701: mol_type = other DNA
atgcgtagatctgaagtgctggctgaggaaagcatcgtgtgtcttcaaaaggcccttaaccatttaagggagatctgggagctgatcggtattccagaggaccagaggttacaacggactgaagtggtgaaaaagcacatcaaggagctgctagacatgatgatcgctgaagaagagtccctgaaagaaaggcttatcaagtccatctcggtgtgccagaaggaattgaacacactctgttcggagttgcacgtcgagccctttcaggaagaaggggaaacaactatactgcagctcgaaaaggatttgagaacacaggttgaactgatgcgaaaacagaaaaaagagcggaaacaggagctcaagctgctgcaagagcaagaccaggaactgtgcgaaatcctgtgtatgcctcattacgacatcgacagcgctagcgtgccatccctggaagagctcaaccagttcaggcagcatgtcacgactctcagagagaccaaggcctcccgtagagaggagtttgtgtcgatcaagcgacagatcatcctgtgcatggaagcattggatcatacccccgacacaagtttcgagagggatgtagtgtgcgaggatgaagatgccttttgcttgtcattggagaacatcgccaccctgcagaagctacttcgtcagcttgaaatgcagaaatctcagaacgaagcggtgtgcgagggcctccggactcaaataagagagctgtgggaccggctacagattccggaggaggagagggaagcagtcgctacgatcatgtctggatcaaaggccaaagtgaggaaggccctccagttagaggtcgatagactggaagagttaaaaatgcaaaatatgaagaaggttattgaggctatccgagtcgagctcgttcaatactgggaccagtgcttttacagccaggagcaacggcaggcttttgcgccattttgcgccgaggactatacagaatcactcctccagcttcatgatgctgaaattgtgagacttaagaattattacgaggtacacaaggaacttttcgagggcgtccaaaaatgggaggagacatggcgcttatttctggagtttgagcggaaggcaagcgatccaaaccgcttcaccaatcgtggagggaatctgcttaaggaggagaaacagcgggcaaaacttcagaaaatgctccccaaacttgaggaggagttgaaggccaggattgaattatgggaacaggagcactcaaaagcctttatggtgaacggacagaagttcatggagtacgtggcagagcagtgggagatgcacagactggagaaagagagggccaaacaggaaagacagctcaaaaacaagaagcagacagagacagagatgctgtatggctccgctcctcgtaccccttcgaaaaggcggggactggctccaaataccccaggcaaggcccgtaagttgaatactacaaccatgtctaatgctaccgccaattcttcaattcgtcctatctttgggggaacagtttatcatagtcctgtgtcccgactgccgccttctggaagtaagcccgttgcggcttccacatgtagcggaaagaagacaccacgcaccggtagacatggggcaaataaggagaatctcgagctcaatggatccattctatcggcacgcacctttaaagggttccagatttag

SEQ ID NO: 237029 - DNA, 1863 bp, synthetic construct
  misc_feature 1..1863: note = Description of Artificial Sequence: Synthetic coding sequence
  source 1..1863: mol_type = other DNA
atgaggcgctctgaggtactggcagaggagtcaatcgtgtgcctacagaaggctctgaaccacctgagggagatatgggaactaattggtattcctgaagatcagaggctgcagcgcactgaagtagtgaaaaagcacatcaaagagttgctggatatgatgattgccgaagaggagtccctgaaagaacggctgatcaaaagcatctccgtctgccagaaggagctaaacactctctgtagtgaattacatgttgagccttttcaggaagaaggagagactactatcctgcaacttgagaaggatctgagaactcaggtggagctgatgcgtaagcagaaaaaagaacggaaacaggagctcaaactgctgcaggaacaggatcaagagttgtgcgaaatcctgtgcatgcctcactacgatatcgactccgcgagcgtcccttccctggaagagctgaaccagttcaggcagcacgtgactaccctgcgggagacaaaagcaagcaggcgcgaggagtttgtctccatcaagcgccagataattctctgcatggaggccttagaccatacgcctgacaccagctttgagagagatgtcgtctgtgaggatgaagacgctttttgtctgagtttggagaatatcgccaccctacagaagcttctgaggcagctggagatgcagaaaagccaaaatgaggccgtctgcgaaggactaagaacccagatcagagaactttgggatcgcttgcaaattccggaggaagaacgggaggcagtagctacaattatgtctggctctaaagcaaaggtcaggaaggccttgcagttggaggtggacagactggaggagctgaagatgcagaatatgaaaaaggtgattgaggcaatacgtgtagagctggttcagtattgggatcagtgcttctattcccaggagcagagacaggccttcgcacccttttgtgccgaagattacaccgaaagcctgctacagctacacgatgctgagattgtgaggttaaaaaactattacgaggtgcataaagaactgtttgagggcgtgcagaagtgggaggaaacgtggcggttgttcctggaattcgaacggaaagcatccgaccccaatcgcttcacaaatagggggggtaatctgcttaaagaggaaaaacagagggctaaactgcaaaagatgctaccaaaattagaagaggagttaaaagcgaggattgagctgtgggagcaggaacattccaaagcctttatggtgaacggtcaaaagtttatggaatacgtggctgagcagtgggaaatgcaccggctggaaaaagaacgagctaagcaagaacgccaactcaagaacaaaaagcagaccgaaacagagatgctttacggctccgcaccccgaactccctctaagcggcgtggtcttgccccaaataccccgggaaaggccaggaaattgaataccacaactatgtccaacgccaccgccaactctagcatccgccctatcttcggcggaactgtctatcattctcccgtgtccaggttgccaccgtctggcagcaaacctgttgcagctagcacctgcagtggtaagaagactccccgaacaggtcggcacggtgcaaacaaagaaaacttagagcttaatgggtcgatcctgagcggcggataccctggctcggctcccctccaacggaacttctccataaattcggtcgcttctacttactctgagttcgccaaggatccatccctgagtgattcttccacagtcggcctgcaacgagagctatccaaggcctctaagtccgatgctacaagcggcatcctgaactccaccaacattcagagttag

SEQ ID NO: 237030 - DNA, 1578 bp, synthetic construct
  misc_feature 1..1578: note = Description of Artificial Sequence: Synthetic coding sequence
  source 1..1578: mol_type = other DNA
atgaggagatccgaagtgctggctgaagagtcaatcgtctgtctgcaaaaagctctcaaccacctcagagaaatttgggagctgatcggcatccccgaggaccaaaggctgcagcgaaccgaggtggtcaagaaacatataaaagaagagggcgaaaccactattctccaattggaaaaggatttgcggacccaggtagaactgatgaggaagcaaaaaaaagagcgcaagcaggagctgaagctgttgcaggagcaggatcaggagttgtgcgagatcttgtgtatgccacattacgatatcgactctgccagtgttcccagcctcgaagaactgaaccaatttcggcagcatgtcaccaccttacgagagacgaaagcaagccgccgagaagagttcgtcagtatcaagcgccaaattatcctgtgtatggaggctcttgatcacaccccagatacctccttcgagagggacgtagtttgcgaagatgaagatgccttctgtttgtcgttggagaacatcgcaacattgcagaagctcctcaggcagttagagatgcaaaagtcgcagaacgaggccgtatgtgaagggctccgcacccaaattcgcgagctttgggatcgcttgcagattcccgaggaggaacgcgaagccgtggccaccattatgtccggctcaaaggccaaggtgagaaaagccctgcaactcgaggttgatagactggaagagttgaagatgcagaacatgaagaaggtgatcgaggctattcgggtcgagctcgtgcagtattgggatcaatgcttttatagccaggaacagaggcaggcgttcgctccattctgcgcagaagactacaccgaatcactactgcagctccatgatgccgagattgtgagactgaagaattactatgaagtgcataaggagttgtttgaaggcgtccagaagtgggaagagacatggagactgttcctcgagtttgagcgaaaggcctctgatcccaatcgttttaccaatcggggaggtaacttgctaaaagaagagaaacagcgcgctaagctacagaagatgttaccaaaacttgaagaagagctcaaagctcgcatcgagctgtgggagcaggagcactctaaggctttcatggtcaacgggcagaagtttatggagtacgttgcggagcagtgggaaatgcacaggctcgagaaggaacgagccaagcaagagagacaactgaagaacaagaagcaaactgaaaccgagatgttgtacggaagtgctccgagaacaccttcaaagaggaggggattagccccaaacacaccagggaaagccaggaaactgaacacaacaacaatgagcaacgcgaccgcgaatagcagcatccggccaattttcggagggactgtgtatcactctccagtgtcaaggctgccacctagtggcagtaagccagttgcagcctctacctgtagcggaaagaagacgccaaggactggtcgacacggcgcaaataaggaaaacctggaactgaacggtagtatactgagtgcaaggacctttaaggggtttcagatatag

SEQ ID NO: 237031 - DNA, 696 bp, synthetic construct
  misc_feature 1..696: note = Description of Artificial Sequence: Synthetic coding sequence
  source 1..696: mol_type = other DNA
atgagggtactgggaggacggtgtggcgcattattagcttgcttgttactcgtcctcccggtatctgaggctaatttctgtctctatttccgcaatgactttatctataatagagcttgtatatctgtgttggtgggccttagcggatgcaactttttctacagcatctgtttcttgtctaaacagcaggcttctcaggtgctcgtgcgcaaaaggcgcgcaaacagcctcttggaggagactaagcagggcaaccttgagagggaatgcattgaagagctctgcaataaggaggaggccagggaggtcttcgaaaatgatcctgaaactgattacttctacccaaagtacctggtttgcctgcgctccttccagacgggcctttttacagcggctcgtcagagcaccaatgcatatcctgacctgaggtcttgtgttaatgcaatcccagaccagtgcagtcctctgccctgtaacgaggacggttatatgtcatgtaaggacggcaaagcctcattcacctgtacttgcaagcccggttggcagggcgagaagtgtgagttcgacatcaacgaatgcaaagatccaagtaacattaatggagggtgtagtcagatctgtgataacacacccggtagttatcactgcagctgtaaaaacgggttcgtgatgttatccaataaaaaagattgctag

SEQ ID NO: 237032 - DNA, 2031 bp, synthetic construct
  misc_feature 1..2031: note = Description of Artificial Sequence: Synthetic coding sequence
  source 1..2031: mol_type = other DNA
atgagagtgttggggggacgatgcggcgctttacttgcctgcctgttgctggtgcttcccgtcagtgaggccaatttccttagtaaacagcaggctagccaggtgcttgtacgcaaaagacgcgcaaacagcttgctcgaggaaacaaagcaaggtaacctcgagcgcgagtgcatcgaagagctctgtaataaagaagaggcacgagaggtattcgaaaacgatcctgagacggattatttttatccgaaatatctggtgtgtctgaggtctttccagaccggcttatttacagccgctcgccagtccaccaatgcttatcccgacctccggtcctgcgtcaacgccatcccggatcaatgctctccactcccatgtaatgaggacggctacatgtcctgtaaagatgggaaggccagctttacctgcacctgtaagccgggatggcagggcgaaaaatgcgagttcgacattaacgagtgcaaggatccttccaatattaacggcggttgcagccaaatctgcgacaacacacctggatcttaccactgtagctgcaaaaatggttttgtgatgctttccaataagaaagattgcaaagacgtcgacgagtgttcactgaagcctagcatctgcgggacagcggtgtgcaaaaacattcccggagatttcgagtgcgagtgccccgagggctaccggtacaacctgaaatctaagagttgtgaggacatcgacgagtgctcagaaaatatgtgcgcacagctttgcgtgaattatcctggaggctacacttgttattgcgatggaaagaagggctttaagctggcacaggaccagaaaagttgcgaggtcgtaagtgtgtgtctgcctctgaatttagatacgaaatacgagctgctctatctcgccgagcagtttgctggcgtggtattgtacctgaaatttcgtttgccagagatctcaaggttctccgcagaatttgacttccgaacctatgatagcgaaggcgtgattctctacgctgagtccattgatcactccgcctggttactgatcgcccttcgcggagggaagatcgaggtccagttaaaaaatgaacatacaagcaagattaccaccgggggagatgtgatcaacaatggtctctggaatatggtgtccgttgaggagctagagcactcaataagtatcaagattgcaaaggaggcagtgatggacataaacaagcctgggccattatttaagcctgagaatgggttgctcgaaaccaaggtctatttcgctggcttccctcgaaaagtggagtctgagttgatcaagcctatcaatccccgtctggacggttgcatacgctcttggaatctgatgaagcagggagcatctggcataaaagagatcatccaagagaagcagaacaagcactgcctagttactgtcgaaaaaggtagttactacccaggaagcgggattgctcagtttcatattgactacaacaacgtcagcagcgctgaaggctggcatgtgaatgtaactctgaatatacggccttcgacaggaactggggtcatgctggccctggtttcaggaaataacactgtcccttttgccgtatctctggtcgatagcacttctgagaagagccaggatattctgctctccgtagagaacacagtgatttaccgaattcaggccctgtccctctgctcggatcagcagtcacacctggagttccgggttaatcgaaataacctggaactgtccactcctctaaagatcgagactatttcccacgaggatctccagcgtcagctggccgtgcttgacaaggcgatgaaggccaaggtggctacgtatctgggaggcctgcctgacgtgcccttcagcgccacccctgttaatgctttttacaacgggtgtatggaagtgaatatcaacggggtgcagctggacctcgatgaagccatctccaaacacaatgacatcagggctcatagctgccctagcgtgtggaagaagaccaaaaattcctag

SEQ ID NO: 237033 - DNA, 1275 bp, synthetic construct
  misc_feature 1..1275: note = Description of Artificial Sequence: Synthetic coding sequence
  source 1..1275: mol_type = other DNA
atgggctgcggcacatcaaaggtactccctgaaccccctaaagacgtgcagcttgacctagtaaaaaaggtggaacccttttccggaactaaatccgacgtgtataagcactttatcactgaagttgactctgtcggacccgttaaggctgggttcccagccgcatcccagtatgcccacccctgccccggaccgccaacggctggacatacagagcctcctagtgagccacccagacgcgcaagagtagcaaagtatcgtgccaaattcgacccaagggtcaccgccaagtacgacataaaggccctcattgggagaggtagttttagtagagtagtaagggtcgagcacagagcaacacgacaaccgtatgcaataaagatgatcgaaaccaagtaccgagaaggccgtgaagtgtgtgagtctgagctccgtgtgctgcgcagggtgcgccacgcaaatatcatacagctggtggaggtcttcgaaacccaggagcgcgtctatatggtgatggagctggcaactggaggggaactctttgataggatcatcgctaagggcagctttactgagcgggatgcaacacgcgtgctgcagatggtgttggatggagtcaggtatcttcacgccctgggcattacccatcgagatctgaagccagagaatctcctgtactaccaccccggaaccgacagcaagattataatcaccgactttggcctggcttcagcacgcaaaaaaggtgatgattgcctgatgaaaacgacctgtgggacaccggaatatattgcgcctgaggtcttggttaggaaaccttacactaacagtgtcgacatgtgggcactgggtgtgatcgcctacatcttactctccggaaccatgccatttgaggacgataaccgaacgcgcctttataggcaaatactgcgtggaaagtattcctattcaggtgaaccgtggccaagcgtatctaatctggcaaaagatttcatcgacaggctgctgacggtcgaccccggtgctcgaatgaccgcactgcaggcgctccgtcacccgtgggtcgtgtcaatggcagcaagcagttcaatgaagaatctacacagatccatcagccagaatctgctcaagcgggcaagctctcgctgtcagagtactaagtcagctcagtcaacaagatcttcccggtcaacacggtcaaataaatctcgtagggtaagggagagggagctgagagagctgaatttgcgatatcaacagcagtataacggctag

SEQ ID NO: 237034 - DNA, 1953 bp, synthetic construct
  misc_feature 1..1953: note = Description of Artificial Sequence: Synthetic coding sequence
  source 1..1953: mol_type = other DNA
atggcctgcagggagttcgagatgggcaggaagaaatgtgagcgttactggccactgtatggggaggaccccatcacattcgccccttttaaaatctcatgcgaagacgaacaggcccgtactgactatttcatcagaaccttgctgctggagtttcagaacgagtcccgccgattgtatcagtttcattatgtcaactggcccgatcacgacgtgccttcctcattcgactcgatactggacatgatttcgctaatgcgcaagtaccaggagcacgaagatgttccaatctgtatacactgtagtgcaggatgtggcaggaccggcgctatctgcgctattgactacacctggaatctgctgaaggccggaaagatcccggaagagttcaatgtgttcaacctaatccaggagatgcgaactcagcgccactcagcagtccagaccaaggagcaatatgaacttgtgcacagggcaattgcacagcttttcgagaagcaactgcagctgtacgaaatccacggagctcagaaaattgcagacggagttaacgagatcaataccgagaatatggtgtcaagtatcgagcctgaaaaacaagatagtccgccaccaaaacccccacgaacacggtcgtgccttgtggaaggcgacgcgaaggaagagattttacagcctcctgagccccaccctgtgccacctattctgacacctagcccgccttccgctttcccgacagtgaccacagtctggcaggacaacgacagatatcatcctaagccagtactgcatatggtctcttccgagcagcattctgccgatcttaacaggaactatagcaaatctaccgagcttcccggaaagaacgagtctacaattgaacaaatcgacaaaaaactcgaaagaaacttaagctttgagatcaagaaggtaccgctgcaagagggcccaaaatcttttgacggcaatactctattgaaccgtggccatgccatcaaaatcaaatctgcatcaccttgtatcgccgataaaatctctaagcctcaggagttgtcatccgacctgaatgtgggcgatacaagtcagaactcctgtgtggattgctctgtgacacagagcaataaggtgagcgttacaccgcctgaagagagtcaaaactctgacaccccacccaggcccgacagattgcctctggacgaaaaaggccacgtgacctggtcattccacggcccagaaaacgccattcccatacccgatctgagtgagggtaacagcagcgatattaactaccagactagaaagaccgtgtcactgacacctagcccgacaacacaagtggagaccccagaccttgtggatcacgacaatacatctcctctattccgtacgcccctgagcttcactaatcccctgcactctgacgacagcgatagcgacgaaagaaacagcgatggcgcagtgactcagaacaaaacaaacatttccaccgcctcagccaccgtttctgctgctacatctacagaatcaatcagcacccgtaaagtgttacctatgtcaattgctagacacaatattgccggaactacgcattctggagctgagaaggacgtggatgtctcggaggattctccacctcccctaccggaacgcacgccagagagcttcgtgcttgccagtgagcacaacacacccgtgaggagcgagtggagcgagctccaatctcaggagagatcagagcagaagaagtcggaaggactgatcacaagtgagaatgagaagtgtgatcatcctgccggaggtattcattacgaaatgtgcatcgagtgcccaccaaccttctctgacaagagggagcaaatcagcgaaaaccctacggaggccactgacattggttttggcaaccgatgcggcaagcccaaaggtcctcgcgaccccccatccgaatggacatag

SEQ ID NO: 237035 - DNA, 1062 bp, synthetic construct
  misc_feature 1..1062: note = Description of Artificial Sequence: Synthetic coding sequence
  source 1..1062: mol_type = other DNA
atgtctagatctctggattctgccagatcctttctcgagcgcctggaagcgcgaggaggacgcgagggagccgtgctggcaggcgagttttcaaagcgctgcgaaagatattgggcccaggagcaggagccattacagacaggactcttctgcataacactaatcaaagagaaatggcttaatgaagacattatgctgcggaccttgaaagtgaccttccaaaaggaaagccgctcggtgtatcagcttcagtatatgtcttggcctgacaggggcgtgcccagcagcccagatcatatgctggctatggtcgaagaagcccgtagactacagggaagcggacctgagcccctgtgtgtgcactgctccgcaggctgcggaagaactggggtgctgtgcactgtggactacgtgaggcagctattattgactcagatgatacctcccgatttcagtctgttcgacgtggtgctcaaaatgcggaaacagcgccctgcagcagttcaaacagaggaacagtatcggtttttgtatcataccgtggcccagatgttttgctcaaccctccaaaatgcatcaccccattatcagaacatcaaggaaaattgtgctcctctgtatgacgacgcactgttcttaagaacaccgcaggccttactggccatccctagaccacctggtggcgtgctgcgctctatatcggtcccaggctcccctgggcacgctatggctgacacatacgcagtagtccagaagagaggggctcctgccggagcaggatctggaacacagacagggaccgggacaggcactggggctaggtcagcagaggaggctccactgtactcgaaagtcaccccacgcgctcagcgccctggggctcacgcagaggatgctcgtggcacccttcctggccgtgttccagccgatcagtcacccgctggatccggcgcatacgaggacgttgcaggaggggcacaaactggtggattggggttcaacctgcggattggaagaccgaagggcccacgagaccccccagccgagtggactcgcgtgtag

SEQ ID NO: 237036 - DNA, 1233 bp, synthetic construct
  misc_feature 1..1233: note = Description of Artificial Sequence: Synthetic coding sequence
  source 1..1233: mol_type = other DNA
atgccaacaaccatcgagcgggaatttgaagagctggatacgcagcgcagatggcagcccctgtacctagaaattcgaaacgaaagtcacgactacccccacagggtggctaaattcccagagaacaggaataggaataggtaccgtgacgtgagtccctatgaccattcgcgcgtgaagctgcagaatgcagagaacgattacataaacgcaagcttggttgatattgaagaggctcagaggagttatattctgacacagggtcctctaccaaacacatgctgccacttctggctgatggtgtggcagcagaaaacaaaggcagtggttatgttgaatcgaatcgtggagaaagaaagcgtcaaatgcgcgcagtactggcccacagacgaccaagagatgctctttaaggaaacaggctttagcgttaagctcctttctgaagacgtgaaaagctattatacagtgcatctgctgcagttggagaacattaactatatcgaaaacctctggatcacactgtatctcaaactcttgatgcttgacgtaaagcggagtttaaagtcgggggagaccagaacgatttcccactttcactacaccacatggcccgactttggggtgccggagtccccagcttcatttctaaacttcctattcaaggttcgagaaagcggctcactaaaccctgaccacgggccagccgtgattcattgcagcgccggtattggccgaagtggcacgtttagtttggtcgacacgtgtctggtgctgatggagaagggggacgatattaacattaagcaagtgctgctaaatatgagaaagtatcgtatgggcctcatccagacgcctgaccagctgagattctcctacatggccatcatcgaaggagctaaatgcattaagggtgatagttctatccagaagcggtggaaggagttgagtaaagaggaccttagcccagccttcgatcattctccaaacaagatcatgaccgagaaatacaacggcaacaggatcgggttggaagaggagaagctgacgggggatagatgtactggtcttagttctaaaatgcaggacaccatggaggagaacagtgagagtgccttgcggaagcggataagggaggacaggaaagctacaacagctcagaaagtgcagcagatgaaacagcgactgaacgaaaacgaacggaagcgaaagcgcccacggttgacagacacatag

SEQ ID NO: 237037 - DNA, 2259 bp, synthetic construct
  misc_feature 1..2259: note = Description of Artificial Sequence: Synthetic coding sequence
  source 1..2259: mol_type = other DNA
atggaccagagagaaattctccagaaatttctggatgaggcccagtctaagaagatcaccaaggaagaatttgcgaacgagttcctcaaactaaagcggcagtctactaagtataaggccgataaaacctatccaactacagtggccgagaaacctaaaaatatcaagaagaatcgatacaaagacatcctcccatatgattattctagagttgaactatcgctgattacatctgatgaagactcctcctacatcaatgccaactttattaaaggggtttatggacctaaagcctatatcgcaacgcagggcccactttccaccacactgctggacttctggcgcatgatctgggagtattccgtgctcatcatcgtgatggcctgcatggaatacgaaatgggaaagaaaaaatgcgaacgctattgggccgagcctggcgaaatgcagctagaatttgggcctttttctgtgtcgtgcgaagcagagaaaaggaagtcagattacataatccggacactgaaagtgaagttcaacagcgagacaaggactatctatcaattccattataagaattggcctgaccacgatgttcctagctccatcgatcctatcttagagctgatttgggacgtccgctgctatcaggaggacgactcagttccaatttgtattcattgtagcgcaggctgcgggcgaacaggtgtgatctgtgccatcgattatacctggatgctgctgaaagacggctcccaggccaaacactgcatacccgagaaaaaccataccctccaggctgacagctactcccccaatctgcctaaaagtactacaaaggctgccaaaatgatgaatcagcagaggacaaaaatggagataaaggaatcctccagtttcgactttaggacctccgagatttctgctaaggaggaactggtcttgcatccagctaaaagcagtacaagcttcgatttcctggaactcaattattccttcgacaaaaatgctgacactaccatgaaatggcaaactaaggccttccccatcgttggcgaacccctgcagaagcatcaaagtctcgacctcggcagtctgttattcgagggatgctctaactcgaagcccgtgaacgctgccggacgctatttcaactcaaaagtgcccatcactcggacaaaatctactcccttcgaactaatccagcaaagagagaccaaagaggtggactccaaggagaacttttcctatctggaatctcagcctcatgactcatgtttcgtggagatgcaggcccagaaggtgatgcacgtcagctctgccgaactgaactactcactcccgtacgatagcaagcatcaaatcagaaatgcttcaaatgtgaagcaccacgattcttctgctttgggggtgtattcctacattccactggtggagaacccctactttagcagctggccacctagtgggacgagtagcaaaatgtccctggatcttcccgaaaaacaggacggcacggtgttcccttcctcgctgctgcctacaagctcaacaagtctgtttagttactacaattctcatgactctttgagtctgaattcgccaactaacattagtagcctgctgaaccaggaatccgcggttctagcgacagcacccaggatcgacgacgaaatccctccaccattgccggtctggactcccgagagcttcatcgttgtcgaggaagctggagaattcagcccaaacgttccgaagtcccttagcagtgcagtgaaggtcaagatcgggacatcattagagtggggcggtacttctgagcccaagaaattcgatgattccgttattctgcgcccaagcaagtctgtgaagctgagaagccctaaatcagagctgcatcaggataggagctcccccccacctccgttaccagaaaggaccctcgagtccttctttctcgcagacgaggattgtatgcaggcccaatctatcgagacttacagtacctcgtacccagataccatggagaactctacaagttctaagcagacactgaagaccccgggaaaatccttcacccgtagcaagtctctcaagattttgcggaacatgaagaagagcatctgtaacagctgtccgcctaacaaacctgcggagtccgtccagtccaacaacagctcttcgtttctgaattttggtttcgccaaccgcttttctaagcctaagggcccacgcaatccgcctccgacctggaatatatag

SEQ ID NO: 237038 - DNA, 5723 bp, synthetic construct
  misc_feature 1..5723: note = Description of Artificial Sequence: Synthetic coding sequence
  source 1..5723: mol_type = other DNA
atgttaagtcatggcgctgggcttgccttgtggattaccctttcactgctgcaaactggtctggccgaacctgaacgctgcaacttcacactagccgagtctaaagcctccagccactcggtgtcaatacagtggcgcatcttaggatccccttgtaactttagcttaatttacagtagcgatactctaggcgcagcgctgtgtcccacctttcgcatcgacaacaccacctatggctgcaacctgcaggatcttcaggcgggaacaatatacaacttccgaatcatatctttggacgaagaacgaacagtcgtcctccagaccgatcctctgccaccagcaagattcggcgtttccaaagaaaagaccaccagcacctccctgcatgtttggtggacacctagcagcggaaaagtcaccagctatgaagtgcaactcttcgatgaaaataatcagaaaatccagggggtgcaaattcaggagtcgaccagttggaatgagtacaccttctttaatctaactgcgggttccaaatataacatcgcgattacagctgtaagtggagggaaaaggagtttcagcgtctatacaaacggcagcaccgtgccctcacccgtgaaggatatcggaattagtaccaaggctaactccttactcatatcttggagtcacggtagcggtaacgtggaaaggtatcgcttgatgctaatggataagggaatcctggtccacggcggtgtggttgacaagcacgcaacatcttatgcattccatggccttacccccggttatctctacaatctcacagtcatgacagaggcggctggcctgcagaactacagatggaaattggtcagaacggcccctatggaagtatccaatctcaaggtaacaaatgacgggagtctgaccagccttaaggttaaatggcagagaccaccagggaacgtcgactcgtataacatcaccctgagccacaaagggaccattaaggaatcccgcgtcctcgctccctggatcaccgaaacacacttcaaagaactcgttcccggtaggctgtaccaagtcacagtctcttgtgtgtctggagaattgtctgctcagaagatggcggttggtcgcacatttcctgataaagttgcaaacctggaggctaacaataatgggcgtatgcgatcactggtcgtctcttggagtcccccagccggagactgggagcaataccggatcctgctcttcaatgactccgtggtcttacttaatattactgtcggtaaggaggagacccagtacgttatggatgataccggccttgtccccggaaggcaatacgaagtcgaggtgatcgtggagtctgggaacctgaagaactcagaacggtgccaggggagaacagtgcctttagcagttcttcaattgcgagtcaagcacgctaatgagactagcttgagtatcatgtggcagacaccggttgccgagtgggagaagtacataataagtctcgctgacagggatctgctactgattcataaatcactttccaaagatgctaaggaattcaccttcacagatctggtacccggacgaaaatacatggccaccgtaacgtccataagcggggacctcaaaaatagctcatctgtcaaaggtcggactgtacccgcacaggtcacagacctgcacgtcgccaatcagggaatgacaagcagtttgtttacaaattggacacaggctcagggtgatgtagaattttaccaagtgctcctgattcacgagaacgttgtcattaagaatgagtccatcagctctgaaacatcgaggtatagttttcattcccttaaatccgggagcctctactctgtggtagtcacaactgtctcagggggaataagttctcgccaggtggtggtggaaggacgaacagtgccatccagcgtgtcaggcgttacggtaaacaattcaggccgtaatgattacctgtcagtgtcgtggctgctcgcaccaggagatgtagataactacgaggtaacgctgtcccatgacggcaaggtggtccagtctctcgtcattgctaaaagcgtgagggagtgttcttttagttccttaactcctggacgactctacactgtgaccataaccactcgcagcggcaaatatgagaaccactcattctcacaggagcgaactgtcccggacaaggtgcaaggagtttcagtcagtaacagtgcaaggagcgattacctccgagtgtcttgggttcacgcgaccggcgatttcgaccactacgaagttacaataaaaaacaagaacaattttatccagaccaaatcaattcctaagtccgagaacgagtgtgtgtttgttcagctagtgcccggacgtctgtactcagtgactgtgaccactaagagcggtcagtatgaagccaacgagcaggggaatgggagaacgattccagagccagtgaaggacctgacattgcgaaacagatccactgaagatctccatgttacgtggtccggggctaacggggacgtggaccagtatgagatccagttgctgttcaacgatatgaaagtttttccgccttttcacctcgtgaacaccgccaccgagtaccgctttacaagcctcacccccggacggcagtacaaaatccttgtgctaacaatctccggagatgtccagcaatctgcctttatcgagggtttcacagtgccatcagctgtgaaaaatattcatatcagccctaacggagccactgatagtctcaccgttaattggacacctgggggtggtgatgtggattcctacacggtcagcgccttcaggcactcacagaaggtcgattcccagacgattcccaagcacgtgttcgagcacaccttccacaggctggaggccggagaacagtatcagatcatgattgccagtgtctctggaagtctaaaaaaccagatcaatgtagttggaagaaccgtcccggctgcagttactgacctgcgtatcaccgaaaactccaccagacatctgtcctttagatggacagcgagtgaaggagagttatcttggtataatatctttctgtataaccccgatggaaacctgcaggagagagctcaggtggaccccctggtccagtccttctctttccaaaacctgctgcagggtcggatgtataagatggtcattgtaacacattccggagagctcagtaacgaaagttttatctttggcaggacagttccggcatctgttagccatttaagaggctctaatcgaaatacaacagactcactgtggtttaattggtcacctgcatcaggagatttcgatttttacgagctgattctgtataaccccaacggtacgaaaaaagaaaattggaaggacaaagaccttacagaatggagatttcaggggcttgtgcctgggcgaaaatatgtcctctgggtagtgactcacagcggagacctgtccaacaaggtaaccgctgagagccgcaccgccccttcaccccctagcttaatgtccttcgccgatatcgccaacacttcccttgccatcacttggaaagggcctcccgactggactgactacaacgatttcgagctgcagtggttgccgcgagatgccttgaccgtgtttaatccttataacaaccgaaagtcagagggacggatcgtgtatggcctgagacccggacgctcgtaccagttcaatgtcaaaactgttagtggggactcatggaagacctacagtaagcctatctttggtagcgtaagaaccaaacccgataaaattcaaaatctgcattgccggccacagaatagcacggccattgcttgcagttggatcccaccagactccgactttgacggatattctattgagtgccgcaagatggatacgcaggaagtggaattttctaggaagctcgagaaggaaaagtcgctactgaacattatgatgctcgtcccccataaaagatacttggtgtcaatcaaggtccagtcagcagggatgacatcagaggtggtcgaggactcaactatcaccatgatagaccgtccgccaccacctcccccacatattagagtgaatgaaaaagatgtgctcatcagcaagtcctccatcaatttcactgtcaactgctcctggttctccgacactaatggagccgtgaaatattttactgtggtcgtgagggaagccgatggtagcgacgagttgaagcctgaacagcaacacccattgcctagctacctggaatacaggcataatgcaagcatccgcgtgtaccagactaattacttcgccagtaagtgtgcagagaatcccaactctaatagtaaatccttcaacataaaactgggtgcggagatggaatccttggggggaaagtgcgaccccactcagcaaaaattctgcgacggacccctcaaaccgcatactgcgtataggatctctatacgggcttttacccagctgttcgacgaagacctcaaggagtttacaaagccactatattccgataccttcttctctctccccatcactaccgagagcgagccactcttcggtgcaatcgaaggtgttagtgccggactctttctcatcggcatgctggtcgccgtggtggccctgctgatttgcaggcagaaggtttcccacggcagagagcggccaagtgcgagactaagtatcagacgtgatcgtcccctttccgtgcaccttaatctgggccagaaaggaaacagaaaaacctcatgccccattaagatcaaccaattcgaaggccatttcatgaaattacaggcagactccaattacttgctgtctaaggagtacgaggaacttaaggatgtgggaaggaatcaatcttgtgatattgccctcctgccagaaaaccggggtaaaaaccgttataacaatatattaccctatgacgcaacccgggtgaagttgagcaatgtcgatgacgacccctgttcagattacataaacgcatcgtacataccaggcaataacttccgacgggaatacattgttacccagggccctttacctggcacaaaggacgacttttggaagatggtgtgggagcagaacgtgcacaatattgttatggtgacgcagtgcgtggagaaagggagagtcaagtgcgaccattactggcctgctgaccaggatagcctctactatggggaccttatcctacagatgctttctgagtctgtcctgcctgagtggactatcagagaattcaagatctgtggggaggagcagctggacgctcaccgcctcatccgccactttcactataccgtctggccagatcacggtgtgccggagaccactcagtctttgatacagttcgtgcggaccgtgagagactatattaaccggagtcctggggcaggccctacagtggtccattgcagcgctggagtgggacgaaccggcacttttatcgccttagatagaatcctgcagcaactggattcaaaagatagcgtcgacatttatggcgcagtgcacgacctccgactgcaccgggtgcacatggttcagaccgagtgtcagtacgtgtatctgcatcagtgcgtgcgtgacgtgttgcgagccagaaagctccggtctgagcaggaaaatcccctatttcctatctacgaaaatgtcaaccccgagtaccacagggatcccgtgtactcacgacatta

SEQ ID NO: 237039 - DNA, 4518 bp, synthetic construct
  misc_feature 1..4518: note = Description of Artificial Sequence: Synthetic coding sequence
  source 1..4518: mol_type = other DNA
atggtccacgtggctcgtctgttgctccttctgctgacctttttcctcaggacggatgcagagacacctcctcggttcacccgcacccctgtcgaccagacaggtgtgtctgggggagttgcaagtttcatctgtcaggctacaggagacccaaggcctaaaatcgtttggaataagaagggtaagaaggtcagcaaccaacgcttcgaagtgattgagtttgacgacggcagcggaagcgtcctcagaatccagcccctgcgcacacccagagacgaggctatctatgagtgcgtggccagcaacaacgtgggcgaaatctcagtgagtactcgcctcacagtcctgcgggaagatcagatcccacgaggattccctaccattgatatgggaccccagttgaaagtggtggagcgcactagaactgcgacgatgctgtgtgctgccagcgggaaccctgatcctgagattacatggttcaaagactttctgcctgtcgatacaagcaataacaacgggcgaattaaacagctgcggagcgaatcaatcggcgcactgcagatcgagcagagtgaggagtcagatcagggaaagtatgagtgcgtggccactaatagcgccggtacgagatacagcgcccctgctaatttgtacgtgcgcgtgagacgagtcccccctcgcttcagcatccctcccaccaatcacgagataatgcctggaggctcagtgaatataacttgcgtcgccgttggctctccgatgccttatgtgaaatggatgttgggagccgaggatctgactcccgaagatgatatgcccattgggaggaatgtcctggagctgaacgacgtaagacagagcgctaactacacgtgcgttgccatgtctactttgggtgtcatagaggctatcgctcaaatcactgtcaaagctcttcccaagcctcccggaacacctgtggtcaccgagtctactgccaccagcatcacactcacatgggactccggcaacccagaacccgttagctactatatcatccagcataagcccaagaactctgaggagttgtataaggagatcgacggtgtcgctacaactagatactccgtggctggcctaagtccttacagtgattatgagtttcgagtggtggctgtgaacaatattggaagagggccaccctctgagcctgtgttaacccagacatcagagcaagcaccatcctctgcgccaagggacgtacaggcaaggatgctgtcatccaccaccatcctagtccagtggaaggagccggaagaacccaacggtcagatacaggggtacagggtatactatacaatggatccaactcagcatgtaaataattggatgaagcacaacgtagcggactctcagattacgaccattggcaatctggtcccgcaaaaaacctactccgtgaaagtgctggcttttacaagcattggggatgggccattatcaagtgatattcaggtcatcactcaaaccggcgtgcctgggcaacctctgaacttcaaggcagaacccgaatcagaaacatctatcttactcagttggacccccccacgctccgatacaatcgctaactacgagctggtgtataaagacggagaacacggtgaggagcagcgaataacaatcgagcccggaacctcttatcggctccaggggctgaagccaaatagcctttactattttagactggccgcaaggtcccctcaggggcttggggcatcgaccgctgagatttccgcacggaccatgcaatcaatgtttgctaagaatttccatgttaaggccgtcatgaagacttcagtcttgctcagttgggagatcccggagaactacaatagcgcaatgccctttaagattctgtatgatgacggcaagatggtggaggaggttgatgggagggccacccaaaaacttatcgtaaatctgaagcccgaaaagagctactctttcgtcttgacaaataggggaaatagtgcgggtggactccagcatcgagtgacggccaagacagcgccagatgtactgcgaactaaaccagccttcatagggaaaacaaatctcgatgggatgatcactgttcaactgcctgaagtacctgccaacgaaaacatcaagggctactatataatcatcgtgccccttaagaagtccaggggtaaatttattaaaccctgggagtcccctgatgaaatggagctggacgagttgctcaaagagatctcgagaaagcgacggtctatcagatatgggagggaagtagaactcaagccatacatcgccgctcattttgacgtcctccctactgagttcactctgggcgacgacaagcattatggtggtttcaccaacaagcagttgcagtctggtcaagagtacgtgtttttcgtgcttgcagtgatggaacacgccgagagcaagatgtacgctacatcgccctacagtgatccagtggtctcaatggaccttgatccacagcctattacggatgaggaagaagggttgatttgggtcgtaggccctgtgctggccgtcgtgtttattatctgcatcgtcatagctattctcttgtacaagcgcaagcgcgcagaaagcgattcccgcaaatctagcatccctaacaataaggagatcccatcacatcaccctaccgatccagttgagctgagacggctcaactttcagacccccggaagcgatgattcgggctacccgggtaaccttcattcttcttctatggctagccacccaccaatccctattctggagttggctgatcatatagagaggctcaaagccaacgacaatcttaagttttcacaggaatacgagtcgattgaccctggacagcagtttacctgggaacattctaatctggaagtgaacaagcctaagaaccgctatgcaaatgttatagcttatgaccacagtcgcgtgttgctctccgcaatagaaggaatcccgggaagtgattatgtgaacgccaattacattgacggataccggaaacagaacgcatacatcgctacacaaggctcactgcccgagacctttggggatttttggcgcatgatttgggagcagcgttctgctacagttgtcatgatgaccaagctggaggagcggtctcgggtgaaatgcgaccaatattggccctctcgaggcactgagacacacgggcttgttcaggtgacactcctggacactgtggaactggctacttactgcgtaaggacctttgctctctacaaaaatgggtcatcagaaaagagagaagtgaggcagtttcaattcacagcttggcccgaccacggagtgcctgaacaccctacacccttcttggcgttcctgcgcagagttaaaacctgcaatcctcctgacgcgggacctatggtcgttcactgcagcgccggtgttgggcgaacgggttgctttattgtgattgatgcaatgctggagcgtatcaagcacgagaaaaccgtagacatttatgggcacgtaaccctgatgcgcgcacaaagaaattatatggtgcagaccgaggatcagtatatcttcatacatgacgctctgctggaggctgtgacctgtggaaacactgaggtgccggctcgcaacctatatgcttacatccagaagctgacccaaatcgaaaccggcgagaatgtgacagggatggagctagaattcaaacgacttgctagctcaaaggctcacacctcccgctttatttctgccaatctgccctgtaataaattcaaaaacagactggtgaacatcatgccatacgagtctacaagagtgtgtctgcagcccattagaggcgtagaaggcagcgattacatcaacgctagtttcattgatggatacagacagcagaaggcatatatagccacccagggcccactggcagagacaaccgaggatttctggcggatgttatgggaacacaactcgaccatagtcgtaatgctgacaaagctgcgggagatgggcagggagaagtgccatcagtactggcctgccgaacgcagcgcacgctatcagtacttcgtcgtcgaccctatggctgaatataacatgccacagtatattcttagggagttcaaagtaaccgatgctcgcgacgggcagtcccgcaccgtaagacagtttcaatttacagactggccagaacagggagtccctaaatcaggggaaggattcatcgacttcatcggtcaggtgcataagacaaaggagcagttcgggcaggacgggccaatctccgttcattgctccgccggtgtggggcgaaccggggtcttcatcacactcagtatcgtgctggaaaggatgcggtatgagggtgtggtcgacatctttcagaccgtaaaaatgctgaggacccagcggccagctatggttcaaactgaagaccagtaccagttcagctaccgggctgccctagagtatctgggtagctttgaccattatgccacttag

SEQ ID NO: 237040 - DNA, 4398 bp, synthetic construct
  misc_feature 1..4398: note = Description of Artificial Sequence: Synthetic coding sequence
  source 1..4398: mol_type = other DNA
atgaggggactcggaacgtgtctggcgactctggctggcctgctcctaacggctgcgggagagactttctcagggggttgccttttcgacgaaccctactccacctgtgggtactcccagagcgagggagatgactttaattgggagcaggtgaatacgctaacgaaaccaacttcagacccctggatgccctccggctctttcatgctggtgaatgcctcaggccgtcccgagggccaacgcgctcaccttctgttacctcagctcaaggaaaacgatacccattgtatcgatttccattacttcgtttctagcaaaagtaatagtcctcccggattgctcaatgtgtacgtcaaggtaaacaacggccctttagggaaccccatttggaatatctcaggcgatcccacccggacttggaatcgggctgagctggccatttcgaccttctggccaaatttttatcaggtcatattcgaggttatcacaagcggccatcagggttatctcgcaattgatgaagtgaaagtgctgggccatccatgcacccgcacaccccattttctacgcatacagaatgtcgaagtgaacgccggacaatttgccacttttcagtgctccgccataggcaggacagtggccggtgatagattgtggctccagggaatcgacgtgagggatgcacccttaaaggagatcaaggtcaccagttccagacgttttatcgcgtctttcaacgtggtaaatacgaccaagcgggacgccggtaagtaccggtgcatgattagaacagagggcggtgttgggatttcgaactatgctgaactcgtggtgaaggaacctcccgtcccaatcgcgcctccacaactcgcaagcgtgggggcaacctacctgtggattcagctgaacgctaacagcattaacggtgatgggccaatcgtcgctagagaagtggagtactgtaccgcgagtgggagctggaacgaccggcagcccgttgactccacttcttacaaaatcgggcacttagacccagacactgagtacgagattagcgtgctgttgacacggcctggcgagggagggacagggagccccggtcccgcactcagaacccgaaccaagtgcgccgatcctatgcgaggcccacgcaaactggaggtggtggaggtgaagtcaaggcaaattactatccgttgggaaccttttggatataacgtcaccaggtgccattcttacaatctgactgtgcactattgttatcaggtgggcggacaggagcaggtcagagaggaagtgtcatgggacaccgaaaatagccacccacaacatactatcacaaatctgtctccttacacaaacgtcagtgttaaattgatcctgatgaacccagaaggaaggaaggaaagccaggagctcattgtccagaccgatgaggaccttcctggcgcagtccccaccgagtcaattcagggctccaccttcgaggaaaaaatcttcttgcagtggagggaacctacccaaacctacggagtgattacactctacgagataacctataaggccgtcagctcctttgatcctgagattgatctttcgaaccagtccggaagagttagtaaacttggcaatgagacacacttcctttttttcggcctgtaccccggaacgacatatagttttacgataagagcgtccactgccaaagggttcggtccacccgctacgaaccaattcacaacaaaaatctctgctcctagtatgccagcatatgaacttgaaacacctctcaatcagaccgataacacagtaactgtgatgttgaaacccgcacactcaaggggtgccccagtgtcagtctaccagatcgtggtcgaggaggaacgcccaagacgcacaaaaaaaaccaccgaaattttgaaatgttacccggtgcccattcacttccagaatgcaagcctcttaaactcccaatattacttcgccgcagaattccccgctgattccctgcaagccgctcagccatttactatcggtgacaacaagacttacaacgggtattggaacactcctttgctaccctacaagtcctataggatttacttccaggcagcttctagggctaatggggagaccaaaattgattgtgtgcaggtcgcaaccaaaggtgccgctacacccaagcccgtgcctgaacccgagaagcagactgaccacactgttaagattgcgggagtgatcgccggaattctcctcttcgtgatcatattcttaggagtggtgctcgtgatgaaaaaaagaaagctcgcaaagaaacgcaaggaaaccatgagctctacgcgccaggagatgactgtgatggtgaactccatggacaagagctacgccgagcagggtactaactgcgacgaagccttctcatttatggacacacacaatctgaatggcagaagtgtgtcctctccatcctcttttactatgaagaccaacactttgtccacttctgttccaaatagttattaccccgacccgtttgtgcccactgcaatcctagtgcctatcaacgacgaaacgcacacaatggcatccgacacctcatccctggttcagtctcacacctacaaaaaacgtgaacctgccgacgtaccctaccagaccggccagttacaccccgcaatacgtgtcgccgatctgctgcaacacatcactcaaatgaaatgcgctgagggctacggtttcaaagaggagtatgaatctttcttcgaaggacagagcgccccatgggactctgccaagaaggatgagaacagaatgaaaaaccgttatggcaatatcatagcttacgatcacagtcgcgtcagattgcaaacgattgaaggcgatactaattccgactatatcaacgggaactacattgacggctaccatcgacccaatcactacattgctacccagggccctatgcaagagaccatctacgacttctggcgcatggtgtggcacgaaaacactgccagtattattatggtcaccaatctcgttgaggtcggcagggtgaagtgttgcaaatattggccagatgatacagagatctacaaggatatcaaggtcaccttaatcgaaaccgagttactggctgagtatgtaattaggacttttgctgtcgagaaacgcggagtgcacgagatccgtgagatccgacaattccactttacaggatggcctgaccacggggtcccctaccacgcaaccgggctgctgggattcgtcagacaagtcaagtctaaatctccacctagcgcaggccctttggtggtacattgcagcgccggtgcgggtagaaccggatgctttattgtcattgatattatgctagatatggcagagagggagggggttgtcgatatttataactgtgtacgcgagttgagaagcagacgagtcaacatggtacagactgaggaacagtacgtgtttatccatgatgctatcctggaagcatgtctatgtggtgacacatcggtgcccgctagccaggttagatcactgtattacgacatgaacaaactggacccccagaccaatagctcacagatcaaggaggaatttagaaccttgaatatggtcacacccacactgcgagtcgaggattgtagcatagcgctcctccccagaaatcatgaaaagaaccgctgtatggatattctgcctccagatcggtgtctgcctttcctgatcacaatagatggcgaatctagcaattatattaatgccgctctgatggattcatacaaacagccctcagcctttatcgttacccaacaccctctgccaaatactgtgaaagacttttggcggttagtgctcgactaccactgtacttccgtcgtaatgcttaacgacgtcgatccggctcagctgtgcccccagtactggcccgagaacggcgtacatcgtcacgggcctatccaggtggaattcgtctctgccgatttagaggaggacatcataagtcggatctttcgaatttataatgctgcccgtccccaagacggctataggatggtccagcagttccaattcctaggatggcctatgtatcgggacacccccgttagtaagaggtcattcttgaagctcatcagacaggtagacaagtggcaagaggagtacaacgggggtgagggacgcaccgtggtccattgcctcaatggtgggggtcggtcagggaccttttgcgccatctcaattgtgtgtgaaatgctgcgccatcagaggacagtggacgtgtttcacgctgtgaagactttacgcaataataagcccaacatggttgacctcttggatcagtataagttttgttacgaggtggctcttgaatacctaaattctgggtag

SEQ ID NO: 237041 - DNA, 4323 bp, synthetic construct
  misc_feature 1..4323: note = Description of Artificial Sequence: Synthetic coding sequence
  source 1..4323: mol_type = other DNA
atggcccgagctcaagcccttgtgctcgccctgacatttcagctctgcgctcccgagacagaaacgcctgctgcgggatgtacatttgaggaggcctctgaccccgctgtgccatgcgaatattcgcaagcacaatacgatgacttccagtgggagcaggtgagaattcaccccggaacacgcgctcctgcagatctccctcacggtagctatttgatggtaaacacaagccagcacgcccctgggcaacgcgcacatgtgatcttccagagtttgtccgagaatgacacacattgcgtccagttctcttattttctttacagccgagacgggcatagtcctggaaccctcggcgtgtatgtcagagtgaacgggggtccactcgggtcagcagtgtggaatatgacggggagtcacggacgtcagtggcaccaggctgagttggcagtgagcaccttttggcccaacgaatatcaggtcctgttcgaagctctgattagtccagaccgtaggggatacatgggactggatgatatacttttgttgagttacccttgtgctaaagctcctcatttcagtagactaggggacgtggaagttaatgctggacagaatgcatcatttcaatgcatggcagcaggtcgggcagcggaggccgagcgttttctcctacaaagacagtccggcgctcttgtcccagccgcaggagttaggcacatctcccatcgacggttcctggctaccttccctcttgccgcagtctcacgcgcagaacaagatctctatcgatgtgtgtctcaagcacctaggggagctggagtgagcaactttgctgagctgattgtcaaggaacctccaactccaatcgctcctcctcaattactcagagctgggccaacatatttaattatccaactgaacaccaatagtatcataggcgacggtccgatcgtacgcaaagagatcgagtatagaatggcgcgtggcccttgggctgaggttcacgccgtgtccctgcagacctacaagctgtggcacttggaccctgatacagagtatgagatttctgtacttctgacccggccaggcgatgggggaaccggccgaccgggtcctccccttatttccaggactaaatgcgccgaacctatgagggcccctaagggtcttgcctttgcagaaattcaggctcggcaactaacgctgcagtgggaacctcttgggtataacgtcacgagatgtcatacttatacggtaagcctgtgctaccactacacattggggagctcccacaaccagactatccgggagtgcgtcaaaaccgagcagggcgtatccaggtacacgattaaaaacctgcttccatatcgcaacgtccatgtccggctagtgctgaccaatcctgagggtcgaaaggagggtaaagaagtgacctttcagaccgatgaggatgtgccctcgggcattgcagccgaatctctcactttcacgccacttgaagacatgatatttctcaaatgggaggagccacaggaaccaaacggcctgattactcagtacgagatttcttaccagagtattgagtcttccgatcctgcggttaacgtgccgggtccaaggaggaccatcagcaagcttcgtaatgaaacttaccacgtattcagcaacttgcaccctgggacgacctacctgttctctgtgagggcaagaaccggcaaggggttcggccaggcagcccttaccgagataacaactaatatttcagcaccaagcttcgattacgccgatatgccaagccccttaggagagtccgaaaataccatcaccgtcttactgcgccctgcacagggcagaggggctcctataagcgtctaccaggtgattgtcgaagaagagcgcgctcgccgacttcgcagagagccaggcggtcaggattgtttccctgttcctctcacctttgaggcggcactggcgaggggcctggtacactactttggcgcagagcttgctgccagttctctgcctgaagcaatgcccttcaccgttggagataaccaaacatataggggcttttggaacccacctctggaaccaaggaaagcctacttgatatatttccaggccgctagccatcttaaaggagagacccgccttaactgcatcagaattgcaagaaaggccgcttgcaaagaaagcaagcgaccactcgaagtgtcacagcggtcagaagagatgggactgatattagggatatgcgcaggcggactcgcggtgctgattctgttgctcggcgcaatcattgttataatcagaaaggggaaacccgtgaacatgacaaaggctaccgtgaattatcgccaggagaaaacacacatgatgagtgcagtggatcggagttttactgaccagtccacactccaggaggacgagcgcctcgggctcagcttcatggatactcacggctattccacaaggggtgatcagaggtcagggggagtaacggaagcttcttccctgctgggcggaagtccacgacggccatgcggcaggaaaggaagcccctaccacactggccaacttcatccggcagttagagttgccgacctgctacagcacataaaccagatgaaaaccgctgagggttacggatttaaacaggagtacgagagcttttttgaaggctgggatgccaccaagaagaaggataaggtgaaaggctcacggcaggaaccaatgccagcctacgacaggcacagagtcaaactgcaccctatgctcggtgatcctaatgccgattatattaatgccaactatatcgatattcggatcaatagagaaggctaccaccgtagcaatcattttatcgctacccagggccctaagccagagatggtatacgacttctggcgcatggtgtggcaggagcattgttccagcatcgtcatgataacaaaactggtcgaggtgggaagggtaaagtgttctcgctattggcccgaggactccgacacatatggagacatcaagataatgttggtcaagacagagacattggccgaatatgtagttcgtaccttcgctttagaacggagagggtactccgctagacatgaggttaggcagttccatttcacggcttggcccgaacacggagtcccttatcacgccactgggctgcttgccttcatcagaagggtgaaggcctcaactcctcctgacgcaggccctatcgttatacactgctctgccggtaccgggaggaccggatgctatatcgtcctggatgtgatgttagatatggcggaatgtgaaggagttgttgatatttacaactgtgtcaaaaccctgtgtagtaggcgtgtgaacatgattcagactgaagagcaatacatctttatccacgacgctattctggaagcctgtctctgtggcgagaccaccatccccgtgtcagaattcaaagccacttacaaggagatgatccgaatcgaccctcagagcaattctagccagctgagggaggaattccagacacttaattctgtcaccccccctctggacgttgaagaatgtagcattgctttactgccccgaaacagagataaaaacaggtccatggacgttctcccccctgacagatgccttcccttcctgatcagtaccgatggtgattccaataactatatcaacgctgccttaactgatagctatacccggtcggccgcatttattgtgacgctccaccccctccaatccaccacccccgatttttggaggctggtgtacgactacgggtgtacgagtattgtgatgctcaaccagctaaaccagtccaattctgcctggccttgcttacagtactggccggagccagggaggcagcaatacggtctcatggaagtcgagtttatgagcgggaccgcagacgaggacttagtagctcgtgtgttccgcgtgcaaaacatctctagagagggtcacctcctcgtgcgtcactttcagtttctacgatggtccgcttatcgtgacacgccagacagtaaaaaggctttcctgcacctgttagccgaagttgataagtggcaagccgagagcggggatggtcgcactatcgtgcactgcctcaatgggggaggccgatccggcaccttctgtgcctgcgcgaccgttctagaaatgattcgctgtcacaatctggtagacgtcttctttgcagccaagaccctgcgcaattacaaaccgaatatggtggagacaatggaccaatatcatttctgctatgacgtggcacttgaatatctggaaggactggagagtcgatag

SEQ ID NO: 237042 - DNA, 4347 bp, synthetic construct
  misc_feature 1..4347: note = Description of Artificial Sequence: Synthetic coding sequence
  source 1..4347: mol_type = other DNA
atgagaatcctgaagcggttcctggcatgtatccagctgttgtgcgtctgtcggctggactgggccaacgggtactacagacagcaaaggaagctggtcgaggagatcggctggtcttacacaggagcccttaaccagaagaattgggggaagaagtatccaacatgtaattctccaaaacagtcacctattaacatcgacgaggatttgacacaggttaacgtaaacctgaagaaactgaaatttcagggatgggataaaacatccctggagaatacttttatacataataccggaaaaactgtggagatcaacctgaccaatgattatagagtcagtggcggagttagcgaaatggtcttcaaagcctccaaaatcaccttccactggggaaagtgcaacatgtccagcgatggctcagaacactccctggaagggcagaagtttccactggagatgcaaatttattgtttcgatgccgatagattttctagcttcgaagaagcggtgaaaggcaaaggcaaattgcgcgcactgagcatcctgttcgaggtagggaccgaagaaaatctggattttaaggcaatcattgacggcgtagaatcagtctcacggttcggcaagcaggccgcacttgaccccttcattttactcaatttgctcccaaacagcactgacaagtactacatttacaacggcagtctgacctctcccccatgtacggatacggtcgattggatcgtcttcaaagataccgtgagtatctccgaaagccaactggccgttttctgtgaagttcttaccatgcaacagagcgggtatgtgatgcttatggattatctgcaaaacaatttccgtgaacagcagtataagttcagccgccaagttttctcgagttacacagggaaggaggaaattcacgaagccgtgtgtagttctgagcctgaaaacgtgcaagccgatcctgagaattatacttcactgctggtgacatgggagcggcctagggtggtgtatgacacgatgatcgagaagttcgcggtgttgtaccagcagttggatggagaggatcaaactaaacacgagttcttaaccgacggataccaggacctgggcgcaattctgaataatttactgcctaatatgagttacgtgctgcagatcgtcgctatctgtacgaatggcctgtacgggaagtattccgaccagttgatcgtcgatatgcctacagataatcctgaactcgacctctttcccgaactcattggaaccgaagagatcattaaggaggaagaagaaggcaaggacatcgaagagggggcaatcgtcaacccagggcgtgattctgctactaaccagatcagaaaaaaagagccccagatatctacaactactcattacaacaggatcgggaccaaatataatgaagccaagacgaatcgctctcctacccgcggatctgagttttctggtaagggcgacgtgcctaatactagtttaaactcaacttcacagcctgtgacgaagctcgccaccgaaaaagacatctccctcacctcccaaaccgtcactgagctcccccctcatacagttgaggggaccagtgccagtcttaacgatggttcaaaaaccgtgttacggagcccacatatgaacctatccggaactgctgagagcctcaacacggtgtctattacagaatatgaagaggagtcccttctgacgtcctttaaactggatacaggggcagaggactcaagtggaagttctcccgctactagcgccataccattcattagcgaaaatattagccaggggtacatcttcagcagcgagaatccagaaactattacctacgatgtcctgatcccggagagcgctagaaacgctagtgaagattccacaagctccgggtctgaggaatctcttaaagatccatccatggagggaaacgtctggtttcccagttctaccgacataacagcccagccggatgtgggtagcgggagggaatccttcttgcaaaccaactatactgagatcagggtggacgaaagtgagaagactacaaagtcattctcggcgggtcccgtaatgagtcagggaccatctgtcacagatttggagatgcctcattactcaacctttgcctattttccaactgaagttaccccccatgctttcactccttctagtcgccagcaggatctggtcagcaccgtcaacgtcgtgtattcccaaactactcagcctgtgtacaacgaggcgtcaaactcttcccatgagagtagaataggcctggccgagggactggagtccgagaaaaaggctgtgatccccctagtgattgtctctgcactgacctttatctgtctggtcgtgctggtgggtatcctgatctattggagaaagtgtttccagactgcgcacttttacttagaagattccacgagcccaagggtgatttcaacacctccaactcccatctttcccataagtgatgatgtgggagccattccaattaagcacttccctaaacatgttgctgacctgcatgcgtcttcagggtttaccgaggaattcgaggaggtccagtcctgcacagttgaccttggtatcacggctgacagctctaatcacccagataacaagcacaaaaaccgttacattaatatcgtcgcctatgaccattcgcgcgtgaaactggcccagttagcagagaaggacggcaaactgaccgactacattaatgctaattacgtcgatggctacaaccgccctaaagcatatattgccgctcaaggcccacttaagtcaactgcagaggacttctggcgaatgatttgggagcacaacgtagaagtgatagtgatgattaccaacctcgtcgagaaaggaaggagaaaatgcgatcaatactggccggcagacggcagtgaagagtacggcaatttcctcgtcacccagaagtctgtacaagtgctcgcgtattataccgtacgtaatttcactctgcgcaacaccaagatcaagaagggtagtcagaaaggaagaccctccggacgggttgttacccaatatcactatacccagtggcccgacatgggcgtgcccgagtattcactccccgtcctgacatttgtccgcaaagcagcatatgccaaacggcatgccgtcggtccggtggtggtgcattgtagcgcaggcgtgggcagaaccggtacatacatagtcttggacagcatgctgcaacaaattcagcacgaggggaccgtgaatatcttcggctttttaaaacacatccggagccagaggaactatcttgtgcagactgaggagcagtacgtgtttatacatgacactctagtggaggccatccttagtaaggagacagaggtgctcgactcccatattcatgcctatgtgaatgcactactcatccctggcccagctggcaagactaagcttgaaaagcagttccaattgttgtcacaatctaacatccagcaaagcgattacagtgctgccctgaaacagtgcaaccgggagaagaatcgcacgtcatccatcattccagttgagcgatcccgggtcggcatcagctccctaagcggagaggggaccgattacataaatgcctcctacatcatggggtattaccagagtaacgagttcattattacccagcatccccttctgcatactataaaagatttctggaggatgatttgggatcataacgcgcagctcgtagtaatgatcccagatgggcaaaacatggcggaagatgagttcgtgtattggccaaacaaggatgagccaattaactgcgagtcctttaaggtgaccttgatggcagaagagcacaagtgcttaagtaacgaagagaaactgattattcaggattttatcttagaggcaacccaagacgactacgtgctggaggttcggcatttccaatgccccaaatggcctaacccagactcccctatcagcaagacatttgaactgataagcgttataaaagaagaggccgctaaccgagatggacctatgatagttcatgacgagcacgggggagtgaccgctggcacattctgtgcactgaccacactgatgcatcaacttgaaaaggagaacagtgtggatgtgtaccaagtggctaaaatgatcaatttaatgcgaccaggagtgttcgcggatattgaacagtatcaatttctctacaaggtgatcttaagccttgtttctacccggcaggaagagaatccctcaacatcgctcgactcaaatggagcggcactgccggatgggaacatcgccgaatccctcgaatccttggtgtag

SEQ ID NO: 237043 - DNA, 504 bp, synthetic construct
  misc_feature 1..504: note = Description of Artificial Sequence: Synthetic coding sequence
  source 1..504: mol_type = other DNA
atgaacaggccagcaccagtggagatctcgtacgagaatatgaggttcttgatcacccacaaccctacaaatgctacgctgaataagttcaccgaggagctgaaaaaatacggagttaccactctcgtccgagtatgcgatgcgacctatgataaagcccctgtggagaaagagggcattcacgtactagactggccgttcgatgacggagcgcctccacctaaccagattgtggatgattggttgaacctgctgaagaccaagttcagggaggaaccaggatgctgcgtggcagtgcactgtgtagccggactgggtagggctcccgtcctggtcgccctcgccttgatcgagtgcggcatgaaatatgaggacgccgttcaattcatccgtcagaaacgtcgcggagccttcaacagcaagcagctgctctatttagagaagtaccggcctaagatgaggctcaggttcagggataccaacggccactgctgcgtacaatag

SEQ ID NO: 237044 - DNA, 249 bp, synthetic construct
  misc_feature 1..249: note = Description of Artificial Sequence: Synthetic coding sequence
  source 1..249: mol_type = other DNA
atgaatcgcccagcccctgtggagattagctacgagaacatgcgcttcctgatcacccataatcccaccaacgcaacactcaataagttcacagaggaactgaaaaagtacggtgtcaccacacttgttagagtttgtgacgcaacttacgacaaagcacccgttgaaaaagaaggaattcacgtcctgaagaagaaaggcagcgtccagttccagacggccgctcttttcggggagatccctacatag

SEQ ID NO: 237045 - DNA, 411 bp, synthetic construct
  misc_feature 1..411: note = Description of Artificial Sequence: Synthetic coding sequence
  source 1..411: mol_type = other DNA
atgaaccggcctgcccctgttgagatttcctatgagaatatgagatttcttatcactcacaaccctaccaacgccacacttaataaattcaccgaagattggcctttcgacgatggcgcacctcctcccaatcagattgtggacgattggctgaacctgctgaaaacgaagtttagagaggagcccggatgctgcgtagccgtacattgtgttgcgggactgggtcgggcacccgtgctcgttgctctcgcgctcatcgagtgcggaatgaaatacgaggatgcggtgcaatttatccgtcaaaagaggaggggcgcttttaacagcaagcaactgctgtacctggaaaaataccggccaaagatgcgactccgattccgcgacaccaacgggcattgttgcgtgcagtag

SEQ ID NO: 237046 - DNA, 192 bp, synthetic construct
  misc_feature 1..192: note = Description of Artificial Sequence: Synthetic coding sequence
  source 1..192: mol_type = other DNA
atgaataggccagcccctgtggaaatttcatacgagaacatgaggttcctgattacgcacaatcccacgaacgctaccctgaacaagtttacggaagagctcaagaaatacggcgttaccacattggtccgagtgtgtgacgccacatatgataaggctccggtcgagaaggaaggtattcatgtcctgtag

SEQ ID NO: 237047 - DNA, 69 bp, synthetic construct
  misc_feature 1..69: note = Description of Artificial Sequence: Synthetic coding sequence
  source 1..69: mol_type = other DNA
atgaacaggccagcccctgtcgagattagctatgagaacatgaggttccttattacccataacccttag

SEQ ID NO: 237048 - DNA, 522 bp, synthetic construct
  misc_feature 1..522: note = Description of Artificial Sequence: Synthetic coding sequence
  source 1..522: mol_type = other DNA
atggccagaatgaaccggccagcacccgtggaagtttcatataaacacatgcggttcctgattacacacaaccccaccaatgcgactctgtcaacattcatcgaagacttgaaaaagtacggagccactaccgtagtgcgagtctgcgaggtgacctatgacaagacaccgctggagaaagatggtataaccgttgttgactggcctttcgacgacggcgcacctccacccggaaaagtggtggaggattggctgagcctggtcaaagcaaaattctgtgaggcccctggctcctgcgtggcagtacactgcgtcgcagggcttggtcgcgctcctgtacttgtcgccctggctctcatcgagtccgggatgaaatatgaggatgctatccaatttattagacagaaacgcagaggcgctataaactctaaacagctgacttacttagagaagtaccgacctaagcaaaggctacggttcaaggatccacatacacacaagacccggtgttgtgtgatgtag

SEQ ID NO: 237049 - DNA, 447 bp, synthetic construct
  misc_feature 1..447: note = Description of Artificial Sequence: Synthetic coding sequence
  source 1..447: mol_type = other DNA
atggccaggatgaataggcccgctcctgtggaagtgagctataagcatatgaggttcctgatcactcacaaccccaccaacgcaactctgagcacctttatagaggaccttaaaaaatatggagccactactgtggtgagagtctgcgaagtaacctacgataagaccccattggagaaggatggcatcaccgtcgtggactggcccttcgacgatggcgctccgccacctgggaaggtcgtcgaggactggctgagccttgttaaggccaaattttgtgaggcaccaggttcatgtgttgccgtgcattgtgttgccggtctcggaaggaagaggcgcggtgccattaactccaaacaactaacctacctcgagaagtaccgtcctaagcagaggttgcggttcaaggacccccacacccacaaaacccgctgctgtgtcatgtag

SEQ ID NO: 237050 - DNA, 447 bp, synthetic construct
  misc_feature 1..447: note = Description of Artificial Sequence: Synthetic coding sequence
  source 1..447: mol_type = other DNA
atggcacgcatgaataggcccgctccagtggaagttagctacaagcacatgcgctttctcataacacataaccccacaaacgctaccctgagtacttttatagaagacctgaagaaatatggagctactacggtggttcgcgtctgtgaagttacgtatgataaaacccctctggagaaagacggcattactgtggtcgactggcctttcgacgatggcgcacctcccccagggaaagtggtcgaggactggctctcgttagtgaaggctaaattctgtgaagcccctggatcttgcgtagccgtccattgcgtggccggtcttgggagaaagcgccgtggagctataaactcaaagcaattaacctatctggaaaagtacagaccaaagcagcgcctgcgtttcaaggatccccatactcataagacacggtgttgcgtcatgtag

SEQ ID NO: 237051 - DNA, 522 bp, synthetic construct
  misc_feature 1..522: note = Description of Artificial Sequence: Synthetic coding sequence
  source 1..522: mol_type = other DNA
atggctagaatgaaccgccctgcccctgtggaagtaagctacaagcacatgcgtttcctgatcactcacaaccctacgaatgcaactctaagtaccttcatcgaagatctgaagaaatatggggctacaaccgtcgtaagagtctgcgaagtgacttacgataaaacccccttggaaaaggatggcattaccgtcgttgactggcctttcgacgacggggcaccaccccctggaaaggtcgtggaggactggttgtccctcgtgaaagcaaagttctgcgaggctcccggaagttgtgtagctgttcactgtgtggccggattgggtagggcccctgtcctcgtggccctcgcactcattgagagtgggatgaagtacgaagatgccattcagttcatacgccagaaaagacgtggcgctatcaattctaagcagttgacctacttggagaagtatagaccaaaacagcgtcttaggttcaaagatcctcacactcataaaactagatgctgcgtgatgtag

SEQ ID NO: 237052 - DNA, 213 bp, synthetic construct
  misc_feature 1..213: note = Description of Artificial Sequence: Synthetic coding sequence
  source 1..213: mol_type = other DNA
atggccagaatgaacagacctgcacccgtggaggtgagctacaaacacatgcgctttcttattacccacaacccaaccaacgctaccttgtctacctttatcgaggacctgaagaaatatggggcaaccaccgtcgtccgcgtgtgcgaggtgacatatgacaaaacgccattggaaaaggacggcataaccgtggtagattggcccttttag

SEQ ID NO: 237053 - DNA, 2343 bp, synthetic construct
  misc_feature 1..2343: note = Description of Artificial Sequence: Synthetic coding sequence
  source 1..2343: mol_type = other DNA
atggagcaagtggagattctacggaagttcattcaacgcgttcaggccatgaagtccccggaccataacggtgaggataattttgcacgggatttcatgaggctgcgacggcttagcactaaataccgtactgaaaagatctaccctactgcaactggagaaaaagaggagaatgttaagaagaaccgttataaggacattctcccctttgaccattcacgcgtgaaattaaccttgaagacaccctcgcaagactctgactatattaatgctaattttatcaagggtgtgtatggcccaaaggcttacgtggctacacagggcccacttgccaacacggtgattgatttttggcggatgatctgggaatataatgtagtcatcatcgtcatggcatgcagggagttcgagatggggcgaaaaaagtgtgaaaggtactggccactgtatggtgaggaccccattaccttcgccccatttaaaattagctgcgaggacgagcaggctaggaccgattattttattagaacgctgctcttagagtttcaaaatgagtcccggaggttgtaccaattccactacgtgaactggccagaccacgacgtcccatcaagcttcgattctattctcgatatgatatcgttgatgaggaaataccaggaacacgaggatgtcccgatatgtatccattgttctgcaggctgcgggaggaccggggcaatttgcgcaatagattacacttggaaccttctgaaagccggaaagattccagaggagtttaacgtgtttaaccttattcaggagatgcgcactcagcgacactctgcagtgcaaaccaaggagcagtatgagctggttcatagagcaattgcacagctgttcgagaaacagctgcagctatatgagatacatggcgcacagaagattgctgacggggttaacgagatcaacacagaaaatatggtttcctccatagaaccagagaagcaggatagccctcctcctaagcctccacggactcgatcttgcctggtggagggtgacgcaaaagaagagattctgcaacccccagaacctcatccagtgccccctatcctcaccccttccccgccttccgcctttccaactgtgactaccgtctggcaagataatgaccgttaccatcccaagcctgtgctgcatatggtctcatcagagcagcactctgctgacctcaacaggaactactccaaaagtactgaattgccaggtaagaacgagtccactatagaacagattgacaaaaaacttgagcggaacttatcatttgagataaagaaagtgcccttacaggagggtcctaaaagcttcgatgggaacactcttctcaaccggggtcatgcaattaagatcaaaagtgcatctccatgcatcgccgacaagatctcaaagcctcaggagctgtcttccgatctaaatgtgggagacacttcccagaattcatgtgtggattgttccgtgacccagagtaacaaggtgagcgtgacacctccggaagaatcacagaatagcgataccccaccccgtcccgaccgcttgccactggatgaaaaaggccacgtgacttggagtttccatgggccagaaaacgctatacccatcccagacctctccgagggcaattcctcggatatcaactaccaaacaagaaaaaccgtctcgctcacaccaagtcccactacacaggtggagaccccagatctggtggaccatgataatacgagccctttgtttcggactccattgtctttcacaaatccgctgcacagtgatgattccgacagtgatgagcgtaacagcgatggcgctgtcacacagaataagacaaatatcagtaccgccagcgctactgtcagcgcagccacgtccaccgaatctatctcgacacgtaaagtgctgcctatgagcattgcaaggcataatatcgctgggacaacccactccggagccgaaaaggacgtcgacgtgtctgaggacagcccgcctccccttccagaacggactcctgaaagtttcgtgctagcatcagagcacaacacacctgtgcgcagcgaatggtccgagctgcagagccaggagcgaagcgaacagaagaagagcgagggtttgatcacaagtgaaaatgagaagtgcgaccatcccgctggcggaatacattatgagatgtgtattgagtgtcctccgaccttttctgacaagagagaacaaattagcgagaaccctaccgaggctacagatatcggctttggtaatagatgcgggaagccgaagggccctcgggaccccccatcagagtggacttag

SEQ ID NO: 237054 - DNA, 1986 bp, synthetic construct
  misc_feature 1..1986: note = Description of Artificial Sequence: Synthetic coding sequence
  source 1..1986: mol_type = other DNA
atgatttgggagtacaacgtcgtgatcattgtcatggcttgcagagaattcgagatgggcagaaaaaaatgcgagagatattggccgctctatggagaggaccctatcacattcgcccctttcaagatcagctgtgaagatgagcaggctcgtaccgactactttatccggaccctcctgctcgagttccagaatgaatctcgtcggctgtatcagttccactatgtcaactggccggaccatgatgtgcccagctcctttgattccatcctcgacatgatctcactgatgaggaaatatcaggagcatgaagacgtgcctatatgcatccattgctcagccggatgtgggaggacaggggcaatttgcgctatcgactatacttggaacctccttaaggccggtaagatccctgaagagttcaacgtgtttaacctgatccaggagatgagaacacaaaggcattctgcggtgcagaccaaggaacagtacgagcttgtgcaccgagcaatcgcacaactcttcgagaaacagctccagctgtatgaaatccacggtgcgcagaaaatcgcagacggcgtgaatgagattaacacagaaaacatggtgtcgtctatcgaacctgagaaacaggactctccccctccaaagccccctcgcacacggtcctgccttgtggagggagatgccaaagaggagattttgcaacctcctgagcctcatccggtgccccctatcctgacaccctccccgccaagtgcctttcccactgtcacaacagtctggcaagataacgacagataccatcctaagcccgtgctgcatatggtttcctctgagcagcatagtgctgatctgaatcggaactactccaagagtaccgagctccccggaaaaaacgagagcactattgagcaaatagacaaaaagctcgagagaaatctcagtttcgagatcaaaaaggtacccctgcaggaaggccctaagtccttcgacgggaacacgcttctgaatcgcggacacgcaatcaagatcaagagcgccagcccctgcatagccgataagatctccaagccccaggagctctcgtctgatttgaatgtcggcgacaccagccagaactcctgcgttgattgttctgttactcagtctaataaagttagtgtcactcccccagaggaatctcagaattcggatactccacctaggcccgatcgactaccgctggacgagaaaggacacgtgacctggagcttccatggtcccgaaaacgcaattcctattccagacttgagtgaggggaattcaagcgatataaactatcaaacccgcaagactgtgagcctgactccttcccccactactcaagtagagaccccagatttggtggaccacgataacacaagccctctgtttcgcactcctctgagctttacaaaccctctgcactccgacgatagcgatagcgatgaaaggaatagtgacggagcagtgacacagaacaagactaacatctctactgcatcagcaaccgttagtgccgcaacctctacagagtcaatttcaacacgcaaggtgttgccaatgagtattgctcgtcacaacatcgctggcacaactcacagcggggcagagaaagacgtggacgtctcggaggactctccccctccactgcctgagaggacacctgagtctttcgtcctggcaagcgagcataatacgccagtccggtccgagtggtctgagctgcagagccaggagagaagcgagcagaaaaagagcgaggggcttataacttcagaaaatgagaaatgcgatcacccagcgggagggatccattatgaaatgtgtatcgaatgcccccctactttctctgacaagagagagcagatttcagagaacccaaccgaggccacagatatcggatttgggaaccgctgtgggaagcctaaggggccaagggacccccctagcgagtggacctag

SEQ ID NO: 237055 - DNA, 1632 bp, synthetic construct
  misc_feature 1..1632: note = Description of Artificial Sequence: Synthetic coding sequence
  source 1..1632: mol_type = other DNA
atgatttgggaatacaatgtggtgatcatagtgatggcatgccgcgaattcgagatgggcagaaaaaagtgcgagagatattggccattgtacggcgaggacccgattacttttgcacctttcaaaatctcctgcgaggacgaacaagcccgaactgattacttcatcagaactttgctgctcgagttccagaacgaatccagacggctgtaccaattccactacgtgaattggcctgaccacgacgtaccgtcatcatttgacagcatactggacatgattagcctgatgcgcaaatatcaagagcatgaagatgtgcccatctgtatccactgcagtgctggttgcgggcgtacgggggcaatatgcgctatcgactacacatggaatctcctgaaggctgggaagatcccagaagagttcaacgtattcaacctgatacaggagatgcgaacacagcgccacagtgcggttcagacaaaagaacaatacgagctggtccaccgcgcaatcgcacaactcttcgaaaaacagctccagctgtatgaaatacatggagcccagaaaattgcagacggggttaacgagatcaatacagaaaacatggtctcctcaattgagccagaaaaacaggattcccccccacccaagccacccaggaccagaagctgtctggtggagggcgacgcaaaggaagaaattctccagcctcctgaacctcaccctgtccctccaattcttacaccatctccaccaagtgcctttccaactgtcactaccgtgtggcaggacaatgaccggtaccaccctaagccagtccttcacatggtgtcatctgagcagcacagtgcagatctgaatcgcaattactccaaaagcacggaactcccgggtaagaacgagagcactatcgagcagatcgataaaaagttagagagaaacctgtcatttgaaatcaaaaaagtgcccttacaggaaggacccaagagtttcgatggcaataccttactgaataggggacacgctattaagataaaatctgcctcaccgtgtatcgctgataagattagcaagccgcaggagttaagctctgatctgaacgtcggggatacatcccaaaactcgtgcgtagattgcagcgtgactcaaagtaataaagtctcagtaacacctcccgaggagagccagaactcagatactcccccacgccctgaccgcctgcctctggatgagaaaggacacgtgacctggtcctttcacggccctgaaaacgctattccaattccagatctctctgaggggaattccagcgacataaattatcaaacccgtaagactgttagtctcacaccaagccctacaacacaggttgagacgcccgacctggttgatcatgacaacacttcccctctttttagaacccccctgagttttacgaaccccctgcacagcgatgacagcgacagtgacgagcggaatagcgacggggcagtgacgcagaacaagaccaatatatcaaccgcgagcgctaccgtgagcgcagctacatcgactgaatctataagcactcgcaaagttcttcctatgagcatcgcgagacataacagccgcaataacacttttaggtgttag

SEQ ID NO: 237056 - DNA, 6884 bp, synthetic construct
  misc_feature 1..6884: note = Description of Artificial Sequence: Synthetic coding sequence
  source 1..6884: mol_type = other DNA
atgcacgtttctctggccgaggccctggaagtgcggggtggcccactgcaggaagaagagatctgggcagtccttaaccaatcagccgagagccttcaagagctgttcagaaaggtcagtttagctgaccccgctgctctgggtttcattatctccccttggtccctgctgctcctgccatcaggctccgtatctttcaccgacgagaatatttcaaatcaggatctgagagccttcacagctcccgaggtgctacagaaccagagcttaaccagcttatcggacgtggagaagattcatatctactcgctggggatgacactttattggggagcggactacgaagttcctcagtcccagcctataaaactgggcgaccaccttaattctatactcctcgggatgtgcgaggatgtcatctatgcaagggtgtccgtgcgtactgtgctggatgcatgtagtgcccacatccggaactctaactgtgctccctcattctcatacgtcaaacatcttgtgaagcttgtgctgggcaatttaagcggtacagaccagctgagttgcaattccgaacagaaaccggacagatcccaggccatccgcgaccgactgcggggtaagggcctcccaactgggagatctagtacctcagacgttctggacatccaaaagcctccactcagccatcagaccttcttaaataagggattgtctaagtcaatggggttcctctcaattaaggatacccaagacgagaactattttaaagacattttgtcggacaacagcggcagagaggattctgagaataccttttccccttaccaattcaagacttctgggcctgaaaaaaaacccatacccggaatagatgtgctgagcaagaagaaaatctgggctagttctatggacctgctttgcaccgctgacagagatttcagttccggagagaccgcaacttatcgcaggtgtcatcctgaggccgtcactgtgcgcacctctacaactccaagaaaaaaggaagcaagatattccgatggctccatcgcgcttgatatcttcgggcctcagaaaatggaccctatttaccacacacgagagctgccaacatcatctgctataagctctgccttggaccgcatcagagaaaggcagaagaaactgcaagtcctgagggaagccatgaatgttgaggagcctgttcgaagatataagacataccatggtgatgtcttttccaccagctctgaatccccttccataattagctctgagagtgattttcgacaagtgaggcgctccgaggcctctaagcgttttgaatcatcttctggccttcccggagtagacgagacgttgagtcagggtcagagtcagagaccctcacgccagtatgagacccccttcgaagggaacttgattaaccaggaaatcatgctcaagcggcaggaagaggagttgatgcagcttcaggcaaagatggcactacgtcaaagtcgactcagcctgtatccgggagataccatcaaagcctcaatgcttgacattacccgggaccctctgcgggagatcgctttagaaacagctatgacgcaacgcaaactgagaaatttcttcggcccagagttcgtgaagatgacaatcgaacctttcatttctctcgatctgccaaggagtatccttacgaagaagggcaagaatgaagataaccgtaggaaagtgaatatcatgctgctgaacggtcagcgacttgagctcacttgcgacacaaagactatctgcaaggacgtgttcgatatggtggtagctcacataggacttgtggagcaccacttgtttgccctggccacactgaaagacaacgaatatttttttgtcgatcccgacctgaagttgactaaggttgctcctgaaggatggaaagaggagcccaaaaaaaagaccaaagctacagtgaactttaccctatttttccgcatcaagttttttatggacgacgtctccctgatccagcatactctgacatgccaccaatattatctacagctgcgtaaagacattctggaagaacggatgcactgcgacgatgagacaagcctgctcctggcaagcctggccctgcaggctgaatacggagactatcagcccgaggttcacggtgtgagctacttcagaatggagcactatctgcccgcacgtgtcatggagaagctggacctctcctacataaaggaagagctgcctaaactgcacaatacatatgtaggggcatctgagaaagagaccgagctcgagtttctgaaggtttgtcaaagactgaccgaatatggcgtgcacttccatcgcgtgcaccctgaaaaaaagagccagaccggcatcctccttggcgtgtgttctaaaggcgttctggtgtttgaggtgcataatggtgtgagaacacttgtcctccggtttccttggcgggagacgaagaaaatatcattctccaagaagaaaataactttacagaacacaagtgacgggatcaagcatgggttccagacagataacagtaagatctgtcagtacttactgcacctgtgctcctaccagcacaagttccagctacagatgagagctcgtcagtcaaaccaggatgctcaggacatcgacgtcttacataagcggtggtccattgtgagctccccagaacgcgaaatcactcttgtgaatctgaaaaaggatgccaagtacggactcggctttcaaattattggcggtgagaagatgggcagactggacctgggaatctttatctcaagcgtggccccagggggacctgctgatttagatggctgtctgaaacctggagatagactcatttccgtgaactccgtgtcattggagggcgtcagtcatcatgccgcaatcgagatcctccagaatgcacccgaagacgtcactctggtgatctcccagcctaaggagaagatttctaaggtcccgtctactcccgtgcacctgaccaacgaaatgaagaattacatgaagaaaagttcctatatgcaggattctgcaatcgactcctcctccaaggaccatcactggtctcggggaacgctgaggcacatttcagagaatagctttggcccttcaggcggtcttcgagagggaagcctgtccagccaggactccaggacagaatccgcctcgctgtctcagagtcaggttaacgggttctttgcatctcacctgggggaccagacatggcaagagtcgcaacatgggtccccctcacctagcgtaatctccaaagcgacagagaaggagacctttacagatagtaatcagtccaagactaagaaaccaggcatttctgacgtaacggattattcagaccggggagactctgacatggatgaggccacctacagttcctcccaagaccaccagactcccaaacaagagtcatcctcctcagtgaacacctctaacaaaatgaacttcaagacattctcttcaagcccgccaaagccaggggacattttcgaagtggagctcgccaaaaacgataacagtttgggaatctctgttactggtggcgtcaataccagtgtgcgtcacgggggtatctatgttaaggctgttatcccacagggagcagccgaaagtgatggcagaatccacaagggtgatagggttctcgcagtgaatggagtttcgctggagggagcaacacacaagcaagctgtagagacactgaggaatactggtcaagttgtgcatttacttcttgagaagggacagagccccacaagcaaagagcatgtgcctgttacaccccagtgcaccttaagcgaccagaatgcccagggacagggccctgagaaagtgaaaaagactacccaagttaaggactactcatttgtgaccgaggagaacaccttcgaggttaagctcttcaagaattctagcggcttaggcttttcattttctagggaagacaacctgatcccagaacagatcaacgcgtcgatcgttagggtgaagaagctctttcctggtcaacccgcagcggaaagtgggaaaatagacgttggcgacgtgatcctcaaggttaacggagctagcctaaaaggcttgagccagcaggaggtgatcagcgccctcagagggaccgcgcctgaggtattcttgcttctatgcagaccgccaccaggcgttcttcccgagatcgacactgctctgttgacaccgctgcaaagcccagctcaggtgctccccaactcgtccaaggactcaagtcagccttcctgtgtggaacagtctactagtagtgatgagaatgaaatgtcggataaatctaagaagcagtgcaagagtccttcccgtcgggactcttattccgattcttcaggttccggggaggatgacttagttaccgcacctgcgaacatcagcaacagcacgtggagctcagccctgcatcagactctctccaacatggtttctcaagcccagtctcaccatgaagctcctaaatcacaggaggataccatctgcactatgttttactacccccaaaagattcctaacaagcccgaattcgaagattcaaaccccagccccctccccccagatatggcacccggtcagtcgtatcagccgcaatccgagtcagccagcagttcaagtatggataagtaccacatacatcacatttctgagccaacacgccaggaaaactggacccccctgaaaaacgatttggagaatcacctggaagactttgagcttgaagtggagttattgataaccttaataaagtcagagaaaggctccctcgggttcaccgtaactaagggcaatcagcggatcgggtgttatgtgcacgatgtgattcaggatcccgctaaatctgacggtcgcctcaagcctggagatcggctgatcaaggtcaacgataccgatgtcaccaacatgacccatactgacgctgtaaacctcctgcgtgccgctagtaagaccgttaggttagtaatcggccgagtcctagaactgccacggatcccgatgctccctcatcttctgcctgatataaccctgacgtgcaataaggaggaattgggcttctccctgtgtgggggtcacgactccctgtaccaggtggtttacatctctgacattaacccaaggtccgtcgccgctatcgagggcaatctgcagttgttagacgtcatacattacgttaacggcgtttccactcaaggcatgaccctcgaggaggtgaacagggcattagatatgagccttccaagtctggtcttgaaagccacaaggaatgacctgcctgttgtgccatcctctaagagaagcgcagtctccgcccctaaaagtacaaaggggaacggttcttattcagtgggatcttgctctcagcctgctcttacccctaatgactcgttttcaacagttgcaggggaggaaatcaacgagatctcttatccaaaaggcaaatgttcgacatatcagattaagggtagtccgaacctcactctccctaaggaatcatacatacaagaggacgacatttacgacgattctcaggaagcagaagtcatccagtccctgctggacgttgttgatgaagaggctcaaaatctgctcaacgagaataacgcggcaggttactcatgcgggccaggaacactgaagatgaatggcaagctgagtgaggagcgaactgaggatactgattgtgatgggtcaccgcttcctgagtatttcacggaagccaccaaaatgaacggatgtgaagaatattgtgaggaaaaagttaagtcagagtcacttatacagaagcctcaagaaaagaagacagatgacgacgagatcacatggggcaacgatgagctccccatagagaggaccaatcacgaggacagcgataaagatcactcctttctgactaacgacgaactcgccgtcctaccagtggtaaaagtgttgcccagtggaaaatacaccggcgcaaacttgaaaagtgtaatccgggttctgcggggacttctcgaccagggtattcccagtaaagaactggagaaccttcaggaactgaaacccttggatcagtgccttatcggacagacgaaggagaaccggagaaagaatcgttacaaaaatatcctgccttacgacgcgacccgcgttccactcggagatgagggcggatatattaacgcttcttttatcaaaattcctgttggaaaggaagagttcgtgtacatagcatgccaaggtcccctacccacgaccgtaggagatttctggcaaatgatctgggagcagaagtctacggtcatcgcaatgatgactcaggaagtggagggggaaaaaataaagtgtcagagatactggcccaacatcctggggaaaacgacgatggtcagcaacagattacgccttgcgttggtgagaatgcagcaattaaagggattcgttgtgcgtgccatgactttggaagacattcagacaagggaagttaggcatatcagccacctgaattttacggcttggccagaccatgataccccatcccagcccgatgaccttctgaccttcattagctacatgcggcatatccataggagtgggccaatcattacacattgctctgcgggaattggcaggtccggcactctaatatgcattgatgtggtgctcgggctcatctcacaggacctagactttgacattagcgatctggtccgctgcatgcggctccaacggcacggtatggtgcagactgaagatcagtacattttctgctaccaggtgattctttacgtgctgactagactgcaagccgaggaggaacaaaagcagcagccccagctgttgaagta

SEQ ID NO: 237057 - DNA, 7304 bp, synthetic construct
  misc_feature 1..7304: note = Description of Artificial Sequence: Synthetic coding sequence
  source 1..7304: mol_type = other DNA
cagtttctattcacgaaggtgtctctggccgatcctgctgccctcggctttataatatctccgtggtcccttctgctcctgccgagcggatccgtcagttttacagacgagaacatttcaaaccaggacctgagggcttttaccgcaccagaggttctgcagaatcaatcactgacgtctctgagcgacgtcgagaagatccatatatactcgctgggcatgaccttgtactggggtgccgattacgaggtaccacagagccagccaatcaagcttggggaccatctgaactccatactgcttggcatgtgcgaagacgttatttatgcacgcgtctcagtgagaacggtgctagacgcctgctctgctcacatcaggaatagcaactgcgccccatcctttagctacgtgaaacatctcgtgaaattggtccttggtaatctgtctggaacagaccagctgtcttgcaattctgaacagaagcccgacagatctcaagccattcgcgacaggctgcgtgggaagggcctccctactggtcgctctagcactagtgacgttttagatatccaaaaacccccattgagccaccaaacttttctgaataagggtttaagcaaaagtatgggcttcttatcgattaaggacactcaggatgaaaattattttaaagatatcctgagcgacaacagcggacgtgaagattctgagaataccttcagtccatatcagtttaagacctccggaccggagaagaagccaatccctgggatcgacgtgctctctaaaaagaagatatgggcatcatccatggatctgttgtgtacggccgaccgggactttagctccggcgagacggctacatatagaagatgccacccagaggcagtgactgtgagaacctcaactacacccaggaagaaagaggcccgttattcggatggaagtatcgccctggacatattcggcccacaaaaaatggatccgatctatcacactcgggagctgccgacgagctctgctatctcatcagcccttgacagaattcgtgaaagacagaaaaaactccaggtcttgcgggaagccatgaacgtggaagagcccgtgagacggtacaaaacctaccacggcgatgtcttcagcacgtcttctgaaagcccttctattatcagctctgagagcgacttcaggcaggtgcgtcgatccgaggcctccaaacggttcgagtctagtagtgggcttccgggagtggatgagacgctgtctcagggccaaagccagcgaccttcaagacagtatgaaacccccttcgaaggaaaccttattaaccaggagattatgctgaagcggcaggaggaggagctgatgcagctgcaggccaagatggcactgagacagtcccgcctgagtttatacccaggtgatactattaaggcctcgatgctcgatatcactcgagacccactccgggaaattgctcttgagacagcaatgacccagaggaaacttaggaatttcttcggaccagagttcgtgaagatgaccatcgaaccttttatctccttggacctccccaggtccatcttgacaaaaaagggcaagaacgaagataaccgaaggaaagttaacataatgctcctcaatggacaaaggctcgaactaacctgcgacactaaaactatctgcaaagacgtgttcgacatggttgttgcccatattggcctcgtggagcaccaccttttcgcactggctactctcaaagacaacgagtatttcttcgtcgacccagacctcaaactcaccaaagtggcgcctgaaggttggaaggaggagcctaaaaagaagaccaaagcaacggtgaattttacactgttctttcgcatcaaattctttatggacgacgtgagcttaattcagcacacgctgacgtgccatcagtattacctgcagctacgcaaagacatcttggaggaaaggatgcactgcgatgacgagacctcccttttgctcgcaagcctggctctccaggcagagtatggtgattaccagcccgaagtgcatggggtttcttactttcgtatggagcattacctccctgcccgagtgatggaaaagcttgatctatcctacatcaaggaggagctccctaagctgcacaatacttatgttggcgcatcagagaaggaaactgaactcgagttcttaaaagtatgtcagagattaacggagtacggcgtacactttcaccgggtccatccggagaaaaaatcccagaccggcattctgctgggggtgtgcagcaagggggtactggtttttgaggttcacaacggtgttaggactctagtccttaggttcccttggagggagactaagaagatctctttcagtaaaaaaaaaatcacgttacagaacacctccgacggcatcaaacatggtttccagactgacaattcgaagatctgccaatatctgctgcacttgtgcagctatcagcacaaatttcagctacaaatgagagctcggcagagcaaccaggacgcccaggatatcgagcgtgccagctttcgatctttaaacctgcaggcggagtctgtacgcggtttcaatatgggcagagctatcagcaccggctctctagcaagctctacactgaacaaactcgcggtgaggcctctatcggttcaagccgaaatcctcaaaagactcagctgctctgaactgtctctgtaccagccattacagaattctagcaaggaaaaaaatgataaggcaagctgggaggagaagccacgggagatgtcaaaatcataccatgatttgtcacaagcctcactttaccctcatcggaaaaacgtgatagttaacatggagcctcctcctcagacagtggctgagctcgtggggaaaccgtctcatcagatgtcacgctcagacgccgagtccctggcgggagtgacaaagctgaacaactccaaatcagtggcctcccttaaccgcagcccagaacgtagaaaacacgagtccgattcgtcctcaatcgaggaccctggacaggcttacgttctagacgtactccataaacggtggtctatcgtgagctcccctgagcgcgagataacactcgtcaatttgaagaaggatgccaagtatggcctcgggttccaaattatcgggggtgagaagatggggcgtctggatttgggtatttttatttcttctgtcgccccaggaggacctgcagatctggatggttgcctgaaacccggagaccggctgataagcgttaacagtgtctcactcgagggtgtgtcccaccacgccgcaatagagatcctgcaaaatgctccggaggacgtgacactggtgattagccaaccaaaagagaaaattagcaaggtcccttccactcctgtgcatctgactaatgaaatgaaaaattatatgaaaaagtcatcttatatgcaggactccgccatcgactcatctagtaaagaccatcactggagtcggggtaccctcagacacatttctgagaactcattcggtccatctggcggtctgcgcgaaggctccctgtccagccaggatagcaggactgagtcagcctccttgtcccagtctcaagtgaacggcttctttgcgtcgcacctgggggatcagacttggcaggaaagccagcacgggtccccgtcgccctccgtcataagtaaggccacggaaaaggagacttttacagactctaaccagtctaagacgaaaaaacccggtattagcgatgttaccgattactcagatcgcggagatagcgacatggacgaggccacttactcttctagtcaagaccatcagacacctaagcaagagagttcctccagtgttaatacttctaacaaaatgaatttcaaaactttttcatcttcaccgccaaagccaggcgacattttcgaagtggaactggccaaaaacgacaactcactgggcatttccgtgaccggtggagtaaataccagcgtgaggcatgggggtatatatgttaaggcagtcatccctcagggcgcagcggagtccgacggacggatccataagggcgatagggtgctggccgtgaacggtgtgtcactcgagggggctacccacaaacaagccgtggagactctccgcaacacgggccaggtggtgcatctgcttctcgaaaagggacagagccccacttctaaggagcacgtgcccgttactccacaatgtactttgagcgaccagaatgcccaagggcaagggcctgaaaaagttaaaaagactacgcaagtaaaggactacagctttgtcacagaagagaatactttcgaggtgaagctgttcaagaactcaagcggattggggttttcattcagcagggaggacaatctgatcccggaacagataaatgcctcaatcgtgagagtgaagaaactcttccctggtcagcccgcagcagaatcaggcaagattgatgtcggtgatgtgattttaaaggtaaacggagccagtctcaaggggctttcccaacaggaggtgatttccgctctcaggggcaccgctcctgaagtgtttctgctgctttgtaggcctccaccgggtgtgttgcctgaaatagacactgcattgctcacccccttgcagagccccgctcaggtgctgccaaatagctctaaagacagcagtcaaccgtcatgtgtagaacagagcacctcgtctgatgaaaatgagatgagcgataaaagcaaaaaacagtgtaagtccccaagtcgcagggatagttacagtgactcaagcggaagcggagaggacgacctggtgaccgccccagcaaacattagcaattcgacttggtcttccgccctgcaccagactctctcgaatatggttagccaagctcagagccaccacgaggcgccaaaatcacaggaagatactatttgtactatgttctactacccgcaaaagattccaaacaaaccagagtttgaagattcaaacccctccccactgccacctgatatggcgcctggacaatcgtaccagccacagtctgagtccgcctcctcgtccagtatggacaaatatcacattcatcatatcagcgagcccaccaggcaggaaaactggactcccctcaaaaatgatctggagaaccacctggaagacttcgagttggaggttgaactgctgatcacactcattaagtcagagaaaggcagcctggggttcaccgtcactaaaggaaatcaacgaatcggctgttacgtccatgatgtcatccaggacccggcaaagagcgatgggagacttaagccaggtgatagactgattaaggtgaatgacactgacgtgaccaatatgacccacacagacgcggttaatcttctccgcgctgcgagtaagaccgttaggctcgtcatcggcagggttctggagctgcccaggataccaatgttgcctcatctattacctgatataacgctgacttgtaacaaagaggaactcggcttttctctgtgcggagggcacgattcattgtatcaggtggtctatattagcgacattaatcccaggagtgtggctgcaatcgaggggaatctccagttactggacgtgattcattatgtcaatggggtatccacccagggcatgacattggaggaggtgaacagagccctggacatgtccctccccagtttggtgctgaaagccaccaggaacgacctgccggtcgtgcctagttcaaagcgaagtgcggtatccgctcctaagtcgacaaagggtaatggcagctattctgtgggctcatgcagtcagcccgctctcaccccaaatgattcattttccaccgtagcaggtgaggagattaacgagattagctatccaaaagggaagtgctctacataccagattaagggaagcccaaacttgactctaccaaaggaatcatatatacaggaggatgatatctatgatgatagtcaggaagctgaagtgatccagtcgctcctggacgtggttgatgaggaagctcagaacctgctgaacgagaacaatgctgccggatacagctgtgggcctggcaccctgaagatgaacggcaagctgagtgaggaacgcacagaggacaccgactgcgacgggtcgccacttccagaatactttactgaggcaactaaaatgaatggctgcgaagaatattgcgaggagaaggtcaagagtgagagcctgatacagaaaccacaggagaaaaaaacagatgacgatgaaatcacctggggcaatgatgagctgcccattgagcgcaccaatcatgaagattccgacaaagatcatagcttcctcacgaatgacgaactcgcagttttacctgtagtgaaggtgttaccctctggtaaatacaccggtgcgaatctgaagtcagttatcagagtgttgcgaggtctcttagatcagggcattcccagtaaagagcttgaaaatctgcaggagctcaaaccactggatcagtgtcttatcggtcagaccaaagagaatagacgtaagaaccgttacaagaacattctgccctacgatgctacacgcgtccccttgggggatgaaggaggttatatcaacgctagctttatcaaaatccccgtcggcaaagaggaattcgtttacatcgcctgtcaggggccactgcctaccacggttggtgacttttggcagatgatctgggaacagaagtcgacagtcatcgccatgatgacccaggaggttgaaggcgagaagataaagtgccaacggtactggcctaatatcctgggcaaaacaacaatggtgtctaaccggctcaggttggccctggtccggatgcaacagctcaaaggcttcgtggttagggcgatgacccttgaggatatccagacaagagaggtacggcatatctcccacctgaatttcacagcatggccagatcatgatactccctcccagcctgacgatcttttaacttttattagttacatgcgccacatccatagatccgggcctattatcactcattgctccgctgggatcggaaggtctggaaccctgatttgcattgacgttgtgctcggcctgattagtcaagatctggacttcgacatctcggaccttgtaaggtgcatgaggctacagcgccacggaatggtgcagaccgaggatcagtacatattttgctaccaggtgatactgtatgttctaacaagactgcaggctgaggaagagcagaaacagcaacctcaactgctaaaata

SEQ ID NO: 237058 - DNA, 7457 bp, synthetic construct
  misc_feature 1..7457: note = Description of Artificial Sequence: Synthetic coding sequence
  source 1..7457: mol_type = other DNA
atgcacgtctccttggcagaggccctggaagtaaggggtggcccactccaggaggaggaaatctgggccgtgctgaaccagagcgctgaaagcctccaggaactctttagaaaagtgtccctcgctgacccagcggctcttggatttatcatctcgccttggtcgttgttactgctgccaagtggatcagtgtcttttaccgatgagaatattagtaaccaggacttgcgggcattcacagcaccggaggtgctgcagaaccagtcactgacttcactctccgatgtggagaaaatccatatttacagcctcggcatgacgctctactggggagctgattatgaggtgccgcaaagccagccaataaagttgggtgatcacctgaattccatcctgctcgggatgtgtgaagatgtgatctatgctcgggtctcagtgcgaactgtactggacgcttgcagcgcgcacattaggaattctaattgtgcgccaagcttttcttatgtgaagcacctcgtgaagttggttctgggtaacctgtctggaacggaccaactctcttgtaacagtgagcaaaagccagaccgttcacaagccataagggatcgtctcaggggtaaagggctcccaacagggaggagctcaacgtccgacgtgctggacattcagaagcctccactctcgcaccaaaccttcctaaacaagggtttatccaagagcatgggcttccttagcattaaagacacacaagacgagaattattttaaggatattctgtctgacaattcaggccgagaggactcagagaatacattttctccttaccagtttaagaccagtggacctgagaaaaagcccatcccaggcatagatgtactttctaagaagaagatatgggcctcctccatggatctcctgtgtactgcggatagagacttttcttccggggaaaccgctacatacagaagatgccaccccgaggctgtaaccgtgcgaacttctaccaccccaaggaaaaaggaggcccgttactccgacggcagcattgccctggatattttcgggccacaaaaaatggatcctatctaccacaccagggaactgcctaccagtagcgccatctcttcagccttggatcggatcagagaaaggcagaaaaaactccaggtgctcagggaggctatgaacgtggaagagcctgttcgccgttataaaacgtatcacggagacgtattttcaacgagctccgaatctccatccattatatcatccgaatctgatttcagacaggtgagacgatccgaagcgtccaaaagattcgagtcctcatccggccttcccggagttgatgaaacgctttcccagggccagtcacagaggcccagccgacagtacgagaccccctttgaaggcaatctgattaaccaggagatcatgctcaagagacaggaggaagagcttatgcagttgcaggccaagatggcgctgaggcagtctaggctgtcactttatcccggagacactattaaggcatctatgctcgatattacccgggatccactgagagagattgccttggagacggccatgacacagcgaaagctgcgtaactttttcggaccagagtttgtaaagatgaccatcgaaccgtttatttccctggacctgccacgatcaatcctgacaaagaaaggcaaaaatgaagacaaccggaggaaggtcaatataatgctgctgaatggtcagaggctggagctcacgtgtgatacaaagaccatttgcaaggatgttttcgacatggtggtggcgcatataggcctggtggagcaccatctcttcgctctggctaccctcaaggataacgaatatttcttcgttgacccggatttaaagctcacgaaagtggcccctgaggggtggaaggaagaacccaaaaaaaagacgaaagccaccgtgaactttacccttttttttcgtatcaagttcttcatggacgatgtgagtttgatccagcacaccctgacgtgccatcagtattacctacaactgagaaaggacattctcgaagagagaatgcactgcgacgatgagacttctctactcctggcaagtcttgccctccaggcggaatacggcgactaccagccagaggtccatggagtatcttacttccggatggaacactacctgccagccagggttatggaaaaattggacctctcttacatcaaggaagagctacccaagctgcacaacacatacgtgggagccagtgagaaggagacagaactggagttcctgaaagtgtgccaacgactgaccgagtacggcgtccactttcaccgcgtccaccctgagaagaaatctcaaactgggatcttactgggcgtgtgctccaaaggagtgcttgtgttcgaagtgcacaacggcgtccgcactctggtgcttaggtttccatggagagaaaccaagaaaatctccttttccaagaagaaaattaccctgcagaatacctcagacgggatcaaacatgggtttcagacagataactctaagatttgccagtacctcttgcatctctgctcgtatcagcacaaattccaactgcagatgcgggctcggcagtcaaaccaggatgcacaggatattgagcgggctagcttccgaagcctcaacctacaggccgagagtgtccgcggttttaatatggggcgtgctataagcacagggtcccttgcctcctcaaccctaaataaactggcggtgcgcccactctccgtgcaggctgagatactgaaaaggctcagttgtagcgaactttctctgtaccaacccctgcagaactcctccaaagagaagaacgacaaagcaagttgggaggagaagcccagagaaatgtcaaagagctaccacgacctgagtcaggcgtctctttatcctcacagaaagaacgtgatcgtcaatatggagcctcctccacagacagtggcagagcttgttggcaagcctagccaccagatgtctcgttccgatgcggagtctctggccggtgtgacaaaactcaacaactcaaagtcagttgcttcacttaatcggtccccagagcgcaggaaacatgaatccgactcatcatcaatagaagaccccggacaagcttacgtgcttgggatgaccatgcattctagcggcaacagctcctcccaagtgccactcaaggagaacgacgtgcttcacaagcgttggtcaattgtcagttcaccggaacgagagattaccttggtgaatctgaaaaaagatgcgaagtatgggctaggctttcagatcattggcggagagaaaatgggaagacttgatctaggaatctttatttcaagtgtggcccctggtggacccgcagatctcgacggatgcctaaagccaggtgatcgacttatttcagtcaatagtgtgagtctggagggcgtgagtcaccatgccgcaatcgagatcctccagaatgcaccagaagacgtgactctggtcatatcccagcctaaagagaagatcagcaaagtcccctctaccccggttcacctaaccaatgaaatgaagaactacatgaagaagtcatcttacatgcaagactcagccatcgatagctctagcaaggaccaccactggtccaggggtacactgcggcacattagcgagaatagcttcgggccaagcggtggccttagggagggctccttgtcatctcaggacagccgaacagagtcagcctctctatcgcagtcacaggtcaatgggttttttgcctctcacttgggcgatcaaacttggcaggagtcccagcatggatcacccagcccatccgtcatttcaaaagccaccgagaaggaaaccttcactgattctaatcagagtaagactaagaaacctggtatcagtgatgtgaccgattattcggatagaggcgatagtgatatggacgaggccacatatagctccagccaggatcatcagacacctaaacaagagtcatcctcttccgtcaacacctcgaataaaatgaatttcaaaacgttttcctcatctcctcccaaaccaggcgacattttcgaggtggagctcgctaagaacgataatagcctcggcattagcgtaacaggtggggtgaacactagcgtacgtcatggcggaatatatgtcaaggcggttattccccagggagctgccgaaagcgacggacggatacacaagggagatcgggtcctcgctgtgaatggcgttagtctggagggggcaacacataaacaggctgtcgagacactgcgtaatactgggcaggttgtacacctcctgctcgagaaaggccaatcgccaaccagcaaagaacacgtaccagtgacacctcagtgtaccctctcagaccagaatgcccaggggcaggggccagagaaggtgaagaaaaccactcaagtgaaggattactcatttgtgaccgaggagaataccttcgaagtaaagctttttaagaattcctctggcttaggcttttcattcagccgtgaggataatctgattcccgaacagattaacgcctcaatagtgagagtgaagaaactcttccctggtcagccagccgcagagtccggaaagattgacgtgggtgatgtgatcctaaaagtgaatggggcatcgctgaagggactgagccagcaggaagtgatttcagccctccggggaactgccccagaggttttcttactgctgtgcaggccacctcccggtgtgctccccgaaatagacactgccctgctcaccccgctgcagtcccccgcacaggtactacccaactcgtccaaggactcctcccagccaagctgcgttgagcagtccacaagctcagatgagaatgaaatgagcgataagtccaagaaacagtgcaaaagcccgagccgacgggattcttactcagatagctccggcagtggggaggacgatctcgtgacagccccagccaatatatcaaattctacctggtcttccgctctgcatcaaacattatctaacatggtctcgcaggcacagtcccaccacgaagcacccaaaagtcaggaggacactatatgtactatgttttactacccccagaagattcctaacaagcccgaattcgaggactcaaatccttctccactccctcccgatatggcacctggacagagctatcagccacaatccgaatccgctagtagctctagcatggacaaataccatattcatcacatctccgaaccaacacgacaggagaactggacaccactgaagaacgatttggagaatcatcttgaagatttcgagctggaagtggagctgctgattactctgatcaagtctgagaaggggagcctcggcttcaccgtaactaagggaaatcagcgaattgggtgttacgtccatgacgtcatccaggatccggctaaatcagatggaaggctcaagcccggtgatcgccttattaaggttaatgacactgacgtcactaacatgacccatacggacgcagtgaacttgcttcgagcggcttctaagacagtacggcttgtcatcggtcgcgttttggagctgccgaggatccctatgttgcctcatttgctccccgatattacgctgacgtgcaacaaggaggagctggggttctctctctgtggtgggcatgacagtctgtaccaagtggtgtatatttctgatatcaacccaaggtcggtcgccgcaatcgaggggaatctccagctgctcgatgttatccattacgtgaacggagtgtctacacagggcatgacgctcgaagaggtgaatagagccctcgacatgtcattgccctccctggtcctcaaagcaacacggaacgaccttcctgtggtgccatcctcgaaaaggtcagccgtcagcgccccaaaaagtacaaaaggcaatggttcctatagcgttggatcgtgcagccagccagctttaacacctaacgactccttttcaactgttgccggtgaagagataaatgaaatctcataccctaaaggtaaatgctctacataccagatcaaaggctcccctaacctgaccctcccgaaagagtcttacattcaggaagacgatatttacgatgattcccaggaagccgaggtcatccagagtctactggatgttgtggacgaagaggcacagaacttgctaaacgaaaacaatgcagcaggttatagctgtggtcccggaacccttaagatgaatggcaagctgagtgaggaaaggacagaggacactgactgcgacggatcaccactgccagagtatttcacagaggcgacaaagatgaacgggtgtgaagagtactgtgaagagaaggtcaagtccgagagtcttatccaaaaaccccaggaaaaaaagacagatgatgacgagataacatggggcaatgacgaactacctattgagaggaccaaccatgaagattccgataaggaccacagcttcctgacaaacgacgaactagcagtgctgcccgtggtgaaggtactgccgagtggtaaatacacaggagcaaatttgaaaagtgtgatacgagtcctgagggggctattggaccagggcatccccagcaaagaactggagaacctgcaggaactcaaaccgctggaccaatgccttattggccaaactaaggaaaataggaggaaaaaccgctacaaaaacatcctgccatacgacgcaacaagggtgcctcttggtgacgaagggggatatattaatgcttctttcataaagataccagttggaaaggaggaattcgtttacatagcgtgtcaagggccattgccaacaacagttggtgatttctggcagatgatatgggagcagaaatccactgttatcgccatgatgactcaggaagttgaaggagagaagatcaaatgccaacgatattggcccaatatactcggtaaaactactatggtaagcaatcgcctgcgcctggcactagtgagaatgcagcagctgaagggatttgttgtgcgagccatgaccctggaggatatacagaccagggaagtccggcacatttcacatctgaattttacggcttggccggaccatgacacacctagccaacccgatgacctgctcactttcatttcatatatgcgacacatccacagatcaggcccaattataacacactgttctgctggaattggcagaagtggcacactgatttgtatcgacgtggtcctcggtctgatttcacaggacctggacttcgatatcagtgatctggtacgctgcatgaggttacaaaggcatgggatggtgcagacagaggaccagtatatcttctgttatcaggttatactgtatgtacttaccaggctgcaagccgaagaggagcaaaaacagcagccccagcttctgaagta

SEQ ID NO: 237059 - DNA, 7400 bp, synthetic construct
  misc_feature 1..7400: note = Description of Artificial Sequence: Synthetic coding sequence
  source 1..7400: mol_type = other DNA
atgcacgtaagcctggctgaggcactggaagttcgcggaggcccattgcaagaggaggagatctgggcagtgcttaatcaatcggcagaaagcctacaagagttgttccgcaaagtgtcgttagctgatccagccgctttgggttttattatctctccatggagtctgcttctgctcccttcaggttccgtttcctttacagacgaaaatatatctaaccaggatctgcgagcgttcaccgcgccagaggtcttgcagaaccaatcactgacgagtctgagcgatgtggaaaaaatccatatatattcactgggaatgacgctttactggggggcagattacgaggtgcctcaatcccagcctattaagctcggcgaccatttgaacagcatactgttgggcatgtgtgaagacgtgatttacgcgagagtgtcagttcgcacagttctggatgcctgtagtgcccacatcaggaatagcaactgcgcaccatcttttagttacgtgaagcacctggtgaaacttgtcctgggtaatctatccggaacagaccaactgagttgcaattctgagcaaaagccagaccgcagtcaggccattcgcgatcggctccggggaaaagggctgccaactggcagatcttcaacaagtgacgttctggacatccagaaaccacctctgtcgcaccagactttcctgaataaaggcctcagtaagtctatgggattcctctccatcaaggacacacaggatgaaaactacttcaaggacattctctcagataactcgggcagggaggatagtgagaacacctttagtccatatcagttcaaaacatccggtcctgagaaaaagccgatccctggcatcgatgttctgtctaagaagaagatatgggctagctctatggatttactttgtactgctgatagagattttagttccggagaaactgccacttaccgccgatgccaccctgaagctgtcacagtgagaaccagcaccactcctcgcaagaaggaagccaggtacagtgatgggtccatagcactcgacatcttcgggccacagaaaatggatccaatataccacactcgcgagctacccacttccagtgcaatcagcagcgccctggaccgcattagagagcgacagaagaagttacaggtgctccgggaggccatgaacgtcgaggaaccagtgcgcagatacaagacataccatggagatgttttcagcaccagctcagagtctccaagcatcatttcctctgagagcgattttcgacaggtgaggaggagtgaagctagcaagagattcgagagctcctcagggctaccaggggtggatgaaacactctcacagggccaatcccagaggcctagccgccagtacgagacaccattcgaaggaaacctgatcaaccaggagataatgttaaaaaggcaggaggaagagctcatgcagcttcaggccaaaatggctttgaggcagagcagactaagtctttaccctggagacaccatcaaggcttctatgctggatataacccgcgatcctcttagggagatcgctttagagactgcaatgacccagcggaagttgcggaacttttttggccctgaattcgtgaagatgaccatcgaacctttcattagcctcgacctccctcgcagcatactgacaaagaaaggcaaaaatgaggacaaccggaggaaagttaacatcatgctcctgaatgggcagagactggagttaacctgtgataccaaaacgatctgcaaggacgtctttgacatggttgtggctcatatcggcctggtagagcatcatttgttcgctctggctaccctgaaagacaacgagtacttttttgtggatcctgacctgaaacttaccaaggtcgctcccgaggggtggaaggaggaaccaaagaagaaaacaaaggccaccgtgaatttcactctgttttttagaataaaattttttatggacgacgtgtccctgatacagcacaccctgacctgtcaccaatactacctccagttacgtaaggacattctggaggagcgaatgcactgcgacgatgagaccagcctactgctggcttccctggcattacaggccgaatacggtgactaccagcccgaagtccatggggtgtcgtattttaggatggagcactatttaccggcaagggtaatggaaaaactggacctctcctacattaaagaggaactccccaaactgcacaacacttatgtcggagcttctgagaaagaaacagagctagaattcctgaaggtgtgccagcggttaacggaatacggggtgcactttcatcgagtacatccagagaagaagagtcaaaccggcatcttgctaggcgtgtgtagtaaaggggtcttagtgtttgaagtacacaacggcgttagaactctggtgcttcgctttccctggcgggaaacgaaaaaaatttctttttctaagaaaaagattaccttacagaacacaagcgacggcattaagcacggcttccagacggacaattcaaaaatctgccagtatctgctgcacttgtgtagttatcaacataagttccaactgcagatgagagctcggcagtctaaccaggacgctcaggatatcgaaagggcgtctttcaggtccttgaacctacaagccgaatctgtgagaggctttaatatggggagagctatttctactggatctctggccagtagtacactaaacaagctggctgtccggcctctatccgtgcaagctgagatcctgaagagactttcctgtagcgagctgtcactctaccaaccattgcaaaattcatcaaaggagaagaatgacaaggcttcttgggaagagaaacccagagagatgtcaaagagctaccatgacctgtcccaggcctccctctacccccacagaaaaaatgtgattgtgaacatggaacctccccctcaaacagtggccgaactggtggggaaaccatcacaccaaatgtctagatccgatgccgagagcttagccggagtgacaaagctgaacaacagtaagtccgttgccagcctgaatcgcagtcctgaaaggcgaaagcatgaaagtgatagctcgtctatcgaggaccctggccaggcctacgtcttggacgtactccacaagcggtggtcaatcgtctcatctcctgagcgagagatcactctggtgaatctgaagaaagatgctaagtatggcctcggctttcaaatcataggaggcgagaaaatgggtcgcctcgatctaggcatcttcatttcctccgtggcacctgggggtcccgcagacctggatggctgcctgaagccaggggacaggctaatatccgtaaatagcgtaagtctggaaggggtctcacaccatgcagccatcgaaattctccagaacgcccctgaggacgtgacactcgtgatctctcagccaaaggagaaaataagcaaagtccccagcacgcccgttcatctgacaaacgaaatgaaaaattatatgaagaagtcaagctacatgcaggattctgcgatcgattcctcctccaaagaccatcattggtcacgtggcactctaagacatattagcgaaaattcatttggaccctcaggtggtttgcgggaaggcagcttgagctcccaggatagccgaaccgagagcgctagcctttcgcaaagccaggtaaacggctttttcgcttctcacctaggagaccagacctggcaggaatcgcagcatggcagtcctagcccaagtgtcatttctaaggcaaccgagaaggagacctttactgattctaatcaatctaaaacaaaaaagcctggcatcagcgatgtgacagactactccgatcgcggagatagtgatatggacgaggctacatacagttcctcacaggatcaccaaactcccaagcaagaatcctcaagcagcgtgaacacaagtaataagatgaacttcaaaacattctccagtagtccacctaagccaggagacatctttgaggttgagcttgccaaaaacgacaatagcttgggaatctcagtgaccggcggtgtgaacacgagtgttaggcatggcggaatatacgtaaaggcagttattccccagggggcagcagaatctgacggcaggatccacaaaggagaccgggtgctggctgttaacggggtcagcctggagggtgctacgcacaaacaggccgtcgagaccctaaggaatacgggccaagtggtgcatctgctgcttgagaaggggcagagtcctacatccaaggaacacgtgcccgttactccacaatgcacacttagcgaccagaacgcgcagggccagggcccagaaaaagtgaaaaagacgacacaggtgaaggattacagctttgtgacagaggagaatacttttgaagtcaagctcttcaagaactcctctggcctggggttttccttcagtcgggaggacaacttgatccctgaacagattaacgcgtccatagtgcgtgtgaaaaagctgttccccggtcagcctgcggcagaatccggaaagatcgatgtgggcgacgtcatccttaaggtgaacggagccagcttaaaggggctgtcccagcaggaggtgattagcgcccttagaggcacagctcccgaggtatttttgctcctctgtagacccccacccggtgtgctaccagaaatcgacaccgccttgctaacacccctgcaatccccggctcaggtcttacctaattccagcaaggactcatctcagcctagttgcgtagaacagagcacatctagcgacgagaatgagatgagtgataaaagcaaaaaacagtgcaagtctccttctagacgggactcttactcagatagctcaggaagtggcgaggacgacttggttacggctccagccaacatcagcaattcgacatggtcgtcagctctacaccaaaccctgtccaacatggttagtcaagcccagtctcatcacgaagcccctaaatcccaggaggataccatctgcacaatgttttattaccctcagaaaatacctaataagcctgagttcgaagacagtaacccatccccattacctcctgacatggcccctgggcagtcataccagccacaatccgagtccgcatcttcttcatccatggacaaataccacatccaccacatttctgagcctacccgccaggaaaactggactccgttgaagaacgatctggagaaccatctggaagacttcgaactggaagttgaactgctcattaccctcatcaagtctgaaaaagggagcctaggcttcacggtaaccaagggcaaccagcgcattggctgttatgtccacgatgtaattcaggaccccgctaagtctgacggcagactcaagcccggtgatcgccttatcaaggttaatgacacggacgtgacaaacatgactcatacggatgccgtgaacttgcttcgcgctgcttctaaaacggtgagactcgtaattggcagagtccttgagctgcccagaatccccatgcttccacacctcctgccagatataactctgacatgcaacaaagaagaactggggttctccttatgtgggggtcacgactctttataccaggtcgtttatatatccgacatcaatccaagatctgtggctgcgattgaaggaaacctgcagttattggacgtgatccattatgtcaatggcgtgtccacgcaaggtatgacgctcgaagaagtgaatcgcgctcttgacatgtcattgccgtctctggtgctaaaagcaaccaggaacgacctcccagttgtcccttcgtcgaagcggtcagccgtctccgcgcctaagtccactaaaggtaacggctcatactctgttggctcttgtagccagcccgctctcacccccaacgactccttcagtactgtcgccggagaggagatcaacgagatttcttaccctaagggtaagtgctcaacgtatcagattaaaggatcccccaatttgaccttgcctaaggagtcttacatccaagaggacgatatctacgacgacagtcaagaagcggaggtaatacagagcctgttagatgtcgtggacgaggaagcacaaaatctgcttaacgagaataatgccgcaggttacagttgtggccctgggacattgaagatgaatggcaaactgtcagaggagcgcacagaggacacagattgcgacggttctccattgcctgaatatttcaccgaagctacaaagatgaacgggtgcgaagaatactgcgaggagaaagttaaatcagaaagcttgatacaaaaaccccaagaaaagaaaaccgacgatgacgaaattacatggggcaatgacgagctgccgatcgagagaacaaatcatgaagactccgataaggatcattccttcctgacgaacgacgaacttgccgtgttgcccgtagtgaaggttctgccaagcggtaaatacacaggcgcaaacctgaagtctgtcatccgagtcctcagagggctgctcgaccaggggatcccgtctaaagaattagagaacctgcaagagctgaagcctcttgatcagtgtctcattggacagactaaggagaatcgaaggaagaacagatacaagaatatcctcccttacgacgccacaagagtacctcttggtgatgagggtgggtacattaacgcaagttttatcaagattccagtggggaaggaagaattcgtgtacatcgcctgtcaaggtcctctgcctactaccgtgggcgacttttggcagatgatatgggagcagaagtccacagtgattgcaatgatgacccaagaggtggagggcgaaaagatcaagtgtcaacggtattggcccaatattctggggaaaacaacgatggtgtccaacaggttgcgcttggccctggttcgcatgcagcaacttaaaggtttcgtggtgagggccatgacactcgaagatatccagactagggaggtgaggcatataagccatctcaatttcacagcctggcccgatcacgacacccctagtcagccagacgacttactgaccttcatctcatacatgcgccacatacaccggtctggacccatcattacacattgttccgccggaattggacgcagcggcacactcatttgtatagatgtcgtcctggggctcatctctcaagacctggactttgatattagtgacctcgtaagatgtatgaggctgcagcggcacgggatggtacaaactgaggaccagtatattttttgctatcaggtgatattgtacgtgctaacccggttacaagccgaggaagagcagaagcaacagccacaattattgaagta

SEQ ID NO: 237060 - DNA, 7472 bp, synthetic construct
  misc_feature 1..7472: note = Description of Artificial Sequence: Synthetic coding sequence
  source 1..7472: mol_type = other DNA
atgcacgtttctctggcagaggccttagaagtgcggggaggtcccctccaggaggaagaaatctgggcggtgttaaatcagagcgcagagtccctgcaagagttattcaggaaggtatcactggccgatcccgctgccttaggtttcattattagcccctggagccttctgctcctccctagcgggagcgtctcgttcacggatgaaaacatcagtaatcaggatctgcgggctttcacagcacccgaggtcttgcagaatcagagtctgaccagtctgtccgacgttgaaaaaattcacatttactctctggggatgacattgtattggggtgccgattacgaagtcccacagagccagccgatcaagctgggagatcatctaaacagcatcctgctgggaatgtgcgaggacgtcatttatgctcgtgtttccgtaaggaccgttctcgacgcctgttctgctcacattcggaactcaaattgcgccccttctttttcttatgtcaagcaccttgtgaagctggtattgggtaacctgtccggtactgatcagctttcatgtaattctgagcaaaagccggaccgttcccaggccattcgggaccgactcagaggtaaggggctcccaaccggaagaagcagtaccagtgatgtgctggacatccaaaaaccccctctcagccaccaaaccttcctgaataaaggcttgagcaagagtatgggattcctttccattaaggacactcaagacgaaaattattttaaggacatcctgagtgacaactccggacgagaagactcggaaaacaccttctcaccttaccagtttaaaacatccggtccagaaaagaagccaattccaggcatcgacgttctttccaaaaagaagatatgggcaagttctatggacctgctgtgcactgctgaccgggacttctcgagcggtgagacagccacgtatcggcgatgccacccagaagccgtgactgtacgtacgagtactactccccgtaagaaggaagccagatatagcgacggttctatagccctggacattttcggccctcagaaaatggacccaatataccacacacgtgagttgcccacgtcttctgccatcagctctgccctggatcggatcagagagcgacaaaaaaagctacaggttctgcgagaagcgatgaacgtggaagagcccgtgcggcgatataaaacctatcatggtgatgttttctcaacaagctctgaatcacctagtatcatcagctcagagtcagactttcgtcaggttagaaggagtgaggcgtcaaaacggttcgaaagtagctcgggactgcccggagttgatgaaacactgtcccagggccagagtcagcgaccctccagacagtatgagactcccttcgaaggaaacctgataaatcaggagatcatgttgaaaagacaggaggaggagctgatgcagcttcaggccaagatggcgctaagacaaagccgcctttccctataccctggagacactattaaggcaagcatgttagacattacgcgggatcccctccgcgagatagctctggaaactgccatgactcagcggaaactgaggaacttttttggtccggagttcgttaaaatgactattgaaccttttataagtctcgatttgccgaggtcaattctcaccaaaaagggcaaaaacgaggacaaccggcgaaaggtaaatattatgcttctcaatgggcagaggttggaactcacgtgcgatacaaagactatctgcaaggacgtgttcgacatggtggtggcccatatcggattggtcgagcaccatctattcgccctggctacattgaaagacaacgaatattttttcgtggatcctgatctgaaactgacaaaggtggccccagaagggtggaaagaggaacctaaaaaaaaaactaaggcaactgtgaactttactctcttcttcaggataaagttcttcatggacgacgtctcactgatccagcacaccctgacctgccatcagtattacctacagctgcgtaaggatatcctggaggaaagaatgcactgcgatgatgagactagcctgctgctggcttctctggccctgcaggcggagtacggcgactatcagcctgaagtccacggcgtttcctacttcaggatggaacactatctgcccgctcgtgttatggaaaagctggatctctcgtacatcaaagaagagctgcctaaactgcataacacctacgtgggggcttccgagaaggagaccgaactcgagtttttgaaggtgtgccagcgactcaccgagtatggggtgcacttccaccgagttcaccccgaaaaaaagtcacagaccgggattcttctcggcgtttgctctaagggcgtcttggtgtttgaggtgcacaatggtgttcgcacactggtgttgcggttcccttggcgcgagacaaaaaaaatctccttctccaaaaaaaagattactctgcagaacacatctgatggcatcaagcacggtttccagacagacaattccaagatttgtcagtatctgctgcacctctgttcgtatcaacataaatttcagctccagatgcgggcacgtcaaagcaaccaggacgcacaggatattgagagggcaagcttccgatcactgaacttgcaggctgagtccgttcggggattcaacatggggagagccatatccacaggatcgctggcatcttctactctgaacaaacttgccgtgagaccgctttcagtacaagctgagatccttaaaaggttaagctgctcagaattgtcgctttatcagcctttgcaaaactccagtaaggaaaagaacgataaagcaagctgggaagagaagccacgggagatgagcaagagttaccatgacctttcccaagccagcctctatccccacagaaagaacgtcatcgtaaacatggaaccacccccacaaactgtcgctgaactggtcggcaagccctctcaccagatgtccaggagtgacgcggagtccctggcaggtgtgacgaagctcaataatagcaagtctgtggcctccctcaaccgtagccctgagcgccgtaagcacgagtccgattcttcaagtatcgaggaccccggacaggcttatgtgctgggcatgactatgcactcctctggcaacagcagttcccaggttcctctgaaagaaaacgatgtactgcacaaacgttggtctattgtgtcctctccagagagagaaatcacgctggtgaacctcaaaaaagacgcgaaatatggacttgggttccagattataggcggagaaaaaatggggaggctggatctcggcatttttattagcagcgtggcacccggaggacccgcagacctcgacggttgtctgaagccaggggatcgactaattagtgtgaattccgtcagcctggaaggcgtgagccatcatgccgcaatagaaatactccagaatgctcctgaagatgtgactctggtcatatcacagcccaaggaaaaaatatcaaaggtgcccagcactcctgtccatctgacaaatgaaatgaagaattatatgaagaaatcttcatatatgcaggactccgccattgatagcagctctaaggaccaccattggagtcggggtactttgaggcatatcagtgagaattccttcggtcccagtggcggactccgcgaggggtctctgagttcccaggattccaggactgagtcagcttcattgtctcagagccaggtgaacggattctttgcatcccaccttggggaccaaacttggcaggaatctcagcatggttctccctctccgtctgtcataagcaaggcgacagagaaggagactttcactgactcgaaccagtctaaaacaaaaaagccaggcatcagcgacgtcacagactattccgatagaggagattcagatatggatgaggctacatacagctcttcccaagatcaccagacccccaagcaggagagctcctcttccgtcaatacctcaaataagatgaactttaaaactttctcatcctctcctccaaagccaggcgatatattcgaggttgaattagcaaagaatgataatagccttggcattagcgtgacagtcttgtttgacaagggcggtgtgaataccagcgtgcgacatggcggaatttatgtgaaggctgtgattccacaaggggcagccgagtcagacgggaggatccacaagggcgaccgggtgttggctgtgaacggcgtgtccctggagggtgcgacccataagcaggcggtggagaccctaaggaacactggacaggtggtgcacctgctcctcgagaaggggcaatcacctaccagcaaggagcacgtgcccgtgaccccgcagtgcaccctgtccgatcagaatgctcaggggcagggtcccgagaaagttaaaaagaccacccaggtgaaagactattcatttgttacagaggaaaacacttttgaagtgaagctgttcaagaactccagtgggcttgggttttcttttagccgagaagataatttgatccctgagcagatcaacgccagcatcgtccgagttaagaaacttttccctggacagcccgctgccgaaagcggtaaaattgacgtgggcgatgtgatactcaaagtgaacggcgcttctctgaagggcctctcacagcaggaagtgatatcagcattacgcggaactgccccagaggtgttcctgctgctttgcagacccccaccaggcgtgcttcctgaaatcgacactgcactgctcactcccctccagagccctgcccaggtgctgcccaacagtagtaaagactcaagtcagccttcctgcgtggaacagtccacatctagcgacgagaacgagatgagtgataaatctaaaaagcagtgcaagagtccctcgcggagagacagctacagcgattctagcggctcaggagaggacgacctggtcactgccccagctaatatctctaactcaacatggtccagcgctttgcaccagaccctgtctaatatggtgagtcaggcacagtctcaccacgaggcccctaagtcacaagaagataccatctgtacaatgttctactatccacagaaaatccctaataaacctgaatttgaggattccaatcccagcccccttccgccagacatggccccaggccagtcgtaccagccacagagtgagtcggcttccagttcaagtatggataaatatcatatacaccacatctccgagcctacacgccaggaaaactggacacccctcaaaaacgacctggagaatcatctggaggacttcgagctggaggtggagctcctgatcaccctgatcaaatcagagaaggggtcattgggctttactgtcaccaaaggaaatcagcgtattggatgctacgtgcatgatgtcatccaggaccccgcaaaaagtgacggacgactgaagcccggagaccggttgatcaaggttaacgatactgacgtcacgaacatgactcacactgacgccgtgaatcttcttagagcagcctccaaaactgtgagactcgtgataggtagagttctggaactccctcgcattccgatgcttccacacctgcttccagatattaccctgacatgcaacaaagaggaacttggcttcagtctgtgcgggggacacgattcattgtaccaagtggtgtacatcagtgacattaatcccaggagtgtggccgcaattgaaggaaacctccagctattggatgtcatccactatgtcaatggagtcagcacccagggtatgacattggaagaggtaaaccgggcattagacatgagtctgccctctctcgtgcttaaagcaacaaggaatgacctgccagtagtcccatcctcaaagcgttcagccgtgtctgccccaaaatctacgaagggaaatggctcgtatagtgtcggctcatgcagtcagccggctcttactcccaacgactcttttagtaccgtcgcaggcgaggagatcaacgagatcagctaccccaaaggcaaatgctccacctatcagattaaaggaagtcctaacctcaccttacctaaagaaagttatatccaggaagacgacatttacgatgactcccaagaagctgaggtcatccaatccctcctggatgtagtcgacgaggaggcccagaatttgctgaatgagaataacgctgccggatattcctgcggccctggaactctaaaaatgaatggaaagttaagtgaggagcgcaccgaagacaccgattgtgacggctctccccttcccgaatattttacagaagcgacaaagatgaatggttgcgaggagtattgcgaggagaaggtaaagagcgaaagcttaattcagaagccccaggaaaaaaagacagacgacgatgagatcacctggggtaatgatgagctgcccattgaacgcacaaatcacgaggactctgataaggaccattccttcttgacgaacgacgagttggctgtgctgcccgtcgtgaaggtgctacccagcggcaaatatacaggagctaatctgaagtcggtgattcgcgtcctccgtgggctgctcgaccaggggatccctagtaaggagttagagaatctccaagagctgaagcctctggaccaatgcctcataggccagactaaggagaataggcgcaagaaccgatacaagaatatcttgccgtacgacgcaacgagggtacccctcggcgacgagggcggatacattaatgcaagctttatcaaaattcctgttgggaaggaggaattcgtgtacattgcctgtcagggcccacttcctacaaccgtaggcgatttctggcagatgatttgggagcaaaagtctactgtgattgctatgatgacccaggaggtggaaggcgagaagatcaaatgccagcgatattggcctaatattttgggcaaaacaacaatggtgagtaatcgcctgcggctggccctggtgcgcatgcagcagctgaaggggtttgtggtcagggccatgaccctggaggacatacagacgagggaagtgcgtcacatctcacatctgaacttcaccgcctggccggatcacgacacccctagtcagcccgacgatctgctaacatttattagctatatgagacacattcatcgatcaggaccaataatcacacactgcagcgcaggaatcggacgttccggaactctgatttgcattgacgtagttctgggactgatttcgcaggatttggacttcgatataagcgacttagtgcggtgcatgcgtttgcagcgccacggaatggtccagactgaggaccaatatatattctgttaccaggtcatcctctacgtcctcaccagactccaagccgaagaggaacagaaacagcaaccccagctgttaaaata

SEQ ID NO: 237061 - DNA, 420 bp, synthetic construct
  misc_feature 1..420: note = Description of Artificial Sequence: Synthetic coding sequence
  source 1..420: mol_type = other DNA
atgcacgtctccctggccgaggcgttggaagtgcgaggcggacctcttcaggaagaagagatctgggcggtgcttaaccaaagtgcagagtcgctccaggaactctttcgcaaggtgtccctggccgatcccgcagctttgggattcatcatctctccgtggtcgctacttctcctgccaagtggttcggtctcattcactgacgagaatatatcgaatcaggacctgcgcgcatttacagcccctgaggtcctccaaaaccagtcactcaccagcttgagtgatgtggagaagatccacatatactcactaggcatgactttgtactggggagctgattatgaagtcccccaaagtcaacctattaagttgggagatcacttgaactcgattttgctaggaatgtgcgaagatgtctag

SEQ ID NO: 237062 - DNA, 7472 bp, synthetic construct
  misc_feature 1..7472: note = Description of Artificial Sequence: Synthetic coding sequence
  source 1..7472: mol_type = other DNA
atgcatgtttctctggctgaggctttagaggtccgcggtggtcctctgcaggaggaggaaatctgggcagttctgaatcaatctgccgaatcactgcaggagctgtttcggaaggtgtcgctcgccgacccagctgctctaggcttcattatttccccgtggagtctcttgctgctacctagtggatccgtgtctttcaccgacgaaaatattagcaatcaggacttacgcgcatttactgctcctgaggtccttcagaaccagagcctgacatctctgtccgacgtcgaaaaaattcacatctattccttggggatgaccctctattggggcgcagactacgaggtcccccagtcccagccaattaagctgggcgatcatctgaacagtatcctgttaggaatgtgtgaggatgtgatttacgctcgtgtttcagtcagaaccgttctcgatgcatgctctgcgcatattcgcaactcaaactgcgccccatcgttctcctacgttaaacacctcgttaaacttgttctaggcaatttgtctgggacagaccagttgagttgcaacagcgagcaaaaaccagaccgcagtcaagccatcagggatcgacttaggggaaagggcctgcccacagggagatctagcacgtcagacgtgctcgatatccagaaaccacctctgtctcatcagactttcctgaacaagggcctttctaaatctatggggttcctgtccattaaggacacgcaagatgagaactacttcaaggacatcctctccgataattccggcagggaagattcggagaacacgttctcaccgtaccagtttaaaacctctggacctgaaaaaaagcctattcccggaattgacgtcctgtcaaagaaaaagatatgggccagctctatggacctactttgtaccgcggaccgggattttagcagcggagaaaccgcaacgtacagaagatgtcatcccgaggctgttacagttcggacatctacaactcctcggaagaaagaagcgaggtactctgatgggagtatcgcactggatatctttggccctcagaaaatggaccctatctatcacacgagggagttgcccacttcctcagccatttcttccgcactagatcgaattagagaacgccaaaaaaagctgcaggtgctgcgggaggcgatgaatgtggaggagcctgtcaggcgttacaagacataccatggggatgtgttttccacgagttccgagagcccatcaattatcagcagcgagagcgacttccggcaggtgcggaggagcgaggccagcaagagatttgaaagctcgagcggtttgccaggagtggacgagacgctctctcaaggtcagagtcaacgtccctcgaggcagtatgaaacaccatttgagggcaatcttatcaaccaggaaatcatgctcaagaggcaggaggaggagctcatgcagctgcaggcaaagatggccctgcgccagtccaggctttccctgtaccccggagatacaatcaaggcaagcatgttagatattactagggacccgctgcgggaaatcgctctggaaaccgccatgactcagcgcaagctgcgtaatttttttgggccagagttcgtgaagatgactatcgagccgtttatctccttggatctgccacggagcatcctgaccaaaaaaggcaagaacgaagataatcgccgaaaggtgaatatcatgcttctgaacggacagagactcgagctcacgtgcgatactaaaaccatctgtaaggacgtatttgatatggtagtggcccatatcggattagtggaacaccatttgtttgcgctggctactctgaaagataacgaatactttttcgtggatccagacctgaaactgacgaaagtggcccctgagggttggaaggaagaacctaagaaaaagacaaaggcgacagtgaatttcaccttattctttaggatcaagttcttcatggatgacgttagcctgatccagcacacactgacatgccaccagtactatctgcagttgcgcaaggacatattggaggaacggatgcactgtgacgatgagaccagccttctgttggcctcactggcactgcaagcagaatatggcgactatcaacctgaggtccacggagtttcatactttagaatggaacattatctgccagcacgggtcatggaaaagctcgacctcagctacatcaaggaagaactgccaaagctgcataatacatacgtaggggctagtgaaaaggaaacagagctcgagtttctgaaggtatgtcagcgattaaccgagtatggcgtccactttcacagggttcaccccgaaaaaaaatctcagactgggatccttcttggggtgtgttccaaaggcgtgctggtgttcgaagtgcataacggagttaggacgctcgtgctgcggttcccctggagggaaacaaagaagatttccttctctaagaagaaaattactctgcaaaacaccagtgacggaatcaaacacgggtttcagacagacaattcgaagatctgccaatatctgctgcatctctgctcatatcagcacaaattccagctgcaaatgcgggctagacaaagcaatcaggacgcccaggacatcgagagggccagtttcagaagcttgaatctccaggctgaaagtgtgaggggttttaacatggggagggccatatccaccggaagcctggcttcaagcactttaaataagctggccgtgcgccctctgtccgtgcaggcagaaatcctgaagagactctcttgttctgagttgagtctctaccaacccctgcagaacagtagcaaagaaaagaacgacaaggcaagctgggaggagaaaccgcgagagatgagcaaatcgtaccacgatctgagccaggctagtctgtaccctcaccggaaaaacgtgatagtgaatatggagccaccaccacaaacagtagccgaactggtcggtaaaccatctcaccaaatgtccagaagcgacgctgaaagcctggccggagtgaccaagctcaataactcaaaatcagtggcctcccttaacaggtcgcctgagcgaaggaagcatgaatcagactcttctagtattgaggaccctggacaggcctacgtgctggggatgacgatgcactcgagtggcaacagctcatcccaagtgcccctaaaagagaacgatgtcctgcataaacggtggagtatcgttagctccccggagagagagattacactggttaatttgaaaaaggatgctaaatacggtcttggcttccagatcatcgggggagagaaaatgggccgtctcgatctgggaatatttatctcttccgtggctccaggcggtcccgcagatcttgacgggtgtcttaagccaggagaccggctgattagcgtaaactccgtgagcctagagggagtcagtcaccatgccgcaatcgaaattctgcagaatgctcctgaagatgtgacacttgtaatcagccagccaaaggaaaagatcagcaaagtcccatctacgccggtccatctgacaaacgagatgaagaactacatgaaaaagagctcttatatgcaggattccgctattgatagttcatcaaaagatcatcattggtcccgcggaacactgcgtcacatttcagagaatagctttggaccgtctggcggattacgggagggttcgctcagttcacaggattcgcgaacagagtcagcctccctgtcacaaagccaagtgaatgggttctttgcatctcatctcggcgatcaaacttggcaggaaagccagcatggaagtccttccccgtctgtcatcagcaaggccactgaaaaggagaccttcaccgactccaatcaatctaagaccaagaaacctggaattagcgacgttacagattactcagaccggggagatagcgatatggacgaagctacctacagctcctcccaggaccatcagacacctaaacaggagagcagttcgtctgttaacacctcgaacaagatgaatttcaaaaccttctcttcctcgcctcccaagcccggtgatattttcgaggttgaactggccaaaaacgataattctttggggatttcagtaaccgtacttttcgataagggtggcgttaacacgagtgtaaggcacggtggaatctacgtgaaggccgttatcccgcagggcgctgccgagtccgatggccgaatccacaagggggacagagtgttagccgtcaacggtgtgagtctggagggggctacccataaacaggctgtcgaaaccctcagaaatactggccaggtggtacacttactccttgaaaagggacagtcgcccacttccaaggagcacgtgcccgtcacccctcagtgcactttatccgaccaaaacgcccagggccaaggtcccgaaaaagtgaagaaaaccactcaggttaaggactactcttttgtcactgaagagaacacctttgaggtgaagctctttaaaaattcatcaggcctggggttcagctttagtagggaggataaccttatccctgagcagatcaacgcgagcatcgtgcgcgtgaagaaacttttcccgggacaaccggctgccgagtctggaaaaatcgatgtgggcgacgtcatcttgaaagtaaacggagcctccttgaaggggttatcccaacaggaggtgatctccgccctccgtggaaccgctccggaggtgtttctgctgctttgccgacctcccccaggcgtactgccagagatagatacggccttgctgaccccactgcaatcccctgcccaggtcttgccaaattctagcaaggacagctcacaaccatcctgtgtggagcagtcgacctctagtgacgagaacgaaatgagtgataagagtaaaaagcagtgtaaaagcccaagccgcagggatagctacagcgatagtagcgggagtggggaggacgatctggtgaccgccccagcaaacatatccaatagcacttggagttctgctcttcaccagaccctgagcaacatggtgagccaagcccagagtcaccacgaggcccctaagtcccaggaagatactatttgtactatgttctactacccacaaaaaatcccaaacaaacctgagttcgaggactcaaacccatcaccgctgcctccggacatggcccctggccaatcataccagccccagtccgaatcagcctcgtcatcatccatggacaagtatcacatccaccacatcagcgagcccactcgacaagagaactggacgcccctcaaaaacgatctagagaaccacctggaggacttcgagctagaggtagagctccttattacactaatcaaatctgaaaaaggatcactcggctttacagtgacaaaagggaaccagagaatcggttgttatgtccacgacgtgatacaggaccccgctaaaagcgacggccgactcaaacctggtgatcgattgataaaggttaatgatactgatgtcacgaacatgacacatacggacgccgtaaacttgctgagagccgcatctaagaccgttagactcgtgatcggtagggtccttgagctgcctaggattcctatgctgcctcacctcctgccagacattaccctgacctgcaataaagaagagttggggttcagtctatgtggcggtcatgacagcctgtaccaagtggtgtatataagcgacatcaacccccgttcagtggctgccatcgaggggaatttgcagctcttagatgttatccactacgttaatggggtgagcactcagggaatgactcttgaagaagtgaacagggcactcgatatgtccctgccatctctggtgctcaaggccacaaggaatgatcttccagttgtgccgtcatctaaaagaagcgccgtcagtgccccaaaaagcactaagggcaacgggtcgtactccgtgggtagctgctcacagccagccctgacccctaacgattcattctctacggtggcaggcgaggagatcaatgagatctcctaccccaaaggaaaatgcagtacataccaaatcaaaggttcccctaatctgacactaccaaaggagtcatacattcaggaagacgatatttacgatgatagccaggaggccgaggttatacagtcattactggacgtggtcgacgaggaggcccagaatctgctcaatgaaaacaatgcggcaggctactcctgtgggccaggaaccctgaaaatgaatgggaagcttagcgaagagaggaccgaagataccgattgcgatgggagccctctccccgagtactttactgaggccactaagatgaatggttgcgaagagtactgtgaggagaaggtgaagtcagagagcctcattcagaagccacaagaaaaaaagacggatgatgatgaaatcacatggggtaacgatgagctcccgatcgagcgcacaaatcacgaggactccgataaagaccatagttttctgactaacgatgagctggcagtgctcccagtggttaaagttctgcctagtggaaaatacacaggggcaaacctgaagagcgtcatcagggtgctccgaggattgctggatcagggtatcccgtccaaagaactcgagaatctgcaggagctgaaacccctggatcaatgtctcattggacagacaaaagaaaaccgtcgcaagaatcgttataaaaatatcttaccatacgatgctacaagggtccctctgggtgatgagggaggatacattaacgcgtcctttattaagattcctgtgggcaaggaggaatttgtctacattgcctgccagggcccacttcccactactgttggggacttctggcagatgatttgggaacagaaatccaccgttatcgcaatgatgacccaggaagtcgagggtgaaaagatcaagtgtcaaagatattggccaaatattcttggcaaaacaacgatggtgtctaacagattacggctagctttagtccgcatgcaacagctcaaaggctttgtcgtgcgcgctatgactctcgaagacatccaaacgagagaggtccggcatatttcccatcttaacttcactgcctggcctgatcacgacactcccagccagccggatgatctactcacttttatctcctacatgaggcacattcacagatcgggtccgattatcacgcactgttccgccggaatcggaaggtccggtaccctgatttgtatagacgtggttttgggactgatatcacaagacctcgattttgacatttcagacttggttagatgtatgcggttgcagcggcacgggatggtgcaaacagaggaccaatacattttttgttaccaggttatcctctatgtgttaacacgactacaggcagaggaagaacaaaagcaacagccccaactgctcaagta

SEQ ID NO: 237063 - DNA, 3564 bp, synthetic construct
  misc_feature 1..3564: note = Description of Artificial Sequence: Synthetic coding sequence
  source 1..3564: mol_type = other DNA
atgcctttcgggctgaagcttcgtagaacacgcaggtacaacgtgttgtctaagaactgcttcgtaacacggattcggctactagacagcaacgtcatcgaatgtactctgtcagtagagtccacaggacaagagtgccttgaggctgtggcacaacgcctagagcttagagaaacacactattttggactgtggttcctaagcaagtcacagcaggctaggtgggttgaactagagaaaccccttaagaagcacctcgataagttcgcaaatgagccgttgctgttctttggcgtgatgttttacgttcccaacgtttcatggctacagcaggaggcaacaaggtatcagtattacttgcaagtaaagaaagatgtgctggagggcaggcttagatgtacactagatcaggtgatccggctagcagggctggccgtacaggcagactttggtgactataatcaatttgattcacaagacttcctccgggagtatgtactgtttccaatggacttagctctggaagaagctgtgctagaagagctcacgcagaaggtcgctcaagagcataaggctcacagcggcattctgcccgcagaagcggaattaatgtacattaacgaggtggaacggctcgatgggtttggacaggagattttccctgtgaaagacaatcatggcaactgcgtgcacttggggatatttttcatgggcatttttgttagaaataggatcgggcgacaagcggttatttaccgttggaacgatatggggaacatcacccacaataaatcaactatcctggttgaactgattaataaagaggaaacagccctctttcatacggacgacatcgagaatgctaagtacattagtagactcttcgcaacacggcataaattctataaacagaacaaaatatgtaccgagcagagtaattctcctcctccaatacgacgacagcccacatggagtcggagttctctgcccaggcagcagccatatattctgcccccagtccatgtgcagtgcggagagcactacagtgagactcacacttcccaggacagtattttccacggcaacgaagaagcgttgtattgtaatagccacaatagcctcgaccttaattacctcaatggaaccgtcactaacgggagtgtgtgttccgtgcatagtgttaacagcttgaactgttcccaaagctttattcaggccagcccagtctcatccaaccttagcatccctgggagcgatattatgagggctgattatattccatctcatcgccatagtgcaatcatcgtcccctcttatcggcctacgcccgattatgaaactgtcatgcgtcagatgaaaagggggattctgcacactgattcacagtcacaatcgctgcgaaacctgaacattatcaacactcacgcatacaaccagcccgaggaccttgtgtactcccaacctgagatgcgggagcggcacccttacacagttccttatggccctcagggcgtttacagtaacaaactagtgagccctagtgaccagcgaaatccaaaaaataacgtcgtgccttcaaaacccggagcaagcgccataagccacacagtatccacacctgaactggctaacatgcagttacaaggatctcacaactactctaccgctcacatgctgaagaactacctgttccgtcccccaccaccatatccacgtccacgcccagccacctctacgcctgatctggcctcacaccgccataaatatgtgtcaggcagctctccagacttggtgacaagaaaggtccagctttcagtgaagacctttcaggaggatagctctcctgtggtgcaccagtcgctgcaggaggtatctgagccgctcactgccaccaagcatcacggcaccgtcaacaagcggcattccttggaagttatgaactccatggtgagggggatggaggcaatgacactgaagagcctgcatctccccatggcaaggagaaatacactaagggaacaagggcctcccgaagaaggatcaggctcccacgaggtgccacagctcccccagtaccatcataagaagaccttttcagacgctaccatgctgatacactctagcgagtctgaggaggaggaggaagaggcccctgagtccgtgccacagattccgatgttaagggagaaaatggagtatagcgcacaactacaggctgcccttgctcggataccaaacaagcctccacctgaatatccgggaccacggaaaagcgtgagcaatggcgctttacggcaggatcaagcttccctgccgcctgccatggcacgtgccagagtcctgaggcatggcccagctaaagccatatccatgagtcgcactgacccaccagcggtcaatggggcaagtctggggccaagtatctctgaacccgacctcacatcagtcaaggaacgcgttaaaaaggaacctgtcaaggaacgacctgtgtccgaaatgttcagcttagaagatagcataatcgagcgtgaaatgatgatccgaaatttggaaaaacagaagatggccggtctggaagctcagaaaagacctctgatgttggctgccctgaatggactgagtgtggccagggtgagtggccgtgaggagaaccgagtcgatgctactcgggtccctatggatgaacgattcaggactctcaaaaaaaagctggaagaagggatggtgttcactgagtacgagcagatcccgaagaaaaaagccaacgggatattttccacagccgctctgcctgagaacgctgagaggtcaaggattagggaggtggtgccctacgaagagaatagagtggaactgatccctacaaaggagaacaacaccggctacattaatgcctcacatatcaaggttgtcgttggcggagcggaatggcattatattgcgacccagggacccttgccccatacatgccatgatttttggcaaatggtgtgggagcagggcgtcaacgtgattgctatggtgacggcggaggaggaggggggacgcacgaagtcacatcggtactggccgaaacttggctccaaacactctagcgcaacctacggaaaattcaaagtcaccaccaaattccggactgactcggtgtgctacgccacgaccgggctgaaagttaaacacctactctctggtcaagaaagaacagtgtggcatttacagtataccgattggcctgatcatggctgccctgaggacgtccaaggatttctctcatacttggaggagatccaatcagtgcgacgtcataccaatagcatgctcgaagggacaaagaataggcacccccctatagttgtgcattgttcagccggagttggacgcaccggggtcttgattctaagcgagctgatgatttactgtctggagcataatgagaaagtcgaggtcccaatgatgttgcgcttgttgcgggagcagcggatgttcatgatccagacgattgcacagtataagtttgtttaccaggtcctcattcaatttctgcagaactctcgcctgatatag

SEQ ID NO: 237064 - DNA, 636 bp, synthetic construct
  misc_feature 1..636: note = Description of Artificial Sequence: Synthetic coding sequence
  source 1..636: mol_type = other DNA
atgccatttggtctgaaactacgaaggacccgccgatacaatgtgctaagtaagaactgtttcgtgaccaggatcagactgctagatagtaacgtcattgagtgcacactgtctgttgaaagtaccggtcaggaatgcctcgaagcagtggcgcagcggctcgagctgagggaaacacactattttggattatggttcctgtcaaagtcccagcaggcaagatgggtcgagctggaaaagcctctcaagaaacacctggataaattcgccaacgagccgctgctcttcttcggagtcatgttttatgtgcctaacgtgtcatggctccagcaggaggcgacccgctaccagtactatcttcaggttaaaaaagatgtgcttgagggaagactgcggtgtacactggatcaggtgattcgtttggctgggttggcggtgcaggcagattttggagactataatcagtttgattcacaggactttctgcgagagtacgtcctgttcccaatggaccttgccctagaagaagcagtcttggaggagctgactcagaaggtggcgcaagagcacaaagcacacaggacaatcatggagacagtgtacaccctggcattctccctgtggggtttctcttag

SEQ ID NO: 237065 - DNA, 1383 bp, synthetic construct
  misc_feature 1..1383: note = Description of Artificial Sequence: Synthetic coding sequence
  source 1..1383: mol_type = other DNA
atgtcccgctctttggattctgctaggagcttcttagagagactggaggcaagaggcggtcgagagggggctgttctggcaggggaatttagtgacatccaggcatgcagcgctgcgtggaaagctgacggagtgtgctcaacagtggctgggtccagacctgaaaacgtgaggaagaatcgttacaaggatgtgctcccatatgaccagactagggtgattctcagtctgcttcaggaagaagggcatagtgattacatcaacggcaacttcatcagaggcgtcgacggcagtctagcatatatcgctacgcagggccctctccctcacactctcctcgacttctggagactcgtgtgggagtttggtgtgaaggtcattctcatggcctgcagagaaattgaaaatggcagaaaaaggtgcgaaagatactgggcccaggaacaggaacccttgcaaaccgggctgttctgtattacccttattaaggagaaatggctcaatgaggatattatgctacggactctcaaagtcacatttcagaaggaatcacgttctgtttatcagctgcagtatatgtcatggcctgatcgcggagtgcctagctcaccagaccacatgttagcaatggtcgaagaagctagacgacttcagggctcaggcccagagcccctgtgtgtccattgtagcgccggatgcggtcggactggggtgctttgtacagtcgactatgtcagacaactccttctaacacagatgatcccacctgactttagtctattcgacgtggtgctgaaaatgaggaaacagcgcccagctgccgtccagaccgaggaacagtatagattcctgtaccatactgttgctcagatgttttgttcaaccctccagaacgcttcacctcactaccagaacatcaaagaaaattgcgcccctctgtatgatgatgctctgtttctgaggaccccacaagcactccttgccattcctcgtccgcctgggggtgtgctgagatcaattagcgtgcccggttctcccggacatgcaatggccgatacatatgcagtggtccagaagcgcggagcccctgcaggagctgggagtggtactcagactggcacgggcacgggcactggtgccaggagtgccgaagaagctcctctgtattccaaagtaactcccagggcccagaggccaggggcacacgcggaggatgcacgtggaaccctccctggaagagtcccagctgatcaatctcccgctgggagcggtgcctacgaggacgtggccggaggagcgcagactggaggcctgggctttaacctgcgtattggcaggcctaaaggccctcgcgaccctccggctgaatggactcgcgtttag

SEQ ID NO: 237066 - DNA, 1248 bp, synthetic construct
  misc_feature 1..1248: note = Description of Artificial Sequence: Synthetic coding sequence
  source 1..1248: mol_type = other DNA
atgcccaccacaattgagagagagttcgaagaacttgatactcaaagacggtggcagcctctgtacttagagattcggaatgaatctcatgattacccccatagagtagctaagttccccgagaaccggaatcgaaaccggtatcgcgacgtatccccgtatgaccatagccgcgtaaaactccagaacgccgagaacgactacattaacgcgtcattggttgacatcgaagaggcccagcggtcttacatactcacacagggtccactgcccaatacctgctgccacttttggctgatggtgtggcaacagaagacaaaagctgtcgtcatgctgaaccgcattgttgagaaagaatctgtcaagtgtgcccagtattggccaaccgatgaccaagaaatgctgtttaaggagacagggtttagtgtgaagctgctgtccgaagatgtgaagtcctactataccgtccacctgctgcagttggagaatatcaatagtggggaaacaaggactatcagtcacttccactacactacctggcctgactttggcgtccctgaatcacctgcttcattcctgaacttcctgttcaaagtgagagaaagtggaagtctgaaccccgatcacggacctgcggtaattcattgtagtgcaggcattggtagatctggcaccttcagcctggtggatacatgcctggtcctgatggagaagggcgatgacatcaatatcaagcaggtcttactgaacatgaggaagtatcggatggggcttatccaaaccccagatcagcttagattctcttacatggctataattgagggtgcaaagtgcattaagggagatagctcaatccagaagcgttggaaagagctttccaaggaggatctgtcacctgcatttgaccacagtccaaataaaattatgactgagaagtacaacggtaacagaataggactggaagaagaaaaactgactggagatagatgtacggggttgtcttccaagatgcaggacacgatggaggaaaattccgagtccgcgcttcgcaagaggatcagggaagatagaaaagcaaccacagcccagaaggtccagcaaatgaaacagagactgaacgagaacgagcgaaagcggaagcggtggctctattggcagcccatactcactaaaatgggattcatgagcgtgatactcgttggggcttttgtgggctggacactcttctttcagcagaacgccctttag

SEQ ID NO: 237067 - DNA, 1164 bp, synthetic construct
  misc_feature 1..1164: note = Description of Artificial Sequence: Synthetic coding sequence
  source 1..1164: mol_type = other DNA
atgccaacaaccatcgaaagggagtttgaagagttagacacccagagacgttggcaaccactgtatcttgaaatacggaacgaaagccatgactacccacatagggtcgctaagtttcctgaaaataggaatcggaataggtaccgggacgtgtctccttacgaccacagtcgggtgaaattgcagaatgccgagaacgactatattaatgcaagcctggtcgatattgaagaggcccagagatcttatattctgacccagggtcctctgcctaacacctgctgccacttttggctgatggtgtggcagcagaaaactaaagctgtagtgatgctgaatagaattgtggagaaagaaagcgtaaagtgcgctcagtattggcccacggatgaccaggaaatgctgtttaaggagaccgggttctcagttaagttgttgagtgaagacgtcaaatcctattatactgttcatctgctccagcttgagaatattaactctggtgagacccgtacaatctcccactttcattacactacatggccagattttggcgtgccagaaagccccgcatctttcttgaattttctcttcaaagtgagagagagcggttccctaaatcccgatcacggtcctgccgtgattcattgttcagccggaatcggcagaagcggcacatttagtctggttgacacctgcttggtgctcatggaaaagggagacgatatcaacattaagcaggtactgctgaacatgcggaagtatagaatggggttgattcagaccccagatcagctgaggtttagttacatggctattattgaaggagccaagtgcataaagggagacagttcgattcagaaaaggtggaaagaattaagcaaagaggacctatcgcctgctttcgaccattcccctaacaaaattatgaccgaaaaatacaatgggaatagaattggcttggaagaagaaaagttgaccggcgaccgctgcacaggcctgtcaagcaagatgcaggacacaatggaggagaacagtgagagcgccctccggaagcggattcgggaagaccggaaagcaactactgcccagaaggtgcagcagatgaagcagcgcttaaacgagaacgagcgcaaacgtaaacggccacgactcacagatacctag

SEQ ID NO: 237068 - DNA, 1179 bp, synthetic construct
  misc_feature 1..1179: note = Description of Artificial Sequence: Synthetic coding sequence
  source 1..1179: mol_type = other DNA
tgccagcaggagttcagaatgtatggaaaggacggcaagggaaccaactggatggaccagggggatatggagtgcaggatgcaagagattgatgaccattcccgagtgaaattacagaacgcagagaacgattatatcaacgcctcccttgttgacattgaggaggcccagcgcagctacatccttacccaaggaccacttccaaacacatgctgtcacttctggctcatggtgtggcaacagaagacaaaggcagttgtgatgctcaacaggattgtggaaaaagagtctgtgaagtgtgcacaatactggccaaccgatgaccaggagatgctattcaaagaaactgggtttagtgtgaagctgctgagcgaagacgttaagtcttattacactgtgcatctacttcaactagaaaacatcaacagcggcgaaactcgcactatctcacatttccattatacgacctggccggatttcggcgttcctgagtcacccgcaagctttctgaacttcctctttaaagtgagggaaagcggttcccttaaccccgaccatgggcctgctgtaatccattgttcagcaggaattggtcgcagcggcaccttctctctcgtcgacacttgtcttgtactgatggagaaaggcgacgacataaacatcaagcaagtcctgttgaatatgcgcaaatacagaatggggctgatccagacgcccgaccagctgcgattctcatacatggctatcattgagggggcaaagtgtattaagggagactccagcatccagaagcggtggaaagagctctccaaggaagatctcagcccagcattcgatcattctccaaacaagataatgacagaaaagtataacggcaatcgtatcggcctggaggaggaaaaattaactggcgatagatgtacaggcctaagctctaagatgcaagataccatggaggaaaattccgaaagcgctcttcgcaaacgtattcgggaagataggaaagccactaccgcgcagaaagtgcagcaaatgaagcaacggttaaacgagaacgagagaaaacggaagcggtggctgtactggcaacccatacttacaaaaatggggttcatgagcgtgattttggtgggtgcctttgtgggctggacccttttttttcagcagaatgccctgtag

SEQ ID NO: 237069 - DNA, 1062 bp, synthetic construct
  misc_feature 1..1062: note = Description of Artificial Sequence: Synthetic coding sequence
  source 1..1062: mol_type = other DNA
atgccaaccaccattgaacgcgagttcgaggagctggatactcagaggagatggcagcctctgtatttggagatcagaaatgaaagccatgattacccccaccgcgtcgccaagttccccgagaaccggaacaggaaccgataccgcgacgtgtctccatatgaccacagtcgggtgaaactccagaacgcagagaatgactacatcaacgctagcctggtggacattgaggaggcacaaagatcctacatcctcacgcaggggccactgccaaacacttgctgtcatttttggctgatggtgtggcagcagaagaccaaggccgtggtaatgctgaatagaatagttgagaaggaatccgtgaaatgcgcccaatactggcctacagacgaccaggagatgcttttcaaagaaacaggctttagtgtgaagttgctctccgaggacgtgaagtcttactatacggtacacctgctccagctcgagaacattaatagtggagagacacgcacaatctcacactttcattacaccacgtggcccgatttcggtgtgccagagtccccagctagttttcttaatttcctattcaaggtgcgcgagagtggttcattgaatccagatcacggacctgcagtgatccactgttcagcagggataggcaggtccggaactttctcgctggttgatacatgcttggtactaatggagaagggggatgacatcaacattaagcaagttcttcttaatatgaggaagtaccgtatgggcttgatccagactcccgaccaacttagattttcatacatggctattattgaaggcgcaaagtgcattaagggtgacagcagcattcagaaacggtggaaggagctgtctaaggaagacctgtctccagcttttgatcactctcccaataagatcatgaccgagaagtataatggcaaccgtatcgggcttgaggaggaaaagctcaccggggacaggtgtacaggtctgtcctcaaagatgcaggacaccatggaggaaaactcggagaggcccaggctgaccgacacctag

SEQ ID NO: 237070 - DNA, 2424 bp, synthetic construct
  misc_feature 1..2424: note = Description of Artificial Sequence: Synthetic coding sequence
  source 1..2424: mol_type = other DNA
atggatcagagagagattctccaaaaattcctggatgaggcacagtccaaaaaaattacaaaggaggaattcgctaacgagttccttaagttgaaacggcagtccaccaagtacaaagccgataagacttacccaacaaccgtcgccgaaaagccaaaaaatatcaagaaaaacaggtacaaggatatactaccttacgactactctcgtgtcgagctttccctgataacctctgatgaagacagctcgtacataaatgctaacttcattaaaggagtctatgggccaaaggcgtatatcgctacccagggacccctctccaccacactgttagatttttggcgcatgatctgggagtatagcgtgctgattattgtgatggcctgcatggagtatgagatgggtaagaagaagtgcgagaggtactgggccgaaccaggtgagatgcaactggagtttggaccgttcagtgtttcctgcgaggctgaaaaaagaaagagcgactacattatccgtactctgaaggtgaagttcaattcggagacccgcaccatatatcagttccattacaagaattggccggaccacgacgtgccgtccagcatcgaccctattcttgaacttatctgggatgtgcgctgctaccaggaggacgacagcgtgccgatctgcatacactgtagtgcaggctgcgggaggacaggagtgatatgtgccattgattacacctggatgctgttaaaggacgggattatacctgaaaatttctccgtcttctctctgatcagagaaatgcgcacccagagaccttcgctggttcagacccaggagcaatacgagttggtgtacaacgcagtgctggagctgttcaaacgccagatggatgtgatccgagacaaacactcaggtacagagtcacaggccaagcattgcattcctgagaaaaatcacaccctccaggccgattcatattctcctaatcttccaaagtctactacaaaggcggctaaaatgatgaatcagcaaagaactaagatggaaattaaagagagctcttcatttgacttccgcacgtcggaaatatccgcgaaggaagaactcgtcctgcacccagccaaatcatccacaagcttcgatttcctggaacttaactacagcttcgataaaaacgctgatactactatgaaatggcaaactaaggccttccccatagttggagagcctcttcagaagcaccaaagcctagaccttgggagtctactctttgaggggtgttctaactccaagcccgtgaacgctgcagggagatacttcaatagtaaagtccccatcacccgcacaaagagcacgccttttgaactcatccagcagagagagaccaaagaggtggatagcaaggaaaacttttcctatctggaaagtcagcctcacgattcctgtttcgtagagatgcaggcccaaaaagtgatgcacgtgtctagtgccgaattaaattactccctcccatacgacagtaaacatcagatcagaaatgctagtaatgtaaagcatcatgactcctccgccttgggtgtttactcctacatacccctggtggaaaacccatattttagctcttggcctccgtcgggaacaagttcaaagatgtccctggacctcccagagaagcaggatggcaccgtcttccccagttcactgctgcccacttcatctacatctttattcagctactacaactcccacgacagcctgagcctcaatagcccaaccaacatttcttctttactgaatcaggagtccgccgtgttggccactgccccacggattgacgatgaaatccccccaccactgccagtgtggacaccggagagtttcatagtagtggaagaggctggagagttttcccctaacgtgccaaaatcgttaagtagtgctgtcaaagtcaaaattggcacctctctagaatggggtggcaccagtgaacctaagaagtttgacgattcagtcatcctcagaccatcaaagagtgtgaaactgaggtcaccaaaatccgagttacaccaagataggtcctcgccgccacctccacttcctgagcgaacccttgaatcattcttcctggccgacgaagattgtatgcaggcacagagcattgagacttactcaacgtcttacccagacacaatggagaactctactagctccaagcaaacactcaagacccccggaaagagttttactcgatctaagtctttgaagattttgcgaaacatgaaaaaaagtatttgcaacagctgtccccctaataagcccgcagaatccgtccagtcaaataacagctcaagctttttgaattttggatttgcaaaccgtttttcaaaaccaaaaggaccacggaatccccctcccacttggaatatctag

SEQ ID NO: 237071 - DNA, 1692 bp, synthetic construct
  misc_feature 1..1692: note = Description of Artificial Sequence: Synthetic coding sequence
  source 1..1692: mol_type = other DNA
atgttgttaaaggacggcatcatacccgagaacttctctgtattcagtctgatccgcgagatgaggacccagcggcctagtctcgtgcagactcaagaacaatatgagctcgtgtataatgctgttcttgagctttttaaacgacagatggacgtgatcagagacaagcactcgggaacggaatcacaagcaaaacactgtatccccgagaaaaatcacactcttcaagcggactcctactcccctaatttgcccaaatccactacgaaggcagcaaagatgatgaatcagcagcggacaaagatggagataaaagaatcatcctcctttgacttcagaacatccgagatatctgcaaaagaggagctggtgctccatcctgccaagtccagcacaagcttcgatttcctggagcttaactattcttttgataagaacgcagacactaccatgaagtggcagacgaaagcgtttcctattgtgggcgagcctctccaaaagcatcagtcgttagatcttggatctctgctgttcgaaggatgtagcaattctaagccagttaacgccgctggcaggtacttcaattccaaggtgcccatcaccagaaccaaaagcacccccttcgaactaattcagcagagagagacgaaggaggtcgatagcaaggaaaacttttcatacctggaaagtcaacctcatgatagctgctttgtggagatgcaggctcagaaggtcatgcacgtgtcaagtgctgaactgaactactcccttccctacgatagtaagcatcagattcgcaacgcttcaaatgtaaagcaccacgacagcagcgcgcttggcgtgtactcttacatccctctggtggaaaatccctatttctccagctggcccccatcaggaaccagttccaaaatgagtctagacctacctgaaaaacaagatgggacagtctttccttcctcgctactgccaacaagcagtactagtttgttctcctattacaactcccatgattctctgtcgcttaacagcccaaccaatatcagcagcctacttaaccaggaaagtgccgtgttagcaacagccccaagaatcgatgacgaaataccacctcccctccctgtctggactcccgaaagcttcatcgtggtggaagaggcgggtgaattctccccaaatgtgcctaaatctctgtcttcagccgtcaaggtgaaaattggcacttctttggaatggggaggaacgtccgaacccaaaaaatttgacgactcagtcattttgaggccatccaagagcgtgaagctgcgatctcctaagtcagaactccaccaggatcgctcttcaccgcctccgccactccccgaacggacacttgaatctttctttctggctgatgaggattgcatgcaggcacagtcaattgaaacctatagcacgagctatccggacactatggagaactctacgtcatccaaacagacactaaaaaccccaggaaaatcattcacccgctctaagtctctaaagatcctgcggaacatgaagaaatccatctgtaactcgtgccccccaaacaagcccgctgagtcagtccagagcaacaattcctctagttttctgaacttcggctttgccaatcgtttcagtaagcccaagggcccaaggaatcccccacccacctggaatatttag

SEQ ID NO: 237072 - DNA, 4911 bp, synthetic construct
  misc_feature 1..4911: note = Description of Artificial Sequence: Synthetic coding sequence
  source 1..4911: mol_type = other DNA
atggaggcagtgcctagaatgcctatgatttggctcgacctaaaggaagcaggagattttcactttcagccggcagtcaagaagttcgtcctcaaaaactacggtgagaaccccgaggcttacaatgaagaactgaaaaagttggagctcttacgtcagaatgccgtcagggtccccagggacttcgaaggatgtagtgtgttgagaaagtatctgggacagctgcactacctccagtctcgggtgcctatggggtcgggccaagaagcggcagtgccggtaacatggactgagatcttttctggtaaatcagtggctcacgaggacatcaaatatgagcaagcttgtatcctgtacaacctgggtgcgttgcactccatgctcggtgccatggacaaacgagtgtctgaagagggcatgaaggttagttgtacccacttccagtgtgctgccggagcattcgcataccttcgtgaacattttcctcaggcctactcagtggatatgagtaggcagatccttactctgaacgtgaatctgatgttgggacaggcacaggagtgcctgctggagaaatccatgctagataaccgaaagtcctttctcgtcgccagaatatcagctcaggtggtcgattattataaagaggcttgccgggcactcgagaatcccgacactgctagccttctgggacggatccaaaaagattggaaaaagttggtgcagatgaagatatattacttcgccgctgtcgcccatctacatatggggaaacaggccgaggaacagcagaaattcggtgagagggtggcttactttcaaagcgctctggataagctcaacgaggccatcaaattagcaaaggggcagcccgataccgtgcaggacgcactgagatttaccatggacgttatcggagggaagtataactctgcaaagaaagataacgactttatttatcatgaggctgttcctgcattggatacactgcagcctgtgaagggcgctcccctcgtcaagcccttgccagttaatcctactgatcccgctgtgactggacctgacatcttcgcgaagttagtgcccatggcagcccacgaagcttcgagcctgtattcagaagaaaaagccaagttgctgagggaaatgatggcaaagatcgaggacaaaaacgaagtcctggatcagttcatggactcaatgcaattagatcctgaaaccgttgacaatctggacgcttactcacacataccaccgcaattgatggaaaagtgcgcagcactatccgtgaggcctgacacagtcagaaatttggtgcagagcatgcaagtgctgagtggggttttcacagacgtcgaagccagtttaaaggatattagggacttgctggaggaggacgaactcctggaacagaagtttcaggaggccgtgggtcaagcaggggcaatatctattacatcaaaggcagaacttgctgaggtcaggcgtgaatgggccaagtacatggaggtccatgaaaaggcctctttcacaaactcagaacttcaccgggcaatgaacctgcacgtgggtaatcttaggctgctttctggaccactggaccaggtgagagctgctctcccaaccccagccctctccccggaggacaaggctgttctgcagaatctcaaacgaatcttagctaaagtgcaagaaatgagagaccagcgtgtcagtctagagcagcaactgcgggagctgatacaaaaggatgatattacagcatccctcgtgactaccgatcactcagagatgaagaagctgttcgaggagcagctcaagaagtacgaccagctaaaggtgtaccttgagcagaatcttgcagcccaagatcgcgttctctgcgctttgacagaagccaacgtgcagtatgccgctgtgcggcgtgtgttatctgaccttgaccagaagtggaactcaacactgcagactctagtggcaagctatgaggcctacgaggacctgatgaagaagagccaagagggccgagacttttacgccgatctggagtctaaggttgccgctctcctggaaaggacacagtccacatgtcaggcgagagaagcagccagacagcagcttctggacagggaactgaagaaaaagccccctccaagaccaactgccccaaaaccactgctccctaggcgggaggaatccgaagctgtggaagctggggaccctccagaggaactgcgttcccttccacctgacatggtcgcaggccctcgccttcccgacacatttctgggcagtgctacccccctgcactttccgcctagcccctttccgtcctcgaccgggccaggaccccattaccttagtgggcctctgcctcctggcacctacagtggccctactcagcttatccagcccagggccccaggaccacacgccatgcccgtcgccccaggtccagccctataccccgcaccagcgtatacacccgagcttggcctggtacctcggtccagccctcagcatggggtggtgagctctccttacgtgggggtgggacctgccccaccagtcgctgggctcccctctgcccctccgccacagttttctggacccgagctggctatggccgtcagacccgcaacaacgaccgtagactccattcaagccccaatcccaagtcatacagcacctagaccaaatcctacaccagctcctcctcccccatgctttccagtgccgcctccacagcctctacctacgccttacacgtacccagccggtgcaaagcagcctataccagcacagcatcacttcagttctggaattcccgctggatttcctgcccctagaattggacctcagccccagcctcacccgcagccccacccaagccaggcctttggcccacagcctccccagcagccgcttccactccagcaccctcatctgttcccccctcaggcgccaggactgttgccgccacagtctccttacccgtacgctccgcagccaggggtcctcgggcagccacctccaccactccatactcaactttaccccggtccggctcaggacccgctgcctgcccattccggagccctgcctttccccagccctgggccaccacagcccccacacccaccactggcctatggtccagcgccatccactcggccaatgggaccacaagccgctccactgacgattcgcggaccgtctagcgctggtcagagcacacctagcccccatttagtgccatctccggcaccgagcccgggtccgggtccagtaccaccacgaccccctgcggcagagccgccaccatgcctgagacgtggcgctgccgcagccgatctgctgagtagttctcccgaatcccagcacggagggacccagtctcccggtgggggacagcctctgctacagccaacaaaggtggacgcagctgaggggagaagacctcaggctttacgtctaattgagcgagacccttatgagcatcccgaaagactacgtcagctccagcaggagctagaggcttttcggggtcagctgggtgacgtaggtgccctcgacaccgtttggagagagctacaggacgcgcaggaacacgacgcaagaggcagaagcatagccatcgctcgatgttattcccttaagaataggcatcaggatgtcatgccctacgattccaatcgggtagtactaaggtccggcaaagatgattacataaacgccagttgcgtcgaagggctgagcccatactgtcctccactcgtggccacacaggccccactgccgggaacagcagctgatttctggctgatggtccacgagcagaaagtgagtgtcatcgtgatgttagtgagcgaagccgaaatggagaagcaaaaggtcgcacgttactttcctaccgagagaggccagcccatggtgcacggggctctttctttggctctgtcctctgtacggtccactgaaactcacgtcgagcgggtcctaagcttgcagttcagggatcagtccctcaagaggagtttggtccatctgcacttccccacctggcccgagttaggactgccagacagtccttctaacctgctgagatttatccaggaggtgcacgcacattacctgcatcaaaggcctcttcacacaccgataatagtccactgctcatcgggtgttggtcggactggagcatttgctctgctgtacgccgctgtccaagaggtcgaggccggtaatggaatcccagagctaccgcagcttgtgaggcggatgagacagcagcggaaacatatgctccaggagaagcttcacctgcgattctgctatgaagctgtggtgagacatgtagaacaggttctgcagcggcatggtgtccctcccccatgtaaacctctggcatcagcttcgataagtcagaagaatcatttgccccaggacagccaggacctcgtgctcggcggtgatgtgccaatcagctcgatccaggctactatagcaaagctgtccatccggcctccaggcggactggaaagccctgttgctagccttcctggacccgctgagccgcctggcctcccacccgcttccctgccagagagcactccgataccctccagctcgccacctcctttgagtagccccctccccgaggctccacagcccaaagaagaacccccagttcctgaagccccaagcagcgggcctccttctagctctctcgagctactggcttctctgacgcctgaagccttctcccttgattcgagccttaggggtaaacagcggatgagtaagcacaattttcttcaggctcacaacgggcagggacttagggctactcgccctagtgacgacccccttagtctgctcgatcctctctggacactgaataagacttag

SEQ ID NO: 237073 - DNA, 2739 bp, synthetic construct
  misc_feature 1..2739: note = Description of Artificial Sequence: Synthetic coding sequence
  source 1..2739: mol_type = other DNA
atggaggccgtccccaggatgcctatgatatggcttgatctcaaggaggcgggagacttccactttcaaccagccgtcaagaaaaatgccgtgagggtacccagagactttgaaggctgtagcgttctcagaaagtatctggggcagcttcactaccttcagtctcgggtgccaatgggctcagggcaggaggccgcagtccctgtgacctggactgaaatttttagcgggaaaagcgttgctcatgaggacatcaagtatgagcaggcctgtatcttatacaaccttggggcactgcacagcatgctgggggcaatggacaagagggtgtcagaagagtgtgccgcaggggcttttgcatacctgagggagcactttccccaggcctactcagtcgacatgagccggcagatcttgactctcaacgtcaacctgatgttagggcaggcccaagaatgccttctggagaagagcatgctggacaatcgtaagagctttctggtggccagaatatctgcccaggtggtagattattataaggaggcctgccgggctctggagaaccctgacaccgcatccctgctcgggaggattcagaaagattggaaaaaattagtacagatgaagatttattatttcgcggcagtcgctcatctgcatatgggcaaacaggccgaagaacagcagaaatttggggagagggtcgcatactttcagtctgctctcgacaagctgaatgaggctatcaagctggcaaaggggcagcccgatacggttcaggacgctctgcgctttactatggatgtcatcggcggaaaatataattctgcaaaaaaagataatgactttatatatcatgaagctgtacctgccctggatacgctccagcctgtcaagggcgcaccccttgtgaagcccctgcctgttaaccccacagacccagccgtgaccggcccagacatctttgccaaactggtgcctatggcagctcacgaagcatcaagcctgtactctgaagaaaaggccaagcttcttagagaaatgatggccaagattgaagacaagaatgaagtgttggatcagtttatggactccatgcagcttgaccctgaaactgtcgataatttagatgcctactcacacatcccaccccaattaatggagaagtgcgccgcattgtccgtcaggcctgacacagttagaaatcttgtgcagagcatgcaagtgctgtctggagttttcacagatgtggaggccagtcttaaggatatcagggacttactggaagaagacgagctactggaacagaaatttcaggaggctgtaggacaggccggtgcaatcagcatcacgtccaaggctgagctagctgaagtccgcagagagtgggctaaatatatggaggtgcatgagaaagcgagctttactaacagcgaactgcacagagcaatgaatcttcatgtgggtaatctgaggctgctatccgggcctttggatcaggtgagggctgccctccctactcctgcgctgtctccagaagacaaagctgtactgcaaaatctcaaaaggattctggcgaaagtgcaggaaatgcgggatcaacgtgtctcactagaacaacagctgagggaactgattcagaaagacgacatcacagcctctttggtcaccactgaccacagcgagatgaagaagctgtttgaagagcagcttaaaaaatatgaccagctcaaagtataccttgagcagaacctggccgctcaagaccgcgtgctctgcgccctcactgaagctaatgttcagtacgctgcagtcagacgcgtactgagtgacttggatcagaagtggaacagcactcttcagacccttgtagcgagctacgaggcatatgaggatctcatgaagaaatctcaggaggggagggacttctacgcagacttggaaagtaaggtggcggctctcctggaacgcacccagagcacatgccaggcccgagaggctgccaggcagcagttactcgaccgagaactgaagaagaagccgcctccccgtccaacagcacccaaaccattgttgcctcggagagaggagagcgaggccgtggaagccggtgatcccccagaggagctgcggagtcttccgccagatatggtcgcgggaccaagactgcccgacacctttcttggtagcgcaactcccctgcatttcccacccagccccttcccaagctctacaggccctggaccccattacctctctggccctcttccgcctgggacttactctggcccaacacaattgattcagccacgcgctcccggtccacatgcaatgccggtcgccccaggccctgcgctttaccctgcacccagctctgcgccatccttcacctcagtttgggccagcgcacctaccgcagcgccaagtacccccgcttccaccagcttgcccactccagggcctagaaccccaactccaacaattccattaccactctgcccttctgcatggggcccaggcgctgccgctacacctccaacccatccagctctccccagatcaaggagcagaccttcagcctcccctctccgtggcagtgcttttcctcagccgtgggccccttccgcatccccctcacctacggggatttggagctgtcctttttaccaaacccatggacccccaggtagcccttcatatcactcccgagcattggtttgctggcctgttcatccttag

SEQ ID NO: 237074 - DNA, 1698 bp, synthetic construct
  misc_feature 1..1698: note = Description of Artificial Sequence: Synthetic coding sequence
  source 1..1698: mol_type = other DNA
atgaattacgaaggcgcacggtctgagcgagagaaccacgctgctgatgacagcgaggggggtgcccttgacatgtgctgctctgagcgcttgccaggcctgccccagccaattgtcatggaagccctcgatgaggccgagggactccaggactcgcagcgggagatgcctcccccaccgccaccgtccccaccatccgatccagcacagaaaccacctcccaggggcgctggctcccattccctgaccgtcaggagctctttgtgtctattcgccgcttcccagtttctgctcgcatgtggcgttctgtggttctctgggtacgggcacatctggtcccagaacgcaactaacctggtgtcttccctgctcacactgttgaaacagctcgagccaacagcatggctggactcaggaacttggggagtacctagtttgttgttagtcttcttaagcgtcggtttagtcctggtgactaccctggtatggcacctcctgcggacccctccagagccacccactcccttgccccctgaagaccggcgacaaagcgttagccggcagccgtccttcacatactcagagtggatggaggagaagatcgaggatgatttcttagacttggatcctgtccctgaaacacccgtgttcgactgtgtaatggatatcaaacccgaggcagatcccactagtttaaccgttaagagcatgggtctgcaggaaaggcgtggatcaaatgtgtccctgacgctggacatgtgcacacccggatgcaacgaagagggctttggctacttgatgtccccaagagaagagagtgcacgagagtatctcctctctgcaagcagagtactgcaggcagaggagctacacgagaaagccctggatccatttctgttacaggctgagttcttcgaaatacctatgaactttgttgatcctaaagaatatgatataccgggactggtccggaaaaatagatataaaacaatcctgccgaacccgcacagcagagtgtgcctgacaagccctgacccagacgatccattgagctcttatataaatgcaaattatattagaggatatggcggagaggaaaaggtgtacattgcaactcaggggcctatcgtgagcactgtggcagatttttggcggatggtctggcaggagcacaccccaatcatcgttatgatcacgaacattgaggagatgaatgagaagtgtactgagtactggcctgaggaacaagtagcatacgacggagtcgagatcactgtccagaaagtgatccatactgaggactacaggctgagactaatcagccttaagtcaggtacggaggagcgcggtcttaaacattattggttcacatcctggccagatcagaagacgccagatagagcgcctccactgcttcatttggtgagggaggtggaagaggccgcacagcaagaaggccctcactgtgctccgattatcgtgcactgttccgcgggaattggtagaaccgggtgcttcattgctacgtcaatctgttgccaacagctgaggcaagaaggagttgtggacatattaaaaaccacttgccagctcaggcaggaccgtgggggaatgattcaaacctgcgaacaatatcaattcgtccatcatgtgatgtcattatatgagaaacagttaagccaccagtcccctgagtag

SEQ ID NO: 237075 - DNA, 1602 bp, synthetic construct
  misc_feature 1..1602: note = Description of Artificial Sequence: Synthetic coding sequence
  source 1..1602: mol_type = other DNA
atgaactacgaaggcgctcgatcagagcgggagaatcatgccgcagacgacagcgaaggcggagccctagatatgtgttgtagtgagagactgcctggtctgcctcagcccatcgtgatggaggccctggacgaagctgagggattgcaggactcccagagagaaatgccgcctcctcccccacccagtccaccgagcgacccagcccagaaacctccgccaaggggcgctggcagccattctctcacggtccgcagttcactgtgcctgtttgcggcttcgcagtttctgctggaaccaacggcctggctggactcaggaacttggggcgtgccttccttattgcttgtgttcctgtcggtgggtttggttctggtaactactcttgtgtggcatctgctcaggactccgcctgagccccctactcctttgccgccagaagatcgacggcaatctgttagccgacaaccatcctttacatactccgaatggatggaagaaaaaattgaggacgattttctggacctggatcccgtacctgaaacacctgtgttcgattgcgtgatggatatcaaaccagaagccgaccccaccagcctaacagtcaaatccatgggactccaggagcgccgaggttccaacgtgtcactgactctggacatgtgcacccccggttgcaatgaggagggcttcggatacctcatgtccccaagggaggaatctgctcgggaatacctcctgtccgcctcgcgtgtcctgcaggcagaggagctccatgaaaaggcactggaccctttccttctacaggctgaattttttgagattcccatgaattttgtggaccctaaggagtatgatatccccggactcgtccgcaagaatcgatacaaaacaattctgcccaatccacactctcgggtgtgcttaaccagtcccgaccccgacgatccattatctagctacatcaacgctaattatatccgcggatacggcggagaggaaaaagtctatatcgctactcagggtcccatcgtcagtaccgttgcagatttctggaggatggtatggcaggagcatacacctattatcgtgatgatcacaaacatagaggagatgaatgagaaatgtaccgagtattggcccgaagagcaagtcgcctatgatggtgtggaaattaccgttcaaaaggtgattcacaccgaggactataggcttagactaatttccctcaagtcagggactgaagagcgtggactcaagcattattggtttacctcatggcccgaccagaagacaccggatagggcaccaccgttactacatctggtgcgagaggtggaggaggccgcacagcaggaaggccctcattgtgcacccatcatcgtgcactgctctgcaggtattgggagaaccggatgtttcattgccacctccatttgttgtcaacagctccggcaggaaggcgtggtggacattttgaaaacaacgtgccaacttaggcaagatcgtggcggaatgatccagacctgtgaacagtatcaatttgtgcatcatgtcatgagtctgtatgagaagcagctaagtcaccagtccccggaatag

SEQ ID NO: 237076 - DNA, 1698 bp, synthetic construct
  misc_feature 1..1698: note = Description of Artificial Sequence: Synthetic coding sequence
  source 1..1698: mol_type = other DNA
atgaactacgaaggagctaggtctgagcgagagaaccacgctgccgacgatagtgagggcggtgctcttgacatgtgctgcagcgagagactaccaggcctgcctcagcctatcgtgatggaggccctggacgaggcagaaggactccaagatagtcagcgggagatgccccctccacctcccccatcccccccatctgaccccgcacagaagccccctcctaggggtgcaggcagccactcattgacggtgcggtctagcctgtgcctgttcgctgcctctcagtttctgctggcatgcggtgtgttgtggttctccggctacggacatatttggagtcagaatgctaccaatctcgtgtcgtccctcctgacgctgctgaaacagcttgaacctactgcctggcttgactcagggacgtggggggtgcctagtctgctgcttgtgtttctgagtgtgggcctcgttcttgtcactacactggtctggcacttactcaggactcctccagaacccccaaccccactacctccggaggaccgcagacagtccgtttctcgccagccaagtttcacgtacagcgagtggatggaggaaaagattgaggatgactttctcgacttggatcctgtaccagagactccagttttcgactgtgttatggacatcaaacccgaagccgaccctacgagtctgacagtgaagtcgatgggcttacaggaaagaagaggcagcaatgtcagtctgacgctcgatatgtgcaccccaggctgtaatgaggagggttttggatatcttatgtctccacgtgaagagagcgcgcgtgaatatttgctgtctgccagccgggtgctacaggccgaagaactgcatgagaaagccctggatccatttttactgcaagccgaattctttgaaattccgatgaacttcgttgaccccaaagaatacgatattcccggactcgtgcgcaagaacagatataagactatcttgccaaatcctcatagtagagtgtgtttgacttcccccgacccagacgaccctctctcgagttatatcaatgcaaactacatcaggggatatggcggagaggaaaaagtgtacatagcaacccagggcccaatcgtgtccaccgtggctgatttctggagaatggtctggcaagaacatacccctattatagtcatgattaccaacatcgaggaaatgaacgaaaaatgtaccgaatattggcccgaggagcaggttgcatatgatggcgtggagatcaccgtgcaaaaagtgatacataccgaagactacagactgaggctgatctctttgaagagcggcacagaagaaagagggcttaaacattactggttcactagttggcccgaccaaaaaacacccgatcgcgctccacccctcctgcacctagttcgagaagttgaagaagcagctcaacaggaagggcctcattgcgcccctattatcgtacactgtagtgcagggatcggacggaccggatgtttcatcgctacgagcatttgctgtcagcagctccgacaggaaggagttgtcgacatcctgaaaacgacgtgtcagctgcgtcaggaccgcggaggtatgatacagacatgtgagcaataccagttcgtccaccacgtgatgagcctctatgagaagcaactgtcccatcagtctccagagtag

SEQ ID NO: 237077 - DNA, 1788 bp, synthetic construct
  misc_feature 1..1788: note = Description of Artificial Sequence: Synthetic coding sequence
  source 1..1788: mol_type = other DNA
atggtacggtggtttcatcgtgacctgtcgggcttagatgccgagaccttactgaaaggcagaggtgttcacggtagctttctggctaggccaagccggaaaaatcaaggggacttttccctctcagttcgcgtgggagatcaggtgacccacatcagaatccagaattcaggggacttctacgatttatacgggggagaaaagttcgcgactttaaccgaactcgtggagtattacactcagcagcagggcgtcctgcaggaccgcgacggaactatcatccaccttaagtatccactgaactgttctgaccctactagtgaacgatggtaccacggacacatgtctggaggacaggcagaaacactcctgcaagctaaaggagaaccctggacattccttgtccgtgagagcctgtcccagcccggagattttgttctttctgtcctatcggaccaacctaaggcagggccaggctctccgctgcgggttacccacatcaaggttatgtgtgagggcggtagatataccgtgggcggtcttgaaactttcgacagcctcaccgacttggtggagcactttaagaaaaccggcatagaagaggcctcaggcgctttcgtctacctgcgacaaccatactacgcgacacgtgttaatgccgcagacattgaaaaccgggtactcgaattgaacaagaagcaggagagtgaggatacagccaaggctggcttctgggaggaatttgaatcactccagaagcaggaagtaaaaaacctgcatcaacgactagaaggccagcgccctgagaataagggaaagaaccgctacaagaatatcctgccctttgaccattctcgggttatcctacaggggagggattcaaatatcccgggatctgactacatcaacgccaactacattaagaaccagttgctagggccagacgaaaatgcaaaaacgtatatcgcttcacaggggtgtctggaagctaccgtcaacgatttctggcaaatggcctggcaggagaattctcgcgttattgtgatgaccacccgggaagttgagaagggcagaaacaaatgtgtgccatactggcccgaggtcggaatgcagagggcttatgggccatatagcgtgaccaactgcggagagcacgacactactgagtacaaacttcgtacactccaagtgagtcccctggacaatggtgacctgattagggagatttggcattaccagtatttgtcctggccagaccacggggtcccctcagagcccggtggtgtgctgagcttcctcgatcagatcaaccaacggcaggagagtctgcctcacgcaggtcccattatagtccattgctccgctgggattgggaggacaggaaccattattgtgattgatatgttgatggagaatattagtaccaaaggacttgactgcgacatagatattcagaagacaatccagatggtccgcgcacaaaggagtggcatggtgcagaccgaagcccaatacaaatttatttacgtagctatagcccagtttatagagacaacgaagaaaaagctcgaagtgctacagagccagaaaggccaagagtccgaatacggaaatataacttatccgccagcaatgaaaaacgcccatgccaaagcttccagaacctctagcaaacacaaggaggatgtttacgagaatctgcacaccaaaaataagagagaggagaaggtgaagaagcaacggtccgctgataaggagaaatctaaggggagcctaaaacgaaagtag

SEQ ID NO: 237078 - DNA, 1794 bp, synthetic construct
  misc_feature 1..1794: note = Description of Artificial Sequence: Synthetic coding sequence
  source 1..1794: mol_type = other DNA
atgctctcccgaggatggtttcacagggatctgagtggcctggacgccgagacgctcttgaagggccgaggggtgcacggatcattcctcgcacgaccatccagaaagaaccagggcgacttcagtttgtctgtgcgggtgggtgatcaggttacccacatccggattcagaattcaggcgatttttatgacctctacggcggagagaaattcgccaccttgaccgaactggtcgaatactatacccaacaacaaggagtcctgcaggaccgcgacgggaccatcattcatctaaagtatcccctgaattgctcagacccaacttctgagcgctggtatcacggtcacatgtcgggcggtcaggccgagacgttgctgcaggctaagggcgaaccatggacttttctcgtgcgggaaagcctgagtcagccaggcgacttcgtgctcagcgtgctttcagatcaacctaaagccggtccaggctctcccctgagggtgacccacatcaaggtcatgtgtgaaggcggtagatacacggtgggcggtttggagacgttcgacagcctcacggaccttgtggagcattttaagaaaaccggtatcgaggaggcctccggcgcttttgtgtatctgaggcagccctactacgccacacgggtgaatgccgcagatatcgagaatcgggtgttggaattgaacaaaaaacaggaatcagaagatacggccaaggccggtttttgggaagagttcgagagcctgcagaaacaagaggttaagaaccttcaccaacgccttgagggacagagacctgagaataaaggtaaaaacagatataagaacatccttccttttgaccactcgcgagtgatcctgcaggggcgagattctaacatcccaggttctgactatatcaatgcaaactacatcaaaaaccagctgctgggcccagatgagaatgccaaaacatacattgcctcccagggctgccttgaagctacagttaacgacttctggcagatggcctggcaggaaaactctagggtcatagtcatgaccactagggaagttgagaaggggcgaaataagtgcgtaccttactggccggaggtgggtatgcagagagcctacgggccttacagtgtgacgaattgtggcgaacacgacacgacagagtacaaactccggactctgcaagtgtccccacttgacaatggcgacctgatccgcgagatatggcattaccagtacttgtcctggccggatcacggcgtgccttcagaaccaggtggcgttctgtcattcttggaccagattaatcaacggcaagagagccttccacatgccggtccaattatcgtgcactgtagtgctgggattgggaggacaggcaccatcatcgtgatcgatatgttgatggagaacataagtacaaagggtctcgattgcgacatcgacatccaaaagaccattcagatggtaagggctcagcgatcaggcatggtgcagactgaggcgcaatacaaattcatctacgtggccatcgcccaattcattgaaactactaaaaagaagctagaagtcttgcagagccagaaaggacaggagtccgaatacggtaatataacgtatccaccagccatgaagaacgcgcatgctaaggcttcaagaacatcaagcaagcataaggaagacgtatacgaaaacctccacaccaagaacaagcgggaagaaaaagtcaagaaacagcgctcggccgataaggagaagtcaaaaggatccctgaaacgaaagtag

SEQ ID NO: 237079 - DNA, 1671 bp, synthetic construct
  misc_feature 1..1671: note = Description of Artificial Sequence: Synthetic coding sequence
  source 1..1671: mol_type = other DNA
atgctctcccgcggtgtgggggatcaagtcacacatattagaatacagaatagtggcgatttttatgatctgtacgggggagagaagtttgccacgctcacagagctggtggaatactacacccaacagcaaggcgtcctgcaggatagggatgggaccataattcaccttaaatatcccctgaattgctctgaccccacatctgagaggtggtaccatgggcacatgtcaggtggtcaggccgagactttgctacaggcgaagggcgagccatggacctttctggtgagggagtctttatcacagccgggagactttgttctgtcagtgctcagcgatcagccaaaagccggacctggaagtccactgcgggtcacacatataaaggttatgtgcgagggcggtcgctacactgttggtggccttgagacatttgatagcctaacagatctcgtcgagcactttaagaaaactggcatcgaagaagccagcggagcgtttgtgtacttacggcaaccatattatgccactcgcgtgaacgccgctgatatcgaaaatcgcgtcctggagttaaataagaagcaggagtccgaggatactgccaaggcgggattctgggaagagttcgagtcccttcagaaacaagaggtcaaaaatctccaccagcgcctcgaaggtcagcgccctgagaacaagggcaagaataggtacaagaatatcttgcctttcgaccactctagggtgatcctgcagggtagagactctaatataccaggcagcgactatataaacgcaaactacattaaaaatcagctcctcggaccagatgaaaacgctaagacctacatagcctcccagggatgcctcgaggccactgtcaatgacttctggcagatggcttggcaggagaattcacgggtgatcgtaatgactaccagagaagtggagaagggaagaaacaagtgcgtgccctattggccagaagttggcatgcaaagggcctatggcccatatagcgttacaaattgtggtgagcacgacaccaccgagtacaagctgcgcactctgcaagtgagtccactcgacaacggcgatcttattcgtgagatctggcattatcagtacctctcttggcctgatcacggtgttcctagtgaacctggaggggtgctatcgtttctcgaccagattaatcagcgccaggagagtctaccccacgccggaccaataatagtccactgcagcgccggaatcggaaggacaggtaccataatagtcatcgacatgctgatggagaatattagtactaagggtctcgactgtgacatcgacatccaaaagacaatccagatggtgcgcgctcagaggtcaggaatggtccaaacagaggcccaatacaaattcatttatgtcgcaattgcccagttcatcgaaacaaccaaaaagaaactcgaagttctacaatctcaaaagggacaagagagtgaatacggcaacattacctaccccccagcgatgaagaacgcgcacgctaaggcctctagaacatctagcaagcacaaagaggacgtgtacgagaatctgcacacgaaaaacaaacgggaagaaaaggtgaaaaaacaacgttccgccgataaggagaagagcaaagggtctctgaagcggaaatag

SEQ ID NO: 237080 - DNA, 1875 bp, synthetic construct
  misc_feature 1..1875: note = Description of Artificial Sequence: Synthetic coding sequence
  source 1..1875: mol_type = other DNA
atggtccgctggttccatcgagatctaagtgggttagacgcagagacactgctgaaagggaggggcgtgcatgggtcctttctcgctcggccatcaaggaaaaaccagggagacttttccctctcggttcgggtgggcgaccaagtgacacatatccggatccaaaattcaggcgatttctatgatctgtatggaggagagaagttcgctacgctcactgagcttgttgagtattatactcagcagcagggggtactccaggatagagatggtactatcatccacttgaaatatcctctcaactgcagcgatccaacatcagagagatggtaccacgggcacatgtcagggggtcaggctgagacccttctccaggcgaaaggggagccttggacattcctcgtgcgggaaagcctgagccagcctggagactttgttctgtccgttctgtccgatcagcccaaggccggaccaggcagccccttacgagtgacccacatcaaggtaatgtgtgagggcggacggtacaccgttggagggcttgagacattcgacagccttaccgacctggtggagcattttaagaagaccggcattgaagaagctagcggtgcttttgtttacctgcgacagccgtactacgccactcgggtcaacgctgcggacatcgaaaatagggtgctggagctgaacaagaagcaggaatcagaagacaccgctaaggcgggattctgggaagaattcgagagtctacagaaacaggaggtcaaaaatttgcatcagcggttggagggtcagaggcccgaaaataagggaaaaaatcgatataagaatatcctgccattcgatcattcacgcgtaattcttcaaggcagggatagcaacatccctggctcagactatatcaacgccaattacatcaaaaaccagctcctaggaccagacgaaaacgcgaagacttatattgcatctcaagggtgcctcgaggcaaccgtgaatgacttctggcaaatggcctggcaggagaattctcgcgtaatagtcatgacaaccagggaggtggagaaagggcgaaacaagtgcgtgccctactggcctgaggtgggcatgcagagagcctacggaccgtattccgtgaccaattgtggtgaacacgataccactgagtacaagctacggacgctgcaggtcagcccgctcgacaatggcgacctgattagggagatatggcactatcaatatctgtcctggccggaccacggcgtgcctagtgagcccggaggtgtccttagctttttggatcagatcaaccagagacaagaaagccttccccacgcaggccctattatcgtccactgtagtgcgggtattgggaggaccggaacaatcatcgtcatagatatgcttatggagaacatctcaaccaaaggacttgactgtgacatcgacatccagaagacaatccaaatggtacgcgctcagcggagcggaatggttcaaacagaggcccagtacaagtttatatatgtcgccatcgcgcagttcattgagaccactaaaaagaagttagaggtgctccaaagtcagaaggggcaggagagtgagtacggcaatatcacatatccacctgccatgaagaacgctcacgccaaagcttcccgaactagcagcaaatcgcttgagtcatcggccggtaccgtggccgctagtcctgtcaggcgcggtggacagagagggctgcctgtgccgggaccacccgtgctttccccagaccttcatcagctgcctgttctggcaccactgcaccctgccgctgatacccgtcgaatgtgcatgagaacttgtacattaagaactagagggagacgtaaatag

SEQ ID NO: 237081 - DNA, 1083 bp, synthetic construct
  misc_feature 1..1083: note = Description of Artificial Sequence: Synthetic coding sequence
  source 1..1083: mol_type = other DNA
atggtgcaagcccacggtggacgaagccgagctcagccactcaccctaagtctaggagccgctatgacacaaccaccaccggagaaaacacccgcaaagaaacacgtgaggcttcaggaacggcgaggtagcaacgttgccctgatgctcgatgttcgttcattgggcgcagtcgagcctatctgttctgtgaatacgccacgggaagtaactctgcacttcctcagaacagccggtcatccactgactcggtgggccctgcaacggcagcccccatctcctaagcagttggaagaggagtttctgaaaatcccttctaatttcgtaagtcctgaagatttagatataccaggccacgcatcaaaggacaggtacaagacgatattgcctaacccacaaagcagagtgtgccttggaagagcccaaagtcaggaagacggcgattatatcaatgcgaactacatccggggttacgatgggaaagaaaaagtgtacatagccacccagggacctatgcctaacacagtgagtgacttctgggagatggtttggcaggaagaggtatctctgatcgtgatgttaacacaactgcgcgaagggaaagagaagtgcgttcactattggcccactgaggaggagacttacggaccatttcagatccgcattcaggacatgaaggagtgcccagaatacactgtcaggcagctcacgattcaatatcaggaggaaagaaggtccgtgaagcatattttgttctcagcatggccagaccaccagaccccagagagcgctggcccactgctccggctggttgctgaggtggaggagagtcctgaaacagctgcccatccaggcccaattgtcgtccattgcagcgctgggatcgggaggaccggctgctttatagccacccggattggatgtcagcagctgaaggcccgaggtgaagtggacatcctggggatagtttgtcagttgagattggacagggggggaatgatccagacggcggagcagtatcagttccttcaccacactcttgccctttacgcaggccaactgcctgaggaacctagtccctag

SEQ ID NO: 237082 - DNA, 1398 bp, synthetic construct
  misc_feature 1..1398: note = Description of Artificial Sequence: Synthetic coding sequence
  source 1..1398: mol_type = other DNA
atggtcggaaaagcttggcctctgactcatagtcagggaacaggcccttgggccccagaaggtcatagaagggaagctgccgatccctggtggcagcggcagcaagcgcaggagggacggatgcaactgggctgtgcatgggtggcagcacggcgaggcggtgggcgaaagctggcttcttggtcccttctgagtccccagaggcagaccgatagacagactgatagttggcaagaggcagcatgggggcctcagctcctgcaacagacaagttggttatctgaaccaccacttgggccagctccgcatctgagtatggtgcaggcacatgggggaaggagtcgagcccagccactcacattgagcctcggggcagccatgacccagcctccccctgagaagacccctgcaaaaaagcacgtgcgactgcaggaacggaggggaagtaatgttgctctgatgttggacgtgaggagtttaggagccgtagagccaatttgctctgttaatacacctagagaggtcaccctccattttttgaggacagcaggccatcccttgacccggtgggccctccagaggcagcccccttcacccaaacagctggaagaagagttcctgaaaattccgagtaactttgtgagcccagaagatcttgatatacccggacacgccagcaaagacaggtacaagaccatcctgcccaacccacagtcgcgtgtttgccttggtagggctcaaagccaagaggatggggactacatcaatgcgaactacatacgcggatatgacggcaaggagaaagtatacatcgccacccagggtcctatgccgaacacagtgtctgatttttgggagatggtgtggcaagaggaggtctcattaatcgtgatgctgacccagctgcgcgaaggtaaggaaaagtgtgtgcactactggcctaccgaggaagagacctacggcccattccagataaggatccaggacatgaaagagtgcccagaatataccgtccgacagctgaccatccaataccaggaagagcgccgttccgttaaacatatactatttagcgcatggcccgatcaccagacacctgaatccgccggtccgttattgaggctggtggctgaggtagaggagtcccccgaaacagctgcgcacccgggaccaatcgtcgtgcactgcagcgccggaattggtcgcactggatgtttcattgctacaagaatcggttgccagcaactgaaggcccgtggcgaggtggacatcctgggcatcgtctgtcagctccggctcgaccgtggcggaatgatacagactgcagagcaatatcagtttctgcaccacacactagctctgtacgccggtcagttgcccgaggagcccagcccctag

SEQ ID NO: 237083 - DNA, 1200 bp, synthetic construct
  misc_feature 1..1200: note = Description of Artificial Sequence: Synthetic coding sequence
  source 1..1200: mol_type = other DNA
atgggcgcttcgttctggccgatcagacaggctagagaacaacagcggcgagccctctcttttagacaaaccagctggctgtccgagccgccattgggtccagccccacacttgtccatggtgcaggcacacggaggcaggtcaagagcacagcctctgactctgtccctcggtgccgcaatgacccagccgcctcccgaaaaaacacctgcaaaaaaacatgtacgtctgcaggagagaaggggttcaaatgtcgctttgatgttggatgtgcgctctctgggcgcagttgaacctatctgcagtgtgaacacccctagggaagtgacactccatttcttacgcactgctggccaccctttgacaagatgggctttgcagcggcagccccctagcccaaagcagctggaggaagaatttctgaagatacccagtaatttcgtgtcgccggaggacctggacattcccggtcacgcctcaaaagaccggtacaagaccatcttacctaaccctcagtcaagggtctgcctgggcagggcccagagtcaggaagatggagactacattaacgccaactacatccgcggttatgacgggaaagagaaagtgtatattgcaacccaaggtcccatgccaaacacagtcagtgacttctgggagatggtgtggcaggaggaggtttcgttgatcgtgatgctgactcaactgcgcgaggggaaggaaaagtgcgtgcactattggccaacagaagaggagacctacgggccatttcagatccgaattcaggacatgaaagaatgtcctgagtacacagtgcgtcagttgaccattcagtaccaggaggaacggaggtctgtgaagcatattttgttttccgcgtggcctgatcatcaaacacccgaaagcgcaggccctctgctgaggctggtcgccgaggtcgaagagtcacccgaaaccgccgctcacccaggtccaatagtggtacattgttccgccggaatcggccgtactggctgcttcattgcaactaggattggttgtcagcagttgaaagccaggggtgaggtcgatatcctcggcatcgtttgccaacttcgactagaccgtgggggtatgattcagaccgcagagcaataccaattcctgcaccacacactggctctttacgcaggtcagctgcccgaggagccatccccatag

SEQ ID NO: 237084 - DNA, 465 bp, synthetic construct
  misc_feature 1..465: note = Description of Artificial Sequence: Synthetic coding sequence
  source 1..465: mol_type = other DNA
atggtccaagcacatgggggaagaagccgagcccagcccttgactctgagcctaggcgctgctatgactcagccccctccagaaaagacccccgctaagaagcatgtgagactccaggaacgcagaggcagcaacgtcgccctgatgctcgacgtgagatcgctaggagccgtggaacctatatgctcagtgaatacgcctcgggaagtgactctgcatttcctgagaaccgcgggacaccctctgactcggtgggcactgcagcgccagcccccttcacccaaacagctggaggaagaattcctgaagatcccatctaattttgtatccccagaggatcttgacattcccggtcatgcctctaaggacagatataagacaatccttccaaaccctcagagtcgcgtctgtttagggcgtgctcagagccaagaggatggagattacattaacgctaactattag

SEQ ID NO: 237085 - DNA, 1326 bp, synthetic construct
  misc_feature 1..1326: note = Description of Artificial Sequence: Synthetic coding sequence
  source 1..1326: mol_type = other DNA
aaaaggcgtagggctgcaagcatgaaccgcctggggtgttggcctgccagatctctcccaaggagtggcagagggtccggacagagatctctgggactgggcggacacccttctggccctagacaccccggtactccggctgcaaaaaggacttgggagagccccggagtgagggcccgtgactgtcctttgtctactagctggctgtccgaacctcctcttggaccagcaccacatctatctatggtacaagcacacggcggaaggagcagagctcaaccacttactctgagtctcggagctgctatgacccagcccccacctgagaaaacaccagcgaagaaacatgttaggcttcaggaacggagaggcagcaatgtcgctctgatgttggacgttcgatctctgggcgcagtcgagccaatatgctctgttaacacccccagggaagtgaccctgcacttcttaaggaccgccggtcacccactgactagatgggccctccaaagacagcccccatcacctaagcagctcgaagaggaatttctgaagatcccttccaattttgttagtccagaggatctggacatccctggacacgcttcaaaggaccgctataagacaatcctgcccaatcctcagagtcgggtatgcctgggtcgagctcaaagtcaggaggacggcgactatattaacgctaattatattcgcggttacgacggtaaggagaaagtttatattgccacgcagggcccaatgccaaataccgtctcggacttttgggagatggtgtggcaggaagaggtgtctctgatcgtgatgcttacacagcttagagaaggcaaagagaagtgcgtgcactactggcctacagaggaggagacctacggcccatttcaaattaggatccaagacatgaaggaatgtcctgagtatacagtccgacaactcacaattcagtaccaagaggagagaaggagcgtgaagcacattttgtttagcgcctggccagatcaccagacaccagagtctgcagggccactgctacgtctggtggcagaagtcgaggagagcccggagaccgcggctcatcccggaccgattgtggtgcactgcagcgccggaataggccgtacggggtgcttcatagccacccgcattggctgccagcagctgaaagctagaggcgaagttgacattctgggcatcgtgtgccaactgcggcttgacaggggagggatgatacagacggctgaacagtatcagtttctacatcacacgctggcgctgtatgcagggcaattgccggaagaaccatctccctag

SEQ ID NO: 237086 - DNA, 423 bp, synthetic construct
  misc_feature 1..423: note = Description of Artificial Sequence: Synthetic coding sequence
  source 1..423: mol_type = other DNA
atggtacaggcccacggtgggagatcacgagctcagccccttactctctcactgggcgcagccatgacccagccaccccctgagaagacccccgcaaagaagcacgttcgcctgcaggagcggagaggaagtaatgtagcactgatgttagacgtgaggtccttgggggctgtcgaacccatctgttctgtgaacacgcctcgtgaggtaaccttacattttctgcgtactgccggacacccactcacccgctgggctttacagaggcaaccccctagtccaaaacaacttgaggaggagtttctgaagataccatctaacttcgtgagccccgaggatctcgacatccccggacatgcaagtaaggatcgttacaaaaccatcctgccaaatcctcagagtagagtctgcctcggacgatag

SEQ ID NO: 237087 - DNA, 1083 bp, synthetic construct
  misc_feature 1..1083: note = Description of Artificial Sequence: Synthetic coding sequence
  source 1..1083: mol_type = other DNA
atggtgcaagcccatggaggcagatcgcgcgcacagcctcttacactgagtctgggtgctgccatgacgcagcctcctccagaaaaaactccggctaagaagcacgtcaggctgcaggagagacggggaagtaacgtggcattgatgctagacgtgcggtctctgggagccgtcgagcccatatgctcggtgaacactcctagggaggtgaccctccatttcctgcggacagccggacacccactcactcgctgggcactgcagcgacagcctcctagcccaaagcaactggaagaggagttcctcaaaattccatcaaattttgtttcccccgaggatttagacattcctggccatgcttccaaggaccgctacaaaacaatactgcctaatccacagtcccgcgtctgcctcggcagggcccagtcacaggaggatggggactacatcaatgctaactacatcaggggctatgacggtaaagagaaggtgtacatcgccacgcaaggccctatgcctaataccgtaagtgacttttgggagatggtctggcaggaagaggtttccctgatcgtcatgctgacacaactgagagagggcaaggaaaaatgtgtccattattggccaactgaagaggagacctatgggccttttcagatccgaatccaggacatgaaagagtgtccagagtacaccgtccgccagcttactattcagtatcaggaggaaaggaggtctgtgaagcacattctcttcagcgcctggcctgatcaccagacacccgaaagcgcagggcctctgctcaggctggtcgccgaagtggaggaaagccccgagactgccgcacacccagggccaatcgtcgtgcactgcagtgccggaataggcagaacaggctgcttcattgccaccaggataggttgccagcagcttaaagcgcgtggggaagtagatatcctaggcattgtgtgtcagctgaggctcgaccggggtggtatgatccagacggctgaacagtatcagtttctgcatcacacattagccctttatgcgggacagcttcctgaggaaccgtccccatag

SEQ ID NO: 237088 - DNA, 570 bp, synthetic construct
  misc_feature 1..570: note = Description of Artificial Sequence: Synthetic coding sequence
  source 1..570: mol_type = other DNA
atgcccaatactgtgtctgacttttgggagatggtctggcaagaggaggtgtctctcatcgtgatgttaactcagctgagggaaggtaaagagaagtgtgtgcattactggcccaccgaggaggaaacatatggacccttccaaattcggattcaggacatgaaggagtgcccggaatacaccgtgagacagctgacaattcagtatcaagaggagcggaggagtgtaaagcacattttgttctctgcatggcccgaccatcagactccggaaagtgctgggccattattaaggttggtggccgaagtcgaggagagccctgaaaccgcagcacatccaggcccaatcgtagtgcactgcagcgcagggatagggagaactggctgctttatcgcgacccggattggctgccaacagctcaaggcacgtggggaagttgacattctgggtattgtatgccaacttcgattagatcggggtgggatgattcagactgctgagcagtatcaattcctgcaccatacccttgcactgtatgcaggacaattaccagaagagccctccccttag

SEQ ID NO: 237089 - DNA, 411 bp, synthetic construct
  misc_feature 1..411: note = Description of Artificial Sequence: Synthetic coding sequence
  source 1..411: mol_type = other DNA
atgaaagagtgtccggaatacaccgtaagacagctgacaattcagtatcaggaggaacgcaggagtgtgaagcacatactgttctctgcatggccagaccaccagacccctgagtctgccggaccactcctgagattggtcgccgaagtggaagagtcgcccgagaccgccgctcaccctggccctatcgtcgtgcattgttcggcgggaattggacggacgggctgcttcattgcaacacggatcggatgccagcagctcaaggcacgcggagaagtggacatcctgggcatcgtctgtcaactcagactggacagggggggaatgatacagactgcagagcagtaccaatttttacaccataccctcgccctctacgccggtcagttaccggaagaacctagcccgtag

SEQ ID NO: 237090 - DNA, 1545 bp, synthetic construct
  misc_feature 1..1545: note = Description of Artificial Sequence: Synthetic coding sequence
  source 1..1545: mol_type = other DNA
atgtcatctccgatttctaaatcccggtcactcgcggcattcttacagcaattgcgctctccaagacagccaccgcgtctggtcacctccaccgcatacacgagtccacaaccacgtgaggtcccggtttgccccctgacggccggtggcgagacacagaacgctgcagcactgcccggacccactagctggcctctgcttggttcacttttacaaatcctgtggaagggagggcttaaaaaacaacacgataccctagtggaataccacaagaagtatgggaagatattccggatgaagctgggaagttttgagagcgtgcacttaggaagcccttgcctcctggaagccttgtaccgcactgagagcgcctacccgcagcggctcgaaattaaaccgtggaaagcgtatcgtgattatcgcaaagagggatacgggttactgattctagaaggcgaggactggcaacgcgtccggtccgctttccagaagaagctcatgaagcccggtgaggttatgaagcttgataataaaatcaacgaggtcctagcagatttcatgggtcgaatcgacgagctgtgtgacgagagaggccatgtggaggatctgtatagcgagctcaataaatggtcattcgaatccatttgtctggtactttacgaaaaaaggttcggtctattgcagaaaaatgccggagacgaagctgttaacttcattatggccatcaagacaatgatgagcacattcggcagaatgatggtaacacctgtggagctccacaaatccctgaatacaaaggtatggcaggaccatacgctggcgtgggacaccatatttaagtccgtcaaggcttgcattgataaccggctcgagaagtattcccagcagcctagtgctgacttcctttgcgatatttaccaccagaataggctttcgaaaaaagagctttatgccgctgtcacggaactacaactggcggctgtggaaaccaccgctaacagcctcatgtggatcctctataacttgtctagaaatccccaggtccaacaaaaactcctgaaggaaatccagagcgtgctgcctgagaaccaggtgccacgagcggaggatctgcgcaacatgccctacctcaaggcttgcttaaaggagtctatgcgtttaacacccagcgttcccttcaccacccgaaccctcgataaggccactgtgctgggagaatacgctcttcctaaagggactgtgctcatgctaaacacccaggtcctcgggagcagtgaagataatttcgaggactcttctcagttcagaccagaacggtggctgcaggagaaggaaaagatcaacccttttgctcacttacctttcggagtgggcaagaggatgtgcatcggccgaaggttggccgaactccagctccacttggctctatgctggatcgtgagaaagtatgatatccaggccacagacaatgaacccgtggagatgctgcacagtgggacgctcgtgcccagccgggagcttcccatcgcgttttgccagaggtag

SEQ ID NO: 237091 - DNA, 2382 bp, synthetic construct
  misc_feature 1..2382: note = Description of Artificial Sequence: Synthetic coding sequence
  source 1..2382: mol_type = other DNA
atggactcatggttcattctggtgcttctcggaagcggcctgatctgcgtgtccgccaataatgctaccactgtggccccttctgttggaatcactaggctcattaatagctcaaccgccgaaccagtgaaggaggaggctaagaccagcaaccccacctctagtctgacctcattgtctgtcgctcctacgttctctcccaacatcacacttggaccaacctatctcactacagtgaacagttctgattctgataacggaacaacgaggactgcaagtacaaacagtattggcatcacgatcagccccaatggcacgtggctgccagacaatcagttcactgatgcgcgtactgagccgtgggaaggtaactcctctacagccgcaacaaccccagaaacttttcctccaagcgacgaaactccaataattgccgtgatggtggccctgagctcgctgttagtcatcgtattcataatcatcgtcttatacatgcttcgctttaagaaatacaagcaggccggttcccactccaattcttttcgtctttctaacggcagaaccgaggacgtggagccacaaagcgtgcctctgttagccaggtcaccctcaactaacagaaaataccctcccctgccagtggacaagctggaagaggagataaaccggagaatggccgacgacaacaagctattcagagaggaattcaatgccctgccagcatgccctatccaggccacttgcgaggccgcttccaaggaagaaaacaaagagaaaaaccgctacgtaaatatcctgccgtatgaccattctcgggtgcacttgacccctgttgaaggtgtgcctgatagcgactatataaacgctagctttattaacgggtatcaggaaaagaataagtttattgctgcccagggtcctaaggaagaaactgtgaacgacttttggagaatgatttgggaacaaaacacagctacgattgtaatggtcactaacctcaaggaaaggaaagaatgtaagtgtgctcagtattggcctgaccagggctgctggacgtacgggaacatcagggtgagcgtggaagatgtgacagtcttagtcgattacaccgttcgtaagttttgcatccagcaagtcggtgatatgactaaccgaaagccccagagactgataacccagttccacttcactagctggcctgacttcggtgtgcccttcacaccaataggtatgttgaaatttttgaagaaagtgaaagcctgcaatccgcaatatgcgggagctattgttgttcactgttccgcaggggtgggtcgcacaggaaccttcgtagtgattgatgcaatgcttgacatgatgcataccgagaggaaagttgatgtttacgggttcgtgagccggattcgcgctcagcgctgccagatggttcagacggacatgcaatatgtgttcatataccaagctctacttgagcactatctgtatggagacaccgaactcgaagtgacttcgcttgagactcatctccagaagatctacaacaagatacccggaacaagtaataatgggctggaagaagaattcaagaaactcacatctattaagatacaaaacgataagatgcgaactggtaacttgcccgctaacatgaaaaaaaaccgcgtgctgcagattatcccttatgagtttaaccgggtgattatccctgtgaaaagaggtgaggaaaacactgactatgtcaatgcatcattcatcgacggttatagacagaaggactcatacatcgcctctcagggtcccctactccatacgattgaagacttctggcggatgatctgggaatggaagtcttgtagcattgttatgctcaccgaactggaagagaggggccaggaaaagtgcgctcagtactggccatcagatggtctggtctcttatggggacatcaccgtagaactcaagaaggaggaagagtgtgagagctataccgtgcgcgacctgctagtgaccaacactcgtgaaaataaatcccggcagatcaggcagttccacttccacggatggcctgaagtgggaattccctccgacggcaaagggatgatttccattatcgcagctgtgcagaaacagcaacagcaatcggggaatcacccgatcacagtgcactgttccgctggcgctggtcgaaccggcaccttttgtgcgctgagtacagtgttggagagggtgaaagcggagggaatactggacgtgtttcagacggtaaaatcactaaggttgcagcgcccacacatggtgcagaccctagaacagtacgaattttgttacaaagtggtgcaggagtatatcgacgccttctccgactatgcaaactttaagtag

SEQ ID NO: 237092 - DNA, 2382 bp, synthetic construct
  misc_feature 1..2382: note = Description of Artificial Sequence: Synthetic coding sequence
  source 1..2382: mol_type = other DNA
atggacagttggttcatcctggtgctcctggggagcgggctgatctgtgtctccgcaaataacgcaaccactgtcgccccatctgtcggaatcacgagactgatcaactctagcacggcagagccagtcaaagaagaggcaaagacatctaatcccacatcttcccttacctctctgtccgtggctccaacgttctcacctaacatcacgctgggacccacatacctcacaacagtgaattcttctgattcagacaacgggacgacacgcaccgcaagcactaactcaatagggatcaccatttcaccgaacgggacctggctgcccgacaatcagttcaccgatgctaggaccgagccttgggaaggtaactcttccactgccgctactactcccgagacctttcctccaagcgatgaaacgcctataattgctgtgatggtggctcttagctccttgctggtcatcgtctttattattattgtactatacatgcttcggttcaagaaatacaaacaggctggctcacatagcaattccttcagactgtccaacggcaggacagaagacgtcgagcctcagtccgtccccttgctggcccgatccccctccaccaatagaaagtatcccccactgccagtcgataaacttgaagaggaaataaaccgtcgtatggctgacgataacaagctttttagagaagagttcaatgctctacctgcctgccccatccaggcgacctgtgaagccgctagcaaggaggaaaacaaggaaaagaatcgttatgtcaacatactgccatatgatcactcaagagtgcacttaacgcctgtggaaggcgtgcctgatagcgattatattaatgcctctttcattaatggataccaggaaaagaacaagtttatagccgctcagggccctaaagaggagacggtgaacgatttttggcggatgatctgggaacaaaacacagcgactatagtcatggtgacaaacctcaaggaaaggaaggaatgcaagtgcgcacagtactggccggatcagggatgttggacatatggtaatattcgggtgagcgttgaagacgttaccgtccttgtggactataccgtgcggaagttctgtatccaacaggtgggcgatatgaccaaccgtaagcctcagcggcttatcacgcaattccacttcacctcttggccagactttggcgtcccattcacacctataggtatgttaaaattccttaaaaaagttaaggcctgcaaccctcagtacgcgggagctattgttgtgcactgttctgctggggtgggacgtactggcacctttgtggtcattgatgcaatgctggacatgatgcacaccgagcgcaaagtggacgtgtatggtttcgtgtctcgaatccgtgcacagaggtgccaaatggtacagactgatatgcagtacgtgtttatttaccaggccctcctggaacattacctgtatggagacacggaacttgaagttacttccctcgaaacacacctccaaaaaatttataataagattcccggaacctccaacaatggcttggaagaggaatttaagaagctgacttctatcaaaatccaaaatgacaagatgcggaccggaaatctgccagctaatatgaaaaaaaatcgggtgttgcaaatcatcccatatgaattcaaccgcgtcatcatccctgtgaagcggggtgaagaaaataccgattacgtgaatgcctctttcatcgacggctaccgacagaaggattcctatatagcctctcaggggcctctgctgcataccattgaggacttctggagaatgatttgggaatggaagagctgctccatcgtaatgctcaccgagctggaagagaggggacaagagaaatgtgcgcagtattggccatccgacggcctggtctcctacggcgatataactgtggaactgaagaaagaagaagagtgtgagtcctacactgtgcgggatcttctggttacaaataccagagagaacaaatcacgccagatcagacagttccacttccacggttggccagaggtggggatcccatctgatggcaaggggatgattagcatcatcgctgctgtgcagaagcagcagcagcaatccgggaatcatcctataactgttcattgcagcgccggagcaggtcgaactggcactttttgcgcattgtccacggttcttgagagagtgaaagcagaaggcatactggacgtgtttcagactgtcaaatcattacggctccagcgtccccacatggtgcagactcttgaacagtacgagttctgctacaaggtcgttcaggagtacatcgatgctttttctgattatgccaattttaagtag

SEQ ID NO: 237093 - DNA, 1977 bp, synthetic construct
  misc_feature 1..1977: note = Description of Artificial Sequence: Synthetic coding sequence
  source 1..1977: mol_type = other DNA
atggtggcgctctcttccctcttggtgattgtcttcataatcatagttctctatatgctgagaagatttcgaaaagcagaacttatgagccgcaatactgagaagtacaagcaggccggatcccactctaactctttccgcctgagtaatggcaggacagaggatgtggagccccaaagtgtccccctgttagccaggtcaccctcgaccaaccgaaagtatccaccgctgccggttgataaactcgaggaagaaatcaatagaagaatggccgatgataataaattgttccgagaggagttcaacgccctgcccgcatgccccattcaggccacatgcgaggccgcttccaaggaggaaaataaagaaaagaatcgatatgttaacattctgccttatgaccactcgagggtccacttgacaccagttgagggagttcccgacagcgattatattaacgcaagttttattaatggttatcaggagaaaaataagttcatcgcagcgcagggacctaaggaagaaacagtcaacgacttttggagaatgatctgggagcaaaatacagctaccatcgtaatggttacgaacctgaaagaaaggaaagagtgtaagtgtgcccagtattggcccgatcagggttgctggacgtacggtaacatcagggtgtcggtcgaggacgttaccgtcttagtggactataccgtgcgcaaattttgcattcagcaggtgggcgacatgacaaacaggaagccgcagcggctgatcacgcaattccatttcacatcctggcctgactttggcgtcccattcacacccattggcatgctgaaattccttaaaaaggtaaaggcgtgtaacccacagtacgctggagctatcgtggtccactgctcagctggcgtggggagaactggcacctttgtagtaatagatgcaatgctggacatgatgcacacggaacggaaggtggatgtttacgggtttgtgtctaggatacgagcccaaagatgccagatggtgcagaccgacatgcagtatgtgtttatctaccaagcactgctggaacattatctgtacggggacactgaactggaggtcacctccttggagactcatctacagaagatctacaataagatcccaggcacctcgaataacggcctggaagaagagttcaagaagctgacctcaattaagatccaaaacgacaagatgcgcactggcaacctgcctgccaatatgaagaagaatagggtgctccagattatcccttatgagtttaaccgtgttattataccagttaaacgtggcgaagagaatactgactacgtcaacgctagcttcatagatggctatcgccagaaggattcttacattgcatcacagggtccacttctgcacaccatcgaagatttttggaggatgatttgggaatggaagtcatgctccattgtcatgctgaccgagctggaggaaagaggccaggagaaatgcgcccagtactggccctcggacggactggtgtcctacggcgacatcaccgttgagctcaaaaaagaggaggagtgtgagtcctacacagttcgcgacctgcttgtgacaaacactcgggaaaacaagtctcgtcaaatccggcagttccacttccatggctggcccgaggtgggaatccccagtgacggaaaaggcatgatctccattatcgctgctgtgcagaagcaacagcagcagtccggaaaccatccaatcaccgtacactgttctgccggagccggtagaaccgggacgttttgcgccctaagcactgtgctcgagcgggtgaaagctgaaggtatactggacgtcttccaaacggtgaagagtttgcgattgcagcggccacatatggtgcagaccctggaacaatatgaattttgctataaggtggtgcaggaatacattgatgcattttctgattatgccaattttaagtag

SEQ ID NO: 237094 - DNA, 2409 bp, synthetic construct
  misc_feature 1..2409: note = Description of Artificial Sequence: Synthetic coding sequence
  source 1..2409: mol_type = other DNA
atggactcttggtttatccttgtgctcctggggagcggcctgatttgcgtgtctgcaaataacgccactacagttgccccaagtgtcggaatcactaggttgataaatagctccacagcagagcctgtaaaagaagaggctaagacctcaaatcctacgagctccctaacatcgctgtctgtagcaccaactttctctcctaacattacgctgggcccaacctatcttaccacggtcaacagctcggattccgataacggcacaacacggacggcctcgaccaactccatcgggatcactataagccccaatggtacctggctaccagataatcagttcaccgacgccaggacagagccttgggaggggaatagcagtacagcagcgacaactccagaaactttccctccttctggcaatagtgactccaaggaccgcagagatgaaacgccaataatcgcggtgatggtggccctgtcatcacttctggtaatagtctttatcattatcgtactctatatgcttcggtttaaaaaatataagcaggctgggtcccacagtaatagttttagactcagcaatggcagaacagaggatgtcgaaccccaatccgtgccactcctcgctaggagcccaagcaccaatcgaaagtatccacccctcccagtagataagcttgaagaagagattaatcgcagaatggccgatgataataagctctttagggaagagttcaacgcactgcctgcctgcccaattcaggcgacatgtgaagcagcatcaaaggaggagaataaagaaaaaaacaggtacgtgaatattctgccttacgatcactctcgggtacatctaaccccggtggagggtgtgccggacagcgattatatcaacgcaagcttcatcaacggctaccaggaaaaaaacaagtttattgctgcccaggggccaaaggaagaaaccgttaacgatttttggcgtatgatatgggaacagaatacagcaactattgtgatggtgacaaacctcaaagaaagaaaagaatgcaaatgcgcacagtactggcctgatcagggatgctggacgtacggtaacattcgggtaagtgtcgaggacgtgacggtattggtggactacaccgtgcgtaagttctgcattcagcaggtcggcgatatgaccaacaggaagcctcagaggttgataacacagttccacttcaccagttggcccgacttcggcgtgccctttacaccgatcggcatgcttaagtttctcaagaaggttaaggcctgcaatccccagtacgctggagctatcgtggtgcactgcagtgccggtgtcggccgtacaggtaccttcgtggtgattgatgccatgctagatatgatgcatacagaaaggaaggtggatgtctacgggtttgtgtcacgcataagagcacagaggtgccagatggtgcaaactgatatgcagtatgtcttcatttatcaggcgctgctggaacattatctctatggtgacaccgaactcgaagtcactagcctggagacccatttgcagaagatatataacaagatcccaggtaccagcaataacggccttgaagaagagtttaagaaattgacgtccattaaaatccagaacgataaaatgcgaacaggtaatctgcccgctaatatgaaaaaaaatagggtgctacagataatcccttatgaattcaaccgagtgatcatacccgttaagcgaggcgaagagaacaccgactatgttaacgcaagcttcatcgatggataccggcaaaaagatagttatatcgcgtcacaggggcctctcttgcatactattgaggacttctggcgcatgatatgggaatggaagtcatgctctatcgtgatgctaacagagttagaggaacgaggccaggagaaatgcgcccaatattggccctccgacggtttggtctcatacggagacatcactgtggaactaaagaaggaggaggagtgtgagtcctacacagttcgcgatttgctcgtgaccaatacccgtgagaacaaatctcgccaaatccgccaatttcacttccacggttggccggaggttggcatcccctctgacgggaagggcatgatctccataatcgccgcagtccagaagcaacagcagcagagtggaaatcaccctatcaccgtacactgtagtgctggggcaggtcgcacaggaaccttttgtgccctctctactgtgctcgaacgggtcaaggcagaggggattttggacgtctttcagactgtgaagagcctgagactccaaagacctcacatggtgcagacccttgagcaatacgagttctgctacaaggtggtccaggagtacatcgacgcattttcagactatgctaattttaaatag

SEQ ID NO: 237095 - DNA, 2409 bp, synthetic construct
  misc_feature 1..2409: note = Description of Artificial Sequence: Synthetic coding sequence
  source 1..2409: mol_type = other DNA
atggactcctggtttattcttgtgctgctgggaagcgggctgatttgcgtgtctgctaacaacgcaaccaccgtggcgccttctgtggggatcacacgtctgattaattcctccaccgccgaacctgtgaaagaggaagctaagacctcaaaccccacctcttccctgacctccctgagcgtggccccaacttttagtcccaacatcactctgggaccaacttatctcaccaccgtgaactcttccgactccgacaatggcaccacgagaactgcttccaccaatagtataggaataaccatatcccccaacggcacttggcttcctgacaaccaattcactgacgctagaacagagccttgggaaggaaactctagcacagccgcaactacacctgagacattcccgccttcaggaaattcagattccaaagatcgcagggatgagacaccaattatcgctgttatggtggctcttagcagcctcctcgtgattgtgtttatcatcatcgtgctgtacatgctgcgatttaagaagtataaacaggccggtagccactccaatagctttcgcctgtccaacggcagaaccgaagacgttgagccccagtccgttcctttgttagcacgatcaccctctacgaaccggaagtatccacccctgcctgtggacaagctagaggaggaaatcaatagaagaatggcagatgataacaagctgttccgggaggagtttaacgccctccctgcttgtccaattcaggcaacctgcgaggcggcttccaaagaggaaaacaaagagaagaacagatatgtcaacatccttccttacgatcatagtcgcgtgcaccttactccggtggaaggcgtgcccgattccgactatatcaatgccagctttattaacggctatcaggagaaaaataaatttatcgccgctcaaggccctaaagaggagaccgtgaatgatttctggaggatgatatgggagcaaaacaccgcgactatagtgatggtcaccaatctcaaggagagaaaagagtgcaagtgtgctcagtactggcccgatcagggatgctggacatacgggaacattcgagttagcgtggaggacgtgaccgtgctcgttgactacactgtgcggaagttctgtatccagcaggtgggcgacatgaccaatcgtaagccccagcgcttaataacgcagtttcactttaccagctggcccgactttggagtacccttcacccccattggcatgcttaaatttctgaaaaaggtgaaggcgtgtaatcctcagtatgcaggtgcgatcgtcgttcattgctccgccggagtcggcaggaccggaacattcgtagtgatcgatgcaatgctggacatgatgcacaccgaacggaaggttgacgtttatggatttgtgtcccgcattcgggcacagcgatgccagatggtacagactgatatgcagtatgtctttatctaccaagctttgctggaacactacctgtacggcgacacggaactcgaggtcacctccctggagacacacctccagaagatatataacaagatcccagggacctcgaataacggtcttgaggaggagtttaaaaaattaactagcattaagattcaaaatgacaaaatgcgtaccgggaatcttcccgcaaatatgaagaagaaccgtgtgctccagatcatcccatatgaattcaatagagtgatcatcccagtgaaaaggggcgaggagaatactgattatgtcaatgccagctttattgacggttatagacagaaagattcctatatcgcctcacaaggacccctattgcacacgatagaggacttctggcgcatgatttgggagtggaagtcttgctctattgtgatgctcaccgagttggaagagaggggccaagaaaaatgcgctcagtattggccctctgatggcttggtctcctacggggatataacagtagagctgaaaaaagaggaggaatgcgaaagctacacagtgcgcgatctcttggtcactaatactcgcgagaacaaaagcagacagattaggcagtttcatttccatggctggcccgaggttgggattcctagcgatggcaaggggatgatctccatcatcgccgcagtgcagaaacaacagcagcagagcggtaaccatcccattacagttcactgctcggcaggagctgggcgaacaggaacattctgtgccctgagcaccgtgctggagcgggtcaaagccgagggaatactggacgtcttccaaactgtgaagagcctgaggctgcaacgaccacacatggtccagacgctggagcagtacgagttctgctacaaggtggtccaagaatacattgacgctttcagcgattatgctaacttcaagtag

SEQ ID NO: 237096 - DNA, 603 bp, synthetic construct
  misc_feature 1..603: note = Description of Artificial Sequence: Synthetic coding sequence
  source 1..603: mol_type = other DNA
atggatagctggtttatcctagtgctactggggagtggattgatatgtgtgtccgccaataacgccacaaccgtagctccgtcagttgggattacccggctgataaattcctcgacggctgagcccgtgaaagaagaagcgaagactagcaaccctactagcagcctaacgtcactcagcgtggcccctactttcagtccgaacataacacttggaccaacatacttgactactgtgaattccagcgactcagataatggcacaaccagaactgcctcgaccaactccatcgggattacaatcagccccaatggcacctggcttcctgataaccagtttacagatgccagaactgaaccctgggaggggaattcttcaactgctgccaccacccctgaaactttccccccaagcggcaattcggactccaaggatagacgggatgagaccccaatcattgctgtgatggtcgcactgagtagtcttttggttattgtgtttattattatcgtcctgtacatgttgaggttcaaaaagtataagcaagcaggatctcactccaactcatttaggctgtctaacggcaggacggaagacgtttag

SEQ ID NO: 237097 - DNA, 2442 bp, synthetic construct
  misc_feature 1..2442: note = Description of Artificial Sequence: Synthetic coding sequence
  source 1..2442: mol_type = other DNA
atggatgatgcagtgcaaataactaagatttcaatggattcgtggttcattctggtgctgcttggcagtgggcttatttgcgtttcagccaacaacgccaccaccgtggccccatctgtgggaatcactcggctaattaatagctccacagcagaacccgtgaaagaggaggccaagacctccaatcctacatcttcactcacctctctgtcagtggcaccgaccttttcacccaacattaccctgggtcctacgtacttaaccactgttaatagtagcgacagtgacaatggcaccacccgaacagctagcaccaactccatcggtattacaatctcacctaatggaacctggttaccagataatcagtttaccgacgcaaggacggagccctgggaaggaaacagctcaacggccgctactacccccgagacttttcctccttctgggaactcagactctaaagatcgtcgggacgagacccctattattgccgtcatggtggcactcagctcattgctggtaatagtgttcatcattatagtgttatacatgctgagattcaaaaagtacaagcaggccggaagccactcaaactcattccggcttagtaatggccgaactgaagacgtggaaccacaatcagtgcctctgctcgcccgaagtcctagcaccaaccggaaatacccgcctttgccagttgacaagttggaagaggaaatcaatcgcagaatggctgatgacaacaagctgttcagagaagagttcaacgcactgcccgcttgtccaatccaggccacctgtgaagcggctagtaaggaggaaaacaaggagaaaaataggtacgtcaacatcctgccatacgaccattccagagttcacctgactcccgtggagggggtgcctgacagcgactatatcaatgcctcctttattaacgggtatcaggagaagaataaatttatcgcggcacagggacccaaagaggaaactgtaaatgatttttggcgcatgatctgggagcagaatacagccaccattgtaatggtaaccaaccttaaggagcggaaggagtgcaagtgtgctcaatactggcctgaccagggttgttggacttacggtaatattagggtgtccgtcgaggacgtgactgtcctggtcgactacaccgtgagaaagttttgcatccagcaggtaggcgacatgacaaacaggaaaccacagcgtctgatcactcagtttcacttcacatcatggcctgatttcggcgtaccctttacccctatcggcatgctgaaattcctgaaaaaagtaaaggcatgtaatccccagtatgcgggtgcaatcgtggtgcattgtagcgctggagtgggtagaacgggcactttcgtggtcatagacgcaatgttggacatgatgcacactgaacgcaaggttgacgtgtacggcttcgtgtctagaattagggcccagaggtgccagatggttcagacggatatgcagtacgtctttatttatcaagccctcttagagcattacctttatggggatacggagctggaagtgaccagcctggagactcacctccagaaaatctataataagattcccggaacatcaaacaacggcctggaggaggagttcaagaagctaacttctattaaaatccagaacgataaaatgaggacggggaatcttccagcaaatatgaaaaaaaaccgcgtcctccagattataccctatgagtttaatagagttatcatacccgtaaagcggggtgaggagaacacagattatgtgaacgccagtttcatcgatggttaccgccagaaggactcctacatcgcttcccaaggacctctcttgcataccatcgaggacttctggcgcatgatctgggagtggaaaagctgttcgatcgttatgcttacggaacttgaggaacggggacaagaaaagtgtgctcaatactggcccagcgatggattagtgagctatggagacattaccgtggaactaaaaaaagaggaagagtgtgagagttacaccgtgagggatctcctggtgaccaacaccagggagaataaatctaggcagatccgtcagttccactttcatggatggcctgaggtgggcatcccatctgatggcaaggggatgataagcattatagcagctgtgcaaaaacagcagcaacagtccggcaatcaccccattacggtgcactgctccgcaggcgctggcagaactggcaccttctgcgctctaagcactgtgttagaacgggttaaggccgaggggattctggacgtttttcagaccgttaaaagcttgcgactccagagacctcatatggtccaaacactggagcagtacgagttctgttacaaggtggtacaggagtatatcgacgccttctcagattacgctaacttcaaatag

SEQ ID NO: 237098 - DNA, 528 bp, synthetic construct
  misc_feature 1..528: note = Description of Artificial Sequence: Synthetic coding sequence
  source 1..528: mol_type = other DNA
atggacagttggttcatcttggtgcttctcggctccgggctcatctgcgtgtcggctaacaatgccacaaccgtcgccccatccgttgggatcacccgcctcattaactcatcaacggccgaacccgtgaaagaagaagccaaaactagcaaccccacaagttctttaacctctctttctgtggccccaactttttctcctaacattactctcggccctacttacctaacgactgtgaattccagcgacagtgataacggcactacacgtacagcctctactaactccatcgggatcaccatctcaccaaacgggacgtggctcccggataaccaatttactgacgcaagaaccgaaccctgggaaggcaactcttccaccgctgcgaccactcccgaaactttccccccatccggaaatagcgactccaaagaccgtagagacgagacaccaattatcgccgtcatggtggcactttcctccctcttagtgatagtttttattattatcgtcctttatatgctttag

SEQ ID NO: 237099 - DNA, 417 bp, synthetic construct
  misc_feature 1..417: note = Description of Artificial Sequence: Synthetic coding sequence
  source 1..417: mol_type = other DNA
atggacagttggttcatattagtccttttaggtagcggactgatctgcgtatctgccaataacgctactacagtagccccttctgtagggatcactaggctgattaactcctctacagccgaacctgtaaaagaagaggcaaagaccagcaaccccacctcaagcttgacaagcctctcagtggccccaacgttctcccccaatattactctcggccctacttacctgactacagtgaattcctcagactccgataatgggaccactcggacagcatctaccaattcaatagggatcactatttcacccaacggtacctggctccccgataatcagttcacagacgcaagaacagaaccctgggaaggcaacagctccactgcagctaccacacctgagacatttccaccctcttag

SEQ ID NO: 237100 - DNA, 762 bp, synthetic construct
  misc_feature 1..762: note = Description of Artificial Sequence: Synthetic coding sequence
  source 1..762: mol_type = other DNA
atggactcatggtttatccttgtgctgttgggcagtggacttatctgtgtgagtgcaaataacgctacaacagtggcaccatcagtcgggatcactagattgattaactcaagtacagccgaacctgtaaaagaggaagcgaagactagtaatccaaccagttctttaaccagcttgtccgtggccccaacttttagcccaaatatcacactggggccaacctatctcacaacagtcaattcctccgatagcgataacggtaccacacgtactgccagcactaatagtattggaattaccatatctcccaatggcacctggcttccagataaccagtttacggatgccagaaccgagccatgggaagggaatagtagcactgcagctaccacccccgaaaccttccccccttccgacgagacccctattattgcagttatggtcgccctgtcatccttgcttgtcattgtctttattatcatagtgctgtatatgttacgttttaaaaaatacaagcaggccggatcgcacagtaatagcttcaggttaagcaatgggaggactgaggatgttgagccccaatccgtcccactgctcgcacgatcacccagtaccaacagaaagtatccccctctgcctgtggacaagcttgaagaggagatcaatcgacgaatggcagatgacaacaaactgtttcgcgaagagttcaacgccctgcccgcttgccctattcaagctacatgcgaggccgctagtaaatag

SEQ ID NO: 237101 - DNA, 1239 bp, synthetic construct
  misc_feature 1..1239: note = Description of Artificial Sequence: Synthetic coding sequence
  source 1..1239: mol_type = other DNA
atgactaacagaaaaccccagaggctaataacacagtttcatttcacgtcctggcctgactttggagtccctttcaccccaatcgggatgctgaaatttctcaagaaggtcaaagcctgcaatccccagtatgcgggagccattgtcgtgcactgttctgccggagtgggcagaaccggaacatttgtggtgatagatgccatgctcgacatgatgcatacagagaggaaagtggacgtctacggattcgtctccagaattcgcgctcagcgctgccagatggtgcaaacggatatgcagtatgtttttatttatcaggcgctcttggaacattatctgtatggggatactgaacttgaagtaacctccctggaaactcatctccagaaaatctacaacaagatcccaggaacctccaataacggtctggaggaggagtttaaaaaactgacttcgatcaagatacagaatgacaagatgagaacgggcaacctgcctgctaacatgaagaagaatagagtcctgcaaatcatcccctatgagttcaatagggtgatcattccagtgaagagaggagaagagaatacagactatgtcaacgcttcgttcatagacggctatcgacagaaggatagctacatcgcctctcaagggcctttgctgcatacgatagaagatttctggcgcatgatttgggaatggaaaagttgctccatcgtaatgttgaccgagctagaagagcgcggacaagagaagtgcgctcaatactggcccagtgacgggctggttagctacggcgatatcacagtggagctgaaaaaagaggaggagtgcgaatcatacaccgtgagagaccttctggtcaccaacacgcgagaaaataaatctcgccagattcgccagtttcacttccatggttggcctgaggtcgggatcccgagcgatggcaaaggaatgatcagtattattgcagcagtccagaaacagcagcagcagtccgggaaccaccccattactgtgcattgtagtgccggagcaggcagaaccggtacattttgcgccctctcaacagtgctggaaagggtgaaggctgagggcattctggacgtatttcagactgtgaagtctctcagactgcagcgcccacatatggttcagacgctggaacagtatgaattctgttataaggtggtccaggaatatattgacgctttctcagattacgctaattttaagtag

SEQ ID NO: 237102 - DNA, 5993 bp, synthetic construct
  misc_feature 1..5993: note = Description of Artificial Sequence: Synthetic coding sequence
  source 1..5993: mol_type = other DNA
atgttgagtcatggagccggactggccttgtggattacactatcgctcctacagacggggcttgctgaacctgagcggtgtaactttaccctggcagagtcaaaggctagttctcattcggtctccattcaatggcggatcctaggcagtccctgcaattttagtctcatctactcttccgatactctaggagcggcactctgtccgactttccgaatcgataacacaacctatgggtgtaatctacaggacctgcaggctgggacaatttacaacttccgcatcatcagtctggatgaagaaagaaccgtggtcttgcagaccgaccctctacccccagcacgctttggggtgtcaaaggaaaaaacgacttctacaagtttacacgtgtggtggaccccttcatctggtaaagtaacaagctacgaggtccagctcttcgacgaaaataaccagaaaatccagggggtgcagatccaggagtccacgtcttggaatgagtacacttttttcaacttgacagctggatcaaaatataatatcgcgattactgcagtgtccggtggcaaaagatccttcagcgtgtacacaaacggaagtaccgtccctagccccgtgaaagatatcggtatcagtactaaggctaatagtctcctcataagttggtcacacgggtcaggaaacgtcgagcgctacagacttatgctgatggacaagggcattttagtgcatggaggtgtcgtggacaagcacgctactagctatgctttccacggcctgacacccggatacctgtacaacctaactgttatgaccgaggctgccggactgcagaactacaggtggaagctggtccgcaccgccccaatggaagttagcaacttgaaggtcacgaacgacggctctttgactagcctgaaagtgaagtggcaaaggccccctggtaacgtcgattcttacaatataaccttatctcataaaggaacaatcaaagaatcaagagtgttagccccatggattaccgagactcactttaaggagctcgtccctgggaggctctaccaagtgacagtgtcatgcgtgtcaggagaactttcagctcagaagatggccgtagggagaacctttccagacaaggtagccaacctggaggctaataacaatggccgtatgcgaagcctcgtggtcagttggagcccgccagcgggtgactgggagcaataccgcattctcctcttcaatgattctgtggtccttttgaatattactgtgggcaaagaagagacacagtacgttatggacgacaccggactggttccagggagacagtatgaagtcgaagttatcgttgaaagcggtaacctgaaaaattcagagaggtgtcagggcagaacggtccctctcgctgttctacagctgagagtcaaacatgccaatgagacaagcctgtctattatgtggcagacacctgttgccgaatgggagaaatatataatcagtctcgccgacagggaccttttgttgatccacaaatcactgagtaaagacgccaaagaatttacctttacggatttggtacctggacgaaagtacatggctaccgtgacttccatcagcggcgatctcaagaattcatcctcggttaaagggagaaccgtccctgcccaggttactgatcttcatgtggcaaatcaggggatgacatcatccctcttcacaaattggacacaggcgcaaggagatgtggagttttaccaggtactcctgatccatgaaaatgtagtgatcaaaaacgaatctatcagctccgagacttcaaggtatagttttcacagcttgaagtcgggctcactgtattctgttgttgtgaccacagtgtccgggggtatttcctcccgccaggtggtggtggaggggaggaccgtgccttcttccgtgtctggagtaaccgtcaataatagtggcaggaatgattacctctccgtttcgtggctcctggcgcctggggacgtggacaactacgaggtaaccctgtcccatgatggcaaagttgtccagtcattggtgatagcgaaaagcgtgcgggagtgttcgttttcaagtttaacgcccggtaggttgtacactgtaacaattactacgcggtctggaaaatatgagaaccattcctttagccaggagcggacagttcctgacaaagttcagggcgtgtccgtgtccaatagcgccagaagtgactacctccgtgtgtcctgggtgcacgccacaggcgatttcgaccactatgaagtgacgatcaagaataagaataacttcattcagaccaaatccatccctaaatcagagaacgaatgcgtgttcgtgcagctggtaccagggaggctgtatagcgtgacagttacaactaagtcaggacaatatgaggcaaacgagcagggcaatggaaggacgattccagaaccagttaaggacctgacgttgaggaacagatcaaccgaggatctccatgtgacttggagtggggctaacggggacgtggaccagtatgaaatccagttacttttcaacgacatgaaagtgtttccaccctttcacctcgtcaacacggccacagaatatagatttacaagcctcacgccaggacgacagtataagatcctcgtactgactataagcggcgacgtacagcagagcgcgtttatcgagggattcacagtgccctctgctgtaaaaaatatccatatcagccctaacggcgcaactgattcacttacggtgaattggacaccagggggtggagacgtcgactcttacacggtctccgcttttaggcattctcagaaggtagactctcagacaatcccaaaacatgtgtttgaacatacgtttcaccggcttgaggccggagaacagtaccagatcatgattgcatcggttagcggctccctgaaaaatcagatcaacgtagtgggccgtaccgttcctgcttccgtgcagggagtgatagccgataacgcatactcttcatactcactgattgtgagctggcagaaagccgcaggagtggctgaacgatacgacatcttgctgctaactgaaaacggaattttgctgcggaacacctccgaacccgctacaactaaacagcataaattcgaggatcttacacccggaaagaaatataaaatccagattctgacagtgagtgggggactcttttccaaggaggctcaaacggaaggacgcacagtgccagccgctgtgacagatctgcgaatcactgaaaattccacccgccacctgtcattccggtggacagcaagcgagggtgaactgtcttggtacaacatattcttgtataatccagacggtaatcttcaggaacgggctcaggtcgaccccctcgtccagtcgttttcttttcagaatttactgcagggcaggatgtataaaatggtcatcgttactcactcaggcgagttgtcgaacgagtctttcatatttggccgtactgttcccgcttctgtgagccaccttagggggtccaacaggaacaccaccgattctctttggttcaattggtcaccagcatcgggagacttcgacttttacgaactgattttgtacaaccctaatggcactaaaaaagaaaattggaaagataaagatctcacagagtggcggtttcagggtcttgtgcctggcaggaaatacgtcctctgggttgtcacccatagtggggatttgtcaaataaagtgacggccgagagtaggactgccccttcccccccaagtctcatgtccttcgccgacattgcaaatacgtcacttgccatcacctggaaaggccctcccgactggaccgattacaacgactttgagctgcagtggctgcctcgggacgctctcaccgtttttaatccctataacaatagaaagagcgaggggaggatcgtttacgggttgcgcccaggacgctcgtatcagttcaatgtcaagactgtatcaggagacagctggaagacctattccaagccgatctttggcagtgtgcggacaaaacctgacaagatccaaaacctgcactgtcggccacaaaatagtactgcaatcgcttgttcttggatcccaccagattctgatttcgacgggtattcaatcgagtgtcgaaagatggacactcaagaggtcgagtttagtcggaaattagagaaagaaaagtccctcctcaacattatgatgttagtcccacataagaggtatcttgtctctatcaaggtgcagtctgccggaatgacatccgaagtcgtggaggacagcaccattactatgatcgacaggccccctccgcctccccctcacatccgggtcaacgagaaagatgtgcttatcagtaaatcatcaatcaatttcaccgtgaactgcagttggttttccgacaccaacggggctgttaagtactttaccgtggtcgtgagagaggcggacggaagtgatgagctgaagcctgagcagcaacaccccttaccctcttacctggagtatcgtcacaatgcatcgattcgtgtgtatcagactaactacttcgccagtaagtgcgccgagaaccccaacagtaatagcaagagctttaacattaagctaggcgctgagatggaatcactgggtgggaagtgtgatccaactcagcagaaattctgcgatggcccattgaagccacatacagcctacagaatctcaattcgagcattcacccaactgtttgacgaggaccttaaggagttcaccaagccactatatagcgatacgttcttctctctccccattacaaccgagagtgagccactctttggggcaatcgagggtgtgtctgctgggctctttttaattggtatgcttgttgccgtggtggccctcctcatctgcaggcagaaggtgagtcacggcagggagaggcctagtgccaggctgtccattaggagagacagacctctatccgtgcacttaaatctcggtcagaagggtaaccgaaaaacgtcttgccctataaaaatcaaccagtttgaggggcactttatgaagttgcaggctgattctaattacctgctgagtaaagaatacgaggaattgaaggacgttggacgtaatcagtcctgtgacattgccttgctgcccgaaaatagagggaagaaccggtacaataacattctcccatacgacgccaccagggtgaagctgagcaacgtagacgatgacccctgttctgattatatcaatgccagctacattcctgggaacaatttccgccgtgagtatatcgtcacccaggggccattgccaggaactaaagatgatttctggaaaatggtgtgggagcaaaacgtgcacaacatcgtgatggtgacgcaatgcgtcgagaaagggagagtgaagtgcgaccactactggcccgctgaccaggattccctgtattacggtgacctcatcttacagatgctcagtgagagtgtgttaccagaatggactattcgcgagttcaaaatctgtggagaagagcaattggacgctcaccggttaattcggcacttccattacactgtgtggccagatcacggggtgccagaaaccacccagtccctcatccagtttgtgaggacagtgcgcgactatataaaccggtctccaggtgccggacctaccgtggttcactgtagcgcgggagtcggaaggactggcacatttatcgccctcgaccgcattttacagcagctcgactccaaagatagcgtcgatatctacggggcagttcacgaccttcgtcttcaccgagtgcatatggtgcagaccgaatgccagtatgtgtacttacaccaatgcgtcagggacgtactgcgagccagaaagttacgttctgagcaggaaaatccgctgtttcccatttatgagaatgtaaatcctgagtatcatcgggaccccgtgtacagtcgccatta

SEQ ID NO: 237103 - DNA, 6647 bp, synthetic construct
  misc_feature 1..6647: note = Description of Artificial Sequence: Synthetic coding sequence
  source 1..6647: mol_type = other DNA
atggaagctgagttttacatggtaatactgacctgcctgattttcaggaactcagagggatttcagattgtccatgtgcaaaaacagcagtgcctcttcaaaaacgagaaggttgttgtgggatcctgcaatagaaccatccaaaatcagcaatggatgtggaccgaggatgagaagcttcttcacgtaaaatcagccctgtgtctcgccatcagtaattcttctaggggacctagtcgcagcgctatcctcgatcgatgcagtcaggcgcctcgatggacctgctacgaccaggagggctttcttgaggtggagaatgcttctttatttctgcaaaagcaggggagtcgggtcgtggtgaagaaggcacgcaaatacttgcactcttggatgaaaatagatgttaacaaggaaggcaaattagtgaatgagtccctgtgtctccagaaagcaggactcggagcggaagtttctgtcaggagtacccgtaacacggccccaccccagatactgaccacattcaacgccgtgcccgacggtttggtgttccttattcggaatacaaccgaggccttcattcgcaatgccgctgagaattactcgcaaaactcatcagagaggcagcatccaaatttgcacatgaccggtatcaccgatacatcctgggtgctcagtacgacacaacccttttcaagcaccaccgaagaaaccggacttgctgagcccgaacgatgtaactttaccctggccgaaagcaaggctagtagtcatagcgtatctattcagtggaggattctagggagcccttgtaatttctcactcatatatagcagcgacactctaggcgctgccctgtgccctacatttagaattgataacacaacctatgggtgtaacttgcaggatttgcaggccggtactatttacaactttagaataatctcacttgacgaagagcggactgtggtgctgcagaccgaccccctgcctcctgcccgttttggcgttagcaaggagaaaacaaccagtacttccctgcacgtgtggtggaccccctcgtccggcaaggtcacgtcatatgaggtgcaattatttgacgagaataaccagaaaattcagggagtgcagatccaagaaagcacatcttggaacgagtatacattcttcaacctgacagctggcagtaagtataatattgccatcaccgcagtctctggtgggaaacggtcattctctgtgtacactaatggcagcacagtgccttctccagtgaaagacattggaatcagcaccaaagcgaactctctcctgataagttggtcccatggcagcggcaacgtggaaagatacaggctcatgttaatggataagggcattcttgtccatgggggagtagtggacaagcatgcaacctcatacgcctttcatggcctcacccctggttacctgtacaacctcacagttatgaccgaggccgctggtctgcaaaactatcgctggaaactggtgaggacagcgcctatggaggttagtaacctcaaggttacaaacgatggcagccttaccagtttgaaggtcaagtggcagaggcctcccggaaatgtggacagctacaatattaccctgtcccacaaaggtacaatcaaagagtcacgcgtgctcgcaccgtggattacggaaacccactttaaggagctggtgccgggtcgcctgtaccaagtgacagtaagctgcgtgtccggcgagctgagtgctcagaagatggccgttgggaggacgttccctgataaagttgctaatctagaagccaacaataatggtagaatgagatccttagtagtgtcatggtcccctccagcgggagactgggaacaatatcgaattctgctgtttaacgactcagttgtccttttaaacatcactgtgggcaaagaggagacacagtacgtaatggacgacaccggtttggtgccaggaagacagtatgaagtagaggtgatagtcgagtccggcaacctgaagaatagcgaaaggtgccagggccgaacagtacctcttgcagttctccaactgcgagtgaaacatgctaacgaaacaagcttgagcattatgtggcagaccccagtggccgaatgggaaaagtatattatcagcctcgccgaccgagatcttctgttaatacacaagagtctgtcgaaggatgccaaggagttcaccttcacagacctggtcccgggacggaagtatatggccaccgtgacgtcaattagcggggacttgaaaaattcaagcagtgtgaagggcaggacagtccctgcgcaggtgaccgacctgcatgttgcgaaccagggaatgactagttccctgttcaccaattggactcaagcccagggcgatgtcgagttctatcaggtactgctgattcatgagaatgtggttataaagaatgagtcgatttctagcgagacatcccggtatagctttcattctctcaagtcaggatcactgtatagtgtcgtggtgaccacagtgtctggtggaatctctagccggcaagtagtggtcgaggggagaacagtgccctctagtgtgtctggagtcaccgttaacaactccgggaggaacgattacctctccgtctcctggctgctggcacccggagatgtcgataattatgaggtcacactgtcccacgatgggaaagtggtgcaaagcctcgtgattgcaaagtcggttcgagagtgctccttctctagtctgacacctggtagactgtatactgtcaccataacaacacgaagcggtaaatacgaaaaccactctttctcccaggaacgtaccgtccctgacaaagtgcagggagtcagcgtaagcaattccgccagaagtgactacctccgggtctcctgggtgcatgcaacaggagatttcgatcactatgaggttaccattaaaaacaagaataactttatccagacaaagagcattccaaagagcgagaatgagtgtgtctttgtgcagctggtcccagggcgtctctatagtgtcacagtgaccaccaagagtggtcaatatgaagccaatgaacaggggaatggcaggacaatccctgaaccagtaaaggatctcacactccgcaaccggtctaccgaggatctgcacgtgacgtggagtggcgcaaacggagatgttgaccagtatgagatacaactgctgtttaacgacatgaaggtattccctccctttcatctggttaacacagccactgaatatcgttttacatctctcacccccggaaggcagtacaaaatcctggtgctgacaatcagcggcgatgtacagcagagcgcatttattgaggggttcaccgtaccatcagctgtgaagaatattcatatatctcccaacggcgctaccgactcgctgacggtgaattggaccccagggggaggtgacgtagattcctacaccgtgtccgcattccgccactcccagaaagtggattcgcagacgattcccaagcacgtcttcgagcatacctttcaccgcctagaggctggcgaacagtaccagatcatgattgcaagcgtgagtggatctctgaagaaccagattaatgttgtcgggcgtacagtgcctgcatccgttcagggagtgatagccgacaatgcctactcttcatactcattaatcgtgagttggcagaaagctgccggtgtagccgagcgctatgacattctgctcctgaccgagaacggtatcctgctgcgcaacacctccgagcccgctaccacgaagcagcataagtttgaagacttaactccgggtaagaaatacaagatccaaattctcactgtgtccggtggactgttttctaaagaagctcagaccgaaggtaggactgtgcctgccgcagttactgacctgcggataaccgaaaattccacgcggcacctgtcgttccgatggacagcatctgagggagaactgtcctggtacaatatcttcctatacaacccagatggcaatcttcaagagagagcacaggtcgaccctctggtccagagcttcagctttcagaacctacttcagggcagaatgtacaagatggtgattgtcacacacagcggagagctgagcaacgagtcctttatatttgggaggactgtgcctgcatcggttagccatttgcgcggttccaacagaaataccaccgactctttgtggtttaattggagcccagctagcggcgattttgatttctacgagctgattctctataaccccaatggcaccaaaaaagagaattggaaagacaaggacctcaccgagtggagattccagggcttggtaccaggccgaaagtacgttttgtgggttgtcactcattctggggatttgagtaataaagtaaccgcagaatcaaggaccgcaccaagccctccaagtctaatgtcgtttgccgatattgccaacacatcactcgccattacatggaagggccctcctgactggacagactataacgattttgaacttcagtggttaccgagagatgcactcacagtctttaacccttacaataacagaaaaagcgaggggaggattgtgtacggattgcggcctggcagatcgtatcagttcaacgtgaagacagtcagcggagacagttggaaaacttatagcaagccaatttttgggtctgtgcggactaagcctgacaagattcagaaccttcactgcaggccccagaattcaactgctattgcttgttcctggattcctccggatagcgactttgacggctacagtattgaatgccgcaaaatggacactcaggaggtggagttttctagaaagctggaaaaagaaaagagcctactgaacatcatgatgcttgttccacataagaggtacctggtctccattaaggtccaaagcgcaggcatgacaagcgaagtcgtggaggactctaccataaccatgatcgatcgcccaccacctcctcctccccacatcagggtcaatgagaaggacgtcttgatttcgaaatcctctataaactttaccgtgaattgcagctggttctcagacacgaatggggcagtaaagtacttcaccgttgtcgtccgcgaggccgacggaagtgatgaattgaaacccgaacagcagcaccccttaccgtcctatctggaatatcggcacaatgctagcataagagtttatcaaacaaactacttcgcctctaaatgtgccgagaatcccaattcaaactctaaaagctttaatattaaacttggcgcagaaatggaaagcttgggcggtaaatgtgatcctacacagcagaaattctgtgatggcccactcaaaccacatactgcataccgcatcagcataagagcatttacccagttgtttgacgaagaccttaaggaatttaccaaaccactgtattccgacacgttcttttccctgcccataaccactgaatcagagcccctgttcggcgcaattgagggggtgagcgcaggcttgttcctgattggaatgctcgtggccgtcgttgcactcctgatctgcagacagaaggtctctcacgggagggaacgaccttctgccagactgtctattcgccgagataggcccctgagcgtacacctgaaccttggacagaaagggaaccggaagacaagctgtccgattaagatcaaccaatttgagggccattttatgaaactccaggccgacagtaattatctgctgtctaaggaatacgaagagttaaaagacgtgggcaggaatcagtcatgtgatatcgcgctcctaccagaaaatcggggaaagaacaggtataacaatattttaccctacgatgctaccagagtgaagctcagcaatgtggacgacgatccatgctccgattacattaatgcctcttacatcccgggtaacaacttcagacgcgaatatattgtcactcagggacctctgcccggaaccaaagatgacttttggaaaatggtgtgggaacagaacgtccataatatcgtgatggtgactcagtgcgtagagaaaggccgtgtaaagtgcgatcattactggcccgctgaccaagattctctgtactatggggatttgattctgcagatgctatccgagagcgttctgcctgaatggaccataagagagttcaaaatttgcggagaggagcagctggacgcgcacaggttgattcgccatttccattacactgtttggcccgatcatggggtcccagagacaacacagagcttgattcagtttgttaggactgtgcgcgactacattaatcggtcccccggtgctggaccaaccgtagtgcattgcagtgcgggagtgggtagaacagggacatttattgccctggaccgaatcctccagcagttagacagtaaagatagtgtcgacatatacggcgcagtacatgacctgcgcttgcatcgggtacacatggtgcagactgagtgtcagtacgtgtacctgcaccagtgtgtgagggacgttttaagagcgaggaaactgcggtctgagcaggaaaaccccctgttccctatttatgagaacgtgaatcccgagtaccaccgggatcccgtttattctagacatta

SEQ ID NO: 237104 - DNA, 5723 bp, synthetic construct
  misc_feature 1..5723: note = Description of Artificial Sequence: Synthetic coding sequence
  source 1..5723: mol_type = other DNA
atgctaagccacggtgctgggcttgctctatggattaccctgtctctgctgcagacgggcctggcagaaccagagaggtgcaatttcaccctggcagaatccaaggcaagttctcactcagtatccattcaatggagaattctcggatcaccctgtaatttttcacttatatattcatccgacacacttggggcagcactctgccccactttcaggatcgataatactacatacgggtgcaacttacaagacctgcaagcaggcacaatctacaattttaggataatcagtctcgatgaggagcgtacagtcgtgctccagactgacccactgcctccggctaggtttggggtgagcaaggagaagaccacttccactagcctacatgtgtggtggactccatccagcggaaaagttaccagttatgaggtacagttgttcgacgagaataatcagaagatccagggcgtccagatacaggagagtacatcgtggaacgaatatacgttttttaatcttaccgcgggatcaaaatacaacattgccattacggccgtcagcggaggtaagcggagcttcagcgtttacacaaatggaagcacggtcccttcacctgtgaaagatattggtatctctaccaaggcaaatagcctgctaatatcatggtctcacgggtccgggaacgtggagaggtacaggctgatgcttatggataagggcatactcgtgcacggcggagtcgtcgataagcacgcgacaagctatgcttttcacgggttgacaccaggttacctgtataacctcactgttatgacggaagcagccggattgcagaactaccgatggaaactcgtcaggacggctcccatggaggtgtcaaacctcaaggtgacaaatgatgggtcattaacttccctcaaagtgaagtggcagagaccacctgggaatgtggattcttacaacattacgctgtcccacaaaggaactataaaagagagtcgggtcctagcaccttggataactgaaactcattttaaggagcttgttcctggaaggctctatcaggtaacggtaagttgcgtctcgggcgagttgtctgcgcaaaaaatggctgttggaaggacgtttcctctcgcggtcctgcagctccgcgtgaagcacgcgaatgagacctcgctgagcattatgtggcagacacccgtggctgaatgggagaagtacatcatctccctggccgacagagacttgctgttaatccataaaagcctgagcaaggatgccaaggagttcacattcactgatctcgtacctggcagaaaatacatggctactgttacttccatctccggggatttgaaaaatagttcatcggtcaaaggtcggaccgtgcccgcacaggttactgatctgcacgtcgcaaaccagggtatgacatcaagcttattcactaactggactcaggcccagggcgatgtagagttttaccaggtgctgctgatccacgagaacgtcgtcatcaaaaatgagtccatcagttcggaaacctcccgatactcattccactcgttaaagtccgggtctttgtactccgttgtcgtaaccacagtttctggcggtatttcctcgagacaagtcgtagtcgaggggcgaacggtgccttctagcgtatccggtgtgaccgtgaacaattcaggccgaaatgattacttgtcagtgagttggctcttggctcctggggacgtggacaattacgaagtgaccctcagccatgatgggaaagtggtgcaaagtctcgtgatagcaaagtcagttcgagaatgttctttctcttcccttactcccggtaggttgtacactgttacaatcactacaaggtctggcaaatacgaaaaccattcatttagtcaagaaagaaccgtgcccgacaaagtccagggcgtctcagtgtccaattcagcacgctccgactacctccgcgtcagttgggtgcacgccacgggggattttgaccattatgaggtcactatcaaaaataaaaacaactttattcagaccaaaagtattcccaagagcgaaaatgagtgtgtgttcgtgcagttggtaccgggtagactttatagcgtgactgtcacaacaaaatcaggccaatatgaagctaacgagcaagggaacggccgaacaatcccagagccagtcaaggatctaacactgaggaaccgttccacggaagacctccacgtgacatggtccggcgcaaacggtgatgtggaccagtatgagattcagttgctctttaacgacatgaaagtgtttcccccattccacttggtcaatactgccacggagtatcgtttcacctccctgacaccaggcaggcagtacaaaatcctggtgctcaccatatcgggtgacgtgcagcagtcagcttttatcgagggcttcaccgtgccgagtgccgtgaaaaatattcacatctcaccaaacggagcaacggactcattaaccgtaaattggacccctggcggaggcgacgttgactcgtataccgtgtcagccttccgccattcgcaaaaggtagacagtcagaccattccaaaacacgtttttgagcatactttccatagactggaggccggagagcagtaccaaataatgatcgcgtcagtgtccggctcgctgaagaatcagatcaacgtcgtgggcaggacggtgccagcctctgtgcaaggtgtgattgcggataatgcctattcctcctactccctgattgtgtcctggcagaaggctgcaggtgtggcagagaggtatgatatactcctgctgacagaaaacggcatactgctgaggaacacttccgaacctgctactaccaaacagcataagttcgaggatctcacccctggcaagaaatataagatacagatccttaccgtcagcggcggtctgttctccaaggaggcgcagacagagggaagaactgtgccagctgctgttactgacctgaggatcaccgaaaatagtacgaggcacctgtcctttcggtggacagccagcgagggtgagttaagctggtataatatctttctctataatcccgacggaaacctgcaagagagggcccaggtcgaccccttggtccagtctttcagctttcagaatctgctgcaaggtcggatgtacaaaatggtgattgtcacccattcaggcgagttgtcaaacgaaagcttcattttcggtcggacagtgccggcttccgtaagtcatctccggggaagtaacagaaacaccaccgactcattatggtttaactggtctcctgcttccggcgacttcgatttctatgagctgatcttatataaccctaacggtacaaaaaaggaaaattggaaggacaaggacctcactgagtggcggtttcaaggactggtgccaggtcgaaagtacgtgctatgggtggtcacccactccggggatctgtccaataaagttaccgctgagtccagaactgcacccagtccgcctagtctgatgtctttcgcagacatcgccaacacatccctcgctataacatggaagggcccaccagactggacagattataacgacttcgaactacaatggctgcccagggatgccctcactgtgttcaacccatataacaaccgcaagagcgaaggcaggatagtttacggactcaggccgggaagaagctaccagtttaacgttaagaccgtcagtggcgactcctggaagacatattccaaacccatctttggaagcgtgcgcactaaaccagataaaattcaaaacttgcactgtagaccccagaactctactgctatcgcttgcagctggattccccctgatagtgattttgacggttacagtatcgaatgcagaaaaatggatacacaggaagtcgaattctcgaggaagctggagaaagagaaaagcctgctgaatatcatgatgctagttccacacaaacggtatcttgtctcaataaaagtccagtccgcgggaatgacttcagaggtggtagaagattcaacgatcactatgatagaccgccctcctcctccacccccacacatacgggtgaacgaaaaagacgtcctcataagcaaatcctctatcaattttaccgtgaattgtagctggttcagcgacaccaatggagccgtgaagtactttacagtggtcgtccgggaggccgacggaaatgacgaactgaagcctgagcagcaacaccccctcccctcttatttggaataccgacacaacgcctcgatccgggtgtaccagactaattacttcgcatccaaatgcgctgagaatcccaactctaattcaaaatccttcaatattaaactgggggcagagatggagtctctcggaggtaagtgtgaccctactcagcagaaattctgcgacgggcctctcaagcctcacacagcatacagaatctctattcgtgctttcactcaacttttcgatgaagaccttaaagagttcacaaagcccttgtactcggataccttcttctccttgccaatcaccaccgagtcagagcctctcttcggagcaattgaaggagtgagtgccggtttgtttctgattggcatgctagtcgccgtggtggcgctcctgatttgtagacagaaggtctcccatggacgggagagacccagtgcgcgactgtctattaggagagaccggccactgagcgtccatctcaacctaggccagaaggggaaccgcaaaacgtcatgccctattaagattaaccagtttgaagggcacttcatgaaactgcaggctgacagcaactatcttttgagtaaggagtacgaggagctcaaggacgtcggccgaaaccagtcctgcgatatcgccctgcttcccgaaaacagggggaaaaacaggtacaacaacatactcccctatgacgccacccgggtgaaactgtctaatgttgatgatgacccctgctcggattacatcaatgcatcctacattcccggtaacaatttcaggcgagagtatattgtaacacagggtccactgcccggtactaaggacgatttctggaaaatggtgtgggaacagaacgtccacaacattgtgatggttacacagtgcgtagaaaaaggtcgcgtcaaatgcgaccattactggccagccgaccaggattcactctattatggggatctgatcttgcaaatgctctctgagagcgttctgcccgagtggacaatacgcgagttcaaaatttgcggagaagagcagctagatgcacaccgactgatcagacatttccactacacagtgtggccagatcatggcgtccccgagactacccagagtttaatccagtttgtgaggacggttagagactatattaacagatcacctggcgcaggcccaacggtggtgcattgctcagccggtgtgggaaggacagggactttcattgctctggatcgaattctgcagcaattggactctaaggactcagtcgacatttatggggcagtgcacgacttgagactgcacagagtccacatggtgcagaccgaatgtcagtatgtgtacctccatcagtgcgttcgggatgtcctgcgggcaaggaaactccggagcgaacaggagaatcctctattccctatatacgagaatgtaaaccctgagtaccacagagacccagtgtacagccggcacta

SEQ ID NO: 237105 - DNA, 2760 bp, synthetic construct
  misc_feature 1..2760: note = Description of Artificial Sequence: Synthetic coding sequence
  source 1..2760: mol_type = other DNA
atggaggccgaattttacatggtgattctgacctgcctgatttttcgaaattctgaggggttccagatcgtgcacgtccagaaacagcagtgcctgtttaagaacgagaaggtggttgtgggatcttgcaaccgcactatccagaatcagcagtggatgtggacggaagacgaaaaactgctgcacgtcaagtccgccctctgcctggccatctccaacagctcacggggaccttcgcgctctgccattcttgacaggtgttcccaagctcctagatggacctgctacgaccaggagggatttttagaagttgagaacgcatcgttgttcctgcagaaacagggatcccgcgttgtggtgaagaaagccagaaaatacttgcatagctggatgaaaatcgacgtgaacaaggagggcaaactggtgaacgaaagcttgtgtctccaaaaggctggacttggagcagaggtgagtgtgcggtcaacgagaaatactgccccacctcagattttgacaacctttaatgcagtacctgatgggctggtcttcctgattcgcaacactaccgaagcttttataaggaacgcagcagagaattacagccagaacagcagcgagcgccaacacccgaatttgcacatgactgggattactgacacaagctgggtactgagtaccactcagccattctcttcgacaacagaagagactgggctggctgagccagagcgttgtaactttacactcgctgagtctaaggcgtcttcccatagcgtctctatccaatggagaatattggggtcaccctgtaacttttcactgatatactcgagcgacactttgggagctgcgctgtgtcccactttccgcatcgataatactacctacggatgcaacctgcaggatctccaggctggaaccatctacaatttccggatcatatccttagatgaggagcggacagtggtgttacaaacagacccgctgccccctgcccgattcggcgtctctaaagagaagacaacatctacatcgttacatgtgtggtggactccatctagtggcaaagtcacatcatacgaagtccagctatttgacgagaataaccagaagattcagggcgtgcaaattcaggagtctacaagctggaatgaatacaccttttttaacctcactgccggaagtaaatataatatagcaatcacagccgtctccggaggcaagaggagttttagtgtatacacaaatggctcaaccgtgcccagcccagtgaaagacatcgggataagcaccaaagcaaactctttgttgatatcttggtcacatgggagtggtaatgtggagcggtacagactgatgcttatggataagggaatcctggtccatggcggtgtggtcgataagcacgcaacttcttacgcctttcatgggcttaccccagggtacctttacaatctgactgtgatgacagaagcagcgggattgcagaactaccggtggaagctggtgagaacagctccaatggaagtatcgaacctaaaggtgaccaatgatggaagcctgacctctctcaaagtgaagtggcagcgacccccaggcaacgtagattcttacaacatcaccttatctcataagggcaccataaaggagtcccgcgtcctcgccccttggattaccgagactcactttaaagagctagtcccaggtcggctctatcaggtcacagttagctgcgtaagcggtgaactctctgctcagaagatggccgttggacgaacattccctgataaggtggcaaatttagaggcgaacaacaacggtcgaatgcgttctttggtggtatcatggtctccccctgccggtgactgggaacagtataggattcttctcttcaacgattccgtcgttttgctgaatattaccgtgggcaaagaagaaacacaatacgtcatggatgatacgggactcgtgcctgggaggcaatacgaagttgaggtgattgttgaatccggcaatctgaagaattccgagcgttgccagggaagaacggtgcccctggctgtcttacaattacgggtcaagcatgctaacgaaacctctctgtcgatcatgtggcagacacctgtggctgagtgggagaagtacattatcagcctggcagatagagacctccttttaattcataaatcactaagtaaggacgccaaggaatttaccttcacagatcttgttcctggaaggaagtacatggcgaccgttaccagcattagtggagacctcaaaaatagtagctccgttaagggcaggactgtgccggctcaggtaaccgatttacacgtggcaaaccaggggatgacatcttcgctgtttactaactggacccaggcccagggcgatgtggagttttatcaggtgttgctgatccacgaaaacgttgtaataaagaacgaaagtatcagttctgagactagcaggtactcgttccactctctcaagtccggaagcctgtacagcgtagtggtgactacagtgagtggcggtataagtagccgacaggtcgtggtggagggcagaactgtgccggacaaagttcagggtgtgagtgtctctaattccgcaagaagtgattacctgagggtctcttgggtgcacgctacaggggacttcgaccattacgaagttaccattaaaaacaagaacaactttattcagacaaaagcatttccttcccaaaagaccaacgtttacttatttagttag

SEQ ID NO: 237106 - DNA, 5723 bp, synthetic construct
  misc_feature 1..5723: note = Description of Artificial Sequence: Synthetic coding sequence
  source 1..5723: mol_type = other DNA
atgctgagccacggcgcaggcctggccctctggattacacttagcctgcttcagaccggcctggcagagcctgagagatgtaactttactttagccgaatccaaggcgtcaagccactcagtctctatccaatggcgcattctcggatccccttgcaatttttctcttatttattcttcagacacactaggggctgccctatgcccgacattccgtattgacaacactacatacggatgtaacctgcaggacctgcaggccggaacaatctataattttcgaatcatcagcctggatgaggagcggaccgtggtgctccaaactgatcccctgccaccagctcgcttcggtgtttctaaagaaaaaacgactagtacctcactccatgtgtggtggacaccttcgtctgggaaagtgacttcttacgaggtacaattattcgacgagaacaatcaaaaaatccagggggtccaaattcaggaaagcacgtcgtggaacgagtatactttcttcaatctgactgccggttctaaatacaacatcgccatcactgccgtgtctggaggtaaacggtccttttcagtatacacaaacggcagcacagtcccttctcccgtaaaggacatcggcatcagcaccaaggccaacagcctacttatatcctggtctcacgggtccggtaacgtggagcgctatcggcttatgctcatggataaaggcatcctcgtgcacggaggcgttgtggacaaacacgctacctcctacgctttccatggacttactcccggttatctgtataatcttaccgttatgaccgaagccgcagggctacagaactacagatggaaattggttagaaccgcaccaatggaggtctctaacctgaaagtcacaaacgacgggtccctgactagtctgaaagtgaagtggcaacggcctcctggcaacgtcgacagttacaacatcacccttagccataaaggcacgataaaagaatccagagtcctagctccatggattaccgagacccactttaaggaactggtgcccggaaggctctaccaggtgactgtttcctgcgtatccggagaactttctgctcaaaagatggctgtgggacggacttttccccttgctgtgctgcagcttcgagtgaagcacgccaacgaaacgtcattgtcaattatgtggcaaacacccgtggccgagtgggagaagtacatcatttctctggctgatcgggacttgctgctgatccataaaagcctctccaaagacgctaaagagttcaccttcactgatcttgtgccgggaagaaaatacatggcaaccgtgacttccatctccggagaccttaaaaattcaagttccgtcaagggccgtacagtgcccgctcaggtgacagacctgcacgtagcgaaccagggaatgacatcatctttgtttaccaactggacacaggcgcagggtgatgtggaattttatcaggttcttctgatccatgaaaatgtcgtgatcaagaacgaatcaatctccagcgagacatccaggtattctttccatagcctcaagagcggctccctttattcagttgttgtcacgaccgtctcaggagggatctcgtctagacaggttgtggtggaagggaggaccgttccttcatctgtctccggggtgacagtgaacaactctggacggaacgattatttgtccgtttcttggctgctagccccaggagacgtggacaattacgaggtgacgttatctcatgacggcaaggttgtgcagagcctcgtgatcgccaaaagcgttcgtgaatgttccttcagctcactcacgcctggcagactgtacacagtgactatcactacacggagtggcaagtatgaaaaccactcctttagtcaagaaaggacagtgccagataaggtgcaaggcgtctctgtcagtaatagcgctaggagcgattatctgagggtgagctgggtgcacgccacaggtgatttcgaccactatgaagtcacaatcaaaaataagaataactttattcagaccaagtctattcctaaatcagaaaacgaatgtgtgtttgtgcagctggttccgggaaggctgtacagtgtaacagtcaccaccaagagcggccagtatgaagcaaatgaacagggcaatgggcgtacaatccctgaaccagtgaaggatctgactctgaggaacaggagtaccgaggacctacacgttacctggtccggcgctaatggcgatgtcgaccagtatgaaatccaacttctgtttaacgatatgaaagtattcccacccttccatctagttaacacagcgaccgagtaccgtttcacctcacttaccccaggaaggcagtacaaaattcttgtgttgacaattagcggagacgttcagcagtcagcgttcatagaaggcttcaccgttccctccgcagtcaagaacattcacatatctccaaacggcgcaaccgatagcctgactgtgaactggaccccgggaggaggggacgtggactcatataccgtgtcagcctttcgtcattcgcagaaagtcgactcccagactatccccaagcacgtttttgagcacacatttcatcggttggaggcgggtgaacagtaccagatcatgatcgcgagtgttagcggcagccttaaaaaccaaataaacgtggttggaagaacagtaccagctagcgtgcagggagttatagctgataacgcctacagttcttacagtctcatagtctcttggcaaaaggccgctggcgtagccgaacgatacgacattctgctgttaactgaaaacgggatactgctccgaaacacctctgagcctgctacgaccaagcagcacaagtttgaggatctaacgccaggcaaaaaatacaagatacagatcctgaccgtttctggaggattgttttcaaaggaggcacagacggaaggaagaacagtgccggctgccgtcactgatttgaggattaccgaaaatagcacgaggcatctgagcttccgttggacagcgagcgagggcgaattgtcctggtacaacattttcctctataatcccgacggcaacctgcaggaacgtgctcaggtggatcccctcgtgcagtccttcagtttccagaatctgcttcaggggaggatgtataagatggttattgtgacacactctggtgagttaagcaacgagagcttcatcttcgggagaacagtcccagccagtgttagtcatctgagaggcagcaatcgcaataccaccgactctctctggttcaattggagccctgcgtccggcgattttgatttttatgagctaattctgtataacccaaacgggaccaagaaagaaaattggaaagataaagaccttaccgagtggagattccagggcctggtaccaggccgtaaatacgtcctgtgggtggtgacccactcgggggacctgagcaacaaagttacagctgaaagccggaccgccccatcccccccttcactcatgagcttcgctgacatcgccaacaccagtctcgccataacatggaagggtccacctgattggacagattacaacgactttgaactgcaatggttgccaagagacgcccttaccgtttttaacccatataacaatcgaaagagtgaggggcgtatagtctacggacttagacccggaagaagttatcagttcaatgttaaaaccgtcagtggtgacagttggaagacctattcaaagcctatctttgggtcagtgcgcaccaaacctgataaaattcagaacctgcactgccgcccacagaatagtaccgccatcgcatgcagctggataccccctgacagtgacttcgacgggtatagcatagagtgcagaaaaatggatactcaggaggtggagttctcacgtaagctggagaaagagaagagcctgctgaatatcatgatgctcgtgcctcacaaacgatacttagtgtctatcaaagtccagagcgcagggatgaccagtgaagtagtagaggatagtaccattaccatgattgataggccaccgccaccaccccctcatatcagggtgaatgaaaaagatgttctaatcagcaagtcttccataaattttactgtgaattgctcatggttcagtgataccaacggagctgtcaagtactttacagttgtggtgagagaggccgatgggtcagacgagcttaaacctgagcagcaacaccctctgccaagctatctcgaatatcgtcacaatgcctccattcgtgtctaccagacaaattactttgccagcaaatgtgctgagaacccaaacagcaattctaagagttttaatattaaactcggagctgaaatggagagtctcggaggaaagtgcgacccaacacagcagaagttttgtgacggcccactgaagccacatacagcgtaccgtatcagtatccgggcttttacacaactctttgatgaggacctaaaagaattcaccaaaccactctattctgacacattcttttcactcccaatcaccacagaatcagaacccctgttcggtgcaatagaaggcgtgtccgctgggttgtttctgattgggatgctggttgcggtggtggctctgctgatctgcaggcaaaaagtgtctcatggccgagaaagaccttctgctcgtctctccataagaagggaccgacccctgtccgtgcatctcaacctggggcagaaggggaaccgcaagacctcgtgtccaatcaagatcaatcagtttgaaggccacttcatgaaactgcaggccgattccaactatctcctcagcaaggagtatgaggagttgaaggacgtggggagaaatcagtcatgtgatatcgctctgctacccgagaacagaggaaaaaaccgctataacaacatcttgccctatgacgcaacacgggttaagctatcaaatgtcgatgatgacccctgcagtgactacattaatgccagctacattccaggaaataattttaggcgggagtacatagtaacacagggacccttacctgggactaaagatgacttttggaagatggtttgggaacagaatgtccataatattgttatggttacacagtgcgttgagaaaggtcgcgtcaagtgcgatcactactggccagctgaccaagacagtctgtactatggcgatcttatactgcagatgctgagcgaatcagtccttcccgagtggactatccgagagttcaagatctgtggggaggagcagcttgacgcgcatcgactaatacgccacttccattataccgtgtggcctgaccacggcgttcctgaaacaacacaatcgctaattcagtttgtccggactgtacgggactatattaatcgctcccccggagcaggaccaacagtcgtccattgttctgctggggtaggcaggaccggcacattcatagccctggacagaatcctgcagcagctggattctaaggactctgttgatatttacggtgccgtgcacgacctgcgcctgcacagggtgcacatggtccagaccgagtgccagtatgtctacctgcatcaatgtgtgcgagacgtcctccgcgctcgcaagctgcgttccgaacaagaaaaccccctgttcccgatttatgagaatgttaatcccgagtaccatagagacccggtttattctaggcatta

SEQ ID NO: 237107 - DNA, 621 bp, synthetic construct
  misc_feature 1..621: note = Description of Artificial Sequence: Synthetic coding sequence
  source 1..621: mol_type = other DNA
atggccttaccttgtacacttgggctcggtatgcttctagccctgcccggtgccttgggtagcggcggatctgctgaggattctgttggaagtagctctgttacagtcgtgctgctcttgctgctcctcctgctgctggccaccggtttagcgcttgcatggagacgcctctcccgggattctggtgggtactaccatccagcgcgactgggggctgctctgtgggggaggacccggaggttattatgggcctctccacctgggagatggctacaggctcgtgccgagctgggctccactgataatgacctcgagcggcaggaggacgagcaggacacagactatgatcacgttgccgatggcggtcttcaggctgatcctggtgagggggagcagcaatgtggggaagcctcctcgcctgaacaggtgccagtgcgtgccgaagaggccagagactccgacaccgaaggggacttagtcctcgggtcgcctgggcctgcaagcgccggaggctcagcggaggccttactgtctgatctgcacgcctttgccggaagcgccgcatgggatgatagcgctagggcagctggcggtcaaggcctgcacgtgaccgcgctatag

SEQ ID NO: 237108 - DNA, 4152 bp, synthetic construct
  misc_feature 1..4152: note = Description of Artificial Sequence: Synthetic coding sequence
  source 1..4152: mol_type = other DNA
atggtccacgtggctaggctacttctgcttctgctgaccttttttttgcggaccgatgcggaaaccccaccgcgtttcacacgaacccccgttgaccaaacgggagtgagtggcggagtggcatctttcatctgtcaggcaacaggagatcctaggccgaagattgtgtggaacaaaaagggaaaaaaagtctcgaaccagcggtttgaggttatcgagttcgatgatggatccggctcagtgcttcggatccagcccttacgcactccaagagacgaggccatatacgagtgtgtggcgtctaacaatgtaggagaaatttcagtctcaacgagactgaccgttcttagagaggaccagattcctcgcggattcccaacaatagacatgggaccccaactaaaggtggtggaaagaacaagaaccgctaccatgttgtgtgcggcatccggcaacccagatcctgaaataacttggttcaaagacttcctgcctgtggacaccagcaacaataacggaaggatcaaacaacttcgatcggtgagcgtgtgcgccacgtatcacactggggcactgcagatcgaacagtccgaggagtctgatcaagggaaatatgagtgcgtagctaccaacagtgccggtacaaggtacagtgccccagcaaacttgtacgtccgcgtgaacagaaaggtgcggagggttcctccacggttcagcattccacccactaaccacgagattatgcccggtggtagtgtgaacattacatgcgttgccgtgggttctcccatgccgtatgtcaagtggatgcttggggctgaggacttaaccccagaggatgacatgcccatcggtagaaacgtgctggagctgaatgacgtgcggcagtctgcgaactatacttgcgtcgccatgagcaccctcggggtgatcgaggctatagcccagattacagtgaaggccctaccaaagcctcctggtactccagtcgtgacggagtcgaccgctacttcaattacccttacgtgggacagtggtaaccccgagcctgtaagttactatatcatccagcacaagcccaaaaacagtgaggagctgtataaagagattgacggagtagctactacccggtacagcgtagccggactgtccccatattccgattacgagttcagggttgtagccgtaaacaatatcggccgaggacctccttccgagcctgtacttacccagacctcagaacaggccccaagctccgccccacgggacgtccaagctcgcatgctcagcagcactactatactggtacagtggaaggagcctgaagaacccaacgggcaaatccaaggttacagagtgtactacaccatggaccccacccagcacgtgaacaactggatgaaacataatgtcgccgatagtcagatcacaaccattggaaacttagtgccacaaaagacatactcagtgaaagtcctggcattcaccagcatcggcgatggaccgctctcatctgatatccaggtgatcacgcaaaccggcgtgccgggtcaacccctgaatttcaaagctgaacctgaatccgagacatctatcctgctcagttggactcccccacgatccgacactatcgcaaattatgaactcgtatataaggacggcgagcacggcgaagaacagcgaattacaatcgagccaggcacctcatatcgattacagggattaaaacccaactcactgtattacttcagattagctgctaggagcccccaaggactcggggcttccactgctgagataagcgctcgaacaatgcagagctctaaagggtattatattattatcgtccctctgaagaagagtcgcggaaagttcatcaagccttgggaatctcctgatgaaatggaattggatgaactactcaaggagattagccggaaacggagatccatccgatatgggagggaggtcgagctgaaaccctatatcgcagcccactttgatgtactcccaacagagttcaccctgggggatgacaagcattatgggggattcactaataaacaactgcagagtggtcaggaatatgtgttcttcgtgctcgccgtaatggagcacgccgaaagcaagatgtacgccacgtccccatactccgatccagtagtgtccatggatcttgatcctcagccaatcactgatgaagaagagggtttaatctgggttgtcgggccagtgcttgccgtggtcttcatcatctgcattgtcattgctattcttctgtacaagagaaagcgcgcagagtccgattcaagaaaaagttcgatacctaataacaaggagatccccagccatcatcccactgacccagttgagcttcgcaggctcaacttccaaactcccggaatggcctcccaccctccaatcccgatcctggagctcgccgatcatattgaacgcttgaaggctaacgacaatctgaaattctcccaggagtatgaatctatcgacccagggcagcagtttacatgggaacattcgaatcttgaggttaataagcctaaaaaccggtatgctaacgtcattgcgtacgaccattcccgagttcttttgtcagcaatcgaagggatcccaggatccgattatgtcaatgccaactatatcgacggataccgcaagcaaaacgcatatatcgctacccaaggttccttacctgagacatttggggatttttggcgtatgatttgggaacagagaagtgcaaccgtggttatgatgacaaagctggaggagcgatcccgggtgaaatgtgatcaatattggccatctcggggtactgagacgcacggcctcgtgcaggtgactctacttgacaccgtggaacttgcaacctactgtgtgcgcacatttgccctatataaaaatggttcctctgaaaagagagaggttcgacagttccaattcacagcctggcccgaccacggcgtgccggaacatcctacaccatttttagccttcctcaggcgcgtgaagacctgtaatccaccagacgctggaccaatggtggtccactgctccgcaggggtggggcgaacgggatgttttatagtgatcgatgccatgctggagaggatcaaacacgagaagacagtcgacatttacggacacgttacactgatgcgagcccagaggaactatatggtgcagactgaagatcagtacatctttatccacgacgccttgctcgaggccgtaacgtgcggaaacacagaagttcctgcacgaaatttatatgcctatattcagaagctgacacagatcgagactggggagaatgttacaggcatggaattggagttcaagcgcctggcaagcagcaaggcacatacttcaaggtttattagcgctaatctcccttgcaacaaatttaagaataggctggtcaatatcatgccctatgaatctacgagggtgtgcctgcagcccatccggggagtggaagggtccgattacattaacgccagctttatcgatgggtataggcaacagaaagcctacatagccacacaaggccctctcgccgagacaactgaggacttttggcgaatgctttgggaacacaactctaccattgttgtcatgctcacaaaactgcgagagatgggacgcgaaaagtgccatcagtactggccagctgagaggtcagccagataccaatactttgtggttgatcccatggcagagtacaacatgccgcagtacatcttgcgcgaattcaaggtgactgatgcaagggatggccaatctaggaccgttcggcagtttcagtttacagactggccggagcagggggttcccaagtcaggggagggctttattgatttcatagggcaagttcataaaacaaaggagcagtttggtcaggatggtcctatttcagtgcactgcagcgccggagtcggaagaacaggtgtgtttattacactgtctatcgtcttagagaggatgcgctacgaaggcgttgtcgatatattccagactgtgaagatgttgcgtacgcagcgccctgccatggtccagaccgaggatcaatatcagttttcgtatagagccgctctggaatacctgggctcatttgaccattacgctacatag

SEQ ID NO: 237109 - DNA, 4521 bp, synthetic construct
  misc_feature 1..4521: note = Description of Artificial Sequence: Synthetic coding sequence
  source 1..4521: mol_type = other DNA
atggtgcacgtcgccaggttactgcttctgctactcacgtttttcctcaggacagacgccgagactcccccaaggtttacacggacccctgttgaccagacaggcgtgtccggaggcgtggcctcattcatttgtcaggcaactggcgatccgcgacccaagatcgtatggaataagaagggaaagaaggtgtctaaccagagattcgaggtgattgagtttgatgatggatcaggatccgtcctacggatacagcccctacggactccaagagatgaggccatctatgagtgcgttgccagcaataacgtcggggagatctctgtgagcactcggttgacagtactccgtgaggatcagatcccacggggtttccctactatagacatgggtcctcagctaaaggtggtcgagagaacccgtactgccactatgctctgcgccgcttccggcaaccccgatcccgaaatcacatggttcaaggacttcctccccgtagatacatcaaacaacaacggaaggataaaacagctaagatccgagtctattggcggtacccccatacggggagcactgcaaatcgagcagagcgaggaatctgatcaggggaaatatgagtgtgtggctactaactctgccggtactagatacagcgcacccgctaacctctacgtgcgcgaattgagggaggtgagaagagtgcctccacggttctccatcccccctactaaccacgagatcatgccaggcggatctgtgaatattacttgtgttgccgtcggaagtcctatgccttatgtgaaatggatgctgggcgcagaagacttgaccccagaggacgatatgccgattggtcggaacgtgctagaattgaatgacgtcagacagagtgccaattacacctgtgtcgcaatgtccaccctgggcgtaattgaggccattgcccagataacagttaaggccctgcccaaacctccgggaacacctgttgtaaccgagtcgacggccacttctatcaccctgacgtgggacagcggcaatccggagcctgtgtcctactacatcatccagcacaaacccaaaaatagtgaagagttatataaagagatcgatggcgtggccaccactagatattctgttgcgggactgagcccctacagtgactacgagttccgcgtcgtcgctgtgaataatatcggcagaggcccaccctccgaacccgtgctcacacaaacatcagagcaggcgccaagtagtgccccacgggatgtgcaagcgagaatgctaagctcaactacaatactggtgcagtggaaggagcccgaagagcctaacgggcaaattcaaggctaccgagtctattataccatggatcctacacaacacgtgaacaactggatgaagcacaacgtcgccgactcacagatcaccactataggcaatctggttccacagaagacgtattctgtgaaagtcctggcctttactagtatcggggacggcccattgagcagcgatattcaagtgatcacccaaaccggagtgccgggacagccactgaattttaaagctgagccagagtctgagacatccattcttctgtcctggaccccccctcgaagtgataccatagccaactacgagctcgtgtacaaggacggcgaacatggggaagaacaacggataacaatcgagccaggcacctcctacagactgcagggcctgaagcccaacagcctgtactactttaggttggccgctagaagtcctcagggattaggcgcaagcaccgccgaaatttctgctcgcaccatgcagtctatgttcgctaaaaacttccatgtgaaggctgtgatgaagacatccgtcctcttgtcttgggagatcccggagaattataattctgctatgccattcaaaattctttatgatgacggaaagatggtggaagaagtcgatggacgcgcaacccagaagttaatagtgaatttaaagccagagaaatcttacagcttcgtgctgaccaatagagggaactccgccggaggcctgcaacaccgcgtgacggcaaaaaccgcccctgacgtgctgcgcactaaaccagccttcataggaaaaacaaacctggatggcatgattaccgtgcaattaccagaggtgcctgcaaacgaaaatatcaaaggctattacataattatcgtgccattgaaaaagagccgcggaaaattcatcaagccttgggagtccccagatgaaatggagctcgacgagttattgaaggagatatccaggaaacgtcgatctatccgttacggcagagaggtggaactaaagccttatatcgcagctcactttgatgttctgccaaccgagttcactttgggagatgataagcattatggagggttcaccaacaagcaacttcagtcggggcaggagtatgtgttttttgtacttgccgtcatggagcatgctgaaagtaagatgtatgcaacaagcccatattctgatcctgtggtatccatggacttagaccctcagcccataaccgatgaagaagaaggcctcatttgggttgtgggcccagtgctggccgtggtctttattatatgcatcgttatagcgatattgctttacaagagctcgaaaccagaccggaagagagccgaatcagacagtcgcaagtcctcgatacccaataataaggagatcccgagccatcatccgacagaccctgtagaactgcggcgtctgaattttcagactccaggaatggcctcccaccccccaattccgattctcgaattagccgaccacattgagaggctgaaagccaacgacaatctgaaattcagtcaggaatacgagtccatcgaccccggtcagcagtttacctgggagcatagtaacctggaggttaacaagccaaagaaccggtacgctaacgtcatcgcttatgaccactctagagtcctcctgtcggccatcgaagggatccctgggagtgattacgtcaacgctaattacatcgatggctaccgtaagcagaacgcctacatcgctacacaaggcagcctgcccgagacatttggggatttttggcgaatgatctgggaacagagatccgcaaccgtcgtgatgatgaccaaactggaggagaggagccgggtcaagtgtgatcaatactggccttctagaggcacagagacacacggacttgtccaggtgaccctccttgacacagtggagttggccacatattgcgtgaggactttcgctctgtacaagaatggcagcagtgagaaacgggaggttcgtcagtttcaatttacagcctggccagaccacggtgtgccggagcaccccacaccctttctcgcctttctgcgcagggtgaaaacctgcaatcctcccgacgccggtcctatggtggtccactgttccgccggagtgggaagaaccggctgctttatcgtgattgacgcgatgttggagaggatcaagcacgagaagacagttgacatctatgggcacgtgacgcttatgagggcccaaagaaactatatggtgcagacagaagatcagtacatcttcatacatgacgcactactcgaagcggtgacctgcgggaacacagaggtgccagctcgaaacctttacgcttacatccagaaactcacacaaattgagactggcgaaaatgtgactggtatggagctggaatttaaacgactggccagcagtaaagcccatacgtctagattcatctctgccaatttaccgtgcaacaagttcaagaaccggctagtaaacattatgccctatgagagtaccagagtatgccttcaacccattcggggagtggagggtagtgactacattaatgcgtcgtttatagacggctacaggcaacagaaggcctacattgctacccagggccctctggcagagactacagaagacttctggcgcatgttgtgggaacataacagcaccatcgttgttatgctgactaaattgcgggagatggggcgagaaaagtgtcaccagtactggcccgcagagcggtcagctcgctaccagtattttgtagtggacccaatggctgaatataatatgccacaatacatactgcgtgagttcaaagtgacagacgcgagagacgggcaaagtcggacagtgcgtcagttccaattcactgactggccggaacagggagtgcctaagagcggcgagggctttatcgattttatcggtcaggtgcataaaactaaagagcagttcggacaggacgggcctatctcggtgcactgctctgcgggtgtcggcaggactggcgtcttcattaccctttcgatcgtgttggaacggatgcgttacgaaggggtggtagacattttccagaccgtcaaaatgctgcgtacacaaagaccggctatggttcagacagaggaccagtaccagtttagctaccgggcagcactggagtatctgggcagctttgatcactatgccacttag

SEQ ID NO: 237110 - DNA, 5738 bp, synthetic construct
  misc_feature 1..5738: note = Description of Artificial Sequence: Synthetic coding sequence
  source 1..5738: mol_type = other DNA
atggtgcatgtcgcgcgacttttactgctactcctcacattcttcctgcggactgacgctgaaactcctccgcgatttacacggacaccagtggatcagaccggagtgtcaggaggcgtggcaagctttatctgccaggctaccggcgaccctcggccaaaaatagtgtggaacaagaaggggaagaaagtttccaatcagagattcgaagtcattgaattcgacgacggaagcggctctgtactccgcatccagccgttgagaactcccagagatgaagccatctatgaatgcgtggcctcaaacaatgttggggagataagcgtgtcaactcggcttacggtgctgagagaggaccaaatacctcgcggttttccaaccatcgacatgggccctcaattgaaggttgtcgagaggacgagaactgccaccatgttgtgcgctgcgtctggtaatcctgatccagagatcacttggtttaaggactttttgccagtggatacatccaacaacaatggtagaatcaaacagcttagatccgagagtatcggcggaaccccaatccggggtgccctccaaatagaacagagtgaagaatccgaccaggggaaatacgagtgtgtggccactaactcagccggaactcggtatagcgcgccagccaatctgtacgtgcgggaattgcgggaggtaagaagagtgccccctaggtttagcattccacctactaatcatgaaattatgcccggagggagcgttaatatcacatgtgttgcagtaggcagccccatgccctacgtgaaatggatgcttggagctgaggatctgaccccagaggacgatatgcctattgggagaaacgtacttgagcttaatgacgtgaggcagagcgctaattatacctgtgttgcgatgtcgactctgggggtgatagaggcaattgctcagataacagtgaaggctctgcctaagcctcctggcacaccggttgtgacggagagcactgcaacatcgataacattaacttgggatagcgggaatccagagcccgtatcctattatattatccagcacaaacctaaaaacagtgaggagctctacaaagagatcgacggcgtggctactacgagatactcagtggccggtttgtccccctactcagattatgaattccgtgtggtggcggtgaacaacattggtagaggaccaccatcagagccagtacttactcagactagcgagcaggcccctagcagcgcaccacgggacgtgcaggccagaatgctgagctccacaacgatcctcgtgcaatggaaggagcctgaagaacccaatgggcagatccagggctacagagtctattataccatggacccgactcagcatgtgaataactggatgaagcataatgttgccgacagtcagataaccaccatagggaatctggtacctcagaagacatatagcgtcaaagtgctcgcctttacctcaatcggcgacgggccactgtcctcagacatacaggttatcactcagaccggcgtgcccggtcagcccttaaacttcaaggccgaaccagagagcgaaacaagtatcttactgagttggacccctccccgatccgataccatcgcaaattatgaacttgtgtacaaagacggggagcatggcgaggaacaacgcattacgattgaacctggcacgtcttaccggcttcaaggtctgaagcccaactccttatattatttcaggctggctgctcggagccctcagggacttggcgctagcactgccgaaattagtgcgcgaaccatgcaaagcaagcccagcgcccctcctcaggacattagctgcaccagcccgagctctacttcaatccttgtgtcatggcagccccctccagtggaaaagcagaacggaataatcacggagtactcaattaagtacaccgcagtggatggcgaagacgataagccccacgagattttgggcataccaagcgataccactaaatacttgttggaacagttggaaaaatggaccgaatatagaatcaccgtgacagcccacactgatgtcgggcctgggccagaatctctctccgttctgattcggacaaatgaagacgtgccttctggcccacctcggaaggtggaagtcgaggccgtgaacagcacctctgtaaaagtgtcatggcggagccctgtgccgaataagcagcatgggcaaattcggggatatcaggtgcattatgtgcgcatggaaaacggcgaaccaaaaggacagccgatgttgaaggacgtgatgctagccgacgcacagtgggagttcgacgataccactgagcatgacatgatcatctccggactccaaccagaaacgtcttatagcctgacggtgaccgcctacaccactaagggagacggggcaagatcgaagcccaagttggtgtctacaacaggagcggtcccaggcaaacctcgcctcgtgatcaaccatacacagatgaataccgctttgatccagtggcacccacccgtggacacctttggacccctgcagggctataggctgaaatttggacgcaaggatatggagccactgacgacactggagttcagcgaaaaagaagatcatttcaccgccacggacatacacaaaggcgcatcctacgtgttcaggctgagcgcacgtaacaaggtgggtttcggcgaagaaatggtgaaggagatttccatcccggaggaagtgcctactggttttccccagaatctacactccgaaggcactactagcacctcagttcagttaagctggcagcctcctgtactcgctgaacgcaacgggatcatcactaagtatacgctcttgtatcgagacataaacatcccactccttcctatggagcagttgatagtaccagcagacacaacaatgacacttacgggattaaagccagacactacgtatgacgtgaaggtgcgcgctcacacgagcaaagggccaggtccatattctccctctgtgcaatttaggacattgccggtcgaccaggtgttcgctaagaatttccacgtgaaggccgtaatgaaaacatctgtgttgctgtcatgggagatccctgaaaattataactctgccatgccgttcaaaattctttacgatgatgggaagatggtggaggaggttgatggcagggccacccagaaactgattgttaacttgaagccagagaaatcatactcatttgtactgaccaatcgcggaaactccgccggaggtctgcagcatagagtcaccgctaaaaccgctcccgacgttctgcggaccaagccagcgtttatagggaagaccaatctagatggcatgatcaccgtccaacttcccgaagtgccagctaacgagaacatcaagggttactacataatcatcgtgcctctgaaaaaatctcggggtaaatttatcaagccctgggaatccccagatgagatggagctggacgagctgttaaaggagatctccagaaaacggaggagcatccggtacggtcgggaggttgagttgaagccatacatagcagcacatttcgatgtgctgccaactgagttcaccctgggggacgacaaacattatggaggatttacgaacaagcagctgcagtcggggcaggaatacgtgttttttgtcctggctgtcatggaacacgctgagagcaaaatgtacgccacaagcccttactcagaccctgtggttagcatggatctcgaccctcagcccatcaccgacgaggaagaaggcctcatttgggtcgtggggcctgtcctggcagtggtgtttataatctgtatcgtgattgccattctgctttacaagagaaagcgcgctgaatctgactctcgcaagtcctcaattcccaacaataaagagatcccatcacaccatcccacagatcctgttgagttaagaagattgaacttccagactcctggaatggcaagccacccccctattcccattctggagttagcagatcacatcgagcgtttgaaggcaaacgacaacctcaagttcagccaggagtatgagtccatagatcccggtcagcagtttacctgggagcattcaaacctcgaggtgaataagcctaagaaccgttacgccaatgtcattgcgtatgatcatagccgggtgctcctgagcgccattgaagggattcccggatcggactatgtgaatgccaactacattgatgggtacagaaagcaaaacgcctatatcgcaacacaggggtctcttcccgagacatttggcgacttctggcggatgatatgggaacagaggagcgccactgttgtgatgatgacaaaattggaagagcggagtagagtgaagtgcgaccagtattggccctcccgagggacggagacccatgggctcgtgcaggtgaccctgcttgacactgttgaactagcaacctactgtgttaggactttcgccctgtacaaaaacggcagcagcgagaagcgggaggtgcgccagtttcagttcaccgcttggccggaccatggcgttccagagcacccaactccctttctggcattcctcaggagagtgaaaacatgtaatcctcctgacgccggtcccatggtggtccactgctccgccggagtcggcaggaccggttgttttatcgtgatcgatgccatgttggagagaattaaacatgaaaagaccgtggacatttacggacatgtcaccctgatgagagcacagcgtaactacatggtgcaaacagaggaccagtatatctttatccatgacgctctattggaggcagttacctgtggcaatacagaggtaccagccaggaatttgtacgcctacatccaaaagctgactcaaatcgaaacaggggaaaacgtgacaggaatggagttggaatttaaacgattagcgagttccaaggcacataccagccgttttatcagtgctaatctgccctgcaataaattcaagaataggctggttaacataatgccctatgaatccacccgggtgtgcctgcagccaatacgcggagttgaaggctccgattacatcaacgcaagttttatcgacgggtatcggcagcagaaggcctacatcgcaacccagggccctctggctgagacaactgaggacttctggcggatgctatgggagcacaatagcacaatcgtcgtgatgctgactaaattgcgagaaatgggcagggaaaagtgtcatcagtattggcctgctgagcgatcggcacggtatcagtactttgtggtggacccaatggcagagtacaatatgccccagtatattctgagggaattcaaagtaactgatgcacgggatggccagtcccgcacagtgcgacagtttcaatttacagactggccagaacaaggcgtgcctaagtccggagagggtttcattgattttatcggtcaggtgcacaagaccaaagagcagttcggtcaagacggcccaatctctgtccattgctccgcaggcgtagggcgaactggagtctttattactcttagcatcgtactggaacgaatgcggtacgaaggcgtggtagacatttttcagactgtcaaaatgctgagaacccagaggcccgcaatggtgcagacagaggaccagtaccagttttcatacagggccgcattggaatacttaggcagttttgatcactatgccactta

SEQ ID NO: 237111 - DNA, 5672 bp, synthetic construct
  misc_feature 1..5672: note = Description of Artificial Sequence: Synthetic coding sequence
  source 1..5672: mol_type = other DNA
atggtgcacgtagcacggctgttactgctgctccttaccttctttctgagaacagatgccgagacccctccacgttttactcgaacccccgtggaccagaccggggtttcaggaggtgtggctagctttatttgccaagccactggagatccgaggccaaagattgtatggaacaaaaagggcaaaaaggtgtccaatcagagattcgaggttatcgagttcgacgatggttcaggtagcgttcttcggatccagcccttaagaactccacgggacgaggccatttatgagtgcgtcgcctcaaataacgttggggaaattagcgtctccacccgactcacggtgctcagagaagatcaaattccccgaggcttccccacgatcgacatgggcccacagctgaaggtcgtggagagaacccgcaccgccactatgctgtgtgctgcctcggggaatcccgaccccgaaattacctggtttaaggacttcctgcccgtcgatacctcaaacaataatggacgcattaagcagctaagatccggcgcacttcagatcgaacagagcgaagagagcgatcagggaaaatatgagtgtgttgctactaacagcgccggtactcgctattccgccccagcaaatctgtatgtgagggtgcggcgtgtgccacctagattctccattccacccactaaccacgagataatgcctggaggttcagtcaatattacttgtgttgcggtggggtccccaatgccatacgtgaagtggatgctcggagctgaagatcttacaccagaagacgatatgccaatcggcagaaacgtactggaactgaacgatgtacggcagagcgccaattatacatgtgtcgcgatgtctactttaggtgtaattgaggcaatcgcccaaattactgtaaaggcccttcccaagcctccgggtactcccgtcgtgaccgagtcaacagctacctccatcacacttacatgggattctgggaaccccgaacccgtctcatattacataatccaacacaagcccaagaacagtgaggagctctacaaggagatcgacggcgtcgcgacgacacggtacagtgtagcgggtctgtccccctactccgactatgagttccgtgttgtcgccgttaacaatatcggcaggggccctccgtccgagcccgtgcttacccaaacaagtgagcaagccccttcttcagcgcctcgagatgtacaggctcggatgctgtcatcaaccacgattctcgtgcagtggaaagaacctgaagaacccaacggccagatacaggggtaccgggtgtactacaccatggatcctacccagcatgtgaacaactggatgaaacacaatgtggccgacagccagattaccaccatcggcaatttagttcctcagaagacttacagcgtcaaggtgctggccttcacttcgattggagacggccctctgtcttccgacatacaggtcattacacagaccggcgtgccagggcagccgttgaactttaaagctgagcccgaatctgaaacctcgatacttctgagctggactcctccacgaagtgacaccatcgccaattacgaactagtctataaggacggcgagcacggcgaagagcagcggatcactattgaaccaggcaccagctataggttgcagggtttgaagccaaattctctgtattacttccgccttgcagccaggtctccccagggactcggggcatcaacagcagagatatcagctaggacgatgcagagcaagccaagcgccccaccccaggacatcagttgtacatctccatcgagcaccagcatcctggtttcctggcagcccccacccgtggagaaacagaacgggatcatcaccgagtactctatcaaatatacggccgtggacggagaggacgataagccgcatgaaattctaggcattccttctgacactacgaaatacttacttgagcagctggaaaaatggactgagtatcgtatcactgtcaccgcccatacagatgtgggcccagggccagagagcctatctgttcttatcaggacgaatgaagacgtcccctctggaccccctcggaaggtcgaagtcgaggccgtaaattccacaagcgttaaagtgtcctggcggagtccagtgcctaataagcaacatggacagattcgcggttatcaggtgcattacgttaggatggagaatggcgagccaaaaggccaacccatgctgaaggacgtgatgctggcggacgcccaagacatgattatatctggcctgcagccagaaacatcctactctctgacagttaccgcctacaccacgaaaggggatggggcaagatctaaacctaaactggtctcgaccaccggcgcagtgccgggtaagcccaggcttgtgatcaatcacacacagatgaatactgccctgattcagtggcacccaccggtcgataccttcggcccactgcagggctatcgcctgaaatttggcagaaaagacatggagcctctcacaacactggagttctccgagaaggaagaccacttcacggccaccgatatccataagggcgcatcttacgttttcagactctcggccagaaataaggttggttttggcgaagaaatggtgaaggagatctcgatccctgaggaagtccccaccggtttcccacagaatttgcacagtgagggaacaaccagcaccagcgtgcaactgagctggcagccacctgtgctggccgagcgtaacggcattataacaaaatatacccttctgtatagagacatcaatattccactgcttcccatggagcaactcattgtgccagccgacaccaccatgaccctgaccgggctgaaacctgacacaacctacgatgtcaaggtgagggctcacacgtccaaggggccaggcccatactctccctctgtgcagtttaggacactgcctgtcgaccaggtcttcgccaaaaacttccatgtcaaggccgtcatgaagacctcggtgttgctctcatgggagatccctgaaaactataatagcgctatgccattcaagatcttgtatgacgacggcaagatggttgaggaagtggatggcagagccacccagaaattgatcgttaatctgaagcctgagaaaagctactcgtttgtcttaaccaatcgaggcaactccgccggtggcctgcaacaccgggtgactgctaaaactgcacctgacgtgcttcgcactaaacccgctttcatcggcaaaacgaacttagacggcatgattaccgtccaactgccagaagtgccagccaacgaaaacatcaaaggatattacattatcattgtccccctaaaaaaatcccgcggaaagttcatcaaaccttgggagagtccggatgaaatggagcttgacgagctactgaaagagatcagccgaaagcgcaggtccatcagatacggcagagaagtcgaattaaaaccctacatcgctgcccattttgacgtactcccaactgagtttacccttggcgacgataagcattacgggggattcaccaacaaacaactgcaatcaggacaggagtatgtgttcttcgtcttggctgtgatggagcatgcagagagcaaaatgtatgcaacctcgccctattccgaccctgtggtgagcatggatctagacccacagcccattaccgatgaagaggaggggctaatctgggttgttggacctgtcctcgccgtggtcttcataatctgcatcgtcatcgctatcttattgtacaagaggaaaagagcagagagtgattctcgtaagagcagcatacccaataacaaggaaataccgagccaccaccctactgatccagtggagctaaggcggcttaattttcaaaccccgggtatggccagccacccacctatccctatcctggaattagccgatcacatcgaacgtctgaaagccaacgataatctcaaatttagccaagaatatgagtctattgaccctggtcaacagttcacttgggagcatagcaatctcgaggtcaacaaacccaaaaacagatacgctaatgtgatcgcctatgaccatagcagggtgctgttgtcggccattgagggcatcccgggatctgactacgtcaacgccaactacattgacggttatcggaagcagaatgcttacattgctacacaggggagcctgcctgagacatttggggacttttggcgcatgatatgggagcagcgatcggctacagttgtcatgatgaccaagctggaagagcggagcagggtgaaatgcgaccagtactggccaagtagagggaccgaaactcacgggctggtacaggtcactcttctggacactgtagaactggccacatactgtgtgcgcaccttcgctctctataagaacggcagcagtgagaaacgggaggtgcgccagttccaattcactgcctggcctgatcatggtgtccccgagcatccgactcccttcctggcatttcttcgccgagtgaaaacttgtaaccctccggatgcgggaccaatggttgtacactgctcagccggtgttggcagaaccgggtgtttcattgtcattgacgccatgttggaaagaattaagcacgagaagaccgtggacatttacggccacgtgacacttatgagggctcagcgcaattacatggtacagacagaggatcagtatatttttattcacgatgccctcctcgaagcagtcacctgtggtaatactgaagttccagcccgtaacctctacgcctatatccagaagctgacccagatagaaaccggagaaaatgtaacaggcatggagctggagttcaagagactagcaagctctaaggctcatacttctcggttcatatcagccaatttaccttgcaataagttcaaaaatagactcgtgaatattatgccatacgaatccacacgtgtatgtctgcaacctatacgcggagttgaggggtccgattacattaatgccagtttcatcgatggatatcggcagcagaaagcatacatcgccacccagggccctctggccgagacaacagaagacttttggcgcatgctttgggagcataacagtacaatagttgtgatgctcacaaaacttagggaaatggggagggaaaagtgtcaccaatattggcctgccgagaggtcagccaggtatcagtattttgttgttgatccaatggcagagtacaacatgccgcaatacattcttagggagtttaaagttacagatgccagggacggccagagccggactgtccgccagtttcagttcacagattggcccgagcagggggtgccaaagtctggagaggggtttattgatttcatcggtcaggtccacaaaactaaggaacagttcggacaggatggccctataagcgtccattgttcagccggagtagggagaactggtgtgtttattacattgagcatcgtgcttgagcgcatgcggtacgaaggggtagtggatatcttccaaacagtgaagatgttaaggactcagcgacctgccatggttcagaccgaggatcagtaccagttttcatatcgagccgctctcgaatatttaggctctttcgaccactacgcaaccta

SEQ ID NO: 237112 - DNA, 5699 bp, synthetic construct
  misc_feature 1..5699: note = Description of Artificial Sequence: Synthetic coding sequence
  source 1..5699: mol_type = other DNA
atggtgcatgtggcacggctcctgctccttctgttgaccttctttctgcgcaccgacgccgagaccccgccaaggttcacaagaacccccgtggaccagaccggcgtgagcggaggagtcgcaagctttatttgtcaggctacaggcgacccgaggcccaaaattgtgtggaataagaaaggcaaaaaggtgtcaaaccaacgtttcgaggtgattgaattcgacgatggcagcggaagtgtgctgcgcatccagcccctgaggacgccacgagacgaggctatttacgagtgcgtcgcctcaaacaacgttggcgaaatctccgtctctaccagattgaccgtgctcagggaagaccagatccctagaggttttccgactatagatatgggtccacagctaaaggtggtggaaaggactcgaacagccactatgctgtgcgctgccagtggaaacccggacccggagatcacatggttcaaggactttctgccagtcgatacctccaataataacggtaggattaaacagctgcgcagcggcgcactccagattgagcagtctgaagagtctgaccagggcaagtatgaatgcgtggccacaaattccgcgggtacacggtatagcgcacctgctaatctttacgtcagagtgcggagggtcccaccccgattctctattcctccgaccaaccatgagattatgcccggaggaagcgttaatatcacatgtgtagccgttggctccccaatgccttacgtaaagtggatgttgggagctgaagatctgacccctgaggatgacatgcctatcggaagaaatgtgctcgaactcaatgacgttaggcaatctgcaaactatacctgtgtggccatgagcacactgggcgtcatcgaagcgattgctcagatcacagtcaaagctctccctaagccgcctgggacccctgtcgtgactgaatccacagccactagcatcacactgacatgggatagtggcaatccagaaccagtcagttactacatcatccaacacaaacccaagaactctgaggagctgtataaggagattgacggcgtggcgactacgagatatagcgtggctggcctcagtccttatagcgactatgaatttagggtcgtggccgtgaacaatattggacggggaccgccaagcgagccagtactcacacagacatccgaacaagccccttcttctgcccctcgggacgttcaggcaagaatgctcagctcaactacgatcctagttcagtggaaggagcccgaagaaccaaatggacagatacaaggatacagagtgtactataccatggatcctacgcagcacgtgaataactggatgaaacataacgtggcggactctcagatcactactattggcaatctcgtgccacagaaaacatattccgtgaaggtactggcatttaccagtatcggagacggacctctgtccagtgacattcaggttattacccagaccggagtgccgggacagcctctaaacttcaaagcggaacccgaaagcgagacctctatactgttaagctggaccccccctcgatctgacactatcgccaattacgagttggtttataaagacggagagcacggtgaggaacagcgcatcacaattgagcccggaactagttacagactccaggggttaaagccaaatagcctttactacttcagactcgccgctaggagtccccaagggttgggggcatccactgcggagatatccgccaggactatgcagagtaaaccttcagccccaccccaggacatctcttgcacttctccaagcagtacaagcatactcgtttcctggcaaccacctccagttgaaaaacagaatggcattattacggagtattccatcaagtataccgccgttgacggggaagatgacaaacctcacgagattttaggaatccctagtgatacgactaagtatctgctggaacaactggaaaaatggactgaatatcgcatcacggttacagcacatactgacgtgggacccggacccgagagcctgtccgttctcatccggaccaacgaagatgtgccctccggtcctccacgcaaagtggaggtggaggctgtcaattccacgtccgtgaaggtatcctggagatctccagtgcctaacaagcaacatggccagattcgcggataccaggtgcattatgttagaatggaaaatggagagccgaagggtcagcctatgctgaaggacgtgatgcttgcagacgcacagtgggaatttgatgatacaactgaacacgacatgataatttcaggactgcaacccgaaacatcttatagccttaccgtgactgcctacacaaccaaaggtgatggtgcccgttccaagcccaaacttgtgagtacaaccggggctgtcccaggcaaaccaagactggttattaatcacactcagatgaatacagctcttattcaatggcaccccccagtggacacttttggacctctgcaggggtacagactaaagtttggtcgaaaagacatggaacctcttacaactttagaattcagtgagaaggaggatcacttcaccgcaaccgacatacacaaaggagcttcgtatgtattcaggttgagcgctagaaacaaagtgggtttcggggaagaaatggtcaaggaaataagcattccggaggaggtccctaccgggtttcctcagaatctgcactccgaaggcacaaccagtaccagtgtccagctgagctggcagcccccagttcttgcagagaggaacggcataattacaaaatatacgttgttgtatagggacatcaacatcccactgctacccatggaacagttgatcgtgcctgcagacaccactatgaccctaactggattaaaacccgacaccacctatgacgtgaaggtccgggctcacacctctaagggacctggcccatattcaccaagcgtgcagttcaggacactgccagtagatcaagtgtttgccaagaattttcacgtgaaagcagtgatgaaaacctccgtgttactgtcttgggaaattccagaaaattataattctgcaatgccctttaagatcctgtatgatgatggcaagatggttgaagaagtagatggccgagccacccagaaactaattgtcaacctgaagccagagaaatcttactcctttgtgcttacgaataggggcaattcagcgggagggcttcagcatagggtgaccgctaagaccgcaccggacgtcttgcggactaaacccgcattcataggcaagacaaacctggacggcatgattaccgtccagctccccgaggtgcctgcaaatgagaatattaaggggtactacataataatcgtgcccctgaaaaagtcccgaggaaaatttataaagccttgggaaagtcctgatgaaatggaactcgatgaactgcttaaggaaatctcccgtaagagaaggagcattcggtatggtcgagaagtggagttgaagccttacattgcagctcacttcgatgttctgcctacagagttcactctcggcgatgataaacattatggtggttttacgaacaaacagctccaatctgggcaggagtacgtcttcttcgtgctggcagtcatggaacatgccgagagcaaaatgtatgcgactagcccttacagcgacccggtggtgagcatggacctcgaccctcagccaattaccgacgaggaggagggcctaatctgggtcgttggccctgtgctggctgtcgtgttcattatttgcatcgttatagccattttactgtacaagagaaagagggctgagtccgattctcggaagtcgagtatcccaaataacaaagaaatcccaagtcaccatcctaccgatcctgtcgaactcaggcggttaaactttcagacacctggtatggcctcgcatcccccaatcccaatcctcgagttagcagatcatatagagcgcctgaaggccaacgataatttaaagttcagtcaagagtacgagtccattgaccctggtcagcagtttacttgggagcactctaatctggaggttaacaagccgaaaaaccggtatgcgaatgtgatagcatatgaccacagccgagtgctccttagcgcaatcgaagggattcccggatccgactatgtgaacgctaactatatcgacggctatcggaaacaaaatgcgtatatcgctacacagggctcgttaccagagactttcggggatttctggagaatgatttgggaacagaggtcagctactgtggtgatgatgacaaaactcgaagaaagaagccgggtgaagtgcgaccaatactggccatcgcggggtaccgagacacacggccttgtgcaagtgacgctcctcgacaccgtggagctggctacctattgcgtgcgaacttttgccctatacaagaatgggtcatctgagaagagggaggtccgacagtttcagttcaccgcctggcccgaccacggggtgccggagcaccccactccatttctggcgtttctgcgcagggtcaagacctgtaatccccctgacgctggacccatggttgtgcattgttcggctggtgtggggagaactggctgcttcattgtgatcgatgccatgcttgaaaggatcaagcatgaaaagactgtagacatctacggccacgttaccctgatgagagcccagcgcaattacatggtgcagactgaggaccaatatatatttatccacgacgccttactcgaggcggtaacatgcggcaacacggaggtgcctgctagaaatttgtatgcctacattcagaaattaactcagatcgaaacaggagagaatgtaacaggcatggagctggagtttaagcgccttgcctcctcaaaggcccacaccagccggttcatcagtgccaatctgccatgcaataagttcaagaaccggctggtcaacatcatgccctatgaatcgactagagtttgtctgcagcctatacggggtgtcgaggggagcgactacattaacgccagttttatagatggataccgccaacagaaggcatacatagcaacccagggcccacttgccgagacgactgaggatttttggcgaatgttatgggagcacaattccacgatcgtggtgatgctaaccaagctacgtgaaatggggcgagagaaatgccaccagtattggcctgctgagaggtcagcccgataccagtacttcgttgtcgaccccatggccgagtacaatatgccccagtacattcttcgcgagtttaaggttacagatgcccgagatgggcaatccagaactgtgagacagttccagttcaccgattggcccgagcagggcgtgccaaagagcggcgaagggttcattgattttatcgggcaagtgcacaagactaaggaacagtttggccaggacggcccaattagtgttcattgtagcgctggggtgggcaggacaggagtgttcattacccttagcatagtgctggagaggatgcggtatgagggagtcgtggatatttttcagacggtcaagatgctccgaactcaaaggccagcgatggttcaaaccgaggatcagtatcaattcagctatagggcagccttagagtacttggggagtttcgatcattatgctacata

SEQ ID NO: 237113 - DNA, 5738 bp, synthetic construct
  misc_feature 1..5738: note = Description of Artificial Sequence: Synthetic coding sequence
  source 1..5738: mol_type = other DNA
atggtccacgtagcgagacttctgctgctgcttcttaccttctttctacggactgatgccgagactcctcccagattcacacgaacaccggttgaccaaaccggcgtatccggaggtgtcgccagtttcatctgccaggcaactggcgatcctagacccaagatcgtgtggaacaaaaagggtaagaaagtctcgaaccagcgattcgaagtgatcgagttcgatgacggttcagggtccgttctgcgcatccagcccctccgtacacccagggatgaggctatatacgaatgtgttgccagcaacaacgtcggggagatcagcgtctccacgagattgactgtactgagggaggatcagattccacggggtttcccaacaatagacatggggcctcagcttaaggttgttgagagaacaaggaccgccaccatgttatgcgctgccagcggaaatcctgaccccgagattacatggtttaaagactttcttcccgtggatacttcgaataataatgggcgtataaagcagctgagatctgagagcattgggggtactccaatccggggtgctctgcagattgagcagtcagaagaaagtgatcaaggtaaatatgaatgtgtggcgacaaattctgcaggcacgcggtactccgcccctgcaaatttatatgtgagggagttgcgggaggtacggagagtccccccacgcttctctattcctccaacaaaccacgagatcatgcctggagggtccgtaaacatcacctgcgttgcagtgggatctccaatgccatacgttaagtggatgcttggagctgaagatctgacacccgaggatgatatgccaataggccgtaatgtgttggagctcaatgatgtccggcagtctgccaattacacatgcgtggcaatgagcacactgggagtcatcgaagccattgctcagattaccgtgaaggctctgccaaagccccctggtacacctgtggtgaccgaatcaaccgcgacgagcattacgctcacatgggactctgggaatccagagcccgtctcttattatatcattcagcacaagcctaaaaattccgaggaactttacaaagagatcgatggcgtcgctactactagatacagcgtagcgggactctcaccttacagcgactacgaattccgggtggtcgcagtgaacaacatcggcagaggaccaccttcagagccagtgcttacacaaacttcagaacaggctccgagctccgcaccacgtgatgtacaagcgaggatgctgagcagcaccacaatcctcgtacagtggaaggagccagaagaacctaatggtcaaattcaagggtacagagtgtactacactatggatccaactcagcatgtgaacaattggatgaaacataatgtggccgattctcaaatcactactatagggaacttggtgccccagaagacctattccgtgaaagtcctcgcattcaccagtatcggggatgggcctctgtcatctgacattcaggtcatcacccaaacaggggtgcccggacagcctttaaattttaaggccgagcccgaaagcgaaaccagcatccttctgagctggactcctccacggtccgatactatagctaactacgagctcgtctataaggacggtgagcatggcgaagagcagagaatcacaattgaaccaggtactagttacaggctgcaaggcctgaagcccaattctctgtactactttcgcttggctgcccgaagcccgcagggcctgggcgctagtactgctgaaattagtgcgcgaacaatgcagtcaaaaccgtctgctcccccacaggacatcagttgtacctcgcccagctcaacgagtattctcgtcagttggcagccccctccagtcgaaaaacagaatggtattatcacagagtactctataaaatacacggctgtcgacggagaagatgacaaacctcatgagatattgggcattccatctgatactactaagtacctgttggaacaacttgagaaatggactgaatacaggattaccgtaaccgcccacaccgatgtgggcccagggcctgaatcactgagcgttttgatccggacaaacgaggatgtgcctagcggccctcccagaaaggtggaggtggaagcagtaaacagtacgtctgtgaaggtgtcctggcgctccccggtgcccaataagcagcacggccagatccggggatatcaggtgcactacgtgagaatggagaatggcgagccaaagggtcaaccaatgctgaaagacgtaatgctggcagacgcacaatgggaatttgacgacacgacagaacacgatatgattatatcggggctgcagcccgagactagttatagtcttacagttactgcctacacaacaaaaggggatggagcaagaagtaagccgaagcttgtatctacgacgggagcggtaccaggcaaacctaggctcgtcattaaccatacccagatgaacacggcactcatacagtggcacccacctgtggacacatttggcccattgcaagggtatcgcctgaaattcggaagaaaggatatggaaccacttacaactttagaattttctgaaaaggaagatcactttactgccacagatattcacaaaggagctagctacgtgttccgcctcagcgcaaggaacaaagtgggattcggggaagaaatggtaaaggaaatctccattcctgaagaggtcccaaccggctttccacagaatctgcatagcgagggtaccaccagcacatcagtgcaactgtcttggcaaccgcctgtcctggccgaacgaaacgggatcatcaccaagtacacactcctataccgagatatcaatatccctctcctgccaatggagcagctgatcgtgccagcggacaccacaatgactctgaccggactgaaacctgacaccacttacgatgtgaaagtacgagctcacacttctaaaggccctggtccatatagtccctccgtgcagttcagaaccctccccgtcgatcaggtgttcgcgaaaaactttcacgtgaaggccgtgatgaaaacctcagtgctgctaagttgggaaatccccgagaactacaattccgccatgccctttaaaatcctgtacgacgatggaaagatggtcgaagaagtggacgggagggcaacacagaaactcattgtcaatctcaaacctgagaaaagctattctttcgtgcttacaaatcggggaaacagcgccggagggctccagcaccgagtcaccgccaaaacagcgccagatgtcctgcgtactaaaccagccttcatcggtaaaactaatttggacggcatgattactgtgcaactgcctgaggttcccgctaatgaaaatatcaaaggctattacatcatcatcgtgcctcttaagaagtctaggggcaagttcattaagccttgggagtcccccgatgagatggagttagacgagctgcttaaagaaatcagccggaagcgaaggtccatccgctacgggcgagaagtagagctcaagccttacattgcagcccactttgacgtcctccccaccgaattcactctgggcgacgataagcactatgggggattcacaaataaacagctgcaatccggccaggagtatgtcttcttcgtgctggccgtgatggaacatgctgagtccaaaatgtatgccacatccccttattccgacccagtagtgtccatggacctggatccccagcctattaccgacgaagaagagggacttatctgggttgtggggccagtgctcgcggtggtatttattatatgcatcgtgattgctatcctgctgtacaagagaaagagggccgagagtgattcacgcaaaagttctatcccaaacaacaaagagattcctagtcaccatcccacagacccggtagagctcaggcgactgaatttccaaactcctgggatggcctcccatccaccaatcccgattctggagctagcagatcatatagagcgactcaaagcgaacgacaacctaaaattttcacaggagtacgagtctatagacccaggccagcagttcacttgggagcatagcaaccttgaggttaacaaaccaaagaataggtacgccaacgtgattgcgtacgatcatagcagggtgctactcagcgccattgaaggaattccagggtccgactatgtgaatgcaaattatattgatgggtacagaaagcagaatgcttatatagccacccagggatctctgccggagacatttggagacttctggaggatgatatgggagcagcggtccgccacagttgtcatgatgaccaaactcgaagaacgctcgagggtgaaatgtgaccaatattggccatccagggggaccgaaactcatggcctcgtacaggtcaccttactggacaccgttgagctggctacttactgcgttaggacttttgcactgtacaaaaatggctcctccgaaaaaagagaggttcgtcaatttcagtttactgcttggcccgaccacggcgttcctgaacaccctacgccctttttagccttccttcgtagggtgaaaacctgtaatccccctgacgccggacccatggtggtgcactgctccgccggagttggcaggaccggctgcttcatcgttatcgacgcaatgctcgagcgtataaaacacgagaaaacggtcgatatctatggtcacgtcactctgatgagggcacagagaaactatatggttcagaccgaagatcagtacatatttatccatgacgctctgctggaggccgtcacttgtggcaacacggaggtgcctgctagaaatttgtatgcatacattcaaaaattgacacagattgagacaggagagaatgttacaggcatggagttggagtttaagcggctggccagttccaaagcgcacacgtctagatttataagtgccaatttaccttgcaacaaattcaagaatagactggtgaatattatgccttacgagagcacgcgagtgtgtctgcagcctatcaggggcgtggaaggttcagattacattaacgcaagcttcatcgacgggtatcggcagcagaaggcatacattgccacccaaggtcccctggctgagaccaccgaggatttctggcggatgctgtgggagcacaatagcacaatagtcgtcatgctgactaagctgagggaaatggggagggagaaatgtcatcagtactggcctgccgagcggagcgccagataccaatatttcgtcgtagatcctatggccgagtacaatatgcctcagtatatcctgcgggagttcaaagtaactgacgccagagacggtcagagtcgcactgttcggcagttccagtttactgactggccagagcagggcgtgcctaagagcggcgaaggctttatcgatttcataggccaggtacataaaaccaaagagcagttcggccaagatgggccaatttcggtacattgctcggccggagtaggccgtacaggggtatttatcactttgtccatcgtgcttgagcgcatgaggtacgagggagtcgtcgacatctttcaaaccgtgaagatgctgcgtacccagcgtcccgctatggtgcaaacagaggatcaatatcaattttcctatcgggctgccctggagtacttgggctcgttcgaccactatgcgactta

SEQ ID NO: 237114 - DNA, 4509 bp, synthetic construct
  misc_feature 1..4509: note = Description of Artificial Sequence: Synthetic coding sequence
  source 1..4509: mol_type = other DNA
atggtgcacgtcgctagactgctgctcttgcttctgactttttttctgagaactgatgcggagacaccgcctagattcacacgtactccggtggatcaaaccggcgtctccggtggcgtggcctcttttatctgtcaggcaacaggtgaccccagaccgaaaatagtgtggaacaaaaaaggcaaaaaggtgagcaatcaaaggttcgaggtgatcgagtttgatgatgggtccggctcagtgctcagaatccagccactacggaccccacgcgacgaggctatctatgagtgcgtggcctccaacaatgttggagagatcagcgtgagcacacggctgaccgtcctccgagaggatcagataccaagaggctttccaacaatcgacatgggaccacaactcaaagtggtggagcggactagaaccgcaaccatgctctgcgctgcgagtggaaatccggaccccgaaataacctggtttaaagactttctccccgtcgacacctccaacaacaacggccgaatcaagcaattaagaagcgggggaactcctattagaggagcgcttcaaatcgagcagtccgaagagagcgatcagggaaaatatgagtgcgtggccaccaactccgccggtacccgttactcagcacccgcaaacctctatgtgcgggagctacgagaggtgagaagggtgcctccgaggttctccattcccccaaccaaccacgagatcatgcctggcggttctgttaacattacatgtgtggcagtaggctctccaatgccctatgtgaaatggatgctgggcgctgaagacctcacgccagaagatgacatgccaattggccgaaacgtccttgaactgaacgacgtgagacagtccgcaaactatacatgtgttgccatgagcacacttggagtgatcgaagccattgcacagatcacagtcaaagccctacccaaacctccagggaccccagtcgtcacagagtcaaccgccaccagcataaccctcacatgggactctggaaaccccgagcctgtatcctactatatcatccagcacaaacccaagaatagtgaggaactttataaagagattgacggagtggctactactcgctatagcgtggctggtttgtcgccctatagcgactatgaattccgcgtcgtggcggtgaacaatattggacgcggacctccgtccgagcctgtgttgacacaaacttctgaacaggctcctagctctgcccctcgagatgtgcaggcacgcatgctgtcatcgacgaccatactggttcaatggaaggaacctgaagagcctaacgggcagatccaaggatatcgcgtgtactacaccatggatccgacacaacacgtcaataactggatgaagcacaacgtggctgactcgcagatcaccactatcggcaatctggtgccccagaaaacttactctgttaaggtgctcgcctttactagcatcggggacggtcctctttccagcgacatacaggtcattacacagacgggtgtgcccggtcagcccttgaatttcaaagcggaacctgagagcgagacttctattcttctgagctggacaccaccccgatccgacacgatcgccaactatgagctcgtgtataaagacggcgagcacggtgaggagcaacggattactatcgaacccggtacctcttatcgtcttcaaggcctcaagcctaactctctttactactttagactcgccgcaaggagccctcagggactcggtgcaagtaccgctgagatctccgcacgtactatgcaaagcatgttcgctaagaatttccatgtaaaagcagtgatgaagacgtctgttctgttgtcttgggaaatcccggagaactataactctgcaatgccctttaagatcctctacgatgatggaaaaatggtagaagaggtggatgggagggcgacccagaaactgattgtcaacctgaaacccgaaaagtcctactccttcgtcctgaccaaccgaggtaacagcgccggagggctgcaacaccgtgtgacggctaaaactgcgcctgatgtgctgcgcactaagccagccttcatcgggaaaaccaatctggatggtatgattaccgttcagctgcccgaggtgcccgcaaatgaaaacatcaaaggttactatataattattgttcctctgaagaagagccggggaaagttcattaagccatgggaatcccccgacgaaatggagctggatgagctgctcaaggagatcagcagaaagagaaggtccattcgctacggacgggaagtcgaacttaagccctacatcgccgcacacttcgacgtgttacccactgagtttactctgggtgatgataagcactatgggggtttcactaacaagcagctgcaatctggccaggagtatgtattcttcgtcctggcggtcatggagcacgctgaaagcaagatgtatgcaacgtccccctatagcgacccagtcgtatccatggacctggatcctcagcccatcaccgatgaggaggaaggcttgatttgggtggttggcccagtgctggccgtggtgttcatcatctgtattgtcatagctatccttttgtataaaagtaaacccgaccgtaagcgtgctgagagcgactctagaaaatcaagcatccctaataataaggaaattccctcacatcatccaactgatcccgtcgagttgaggcgcctgaatttccaaacaccgggaatggcttcacatcctcctatccctatcctcgaactcgccgaccatattgagcgccttaaagccaacgataatttgaagttcagtcaggagtacgaaagtatcgaccctgggcagcaattcacctgggagcactcaaacctggaggttaacaaacccaagaatcgatacgccaacgtaatcgcatacgatcactccagggtgttactgagtgctatcgaaggcatccctgggtctgactacgtgaatgctaattatatagatggttatcgcaagcagaacgcctacatcgcgacccagggctcccttcctgaaacctttggagacttttggcgcatgatctgggagcagcgtagcgccactgtggttatgatgaccaagctggaagaaaggagtcgtgtaaagtgtgatcagtactggccgtcacgcggaactgaaacacacggactcgtgcaggtgaccctgctggatactgttgaactggctacgtattgcgtgagaacattcgctttgtataaaaatggcagtagcgagaaacgggaggtgcggcagttccagttcaccgcttggccagatcacggagtgcccgagcatccgacgcctttcctcgcttttctgaggagagtcaagacatgtaatcctcccgacgctggtcccatggtggtgcactgctccgctggagttggacggactggatgttttattgtcatcgatgccatgctcgagcgaataaaacacgagaaaactgtggacatctatggtcacgtgactctcatgcgcgctcagcgtaattacatggtgcagacggaagaccaatacatttttatccacgacgcactgctggaggcagtaacgtgcggtaataccgaggtgccagctaggaacctctacgcgtatattcagaagcttacccagatcgagacaggggagaacgttaccggtatggagttagagttcaaacgcttggcatccagcaaggcccacacgagccgcttcatcagtgcaaacctgccgtgtaataagttcaagaaccggcttgtgaacatcatgccttacgaatccacacgggtgtgcctccagcctataagaggagtggaagggtccgattacattaatgcctcttttatagatggatatcgacagcagaaagcttacattgcgactcagggacccctcgcagagacaactgaggatttttggcgtatgctgtgggagcataattctactattgttgttatgttgacaaaacttcgcgagatgggacgggagaaatgccatcaatactggcccgcagagagatcggctaggtaccaatacttcgttgtggaccccatggccgaatacaacatgccccagtacatcctccgggagtttaaagtaactgatgccagggatggacagtcccgaactgtgcgccagttccaatttaccgattggcccgagcaaggtgtccccaaatctggagagggctttattgatttcatcggacaagttcacaaaacaaaggaacagtttggtcaggacgggccaatcagcgtccattgtagcgcaggagtggggagaacaggtgtctttatcactttaagcattgtgctggaacgcatgcgctacgaaggcgtcgtggacatcttccaaactgtaaaaatgctgaggactcagagacctgcgatggtgcagaccgaggaccagtaccaattttcatatcgagccgcactggaatatctcggctccttcgaccactatgcgacatag

SEQ ID NO: 237115 - DNA, 4518 bp, synthetic construct
  misc_feature 1..4518: note = Description of Artificial Sequence: Synthetic coding sequence
  source 1..4518: mol_type = other DNA
atggtgcatgtcgccagacttctgctgctcctccttacattctttttaagaaccgatgcggaaaccccaccgaggtttactcgtacgccagtggatcagactggcgtgtccggcggtgttgcatcattcatctgtcaggctacgggcgatccccgtcccaagattgtgtggaataagaaaggcaagaaggtatccaaccagcgatttgaagtgatcgaattcgacgatggatctggaagcgttctccgaatacagcccctacgcacacctagggacgaggctatctacgaatgcgtagctagcaataatgtgggtgagatctcggtgagtacgcggctgaccgtgctgcgggaggaccagatacccaggggtttccctacgattgatatgggtccacagctgaaggtggtcgagcgaacaaggaccgcgactatgctctgcgctgcaagcggtaacccagaccccgaaatcacttggttcaaggatttcctgccggttgatacgtccaataataatggaaggattaagcaactgcgaagtgtgagtatcggggctctgcagatcgagcaatctgaggaatcggatcaggggaagtatgagtgcgtcgcgaccaacagtgccggaaccaggtactctgctcccgcaaacctgtatgtcagagttagaagagtgcctcccagattcagtattcctcctacgaaccatgagattatgccaggcggatccgtcaatatcacttgcgtagccgtgggcagccccatgccctatgtaaaatggatgctgggcgctgaagacctcacccccgaagatgacatgcctatcggacgcaatgtgctggagctgaatgacgtgcggcagagcgccaattatacgtgcgtagctatgtcaactcttggcgtgatagaggcaatcgcccagataactgtcaaagcactgcctaagccgcctggaaccccggtggttacagagagcaccgcgacaagcatcacattaacatgggactctggaaatcctgagcccgtgtcttactacattatccaacataaacctaagaactctgaagagctctacaaggagatcgacggagttgccactacaaggtactctgtggccggtctcagcccctacagcgattacgaattcagagtggtagcagtgaataatattggtcgaggcccaccaagtgagcccgttctgacccagacgtctgagcaagctccaagctcagctccaagagacgttcaggctagaatgctaagtagtacgaccatactggtgcagtggaaagagcccgaggagcctaatggtcaaatccaggggtacagggtgtactacactatggatcctacacaacatgtcaacaattggatgaaacacaatgtggcagattctcaaatcaccacgatcgggaatttggtcccccaaaagacgtattctgtcaaagtgctggcgttcacaagtattggcgacggacccctgagtagcgatattcaggttattactcagacaggggtgcccggacagcccctgaatttcaaagccgaacctgagagcgagacttctatcctgttatcatggacaccaccccgtagcgacaccattgctaactatgagctcgtatacaaggacggggagcatggcgaggaacagcgaatcaccattgaaccagggactagctatagattgcaggggctgaaacccaatagcctgtattactttcggctcgcagccaggtctccacaggggttaggcgcatcaactgccgaaatatcagccaggacaatgcagtctatgtttgcgaaaaattttcacgtgaaggctgtgatgaaaacttctgtcctcttaagctgggaaattccagagaattataatagtgccatgccattcaaaatcctatatgacgacggcaaaatggtcgaagaggtcgatggaagagcaactcagaaattgatcgtcaatttgaagcccgaaaagtcttattccttcgtactgacgaataggggcaattcagctgggggactacaacacagagtcaccgctaagactgctccggatgtcctgcggacaaagcccgcatttattggcaaaaccaacctggatggcatgattaccgtccagttaccagaggtgccagccaatgaaaatattaagggatactatatcatcatcgttcccctgaaaaagtctagagggaagttcatcaagccatgggaaagccccgatgaaatggagttggatgagttgctgaaagagatttcgcgcaaaagacgatccatcaggtacggcagagaagtcgaactgaagccttacatcgccgcacacttcgatgtgctgcctacagagtttacattgggtgatgataagcactatgggggtttcacaaataaacaactacagagcggccaggaatacgtgttctttgtgttggcggtgatggagcatgccgaaagcaaaatgtacgctacgtccccttattccgatcccgtagttagtatggacttagacccacaacctattacagatgaggaagaggggctcatctgggtggttggaccagtgctagccgtcgtgttcatcatatgtatcgtcatcgcgatattgttgtataaaagaaaacgcgctgagtccgactcacggaaatctagcatacccaacaacaaggagatccctagccaccacccaactgatccggtggaattgcggagattgaacttccagacccccggttctgatgatagtggataccccggaaatcttcactcttcatctatggcctctcaccctcctattccaattctcgaactggctgaccacattgagaggctcaaggccaatgataatttgaagttcagtcaagagtacgagtctatcgaccccggacagcagtttacttgggaacattcaaacctcgaagtaaataagcccaagaatcgctatgccaacgtcatcgcgtacgatcattctagagtgctcctcagcgccatagaggggatcccaggatccgactacgtaaacgcaaactatatagatgggtataggaaacagaacgcatacatcgccacccaggggtccctgcctgagaccttcggcgatttctggcgcatgatttgggagcagaggtccgctaccgtcgtcatgatgaccaagctcgaggaaagaagccgtgtaaagtgtgatcaatactggcctagtagaggcacagaaacacacggcctggtacaggtcactctcctcgacaccgtggaactcgccacctactgcgttcgaactttcgccctgtacaagaacggaagttccgaaaagcgcgaagtgcgccagttccaatttacggcgtggcccgaccacggcgtccccgagcacccgactccctttctggcgtttctccgcagagtgaagacctgcaacccacccgatgctggtcctatggtggttcattgttctgccggagtgggccgaaccggatgctttatagttattgacgccatgcttgagcgtatcaagcatgaaaaaactgtggatatttatggtcacgtgaccctcatgagagcacaaagaaattatatggttcaaacggaagatcagtacatcttcatccatgacgccctgttagaggccgttacctgcggcaatactgaggtccccgcaagaaatctttacgcatatatccaaaagttgactcaaatcgaaaccggagagaatgtcacaggtatggaattggagttcaagagattggcctccagtaaagcccacaccagccgatttatatcggcaaatctgccctgcaacaaatttaaaaacaggctggtgaatattatgccctatgaatccacccgggtctgtctacaacctattagaggcgtggaaggttccgattacatcaatgcttccttcatagatggttatagacagcagaaagcatacattgcgacgcagggccctctggccgagacaacagaagacttctggcggatgctctgggaacacaacagcacaattgtcgtcatgttaaccaaattacgcgagatgggacgcgagaagtgccaccagtattggcctgctgaacgcagtgcccgataccagtattttgtagttgatccaatggctgagtacaatatgcctcagtacatccttcgggagttcaaggtcactgatgcaagggacggccagtcacgcacagttcggcagtttcagtttaccgattggcctgaacagggggtgccaaagtcaggggagggttttatcgacttcattgggcaggtgcacaagactaaggagcagttcggccaagatggtcccatctccgtgcattgctctgctggggtcgggagaaccggggtgttcattactctcagtatcgtcctggagcggatgcgatacgagggcgtcgtggatattttccagacagttaagatgctgcgtactcaaaggccagcaatggtgcaaactgaggatcagtaccaattctcttatagagctgctcttgaatatctgggaagctttgatcactatgctacttag

SEQ ID NO: 237116 - DNA, 282 bp, synthetic construct
  misc_feature 1..282: note = Description of Artificial Sequence: Synthetic coding sequence
  source 1..282: mol_type = other DNA
atggtccacgtggcacgtctcctcctgctgctgctgacctttttccttcgaaccgacgccgaaaccccgcctagattcaccagaaccccggttgatcagaccggtgtgtcagggggagttgccagtttcatttgtcaggccacgggcgatccacgcccaaaaattgtatggaataagaagggcaagaaggtaagtaaccaacggtttgaagtcatcgagtttgacgacggcagtggctccgtgcttagaattcagcccctgaggaccccccgtgatgaatag

SEQ ID NO: 237117 - DNA, 4518 bp, synthetic construct
  misc_feature 1..4518: note = Description of Artificial Sequence: Synthetic coding sequence
  source 1..4518: mol_type = other DNA
atggtccatgttgcaagacttctcctgttgcttctcactttcttcttaagaactgatgcagaaacgccgccacgattcacaaggacccccgtagaccagactggcgtttccgggggagtagcctcctttatctgccaagccacaggcgatccacgccctaaaatcgtgtggaacaagaagggcaaaaaggtctccaaccaacgatttgaagtaattgaatttgatgacgggtctggaagcgttctgagaatccaaccactccgaacccctagagacgaggccatttacgaatgcgttgcctctaataatgttggagaaatctctgtcagcacaaggctaacagtgcttcgcgaggaccaaattccgcgagggtttccaaccatagacatggggcctcagctgaaagtggtggaaagaacccgcaccgctaccatgctatgcgctgcaagcggtaaccccgatcctgaaatcacgtggttcaaagattttctaccagttgacacttccaataacaatgggagaatcaagcagttgcgcagcgaaagcattggaggaacacccatacgcggtgcgctgcagatagagcagtccgaggagtcagatcaaggcaagtatgagtgtgtcgccacaaactccgccggtactcggtactcagcaccagccaatctttacgtaagagaactcagagaagtcagacgggtgcctccgaggtttagtattccgccaactaaccacgagataatgccaggcggttccgtcaacattacgtgcgtcgccgttggaagcccgatgccatacgtaaaatggatgctgggggctgaagatctcacgcccgaagacgatatgccaatcggacggaatgtcttggagctgaacgacgtaagacagtcagctaactacacctgcgtagcaatgtctaccctgggagtgattgaagctatcgcccaaattacagtgaaagccctgcccaaaccccctggaacccctgttgtgaccgaatctacggcgacttccatcactttgacgtgggacagcggaaatcccgaaccagtctcctactatattatacagcacaagcccaaaaattccgaagagttgtacaaggagattgacggggtcgccacaactcggtatagcgtggccggtctctccccttactcagattacgagttccgcgtcgtggccgtgaataacattggcagagggcctccttccgagccagttctgacccagacctccgagcaggctccctcctcagccccaagggacgtacaagcgcgtatgctgagttctacgaccattctagtgcaatggaaagagcccgaggaaccgaacggccagattcaaggatatcgggtctattacactatggatcctacgcagcatgtgaataactggatgaagcacaacgttgccgacagccagataaccactattggcaatctcgtcccgcagaaaacctactcagttaaggtcctcgcatttacctcgataggtgacggacctttatcctcggacattcaggtcattacccagacgggcgtccctggacagccccttaactttaaggccgaaccagagtctgaaactagcattctgctgtcatggacaccacccagatctgataccatcgctaattatgaactggtctataaggatggcgaacacggggaggaacagcgcataacaatcgaacctggcacctcataccgtttacaggggctgaaaccgaatagtctctactactttcggctggcagccaggagtcctcagggactgggcgcaagcaccgccgaaattagcgccagaaccatgcagtcaatgtttgctaaaaacttccacgtaaaagcagtgatgaagacctcggtgctgctcagttgggagatcccagagaattataattcggcaatgccatttaaaattctgtatgacgacgggaagatggtcgaggaagtagacggacgagccacccagaagttgattgtgaacctgaagccagagaagtcatactcatttgtcctcactaacaggggtaactctgccggtggactgcaacaccgggtgaccgccaagactgcacccgacgtcttgcgtaccaagcctgcgttcatcggtaagaccaaccttgatggtatgatcaccgtgcaactgccagaagtacctgccaatgagaacataaagggttactacatcataatcgtccctctcaagaaaagcagggggaagttcataaagccatgggagtcccctgatgagatggaactcgatgaactcctcaaagaaattagccggaaacggcgttcgatccggtacgggagggaagtggagctgaaaccatacattgccgcacatttcgacgtgcttccaactgaatttacgctgggtgacgataaacattacggtggtttcaccaacaaacaactccagtcaggtcaggaatacgtgttcttcgttctggcggtcatggaacacgcggaatcaaaaatgtatgccacatctccatactctgatcctgtagtcagtatggatcttgatccccagccgatcaccgatgaagaggaggggttgatttgggtggtcgggccagtactggcggtggtattcataatttgtatcgtgatcgcaatcctcctgtacaagagcaagccagatcggaagcgggctgagtctgattcaagaaaatcgagcatcccaaacaacaaagagattccttctcaccacccaactgacccggtggaattgcgaagactgaacttccagactcctgggatggcctcccaccctcctattccgatccttgagctggcagaccacatcgagcgcctgaaggccaacgataatctgaaattttcccaagagtacgagagtatagacccaggacagcaattcacatgggagcattcaaacctcgaggtgaacaaacccaagaataggtacgccaacgtcattgcctacgatcattcacgggtccttctctccgctattgagggtattcccggatccgattatgtcaacgcaaactacatcgatggctatcggaagcagaatgcatatatagcaacccagggaagcctgccagaaactttcggtgacttctggcgcatgatttgggagcagaggtctgcaactgtggtgatgatgaccaaacttgaggaacgtagccgagtgaaatgtgaccaatattggccttcgcggggaactgaaacgcatggcctagttcaggtgaccctcttggatactgtggaattagcaacgtactgtgtccgtacatttgctctgtacaagaatgggagcagtgaaaagcgagaggtaaggcagtttcagttcacagcctggcccgatcacggtgttcccgagcatccaacaccattcctagccttcctccgcagggttaagacatgtaaccctcccgacgccggacctatggtcgtgcattgcagtgctggcgttgggaggactggttgtttcatcgtaatcgacgcaatgctggaacgcatcaagcatgagaagacagtcgacatctatggccatgttaccctgatgagagcccagcgtaattacatggttcagaccgaagatcagtacatttttatccacgatgccctgcttgaagcagtgacctgtggaaacacagaggtgccggcaaggaacttatacgcctacatccagaagttgacacaaattgagacaggcgagaatgtgaccgggatggagttggaattcaagaggctggcctcctccaaagctcatacttccagatttatcagcgccaacctgccctgcaacaaattcaagaatagattagtgaatatcatgccatacgagtccactagagtctgtcttcagcctatccggggagttgaaggctccgactacatcaatgccagcttcatcgatggttatagacagcagaaagcctatattgcgacccaggggccacttgctgaaacaaccgaggatttttggagaatgttatgggagcacaatagcacaatcgtggtaatgctgaccaaactgcgggaaatgggtagggagaaatgccaccagtactggcccgcagaaagaagtgcacgataccagtactttgtggtggaccccatggccgagtataacatgccccagtacatcctgcgcgaattcaaagttaccgatgcgagggacggacagagtaggactgtgagacagttccagttcaccgattggcctgagcaaggggtcccaaagagcggcgagggatttatcgattttatcggacaggtccataagaccaaggagcagttcggacaggatggccctatctcagtccattgtagcgccggagtgggcaggacaggcgtttttattaccctgagcattgtacttgagagaatgagatacgagggagtggtggatatctttcagacagtcaagatgcttcgaacccagaggcctgctatggtacagacagaagaccaatatcagttctcatatcgcgctgctctggaatacctgggaagctttgaccattacgcaacttag

SEQ ID NO: 237118 - DNA, 4509 bp, synthetic construct
  misc_feature 1..4509: note = Description of Artificial Sequence: Synthetic coding sequence
  source 1..4509: mol_type = other DNA
atggtgcatgtggcaaggttgctgctgcttctcctgaccttctttctccgtacggatgccgagactccaccaaggttcactcgcaccccagtagatcagacaggggtatctggaggcgtcgcctctttcatctgtcaggctacaggtgaccctcgcccaaagatcgtctggaacaagaaaggcaaaaaggtgtcaaatcaacgcttcgaggtcatcgaattcgacgacgggtccgggtctgtgctgcgcatccagccgcttagaacacccagggacgaagccatctacgagtgcgtggcctccaacaatgtgggggagatcagcgtcagtaccaggctcacagtgttgcgggaggaccagattcctcgaggattccccactatagatatgggaccccagctaaaagtggtcgagcgtactcggaccgccactatgctttgtgctgccagcggcaacccagacccggaaatcacctggttcaaagactttcttcctgttgatacgagcaacaataatggccgaatcaaacaacttcggagtggaagggtcttccatacaggggcactacaaattgaacagtctgaggaatccgaccaggggaaatatgagtgtgtggcgaccaatagtgcagggacacggtactccgctccagctaatctgtacgtaagagtcaatcggaaggttaggagggtgccacccaggttctctatacccccaacgaaccacgagattatgccgggaggcagcgttaacatcacctgtgtggcggtcggctcccccatgccatacgtgaaatggatgctgggggctgaagatttgacacccgaagacgacatgccaattggcagaaatgtactggagcttaatgacgtgcggcagagtgctaactacacatgtgtagcaatgtctaccctgggcgtgatcgaagccatcgctcagatcactgtcaaggcattgcctaagccgcctgggacacccgtggtcactgagtccacggctacttctatcaccctcacttgggactcaggtaaccccgagccagttagttactatatcatacagcataagcccaaaaatagtgaggagctgtataaggagatcgacggggttgccaccaccagatactccgtcgctggcttgtctccatacagcgactacgaattccgtgtcgtagccgttaataatattggtcgtgggcctccctccgagccggttttaacccagacctccgagcaggccccatctagtgcgcctagagacgttcaggcacggatgctttccagcaccaccattctggtccaatggaaagaaccagaagagccaaacggccagatccaaggatacagagtgtactacactatggatccgacacagcatgttaataactggatgaaacataacgtagcagattctcagattacaaccattggaaatctcgttccccagaaaacttactcggtaaaagttctggcttttacatccatcggggacggccctctgagctccgatatccaggttatcacccaaaccggtgtgccgggacagcctttgaactttaaggctgagcccgagtctgagacctcaattctgttgtcttggacgcctccgaggtcagacacgatcgcaaattacgagcttgtttataaggacggcgagcacggcgaggagcagcggattaccattgagccaggcaccagttacagactgcaagggctgaagcctaactccctgtactacttccggttagcagcaagaagtccccagggattgggcgcttcaacggctgagattagcgcccgtaccatgcagagcatgtttgctaaaaattttcatgtgaaagccgtcatgaaaacttccgtgctgctgtcttgggagatacctgaaaattataacagtgctatgcccttcaaaattctttatgacgatggcaagatggtggaagaggtggacgggagagccacccagaagttaatcgttaatctcaagcccgagaagtcttacagttttgtcctcacaaatagaggcaactccgccggaggcctacagcaccgcgtcacagcaaagaccgcccctgacgttctgcgtacgaaaccggctttcattgggaaaactaatctcgatggcatgatcacagttcagttgcccgaggtccccgcaaacgagaacatcaaaggatattatatcataattgtacccctcaaaaaaagcagaggcaagttcattaagccgtgggaatctcctgacgaaatggagctggatgagctattgaaggagatttctagaaagcgacgttccattagatacggcagagaggtcgagctgaagccctacattgctgcccattttgacgttcttccgacagaattcaccctgggtgacgataaacattatgggggattcacaaacaaacagctccaaagtggacaggaatatgtattcttcgtgctggctgtaatggaacacgccgagtccaaaatgtatgctacaagtccctactcagatccagtcgtatctatggacctggatccgcaacctattaccgatgaagaggaggggctcatctgggttgtcggcccagtcctggcagtggtgttcatcatatgtatcgtaatcgccattttactgtacaagcggaaaccatatcggaagcgggctgagagcgatagtcggaagagctccattcccaacaataaagagatccctagtcatcacccaacagatccagtcgaactgcgcaggctgaactttcaaacacccggtatggctagccatcctccgatccccatcttggaactggcagatcatattgaacggctgaaggccaatgacaacctgaagttttcgcaagaatacgagagcatcgatcctggccaacagttcacgtgggagcacagcaacctggaagtaaataaacccaaaaatcggtacgccaacgtgattgcgtacgaccattcgcgggtcctcctgagcgctattgaagggatcccaggctcagattatgtgaacgcaaattacatcgatggttatcggaaacaaaacgcctacatcgccactcagggatccctgcctgagacttttggagacttttggcggatgatttgggagcagaggtcggccaccgtcgtcatgatgacaaagttggaagagcggagtagagtgaagtgtgatcagtactggccaagtcgtggtaccgaaacccacgggctggtccaggttactcttctcgatacagtggagctggctacctactgcgtgcgcactttcgccctgtacaaaaatgggtcgagcgaaaaacgagaggtgcggcagttccagtttactgcatggcccgaccatggcgtacctgagcatcccaccccatttctcgcatttcttcggcgtgtcaagacttgcaacccacctgatgcgggaccaatggtggtccattgctctgctggtgtaggaaggaccggatgcttcatcgtaatcgacgctatgctggaacgcatcaaacatgagaaaaccgtggacatttacgggcacgtcacactcatgcgtgcccagagaaattacatggtgcagacggaggaccagtacattttcatccacgatgcgcttctggaagcagtcacatgcgggaataccgaagtaccagctcggaatctgtatgcatacatccaaaagttgacccaaatcgaaacaggcgaaaatgtcaccgggatggaactggagttcaagagactggcaagtagcaaggcccatacaagtcgctttatctctgccaatttgccgtgtaacaagtttaaaaaccgcttagttaatattatgccttatgagagtacaagagtgtgtttacagcctattcgcggagtagagggaagcgattacattaacgccagcttcatcgacggataccggcagcagaaagcatatatagccacccaggggcctctggccgaaacgactgaagacttctggaggatgctgtgggagcacaactccacaattgtggtgatgcttactaaactgagggaaatgggcagggaaaaatgtcatcagtattggcctgctgagcgttctgccagatatcagtattttgtggtcgacccaatggctgagtacaacatgccacagtatatcctccgagagtttaaagtcacagatgctcgggacggccaatcccgcaccgtgagacagttccaattcaccgattggcctgagcagggagtccctaaatccggcgaaggttttatcgacttcataggccaagtgcataagacaaaggaacagttcggccaagatggaccaatctccgtgcactgctcagccggagtggggagaaccggtgtttttatcactctcagtatagttttggaaaggatgagatacgagggtgtggtagacatcttccaaaccgtgaagatgttgagaacacaacggcctgctatggttcagaccgaggatcagtaccagtttagttatcgggcagccctggagtacctcggatcatttgaccactatgcgacttag

SEQ ID NO: 237119 - DNA, 5738 bp, synthetic construct
  misc_feature 1..5738: note = Description of Artificial Sequence: Synthetic coding sequence
  source 1..5738: mol_type = other DNA
atggttcatgttgctcgcctgctattattgctgctcacgttctttttgcgaactgatgctgagacaccacctcggttcacccggaccccagtggaccaaaccggtgtctcaggcggagtggcgtcctttatttgccaagctaccggggatcccagacctaagattgtatggaacaaaaaaggaaagaaggtgagtaaccaaaggttcgaagtaatagagtttgatgatggctccggaagcgtattgagaatccagccgctgcgcactccaagggacgaagccatttacgagtgcgtggcgtccaacaatgtgggtgagatctcagtgagcaccagattgaccgtgttgcgagaagaccagatccctcgcggatttcctacaattgatatggggccacaacttaaagtggtcgagcgcacacggactgccaccatgttgtgcgctgcctctggtaaccccgatcctgagatcacctggttcaaggacttccttccagtcgacacctcaaataacaacggacgcataaagcaattaagatctgagtcaattggtggcaccccaattcgcggagccctgcagatagaacagtcagaggagtccgaccaggggaaatatgagtgtgtggcgactaacagcgccggaactagatactccgcccctgcaaatttatacgttcgggagctgcgtgaggtaaggagggtacctccgaggtttagcattccaccaaccaatcacgaaattatgcctggaggttccgttaatataacctgtgtggcagtcggttcgccaatgccatacgtgaaatggatgctcggagccgaagacctgactccagaggacgatatgccgatcggccgtaacgttctggagctgaatgacgttcgccagtccgctaattacacatgtgtagctatgtcaaccctgggagtgatcgaggccattgcacagatcactgtgaaggctttgcctaaaccaccgggaacaccagtagtgacggagagcaccgcaacgagcatcactctgacctgggactccggcaatcccgagccagtgtcctattatatcatccagcataagcctaagaacagcgaagagttgtacaaggagatcgatggtgttgcaactacccgctactccgtcgcaggactctccccttatagtgactacgagttccgagtcgtggccgtgaacaacattgggcgaggccctcccagcgagccagtccttactcagaccagcgagcaggccccttctagtgccccacgtgacgtccaggcacggatgctttcatccactaccatcctggtgcaatggaaggagcccgaagagcctaacgggcagatacaagggtatagggtgtattatacaatggatcccacccagcatgtcaataactggatgaagcataacgtggccgactcccagatcacgactattgggaacttggtgccacagaaaacatactccgttaaggtcttagccttcacatccattggtgacggccctctatcgagtgacattcaggtcattacccaaacaggagtgcccggacagcccctgaacttcaaggctgagcccgagtccgagactagcatcctgctgtcttggacacctcccaggtctgacactattgctaactacgagctcgtgtataaggatggagagcacggggaagaacaaagaatcactatagaaccagggacaagctaccggctgcagggactgaaacctaactctctgtattattttaggctcgctgccaggagtcctcagggtttgggagccagcactgccgaaatctccgcccgaaccatgcaatcgaaacccagtgcccctccacaggacatttcctgcacctcaccctcttccacctccatcctggtcagctggcagcctccaccagtggaaaaacagaatggaataattactgagtactccataaagtacacagctgtagacggcgaagatgataaacctcacgagatccttggaataccctccgataccaccaaatatcttctagaacaactggaaaagtggactgagtacaggataaccgtgactgctcacacagatgtggggcctggtccagagagtttgagtgtactcatcagaacgaacgaggacgtgcccagtggcccaccacggaaagtcgaggtcgaggccgtcaacagcacatctgtgaaggtgtcttggcggtccccagtccccaacaagcagcatggccagattcgagggtaccaggtccactacgttcgcatggagaacggggaacctaaaggtcagcctatgctgaaagatgtgatgctcgcagatgcccagtgggagttcgacgataccaccgaacacgacatgatcatctccgggctgcagcccgagacaagttactcactcacagtgacagcctacacgacaaagggggatggcgcaaggtcaaagcctaagctggtgagcacaaccggcgctgttccagggaagcccagactcgtcattaatcatactcagatgaataccgcccttatacagtggcacccacctgttgatacctttggcccactccaaggatatcgcttgaaattcggacggaaagacatggagcccttaacaaccctggaattttccgagaaggaggatcatttcacggccaccgatatacacaagggggcaagttacgttttcaggttgagtgccagaaacaaggtgggttttggtgaagagatggtgaaagaaatcagtatacctgaggaagtgcctaccgggtttcctcagaacctgcattccgaagggacgacatcaaccagcgtacaattatcatggcagccacccgtgttggccgaaaggaatggtatcattaccaagtacaccctcctgtaccgggacataaacatacccctcctgcccatggaacaactgatcgtcccagctgacaccacaatgaccctcactggactgaaacccgacactacctacgacgtcaaggttagagctcacacctctaagggccctggcccatatagcccttctgtgcagttccgtacactgccagtcgaccaggtatttgcgaaaaattttcatgtgaaagccgtgatgaaaacctcagtcctgctctcctgggaaattccagagaattataattcagctatgccatttaagatactatatgacgacggaaagatggtggaggaggtggacggccgagccacccagaagttgatcgttaacctgaagcccgagaagtcttattcctttgtcctcaccaataggggcaactccgcgggagggcttcagcaccgcgttaccgcgaagactgcgcctgacgttctgcggacgaagcccgcatttatcggaaaaactaatctggacgggatgattactgtgcagctgcctgaggtcccagccaacgagaatattaaaggttattacatcatcatcgtgccccttaaaaaaagccgcggaaaattcattaagccttgggagagccctgatgaaatggaactggatgaactccttaaggagatcagccgcaaaagacgatctattaggtatggcagggaggtggaactcaagccatacatcgctgcacacttcgatgtgctgcccaccgagttcacattaggggacgacaaacattacgggggttttacaaacaaacagttgcagagcgggcaggagtatgtgttctttgtgcttgccgtcatggagcatgcagaaagtaaaatgtatgcaacatctccatactctgatcccgtggtcagcatggatctggatcctcagccaatcacagatgaagaagaggggttaatctgggtcgtggggccagttctggccgtcgtattcattatctgtattgtgattgcaatacttctctacaaacggaagcgagccgaatctgacagccggaagagctcaataccgaataacaaggaaatcccctcccaccaccctaccgatcctgtggaactgcggaggctgaattttcagactcctggcatggccagccacccccctatccctatcctggaactggcagaccatattgagcgactgaaggctaatgataacctgaagttttcgcaagagtatgaaagtattgaccctggacagcagtttacctgggaacattccaacctcgaagttaacaagccgaaaaaccgatacgccaatgtcattgcctatgatcatagccgagtactgctttctgcaatcgaaggaataccgggaagtgattatgttaatgcaaactatatagatggttaccgaaagcagaatgcctatattgcgacgcagggctctcttcctgaaacctttggagacttttggaggatgatctgggaacagcgatccgcgacagtcgttatgatgacaaagctggaagaacgatctagagtgaagtgtgaccagtactggccctcgcgcggtacagagacacatggcttggtgcaggtgacactcctggacactgtcgagctggcgacctactgcgtgcggacgtttgccttatataaaaacggcagcagtgagaagagggaggtccgccaattccagtttacagcatggcctgaccatggtgttccagagcacccaacaccttttcttgctttcctccggcgagtcaagacatgtaaccctccagacgctggccctatggttgtacactgctctgccggagtggggagaacggggtgctttattgttattgacgcgatgttggaacgtataaaacacgaaaagaccgttgatatttatggtcacgtgaccctgatgcgcgctcagcgcaactatatggttcagactgaggatcaatacattttcattcacgatgcccttctggaggccgtcacctgcggcaatactgaagtgccagccagaaacctgtacgcttacattcaaaagctgacccagatcgagaccggagagaatgtcaccggtatggaactcgaattcaagaggctggctagttctaaagctcatacctctcgctttatttcggccaatctgccttgcaacaaatttaagaacagacttgtgaatattatgccctatgagtcgacccgcgtgtgtctccagccaatacgcggagttgaggggtcagattatatcaacgccagcttcatcgacggctaccggcaacagaaggcctacatcgcaacacaaggtcctctggccgaaaccacagaagatttttggagaatgctgtgggaacataatagtacgatcgtcgtgatgctaaccaaactgcgggaaatgggcagggagaaatgccaccaatactggcctgccgaaaggtctgcacgttaccaatacttcgtggtcgatcccatggccgagtacaacatgccccaatatattctgcgagagttcaaagtaaccgacgccagagacgggcagagcagaaccgtacgacagtttcagttcacagactggccagaacagggtgttcctaagagcggagaaggatttatagactttattggccaggtgcataagacgaaggagcagtttgggcaggacggaccaatttccgtccattgttccgccggagtcgggcgaacgggcgtgttcataacgctttctatagtgttagaacggatgaggtatgagggcgtggtggacatttttcagacggtgaaaatgctgagaacccagcggcctgcaatggtgcagacagaagaccagtaccagtttagctatcgagcagcccttgaatacctcggttccttcgatcattacgctaccta

SEQ ID NO: 237120 - DNA, 2103 bp, synthetic construct
  misc_feature 1..2103: note = Description of Artificial Sequence: Synthetic coding sequence
  source 1..2103: mol_type = other DNA
atggaacctctgtgtcccttgttgctggtcggcttctcgctcccattagccagggccctccgtgggaatgagacaaccgccgactcaaacgagactaccaccacgagcggccctccagatcccggtgcaagccaacccctgttggcctggctgctgctgcccctgctgctgctcttactcgttcttcttctggcagcctacttctttcggttccgaaaacaacgcaaggctgttgtatcaaccagcgacaagaaaatgcctaatggaatcctggaggagcaggaacagcagcgggttatgctgctgagccggtcaccttcagggccaaagaagtatttccctattccggtcgaacatctcgaggaggaaattaggatccgctcagctgacgactgcaagcaattcagggaagagttcaacagcctgccctccggacacatccaaggcacgttcgaattggcaaataaagaagagaacagggaaaagaatagatatcccaatattctgccaaacgaccattctcgtgtaattcttagtcagctggacggcatcccatgttccgattatatcaacgcatcatacatcgacggctataaggaaaagaataagttcatcgccgcacaggggcctaagcaggaaactgtcaacgatttttggagaatggtatgggaacaaaagtccgcaacaattgtgatgcttaccaatctgaaagaacgaaaggaggagaagtgccaccagtattggcctgaccagggatgttggacctacggtaatatccgggtttgtgtggaagactgcgtggtgcttgtggactacactatacggaagttctgtatccaaccccagctccctgatggctgcaaggctccgaggcttgtatctcagctgcatttcacgtcctggccagacttcggtgtcccttttaccccaatcggtatgctgaaattcctgaagaaagtgaagacactgaaccctgtacacgccggaccaatagtggtgcactgttcagcaggggtggggaggacggggacctttattgtcattgacgcaatgatggcaatgatgcacgcggaacagaaggtggacgtttttgaattcgttagtcgaatcagaaatcagcgtccccagatggtgcaaactgatatgcagtatacgttcatctaccaagctctgttggagtattacctctacggggacacggagctcgatgtgtcaagcctagagaagcacctgcagaccatgcatggaacaactacacatttcgacaagattgggctagaggaagagttcaggaaattgaccaatgtgagaatcatgaaagagaatatgcgaacaggaaacctccctgcaaacatgaaaaaggctcgcgtcattcagatcataccttacgatttcaatcgggtgatcctgtctatgaagcgtggtcaagaatatacagactacatcaatgcttcttttattgacggctatcgccagaaggattacttcattgccactcagggaccactggcccacacagtggaagatttttggcggatgatctgggagtggaagagtcatactatcgtgatgttgacggaggtccaggaacgggaacaggataagtgttatcagtactggcccacagagggatccgttacccacggggaaataacgattgagataaagaacgacaccctgagcgaggcaatcagtattcgggactttttagtaacccttaaccaaccgcaagcacgacaggaagaacaagtgcgcgtggtaaggcagtttcactttcacggatggcctgaaatcgggatccccgcagagggaaaaggtatgatcgatttgatcgcagctgttcaaaaacaacaacagcagactggcaaccatccaattaccgtgcattgcagcgccggtgccggacgtacaggcactttcatcgctctgagtaatatcctggagcgggtgaaagccgaaggcttgctggacgtgtttcaggcagttaagtcactcagactgcagaggccgcacatggtccagactctggagcagtatgagttttgttacaaagtcgtgcaggactttatcgacatcttcagtgactatgcgaactttaaatag

SEQ ID NO: 237121 - DNA, 1929 bp, synthetic construct
  misc_feature 1..1929: note = Description of Artificial Sequence: Synthetic coding sequence
  source 1..1929: mol_type = other DNA
atgtcaaacagaagctccttctccagactgacgtggttccgaaaacagcgcaaggccgttgtgtccacttcagacaagaaaatgccaaatggcatcctcgaggaacaggaacaacaaagggttatgctgttgtctaggagcccgagcggtcccaagaagtacttccccatcccagtggagcatctggaagaagaaattcgcatacgcagtgccgacgactgcaagcagtttcgtgaagagttcaacagcctcccttccggacatattcagggaacattcgagctagctaataaagaggaaaatcgggaaaaaaacagatatccaaatatcctcccaaacgaccactcccgcgttatcctcagccaattggacggcatcccatgtagtgattatatcaatgcgtcttatatcgatgggtataaagaaaaaaacaaatttattgctgcccaagggcctaagcaggaaactgtgaacgacttttggaggatggtctgggaacaaaagagcgcaacaatcgtaatgctcaccaacctcaaggaaagaaaggaggaaaagtgccaccagtactggccagatcagggttgctggacatacggcaatattagggtgtgcgtcgaagattgtgtcgtgcttgtggactatacaatccgtaagttctgcatccaaccacagctgcctgatggatgcaaggctcctcggcttgtctctcaactacactttacttcatggcccgatttcggggtgccattcacaccaataggcatgttgaaatttctgaagaaggtcaagactctcaacccagtccatgccggacccatcgttgtccattgctctgctggggtcggtcgcacaggcaccttcatcgtgatcgacgctatgatggcgatgatgcatgccgaacagaaggtggacgtcttcgagtttgtgtcccgaattaggaatcagcgacctcagatggtgcagaccgacatgcagtatacattcatataccaggctctgttagagtattacctgtacggtgacacagagctggacgtctcttcattggaaaagcacctccagaccatgcacgggacaactactcacttcgataaaattgggttagaagaggaattcaggaagctgaccaatgtgaggataatgaaagaaaacatgcgcaccgggaacctccctgccaacatgaaaaaagcgcgtgtgattcaaatcataccatacgatttcaaccgggtgatcctgtcaatgaagcgcggacaggagtatactgactacataaatgcctcgtttatcgatggataccgccagaaagactatttcatagcgacgcaaggccctttagcccataccgttgaagatttttggaggatgatatgggaatggaaatcccacactatcgtcatgcttacagaagtgcaggagcgagagcaggacaagtgctaccaatactggcctaccgagggatcggtgacacacggcgagatcaccatcgagatcaaaaacgatactttatccgaggctatctcaattagggacttcttagtgactctgaaccagccccaagcccgacaggaagagcaggtacgcgttgtcaggcagttccacttccatgggtggcctgagatagggatccctgcagaggggaagggaatgatcgaccttattgccgctgtacaaaagcagcagcaacagaccggcaaccaccccatcacagtgcactgttcggccggtgctggtcgtactggtaccttcattgccctctccaacatactcgagagggtcaaagcagaaggcctgctcgacgtgttccaggcagtcaagagtctacgtttacaacgtccgcacatggtgcagacccttgagcagtatgagttttgttacaaagttgtgcaggacttcattgacattttctcagattacgcaaacttcaaatag

SEQ ID NO: 237122 - DNA, 2103 bp, synthetic construct
  misc_feature 1..2103: note = Description of Artificial Sequence: Synthetic coding sequence
  source 1..2103: mol_type = other DNA
atggaacccctttgtccactactcttggtaggcttttctctaccgctggcccgagccctgcggggtaatgagaccacagccgattccaatgagacaacaacaacctctggcccacccgaccctggcgcttctcaacccctcctggcctggctgcttttgcctctgttgctattgctgctcgtcctgctgcttgcggcttacttctttcgctttaggaaacaacgaaaagctgtggtctctactagtgacaaaaagatgccaaacggcatcctggaagaacaggaacaacagcgcgttatgctgctgagccgaagtccaagcgggcctaagaaatatttcccaattcctgtggaacatctggaagaggagattcggatacgtagcgccgatgactgcaaacaattccgagaggaatttaatagcctgccttccggccatattcaggggaccttcgagctcgccaacaaggaagagaacagagagaagaaccgatacccaaacattctgcccaacgaccacagtagggtcattctttcccaacttgatgggatcccctgcagcgattacataaacgcatcatacattgatggctataaggagaaaaacaagttcatcgcagcccaaggacctaagcaggaaaccgttaacgatttctggagaatggtttgggaacaaaagtccgccactatcgtgatgctgaccaatctcaaggaacggaaagaggagaaatgccaccaatattggcccgatcaggggtgctggacttatggcaacattagagtgtgtgttgaagattgcgtggtgctggtggactatacaatccgaaagttttgcatccagccccaattgccagacgggtgtaaggctcccagattggtgtcacagcttcattttacatcatggcctgattttggcgtgcccttcacacccattggcatgctgaagtttctaaaaaaggtcaagaccctgaatcctgtccatgccggtccaatcgtcgtccattgttctgcgggagtggggcgtaccggcactttcatcgtcatcgacgctatgatggccatgatgcatgctgagcaaaaggtcgatgtgtttgagttcgtgagccgaatcaggaatcaaagaccgcagatggtacagacggatatgcagtataccttcatttatcaggctctccttgagtactacttgtatggcgacacggaactggatgtctcatccctggaaaagcacctgcagactatgcatgggaccacaacacatttcgacaaaatcggcttggaggaggagttcaggaaactgaccaatgtacgtatcatgaaggagaacatgagaacagggaacttgccagcaaacatgaaaaaagccagggttatccagataatcccctacgacttcaatcgagtcatcctcagcatgaaacgagggcaggagtataccgattacattaacgcaagtttcatcgacggttatcgccagaaagattactttatagccactcagggccctctggcccacaccgttgaggatttttggagaatgatctgggagtggaaatctcacaccatcgtgatgctgacagaggtacaggagcgggaacaagacaaatgttaccaatactggccgaccgaagggtcagtcacccacggggagattactatcgaaatcaaaaacgacacattgtcggaggcgatctctatccgtgattttctcgtgaccttgaatcaaccacaggctagacaggaagaacaggtgagagtggtaagacagtttcacttccatggttggccagaaataggcatccccgctgagggcaagggcatgattgaccttatcgcagctgtccagaaacaacagcagcagacaggcaatcaccctatcaccgtccactgcagcgctggcgctggcaggaccggaacctttatcgccctttccaacattctggagcgcgtcaaagccgaaggacttctggatgtgtttcaggccgtgaaaagcctgcgtctgcaaagaccacacatggtacagactctcgagcagtacgaattctgttataaagttgtccaggattttatcgacatctttagcgattatgctaactttaagtag

SEQ ID NO: 237123 - DNA, 438 bp, synthetic construct
  misc_feature 1..438: note = Description of Artificial Sequence: Synthetic coding sequence
  source 1..438: mol_type = other DNA
atggagccactctgcccgctgctgttggtgggcttctcactcccactcgcccgagccctgaggggtaacgagacaactgccgactctaatgaaaccactacgacctctggaccacctgatcccggtgcctctcagcctttgttggcttggctgctcctacccctgctgcttttgctcctcgtactcctactcgctgcctacttctttagatttcgcaagcagaggaaggccgtggtcagcacgagtgataaaaagatgcctaacggtatactggaggagcaagagcagcagagagttatgctactcagccgaagcccaagtggacccaagaaatatttccccattccggtggaacaccttgaagaagagataagaataagatctgcagacgactgtaagcagtttcgcgaggagtttaacatgacaatattgggctag

SEQ ID NO: 237124 - DNA, 2010 bp, synthetic construct
  misc_feature 1..2010: note = Description of Artificial Sequence: Synthetic coding sequence
  source 1..2010: mol_type = other DNA
atggtatctcagcgacttcccagaaaaactaggggaccaccttggagcccgtgtgtgcattcttgttggtgggtgttggcctgtcggagccccggattaagcggagctacacgcccactgcctaccgcaacaagacaaccgagaccacaggccctgcgaactcgggcacccccaagcaggtgctggcctggatgctattgtcgatgttgctcatcatcgtcatgctcattctccccccctacatcatctgggagtggaccaaagaagtattttccaattccagtggaacatctggaagaagaaatccgaatcagatccgcggacgattgtaagcaatttcgggaagagttcaattcacttccttcagggcacattcagggcacattcgagctggcaaataaagaggagaatagggagaaaaaccgttacccaaacatcttgcccaacgaccacagtcgggttatcttatctcagctggacgggatcccatgctccgactatataaatgcatcatacatagacggctataaggagaagaataaattcatcgctgcccaaggcccaaagcaggagaccgtaaacgacttttggagaatggtgtgggagcagaaatctgcaactattgtgatgttaacaaacctgaaggaacgcaaggaggaaaaatgccaccagtactggccggaccaagggtgttggacttacggcaacatccgggtatgcgtagaggactgcgtcgtgctcgtggattacaccatccgcaagttctgtattcagccgcagctccctgatgggtgtaaggcaccacgcttagtttctcagcttcacttcacgtcatggccagactttggagttccattcacccccataggaatgctcaaatttcttaaaaaggtcaaaactttaaatcccgtgcacgctggcccaatcgtggtacattgctcagctggggtcgggagaaccggaacatttattgtgattgatgccatgatggccatgatgcacgcagagcagaaggtggacgttttcgaatttgtctccagaatcaggaaccagcgccctcagatggtccagaccgacatgcagtacaccttcatctatcaggctctgttagagtattacctatacggggatacggagctcgacgttagtagcttggagaagcatctccaaacaatgcatgggaccaccacccacttcgataaaattgggctggaagaggaattccgcaagctgaccaacgtccgtatcatgaaagagaatatgagaaccggcaatcttccagcgaacatgaagaaagcccgagtcattcagattatcccgtacgattttaatagggtgattctgagcatgaaacgtggccaggaatacacagattatatcaatgcttccttcattgatggttacagacagaaggactacttcatcgccacacagggtcccctggcgcacacggtggaagacttttggaggatgatctgggagtggaaaagccataccatcgtgatgctgacagaggttcaggagcgagaacaggataagtgttatcagtactggcctactgaaggttccgtgactcacggggaaattaccattgagattaaaaacgatactctcagcgaggctatttccattcgtgatttcctggtgactctgaaccagccccaggcacgtcaggaggaacaggtgcgcgtggtccgacaattccatttccacgggtggcctgaaattggcatcccagcggagggcaaaggcatgattgacctgatcgctgcagtccagaaacaacaacagcaaaccggaaaccacccaattacagttcactgccgcaactctatgaactccgccacaaaatggtataagattctgctgatctactttctgataatgctgataagcaatgaggactcttgtttaaagattttctttaatttaatggagcagagacgcagtcactttcctcaggacgctcgtctctctcctccactctcagggaccgcatttgcactgtag

SEQ ID NO: 237125 - DNA, 423 bp, synthetic construct
  misc_feature 1..423: note = Description of Artificial Sequence: Synthetic coding sequence
  source 1..423: mol_type = other DNA
atggagcctctttgcccactcctgctcgtcggcttcagtctgcccctagctcgagctcttcggggtaacgagaccacagccgatagtaacgagacaaccacaacatcaggtcctcctgatcccggagctagccagcctttgctcgcatggttgcttctgcccctgctgctgctcctgctggtgcttttactggctgcctacttttttaggttccgcaagcaacggaaggccgtagtctccaccagcgataagaagatgccaaacggaatattggaggagcaggagcaacagcgcgtaatgttactgagtcgatctcccagtggccctaaaaagtatttccccattcctgttgagcacctggaggaggaaatcagaatccggtctgctgacgattgcaaacagttccgggaggagttcaactag

SEQ ID NO: 237126 - DNA, 465 bp, synthetic construct
  misc_feature 1..465: note = Description of Artificial Sequence: Synthetic coding sequence
  source 1..465: mol_type = other DNA
atggagccactttgtcctctcctgcttgtgggcttctccctccccctggctagggcactgcggggtaacgaaaccaccgctgactccaatgagaccactactacctcaggcccacccgaccccggagccagtcaacctcttctggcatggctcttattacctttgcttctgctgttactggttttgctcctggccgcatatttctttcggttcaggaagcagaggaaagccgtggtgtcgaccagtgacaagaaaatgccaaacgggatactcgaagaacaggaacagcaacgcgtgatgctattgagtagaagtccttccggccctaaaaagtattttcccattcctgttgagcatttggaagaagaaattcgtatccgctccgctgatgattgtaagcagtttagagaagagttcaattctttgccctcaggtcacatacaagggacgtttgaactcgcatag

SEQ ID NO: 237127 - DNA, 5723 bp, synthetic construct
  misc_feature 1..5723: note = Description of Artificial Sequence: Synthetic coding sequence
  source 1..5723: mol_type = other DNA
atggccccagagcctgcccctggcagaaccatggtaccacttgtacccgcattagttatgctgggcctggtggccggagctcatggcgattccaaacccgtgttcattaaagttcctgaggaccaaactgggctctcgggtggcgtggcctcctttgtctgccaagccactggggagccaaaacctaggattacttggatgaaaaaggggaagaaagtcagcagccagaggtttgaggtcattgagtttgacgatggtgcagggagcgttctccggattcagcctttaagggtgcaacgcgatgaggccatatatgagtgcaccgcgactaatagcctaggagaaataaatacttccgctaaattgtccgtgttggaggaggagcagttgcccccaggcttccccagcatcgacatgggcccacaactcaaggtggtagaaaaggctaggaccgctacgatgctgtgcgccgctgggggaaacccggacccagagattagctggttcaaggactttctccccgtggatcctgccacctccaatggcagaataaaacagttgaggtccggtgctttgcagatcgagtccagtgaggagtctgatcagggcaagtacgaatgtgtggccacaaatagcgccggtaccaggtattcagcccctgccaatctctatgtcagggtccgcagagttgcacctcgctttagcatcccgccttcctcacaggaggtgatgcccggagggtcagtcaacctgacatgtgtggcagtgggggcacctatgccatacgtgaagtggatgatgggagccgaagagcttacaaaggaggatgaaatgcccgttggaaggaatgtgctggaactatctaacgtggtccgttcagctaactacacgtgtgttgctatttcctcgcttggaatgatcgaggctaccgcacaagttaccgttaaagccctgcctaagccaccaattgacttagtggttactgaaacaaccgctacatcagttactctcacttgggattctggaaacagcgaaccggtcacctactatgggattcagtatagggctgctggaaccgagggacccttccaagaagttgacggcgtggcaactactcgttattctatcggtggactcagcccattctccgagtatgcattcagggttttggcagtaaactcaattggccgagggccaccatcagaggccgttcgcgcacgaaccggggaacaagccccttcatcccccccaagacgcgtacaggccaggatgctgtcagctagcactatgctagtgcagtgggaacccccagaagagccaaacggactggtccggggataccgcgtgtattatacccctgactcacggaggcctcccaatgcctggcacaagcacaacacagacgctggcctgctcaccactgtaggctcactgttacccggtatcacttactccttaagagtgcttgccttcacagcggtcggcgatggcccaccatccccgacgattcaggtgaagacacagcagggggtgcctgcccagcccgctgattttcaggctgaggttgaatccgatacccgcatacagttgtcctggttattgcctccacaggagaggattattatgtacgagctagtctactgggcggctgaagatgaagatcagcagcataaggtgacatttgatccaactagcagctacaccctggaggatttaaaacccgacacactatatcgcttccagctggctgctagatctgacatgggggtgggcgtcttcacccctaccatagaggctcgaactgcacaaagcacgccatccgcccctccccaaaaggtgatgtgcgtctctatgggctccacaacagtcagagtctcttgggtacctcctcccgcagatagccgcaacggggtgatcacccagtattctgttgcatacgaggcagtggatggggaggaccgagggaggcacgttgtggatggaatatctcgtgagcactccagctgggacctcgttggattggaaaaatggacggagtaccgggtctgggttcgtgcccacacagatgtggggccaggccctgagagctcacccgtactggtgagaacagatgaagacgtaccaagcggacccccacgtaaggtggaagtggagcctctgaactctaccgccgtccatgtttactggaaactgccagtcccctccaaacagcacggacaaatacggggataccaggtcacctacgtgcggctagagaacggtgaacctaggggcctcccaattattcaggacgtaatgctagcagaggcacagtggcggccagaagagagcgaggattacgaaacgacgattagtgggttgactcctgagacaacctactcggttaccgtggcagcatataccacaaaaggggatggtgcgagatcaaagcccaagatagtgaccacgaccggcgctgtgccaggacggccaactatgatgatatcaactactgccatgaataccgccctcctgcagtggcacccccctaaggagctgcctggcgagttactaggctacaggcttcaatactgcagggctgacgaagcaagacctaatactatagactttgggaaagacgaccagcatttcactgttaccggactgcacaaaggaactacttatatattccgactggcagcaaaaaaccgggctgggcttggcgaggagttcgagaaagaaattaggacccctgaggatttgccctccggattccctcagaatctccacgtgacagggttgacgacctccaccaccgaactggcttgggacccgcctgtgctggcagagcggaatggaagaataataagctataccgttgtttttcgtgatattaatagccagcaggaattacagaatattactacggatacgagattcactctcactggactgaaacctgacaccacttatgatatcaaagtccgcgcttggacttcaaaggggagcggcccactctcccctagcatccagtccagaacaatgcccgtcgagcaggtgttcgccaagaacttcagagtggccgctgcaatgaagacctcagtgttactttcttgggaggttcccgatagctacaaatccgctgtgcccttcaagatcttatataatggccagagcgtcgaggtcgacggccattcgatgcgcaaattgatagccgaccttcagccaaacacggagtactcatttgtgttgatgaacaggggcagttccgcgggaggtttacagcacctggtgtccatcagaaccgcaccagatctcctgccacataagcccctgccagcttctgcatatattgaggatggccgattcgacctctcaatgcctcatgtccaggacccatccttggtgagatggttctacatagtagttgtcccgatcgatcgggttggcggttcgatgcttactccacgatggagcacaccagaagaactcgagttggacgagctcctcgaggcaatagaacaggggggtgaggagcagagacgcagacgaaggcaggctgagcgactgaaaccgtacgtagcggcacagttggacgtactgcccgaaacattcactttgggtgacaagaagaactatcgcggtttttacaatcgaccgctgtcccctgaccttagctaccagtgcttcgttctggcgagcctgaaagagcccatggatcagaaacgatatgcctctagcccatacagcgatgaaatcgtcgtgcaggttactccagcccaacagcaggaagaaccagagatgttatgggtcaccgggcctgtgctagcagtgatcctaattatactgatcgttatcgcaatcctgctgtttaagagaaagaggacacattcccccagcagcaaggacgagcagtccatcggactgaaggattcccttcttgcccactccagcgatcctgtggagatgagacgccttaattaccaaaccccaggcatgcgggatcatccgccaattcctatcacagacctcgccgacaatattgagaggctcaaggccaacgacggactgaagttttcccaggagtatgagtctatcgatcccggacaacagttcacttgggagaattcaaatctggaagttaacaagcctaaaaaccgctatgccaatgtaatcgcttatgatcatagtcgagttattcttacctcaattgatggcgtgccgggaagcgactacattaatgcaaactatattgatggttacagaaaacagaacgcgtatatcgctacccaagggccactgcctgaaacaatgggcgacttctggagaatggtctgggaacagcggacagccactgtggtaatgatgacacgactggaagaaaaatcaagggtgaagtgtgatcagtattggcccgctagaggtactgagacctgtgggctgatacaagtcacccttctggacaccgtcgagttggccacctacactgtgagaacattcgctcttcataaatccgggtcctctgagaaacgggagctgcgacagttccagttcatggcctggcctgaccatggtgtaccagaataccctaccccaatcctggctttcctgcggcgagtgaaggcctgtaatcccctggatgcgggtcccatggtggtacactgttctgccggtgtgggtaggaccgggtgctttatcgtgatcgacgccatgcttgagcgcatgaagcatgagaagacagtggacatatatggccacgtaacttgtatgcggtctcagcgtaactatatggtgcagacggaagaccagtacgtcttcatacacgaggccctgctcgaagcagctacatgcggccacaccgaggttcctgcccgaaacctgtatgcccacatccagaagctcggacaggtgcctcctggggagtcagtaacagctatggagctggaatttaagctcttagctagtagtaaagctcatactagcagatttatttctgccaacctgccctgcaataaatttaaaaacagattagtgaacattatgccatatgagcttactcgagtctgcctccaaccgatacgtggagtggaagggtccgattatatcaatgcaagtttccttgacggctatagacagcaaaaggcctacattgcaactcagggtcccctggcggagtccacggaggacttctggcgaatgctgtgggagcataatagcacaattattgtgatgctgactaagcttcgcgaaatgggacgcgagaaatgtcaccaatactggcccgctgagaggagtgctagataccagtacttcgtggtcgatcctatggccgaatacaacatgccccagtacattctgcgagaattcaaggtgacagatgccagggacggacaatctagaactattaggcagtttcagtttaccgactggcccgagcagggtgtccctaagaccggcgaggggttcatcgacttcatcggccaggtgcataagaccaaagagcaattcggacaggacggacctatcaccgttcactgcagtgctggcgtagggcgtacaggcgtattcatcaccctgtcaatcgttctcgaacggatgcgatacgaaggcgtggtggacatgtttcagaccgttaaaacgctcagaacgcagcgccctgctatggttcagacggaagaccagtatcagctctgttatcgtgcagcgttagagtacctgggctccttcgatcactacgccaccta

SEQ ID NO: 237128 - DNA, 5696 bp, synthetic construct
  misc_feature 1..5696: note = Description of Artificial Sequence: Synthetic coding sequence
  source 1..5696: mol_type = other DNA
atggcccctgagcctgcgcctgggcgtaccatggtcccccttgtaccagccctggtgatgctgggcttagtcgcaggcgctcatggggattcaaaacccgtgtttattaaagtgcccgaagatcagactgggttatctggcggtgttgccagctttgtatgtcaggcaaccggggaacccaagcctaggattacctggatgaagaaaggcaaaaaagtcagcagccaacgtttcgaggtgatcgagtttgacgatggagcaggatcagtgctgcgcatccaaccactgagggtccagagagatgaagcgatatatgaatgcaccgccaccaattcccttggagagatcaacacgagcgccaaactttccgtgttagaggaagaacagttgccaccagggttcccaagtattgatatgggaccacaactgaaagtagtcgaaaaggccaggacagcaacgatgctctgcgctgccggaggcaatccagaccctgaaatctcttggtttaaagattttctgcccgtggacccggcaacgagtaatggccgtatcaaacagcttagatcgggggctctgcagatcgagtcgagcgaggaatcagaccaggggaaatacgagtgtgtagctacaaattcggcgggaacccgctacagcgccccagcgaacctctatgtgcgagttcgtagagttgcaccgagattctccattccaccctcttcgcaggaagttatgcctgggggatctgtaaatctcacctgcgtcgccgtaggggctccaatgccttacgtcaaatggatgatgggcgctgaagagttaacgaaggaagacgaaatgcccgtcggcaggaacgtcctcgagttaagcaatgtcgtgcgatcagcaaattatacttgcgtggccatcagtagcctcggcatgatcgaggccacagcccaagtgacagtgaaggccctgcccaaaccccctatcgatttggtggtgaccgaaactaccgccacctcagtgaccctcacatgggactccggaaattcggagcccgtgacgtattacgggatccagtacagggccgcaggtacagaaggcccatttcaagaggtcgacggcgtcgctactacacgctattctatcgggggactctcccccttcagcgagtacgcgtttagggtcctggcggtgaactcaatcggtagaggcccaccaagtgaagcagtacgggctcgcaccggtgagcaggccccatcttctccacctcggcgagtgcaggcccgtatgttgtccgctagcacgatgttagtccagtgggagcctccagaggaaccgaatggccttgttcggggataccgggtgtattatacacccgattcacgcaggccgccaaacgcatggcacaagcacaacaccgacgcaggcctcctgaccactgtgggatcactgctcccaggcattacttacagcctgagggtcttggccttcacggccgtgggcgatggtccgcctagccccacaattcaagtgaaaacacagcagggggtcccagcccagcccgctgacttccaggccgaagtggaatctgacacacgcatccagctgtcgtggttactgccccctcaggagcgaattattatgtacgagctggtgtattgggccgcagaggatgaagatcagcagcataaagttacttttgatcccacatcatcttacacattggaggatttaaaacccgataccctgtaccgttttcagttggccgctagatctgatatgggcgttggtgtcttcactcccaccattgaagctagaaccgcccaatccacacccagcgcacctcctcagaaggtgatgtgcgtgagcatgggaagcaccacggtgcgggtgagctgggtcccacctcccgctgattctcgtaacggtgtcatcacgcagtactccgtggcctacgaggcggtagacggagaggataggggacgccacgtggtggacggtatttcaagggagcattcaagctgggacctggtggggctcgaaaagtggaccgagtacagggtgtgggttagagcccacactgatgtggggcctggccctgagtcttcgcccgtcctggtgcgaacagacgaggacgtgccgtctggaccgcctcgaaaggttgaagtcgagccgctgaactccacggctgtgcacgtttactggaagctgccagtacctagcaaacagcacggccagattcgcggataccaggttacatatgttaggctggaaaacggagagccacgagggctgccaataatacaggatgtcatgctcgctgaggctcaagaaactactatttcaggattaacacccgaaaccacgtactctgtcaccgtcgccgcatacactaccaaaggcgacggagcccgtagcaagccaaaaatcgtgacaaccaccggcgctgttcccggacggcctacaatgatgatttccactacagctatgaataccgcacttttgcagtggcacccacctaaggagctccctggtgagttacttgggtataggcttcagtactgccgggcagacgaggctcgacccaatacaattgattttggaaaagacgatcagcacttcactgtgaccggtctccacaaaggcaccacttacatctttcggctggccgcaaaaaaccgggcaggattgggcgaagaatttgaaaaggagataagaacgccggaagacctcccaagcggcttccctcagaacctgcacgtaaccggactgactactagcacgactgaactggcctgggatcccccagtcctggccgagcgtaacggcagaatcataagttataccgtggtctttagagatatcaatagccaacaagagcttcagaatatcacgacggatacaaggtttaccttgactggcctgaagccggataccacctatgatattaaagtgcgtgcttggaccagcaaaggctcaggccctctttctccctccatccaaagcaggaccatgcctgttgagcaagtatttgcaaagaatttcagagtcgctgctgccatgaagacgtctgtgctgttaagctgggaggtgcccgattcctacaagtcagctgtgcccttcaagatcctctacaatggacagtccgtcgaagttgatggccacagcatgaggaagctgattgccgatctgcagccaaataccgagtactccttcgtgctaatgaaccgaggtagctctgcgggtgggttgcagcaccttgtgtccatccggactgccccagatctgcttccccacaagccattacctgccagcgcgtatatcgaggacgggcgatttgacttgtccatgcctcacgttcaggaccctagtctggtccggtggttctacattgtagtggttcccatagaccgcgttggaggtagtatgctgacaccacggtggtctactccagaggagcttgaattggacgagctgttggaagccatagaacagggcggtgaagaacagcgtcgccgaaggagacaagctgaaagactgaagccttacgtggcagcccagttagatgtgctgcccgaaacatttactctgggggacaaaaaaaattaccgtgggttttacaaccggccactctccccagacttgtcttatcagtgtttcgtgctcgcgtcactcaaggagcctatggaccaaaagcgatacgcaagttcgccatatagtgatgagatcgtcgtgcaagtcactcccgcacagcaacaggaggaacctgagatgctttgggtcacaggtcccgtcctggccgttatcctgattattctaatagttattgctatcctgctgttcaagaggaaacggacgcactctccctccagcaaggatgagcaaagcattggtttaaaagattccctgttggctcactccagcgatcctgtggaaatgaggagactcaattaccagacccctgggatgcgagaccatcccccaattcccatcacagacttagctgacaacattgaacggctgaaagctaatgacggcctgaaattttcccaggagtacgagagtattgaccctggccagcaattcacctgggaaaattccaatttagaagttaacaagccaaaaaatagatatgcgaacgttattgcttatgatcactctagagtgatcctgacctccattgatggcgtccctgggtcagactatatcaacgctaattacatcgatgggtaccgcaagcagaatgcatacatcgctacccagggccctcttcctgaaactatgggcgacttttggcgtatggtctgggaacaacgcactgcaaccgtggtgatgatgactcgcctcgaagagaaatcccgtgttaaatgcgaccaatattggccagccagaggaacggagacatgcggccttatacaggtgaccttgctggacaccgtggaattggccacatataccgtaagaaccttcgccctgcataaatcgggcagctctgagaaaagggaactgcggcagtttcaatttatggcctggcctgaccacggtgttccagagtaccccacgcctattctggcctttctgcgacgagtgaaggcgtgtaatccactggatgccggacccatggtcgttcattgttctgccggagtgggtagaacagggtgttttatcgtaatcgacgctatgcttgaaaggatgaaacatgagaagacggtggacatatacgggcatgtgacctgtatgcgcagccagaggaactacatggtccagacagaggaccaatatgtgtttattcatgaggctttgctcgaagcggcaacttgcggacacacggaggtgcctgcgagaaatctgtacgcccacatccagaaactggggcaagtcccaccaggggaatctgtaaccgccatggagctcgagttcaaactgcttgcatcttctaaagcccatactagcaggtttattagcgcaaaccttccatgcaataaatttaagaacagactggtcaacataatgccatatgaactgacccgtgtttgcctgcagcctatccgcggtgtagaaggtagcgactacattaacgcatctttcctcgatggttacagacaacagaaggcttatatagcaacacaaggaccattggcagagtccaccgaggacttttggagaatgctttgggagcataatagcaccatcatcgtgatgctgactaagttacgggaaatgggcagagagaagtgccaccagtattggcccgctgaacgctccgccagataccagtacttcgttgtggaccctatggccgaatataatatgccccagtatatcctccgagaatttaaagtcacggacgcacgcgacggtcagtcccggaccatcagacaatttcagttcacagactggcctgagcagggtgtccccaagaccggggagggattcatcgactttatcggccaggtgcataaaactaaggagcagttcggccaagatgggcctattaccgtgcattgttccgccggagtgggccgaacaggggtattcattacattgagcatagtcctggagagaatgcggtatgagggcgtggtggatatgtttcaaactgttaaaacgttaagaacacagcggcctgcaatggttcagacagaagaccagtatcagctatgttatcgcgctgcgctggaatacctgggttcatttgatcactatgcgacata

SEQ ID NO: 237129 - DNA, 5723 bp, synthetic construct
  misc_feature 1..5723: note = Description of Artificial Sequence: Synthetic coding sequence
  source 1..5723: mol_type = other DNA
atggctcccgagcctgccccagggaggaccatggtgccactcgtccccgcacttgtcatgctgggcctcgttgcgggtgcccacggggactctaaacctgtgtttataaaagtgccggaagatcagacaggccttagtgggggagtggcttcctttgtgtgccaggctacaggcgaacccaaacccaggattacatggatgaagaaggggaaaaaagtgtcctcccaaagattcgaggtcatcgagttcgacgacggggcaggctccgtgctcaggatacaaccgctcagggttcagagggacgaagctatctatgagtgtaccgctaccaattcactgggtgaaatcaatacttctgccaaactgagtgtattggaagaagagcagctgcccccaggattccccagcattgacatggggccacagctaaaagtggtcgaaaaagcaagaacagctacaatgctctgcgccgctggtggcaatccagatcctgagatctcctggtttaaggatttcctgccagtggacccagccaccagcaatggtcgaattaaacaattacgatcaggtgcccttcagatcgagtctagcgaagagtccgaccagggcaagtatgaatgcgtggccaccaacagcgcaggcactagatactccgccccagcgaacctgtatgtgagagttcggcgtgtggccccaaggttttccatccccccttcttcacaagaggtcatgccagggggtagtgtcaatcttacatgcgtggcagttggggcacctatgccttacgtcaaatggatgatgggggcagaggagctgacaaaggaggacgagatgcctgtgggtcgcaatgtcttagaactcagtaatgtagtccgcagcgcgaactatacctgcgtcgcaatttctagtttgggcatgattgaggccaccgctcaggtgaccgtgaaggccctgccgaagcctcctatcgatttagtcgtgactgagactaccgcaaccagcgtgaccctcacctgggattccggaaattcagagccggtgacttactatgggattcaatatcgcgcagccggaaccgaaggaccttttcaggaggtcgatggggtggccacgacacgatacagtatcggtggattgtcacctttcagtgagtatgcgtttcgcgtgttagcagtaaattctatcggcagaggcccaccctctgaagcggtgagggcccgaaccggcgagcaagctccatccagcccacccaggagagtgcaagcaaggatgctgagcgcttcgaccatgctcgtgcagtgggagcccccagaagaaccaaacgggttagtccggggttaccgtgtgtactataccccagactcaagacggcctccaaatgcctggcacaagcataatacagatgccggattgctaacgactgtcggcagcctgctgccaggaattacatattcacttcgggttctcgccttcactgcagtgggagatggacccccatcacccactattcaggtcaaaacccagcagggagtgccggcacagcctgcagacttccaagccgaggtcgaatcagacactagaatccaactgtcctggctcctgccgcctcaggagaggattattatgtacgagctggtgtactgggccgcagaggatgaagaccaacagcataaggtcacattcgaccctacatcatcctacaccttagaggacctgaagcccgacaccttataccgatttcagctggcagctcggtctgatatgggcgtaggggtgttcactccaacaattgaagccagaaccgcccagagcacccccagcgcgccacctcagaaggttatgtgtgtgagcatgggctctaccaccgtccgggtcagctgggtcccccctcccgctgacagccgaaacggggtcattacacagtattccgtggcctacgaagccgttgatggtgaagacaggggaaggcacgtagtggatgggattagtcgagagcactccagttgggacctggtgggcctggaaaaatggacggaatatagagtctgggttcgcgcacacacggacgtcggccctggaccggagtcttcacctgtcttggtgcgcaccgacgaagacgtgcccagtggcccaccaagaaaggtggaagtggagcccctgaactccactgctgtgcacgtgtactggaagttaccagtgccatcaaagcagcacggacagatccggggttatcaagtgacctatgtccgcctggagaacggagagccgcgaggactgcctatcattcaggacgtaatgctggcggaagctcagtggcggccagaggagagcgaagattacgaaactacaatatccgggcttacgcctgagaccacctatagtgtcaccgtggccgcatacacaacaaagggcgatggggctaggagtaaaccaaaaatcgttacgacaactggtgcagtgcctggcaggcctaccatgatgattagcactactgcgatgaatacggccttgttgcagtggcatccacccaaagaattacccggagaactactgggttacagattgcaatactgtagagccgacgaagccaggccaaataccatcgacttcggcaaagatgatcagcactttacagtcaccggcctccataaaggcaccacatacatctttagactggctgctaagaaccgggctgggttgggcgaagagttcgagaaagaaatccgtacaccagaggacctcccttctgggttcccacagaatctgcacgtaactgggttgaccacatctaccaccgaacttgcctgggatcccccagtgctggctgagcggaacgggaggattatttcgtatacggtggtgttccgggatatcaactcccagcaggagctccagaacataaccaccgatacaaggttcacgctgacaggactcaagccggatacaacgtacgatattaaagtcagggcatggacttctaaaggctccggaccgctgagccccagtatccaatcacgaacaatgcccgtggaacaggtgtttgcaaaaaatttcagagttgccgcagctatgaaaacaagcgtcttactctcctgggaagtcccagactcctacaaaagcgcggttcctttcaagatcctatacaatggtcaatcagtggaggtggacggccattctatgagaaagctcattgccgatctgcaacccaatactgagtactcttttgtccttatgaatcggggatcaagtgctggaggcctgcaacacttggtatccattcgcactgctcctgatcttttgccccacaagcctctacccgctagcgcatatattgaggacggaaggttcgacctgtctatgccacatgtgcaggaccctagcttagtacgatggttttacattgtggtggttccaatcgatagggtaggcggttctatgttgaccccaaggtggtccactcctgaagagctggaactcgatgagctgctggaagcgattgaacaaggcggagaggagcagcggagacgccgacggcaggctgaaagactgaaaccttatgtcgcggctcagcttgatgtcttgcccgagacctttactctgggcgacaaaaagaactaccgaggcttttacaaccgtcccctttctcccgatctgagctatcagtgctttgtgctcgcttctttaaaggagccgatggatcagaaacgttatgcgtctagcccgtactctgacgaaattgtcgtgcaggttacacccgctcagcaacaggaggagcccgaaatgctgtgggtgactggacctgttttagccgtaattctaattattctaattgtgatagccatacttctgttcaaaaggaagcggactcacagccccagtagtaaggatgagcaaagtatcggcctgaaagattccctgctggcccactcttccgatcccgttgaaatgcgtcgcttaaactatcaaacccccggtatgcgcgaccatcctccgatcccaataacggatcttgctgacaatattgagcggctgaaggccaatgacggcttaaagttctcccaagagtacgagtctattgacccgggtcagcagtttacatgggagaattctaacctggaggtcaacaaaccgaaaaatagatatgccaacgtgatcgcttacgatcactcccgtgtcattcttacttccatcgatggggttccaggtagcgattatattaacgctaactatattgacggatatcgcaagcagaatgcatatattgcgacccaggggccattacctgagaccatgggcgatttctggcgaatggtgtgggaacagcgtactgcaactgtggtgatgatgacaagactggaagaaaagtctagagttaaatgcgaccagtattggccagctcggggtacggagacctgtgggttgatccaggtgacattgctggataccgttgaattggccacctacaccgtcagaacgttcgctttacataaatccggcagtagcgagaagagagaactgcggcaatttcagtttatggcctggcccgaccatggggtgcccgagtaccctactccaattctcgcctttctcagacgcgtgaaggcttgtaaccctttggatgccggtcctatggtggtacactgttcagcgggtgtcgggcgtacgggatgctttattgttatcgatgctatgctcgagcgaatgaagcacgagaagaccgtcgacatctacggccacgtcacatgcatgagatcacaaagaaactacatggtccagaccgaggaccaatatgtcttcattcacgaggccctcctggaggcagctacctgcggccatactgaggtgcctgcacggaatctttacgcacatatccagaagctcggacaggtccctccaggggaatccgtcaccgccatggagctcgagtttaaactcctggcaagctccaaggcccatacatctaggttcattagtgcaaacctgccatgtaacaaatttaaaaatagattagtgaacataatgccatacgaactgactagggtgtgcctgcaacctatccgcggagtagaaggctctgattatatcaatgctagctttctggatggatataggcaacagaaggcttacatcgctacccagggcccattagccgaaagtacagaagatttctggcggatgctatgggaacataactctaccattattgtaatgcttaccaaactcagagagatgggaagggagaagtgtcaccaatactggcccgctgaaagatcagcgaggtaccagtattttgtggttgaccctatggccgagtacaacatgccccagtatatactcagggaatttaaggttactgacgctcgtgatggtcagtcgagaaccattcggcagtttcagttcaccgactggcccgagcagggggtccccaagaccggagaagggtttatagactttatcggtcaagtgcataaaacaaaggagcagtttggtcaggatgggccaataacagtccactgttcagctggagtggggcgaacaggagtctttattaccttaagtatcgtgctggaacgcatgagatatgagggggtggtagacatgttccagactgtcaagactcttcgcactcagcgccctgcaatggtacaaactgaggaccagtatcagctctgctaccgagcggcactagagtatctgggttcattcgatcattacgccaccta

SEQ ID NO: 237130 - DNA, 3801 bp, synthetic construct
  misc_feature 1..3801: note = Description of Artificial Sequence: Synthetic coding sequence
  source 1..3801: mol_type = other DNA
atgtatgagctggtttactgggccgctgaggatgaggatcagcaacataaggtgacctttgatccaacttccagctatacccttgaggatctgaagcctgacacattatatcggtttcaactagctgcccgaagcgacatgggggtgggggtgttcaccccaacaatcgaagccaggacagctcaatctatgccaagtggaccaccacggaaggtcgaggtcgagccgctgaacagtaccgctgttcacgtgtattggaaactgcctgtgccatccaagcagcatgggcagattagaggctaccaagtgacatacgtgagactcgagaatggagaacctaggggcctgcccattatacaagacgtgatgttggccgaagctcaggagacaactatcagcggactcacacccgagacaacatactccgttaccgtggctgcatacaccactaagggagacggcgctcgctctaagcccaagatcgttaccacaaccggcgctgtccctgggagaccaacgatgatgatctctaccacagcaatgaacacagctcttctgcagtggcatccacccaaggagctgccgggtgaactcctggggtaccgcctccagtactgccgggctgatgaggctcggccaaataccatcgacttcggcaaagatgaccagcacttcactgtcactggcctccacaagggcactacatatatcttccgactggctgctaaaaaccgcgctggcctgggcgaggagttcgaaaaagagattcgcacccccgaagacctgcctagcggatttcctcagaatctgcatgtaactggtctgacaacgtcaacaacagaactggcttgggacccaccagtgctggcagaaagaaacggacggattattagttacacagtggtgtttcgcgacatcaattcccaacaagagcttcagaacattacaactgacacgaggtttactctgaccgggctaaagccggacaccacttatgacatcaaggtgcgggcatggacctcaaaagggtccggcccattgtcccctagcattcagtctaggacaatgcctgtggaacaggtatttgctaaaaacttccgggtggcagcggctatgaaaacctcagtgcttctctcttgggaagtccctgatagctataaatctgccgttcctttcaagatcttgtataacgggcagtccgtagaggtcgatgggcactccatgcgaaagctgattgctgatttacaaccaaacacggagtattcctttgtcttaatgaacagaggctcctctgctgggggtctgcagcacttagtgagtatccgaacggccccagacctcctgccacataaaccactgcctgcctctgcatatatcgaggatggtagattcgacctctctatgccccatgtgcaggacccctctctggttcgatggttttatatcgtggtagtgcctattgaccgggtagggggtagcatgctgaccccgagatggtcaacccccgaggaactggaactcgatgaactgttagaggccatagaacagggcggagaggagcagcggaggcgcaggcgccaagcagaaaggcttaagccatatgtggcagcacaactggacgtgctgccggagacctttacgctgggcgataaaaaaaattatagagggttctataaccggcctttgagtcctgatctgtcataccagtgctttgtgctcgccagccttaaggagccaatggaccagaagcgttacgcctcctcaccttatagtgatgagatagttgtgcaggtgacgcctgcccagcaacaggaagaacctgagatgctgtgggtgaccgggccagtgctcgccgttatcttaattatcttgatcgtgatcgccatcttactgttcaaacggaaaagaactcatagcccaagctccaaggatgagcagtcgatcggactgaaagactccctgttagcccactcctcagatccagtagagatgagaagactgaactaccagacaccgggatcctctgtgcccagctgcccaaacacttctagcatgcgagatcacccgcctatacccattactgacttggcagataatatcgagaggttgaaggccaacgatggactgaagttcagccaggagtacgagtccatagaccccggacaacaattcacgtgggaaaacagcaaccttgaggtaaataaacctaagaatagatacgctaacgttatcgcctacgaccatagccgagtcatcttgacctccatcgatggggtgcctggatccgattacataaatgccaattatatcgacggctaccggaaacagaatgcgtatatcgccacacaggggccattgccggagacaatgggtgatttctggcggatggtttgggaacaacgcacggctactgtggttatgatgacacggcttgaggagaagagtagggtgaaatgcgaccaatactggccagctcggggaacagagacatgcggcttaattcaagtgaccctgctcgataccgtggaactggccacttacactgttcggacgttcgccttacacaaatccgggtcatcagagaagcgcgagttgcggcaattccagttcatggcttggcccgatcatggagttcccgaatatccaacccctatactggctttcctccggagggtgaaagcatgcaaccctttagatgccggtccgatggtggtgcattgcagcgcaggtgtggggaggacagggtgttttatcgtcattgacgctatgctggaacgtatgaaacacgagaaaacagtggacatttacggtcatgtcacctgtatgaggtcccaacgaaactacatggttcagactgaggatcaatatgtcttcatccacgaagccctcctggaggccgcaacctgcggccatacggaagtccccgctcggaacctgtacgcgcacatccagaaacttggccaggttccccctggcgaatctgtgacagcaatggagcttgagtttaaactgctggccagctcaaaggcacacacatctcgtttcatttcagccaatctgccatgtaacaagtttaaaaatcgcttggttaatatcatgccatacgagcttacacgggtgtgcctccaaccaattcgtggcgtagaaggctcagattacatcaatgcctcttttctggacggttatagacaacaaaaagcctacattgccacccagggtccacttgccgaatccacagaggacttttggcggatgctgtgggagcacaattccactatcatcgtcatgctgactaagctgcgcgagatgggtagggagaagtgccatcagtattggcctgctgaacgctcagcacgttatcagtatttcgtggtggaccccatggccgaatataacatgccccagtatattttgcgtgaattcaaggtaaccgacgccagggacggccagtcaagaactatacggcagtttcaattcacggattggcccgagcagggagtgccaaaaaccggagaggggttcatagactttattgggcaggtacataaaaccaaagaacagttcggacaagatggtcccatcacagtccattgcagcgccggagtgggacgaactggtgtgttcattaccctttctatagtgttggagcggatgcgatatgaaggagtcgtggacatgtttcaaaccgttaaaactttgaggactcagagacctgcaatggtgcaaaccgaagaccagtatcagctgtgctatagggcagctctggagtacctggggagtttcgaccactacgctacatag

SEQ ID NO: 237131 - DNA, 5696 bp, synthetic construct
  misc_feature 1..5696: note = Description of Artificial Sequence: Synthetic coding sequence
  source 1..5696: mol_type = other DNA
atggctcccgagcctgcccctggcaggacaatggtgcctctagttccagccctagttatgctggggctggtagccggagcccatggcgactctaagcctgtttttattaaggtccccgaagatcagaccggccttagcggtggcgtcgccagctttgtctgccaggctaccggagaaccaaaaccaaggattacatggatgaaaaagggcaagaaggtatcttcccaacggtttgaggtgattgagtttgatgatggcgcaggaagcgtgttgaggatccagcccctgagagtacagcgggacgaagccatatacgagtgcaccgctaccaatagtctgggcgaaattaacacgagtgcaaagctctccgtacttgaggaggagcagctccctcctgggtttccttctattgatatggggccacagctgaaggttgttgagaaggcaaggacagctacaatgctctgcgctgctggcggtaatcccgatccagaaatcagctggttcaaagattttcttcccgtggacccagccacgagcaacggtcgcatcaagcagctacgcagcggcgcactgcaaattgagtccagtgaagagtccgatcagggcaaatacgagtgcgtggcaaccaacagtgccggaaccaggtacagcgctcccgcaaacctttatgtgcgggttcggagagtggcgcctcgcttctcgataccaccgtccagccaagaggtcatgccaggcggatcggtgaacctcacctgtgtagcggtcggcgcaccgatgccctatgtgaaatggatgatgggcgcagaagagttaactaaggaggatgagatgccggtgggtcggaatgtactcgagttaagcaatgttgtaaggtccgctaactacacctgcgtcgccatttcaagtctaggaatgatcgaggcaacagctcaggttactgtgaaggctttacctaagcctcctattgacctggtcgtcacagaaaccaccgcaaccagtgtgactctgacctgggattccgggaactccgaaccagtgacctactatggtatccaataccgcgcagcgggtacagagggaccctttcaggaagtagacggcgttgccaccacacgctattcaatcggtgggctctctccattttccgagtatgcctttcgcgtcctggccgtaaatagcatagggaggggacctccctccgaggccgtgcgagcccgaactggagaacaagccccttcctcaccgccaaggcgtgtccaggcaagaatgctttccgcatcaaccatgctcgtccagtgggaacccccagaagaaccaaacggcctcgtgcggggttatagagtctattatacacccgactctagacgaccccctaatgcctggcacaagcataacacagacgctggtctccttacaaccgtgggcagcctgctgccaggaatcacctatagcctcagagttctggcatttaccgcagtaggggatggcccacccagtccaaccattcaggtcaaaacacagcagggcgtccctgctcagcccgcagacttccaagcagaggtggagagtgatacgcggatccaactcagttggctcctcccaccccaggagcggattataatgtatgaactggtctattgggccgcagaagatgaggatcagcagcacaaggtcacgttcgatccaacaagcagctacacactcgaggatctgaagccagatactctttatcgctttcagctggctgctcgttctgatatgggagtcggcgtgttcaccccgactattgaggccaggaccgcccaaagcactccatcagcccctcctcaaaaagtgatgtgcgtgagtatgggctccacaacagtacgcgtgagttgggtcccacctcccgctgacagccggaacggtgtgattacacagtattccgtcgcgtatgaagccgtggacggggaggacaggggacgccatgtggtcgatggcatcagccgcgaacactcttcctgggacctggtaggattggaaaaatggacggagtacagggtgtgggtaagagcccacacagacgtagggccaggccctgagagctcccctgttctggtgcggactgacgaagatgttccatccgggccaccacggaaggtggaagtggagcctcttaacagcacagccgtccacgtgtactggaagctgcccgtgcccagtaaacaacatggacagatccgaggataccaggtcacctacgtgagactcgagaacggcgaacctcgcggtctgcccatcattcaagatgtgatgctcgcagaggcccaggagaccacaatcagcggcctgactcccgagaccacatactccgtgactgtcgccgcttatacgaccaaaggagatggcgcacgcagtaagcctaaaattgttacaaccactggcgctgtgccaggtcgtcccacaatgatgatctcaacaactgcgatgaacacagcactgctgcagtggcatcccccaaaagagcttcctggagagctcctggggtaccgcctacagtactgccgggctgacgaggctcggcctaataccatcgatttcggcaaagacgatcagcacttcactgttaccggactccacaagggtaccacgtatatctttagacttgccgctaagaaccgtgcaggcctcggcgaagaatttgagaaagagattaggacacccgaggacctgccctcaggttttcctcagaatctccacgtcaccggactcacgaccagtacgaccgaactggcttgggatccgcctgtactggccgagcgcaatggaaggatcatctcatacaccgtcgtgtttagggacatcaattctcaacaggagctgcagaatataacaacggacacacgcttcacactcaccggcctgaagccagacacaacctatgatattaaagtaagggcttggactagcaagggtagcgggccattgtccccatcgatccagtcacgaaccatgcctgtggagcaggtgttcgcaaagaactttagggtggcagctgctatgaagacttcagtattgctctcttgggaggtcccagatagttacaagtcagcggtgccttttaaaatactttacaacgggcagtcagtggaagtcgacggacatagcatgaggaagttaattgctgatctccagccaaatacagagtactcatttgtactgatgaaccgaggatcatccgccggaggcctgcagcacctagtctcaatacggacagccccagatctgctgcctcacaagccacttcctgccagtgcatatattgaggacgggaggttcgacctgtctatgccacatgtgcaggatcctagcctagttaggtggttttacatcgtggttgtccctattgatcgagtgggtggatctatgctaacgccaaggtggagcacaccggaggaattggagttagatgagctgctcgaggcaatcgaacagggaggagaagagcagaggaggcgcagacgccaggccgagcggctgaaaccctatgtagctgctcagttggatgttctccctgagacattcacgctgggcgacaagaagaattaccgaggcttctacaataggccactttctcccgacctgagctatcagtgtttcgtgctggctagcctgaaagagcctatggatcaaaagagatacgctagcagcccttattccgatgagatcgtggtgcaggttacacctgcccaacaacaggaagagcccgaaatgctttgggtgactggacccgtgcttgccgtgatcctgattatcctaatcgtgatagccatactcctcttcaaaagaaaaaggacacatagtccttcctccaaggacgagcagtcaatcgggctcaaagacagcctgttggctcattcatctgaccctgtggagatgcggaggctgaactaccaaacacctggaatgcgagaccaccctccaatccctattacagatttggccgacaatatagaaaggctgaaggccaatgacggtcttaagttctctcaggagtatgagtccatcgatccaggccagcagttcacttgggagaacagcaaccttgaggtgaataaacccaaaaacagatacgccaacgttatagcttatgaccactcgcgcgttatcttgacctcaattgacggcgttcccggatctgactacattaatgcaaactatatagatggctaccgcaagcaaaatgcctacatcgctacacaggggcctctgcccgaaactatgggcgacttttggaggatggtgtgggagcagcggaccgccaccgtcgttatgatgacacggttagaggaaaaatcaagagtgaaatgtgatcaatattggcctgctagaggcacggagacctgtggcttgatccaggtcacactgttggataccgtggaacttgccacatatactgtccggacgtttgctctccataaatctggcagcagtgaaaagcgagagctgagacaattccagttcatggcctggcccgaccacggagtgcccgagtaccctacaccaattctggcgttccttcgtcgcgtgaaggcttgcaacccgttggatgctgggcctatggtggtgcactgttcagccggagtgggaaggaccggatgcttcattgtcatcgacgccatgcttgagcggatgaaacatgagaaaacagtggacatttatggacacgtcacctgtatgcgctcccaaagaaactacatggttcagactgaagatcagtacgtgtttatccatgaggctcttctcgaggcagctacgtgcggacacacagaagttccggcacggaatctgtatgcccacattcagaagctcggccaggtgccacctggtgagtctgtgactgcaatggagctggaatttaaacttctggcctcttccaaggcccatacttcccgattcatctccgctaaccttccttgtaataaattcaaaaatcgcctcgttaatatcatgccatatgagttaacaagggtttgtttgcagcccattcgtggggttgaggggtccgattatataaacgctagcttcctcgatgggtatagacagcagaaagcttacattgctacccagggacctttggcggagtcaacggaggatttttggaggatgctttgggaacataacagcacaattatcgttatgttgactaagctgcgcgagatgggcagggagaaatgccaccaatactggcctgccgagagatcagctagataccaatatttcgtggtggaccctatggcggagtacaatatgcctcaatacatcctgagagaattcaaagtcactgacgcgagggatggacagagtaggacgatacgccagttccagttcacagactggcctgagcagggcgtgcctaaaaccggcgagggttttattgacttcattggccaggttcacaaaacaaaagagcagttcggccaggacggccctataactgtgcattgcagtgctggcgtcggacggacgggggtattcatcaccctctccatagtgctggagaggatgagatatgagggagttgtggacatgtttcaaactgttaagaccctccgtacccagcgccctgcaatggttcagactgaagatcaataccagctgtgttatagagccgctctggagtacttgggcagcttcgaccactatgctacata

SEQ ID NO: 237132 - DNA, 3609 bp, synthetic construct
  misc_feature 1..3609: note = Description of Artificial Sequence: Synthetic coding sequence
  source 1..3609: mol_type = other DNA
atgatgtgtgaggtgatgcccaccattagcgaagctgaaggaccccctggaggtggaggcggacacggttccggcagtccatcccagccagatgcagattcccactttgagcagttaatggttagcatgctggaagaacgggatcgcctgcttgacacacttcgggagacccaggagacccttgcactaacccaagggaaactgcacgaggtgggccacgaacgggacagcttgcaacgccaacttaacaccgcattaccccaggagttcgccgcactcacaaaagaattgaacgtatgtcgcgagcaactgctcgaaagggaggaggagattgcggaactcaaggcagaaagaaataacactcgtttactactggagcacctggagtgcctcgtgtcccggcacgagcgatcactgcgaatgacagttgtcaagaggcaggcccagtcgcccgcaggagtctcctcggaggtggaagttctcaaggctctgaaaagcctttttgagcatcataaggcgctggacgaaaaggtaagagagagacttcgggtggcgctggaacggtgctccttgctggaggaggaactgggtgcaacacataaggagttgatgattttaaaggagcagaataatcagaaaaagaccctcaccgacggagtgctcgatataaatcacgaacaggagaatacaccctccaccagtggcaagaggagctcagacggatcactctcccatgaggaggatttagcgaaggtaattgagcttcaggagattattagcaagcagagtcgggagcaatcccagatgaaagagcgccttgcctccctctcaagccacgtcaccgaactggaagaagacctggacacagctagaaaagaccttatcaagtccgaagaaatgaataccaaactgcagagggatgtgcgggaagctatggctcagaaggaagacatggaggagcgtattaccacactagaaaagaggtacctagccgctcagcgcgaggctactagtgttcacgacctgaacgacaagctggaaaacgagatcgccaacaaggactcaatgcacagacagacagaggacaagaatagacagcttcaggaacgtctggaacttgcagagcagaaactgcaacagacattgagaaaggccgaaactctgccagaggtcgaggcagagttggcccagcgagtcgccgcactgtccaaggccgaagaacggcacggaaatatagaggaaagactcagacaaatggaggcacagctggaggagaaaaatcaagagcttcagcgcgctcgccagcgtgagaagatgaatgaggagcataataagcggctgtctgatacggtggacaagctgctttctgagtctaacgagcggttgcagctccacctaaaggaacggatggcagctttggaagataaaaactccctactcagggaggtggaatccgccaagaagcagctcgaagagactcagcatgataaagatcagctcgtgctgaacatcgaggcgctgagggccgagctggaccacatgcggctacggggtgctagtctgcaccatgggcgaccgcatctgggatctgtacccgattttcgtttccccatggcggatggacacacagactcatatagcacgagcgcagtactccgcagaccacagaagggcagactggcagccctcagggacgagccttcaaaagtacaaaccctgaacgagcaggattgggaacgagcacaacaggcaagcgtgcttgctaatgtggcccaggcgttcgagtctgatgctgatgttagtgatggcgaggatgaccgggataccttgctgtcaagtgtggacctactctccccttcaggccaagctgatgcgcataccctagcaatgatgttgcaagagcagcttgacgcgatcaataaggaaattcgcttgatacaggaagagaaggagaacaccgagcagcgagcagaagaaatcgagtccagggttgggtccggctccctggacaacctcggacggtttagatccatgagctctatacctccatacccagccagctcgctcgcatcatcctcgccccctgggtcaggaagatccacgcccaggcgtattccccactctcctgccagagaggtcgatcggctgggggtgatgaccctgcttcccccatcacgagaagaggtccgggatgacaaaactacaatcaagtgtgaaacctctccgcctagtagccccagagctctgcggctagaccgtctccataagggggcactccatacggtctcccatgaggatatccgtgatattcgcaacagtactggaagccaggacggccctgtgagcaatccaagctcctctaactcaagtcaggattccctgcataaggcaccaaagaagaaaggtatcaaatcaagtatcggaagactgttcgggaagaaggagaagggtcgtcctggacagacagggaaagaggccctcggacaggccggtgtgagcgaaacagacaacagttctcaggacgcattgggcctgtctaaactcgggggacaggctgagaagaacaggaaattacaaaaaaagcatgagttactggaagaggcgcgtaggcaaggactaccatttgcccagtgggatgggccaaccgtcgtcgtgtggctggaactgtgggtaggaatgccggcttggtatgtggcggcttgcagagccaacgtgaagtcgggcgctattatgagtgctcttagcgatacagaaatacagcgggagattgggatctcgaatcccttgcatcgtctaaaactcaggctggcaatccaagagattatgagcctcaccagcccttcagcccctcctacctctaggaccacattggcctacggcgacatgaatcacgaatggataggcaacgagtggctgccatctttgggactcccgcagtatagatcttacttcatggagtgcctcgtcgacgcccgaatgctcgatcatctgacaaaaaaggatctccgtggccagcttaaaatggtcgacagctttcatagaaacagcttccaatgcggcataatgtgtctgcgtaggttaaattacgaccgcaaggagctggagagaaagcgcgaagagtctcaatcagagattaaggatgtcctggtgtggtcaaatgacagggttattcgctggattctctcgattggactgaaagagtacgcaaataacttgattgagagcggggtgcatggagccctgctggccctggatgagactttcgacttctctgctctcgctctccttctgcagatcccgactcaaaacactcaagccagagcagtcctggagcgggagtttaataaccttttggtgatggggaccgaccggaggtttgatgaggatgacgataagagtttccgtagggcaccgagctggaggaagaaattccgtccgaaggatatccgcggattagccgctgggtcagctgaaacactgcccgcaaatttccgcgtaacaagctccatgagcagtccatccatgcaaccaaagaaaatgcagatggatgggaacgttagcgggacccagagactggatagtgcgaccgttagaacttacagctgttag

SEQ ID NO: 237133 - DNA, 3558 bp, synthetic construct
  misc_feature 1..3558: note = Description of Artificial Sequence: Synthetic coding sequence
  source 1..3558: mol_type = other DNA
atgatgtgcgaggtgatgccaactatcagcgaggcggaagggcctcccggaggcggtggaggccacggatctggcagccccagtcagccggacgcagactctcacttcgagcaactgatggttagcatgctggaggagcgtgataggttgctggatacactcagagagacccaggaaacccttgccctgactcagggaaagctgcacgaggtcggacatgagcgagacagtctccaaaggcaactgaacactgcccttcctcaggagttcgccgcactgaccaaggagctgaacgtatgtcgtgaacaactgctcgagcgggaagaggagattgccgagctgaaagccgagagaaacaacacccgactattactcgagcacctggaatgtcttgtctcccgtcacgagcgaagtcttagaatgaccgttgtcaagaggcaggcccagagtcccgcaggtgtgtcaagcgaggtggaggtgctaaaggctctaaagagcctatttgaacatcacaaggccctagatgaaaaagtccgagaaagacttagggtggctctggaacggtgttccctgctagaagaagaactcggggctactcataaggaactgatgatcttgaaggaacagaacaaccaaaaaaagaccctgaccgacggcgttctcgacattaaccatgagcaggagaataccccctctacctccggcaagcgcagctccgatggttcacttagccatgaagaggatttggcaaaggttatcgagttgcaagagattatatccaaacagagccgggagcagagccagatgaaagagagactggcttcattgtctagtcacgtcacagagttggaggaggacctggatactgctcgcaaggatcttattaagtccgaagagatgaatacaaagctccagagggatgtacgcgaggcaatggcccagaaagaagacatggaggagcgcattaccacccttgagaaacgctacttagccgctcaacgggaagccacatccgtccatgatctcaatgacaaactcgagaacgagatcgccaacaaggactcaatgcataggcagaccgaagataagaaccggcaactgcaagagcgtcttgagctggcagaacaaaagcttcagcagacgctgagaaaggcggagactctccctgaagtcgaagccgagttggcacaacgggttgccgcactctccaaagctgaagaacgacacggaaacatagaggaacgcctcagacaaatggaggctcagctggaggagaagaatcaggagctccagcgggctcgccaacgcgaaaaaatgaacgaagaacacaacaaaaggctgtctgataccgtcgataaactcctatctgagagtaacgagagactacagttacatctgaaagagagaatggccgctctagaagacaaaaactccttgctacgcgaggtggagtcggccaagaagcagctggaagagacgcagcatgacaaggatcaactggtgctgaatatagaggctctgagagcggaactggaccacatgaggctgcgtggtgcttctttgcaccatgggcgaccacatctcggttctgtgccggactttaggtttccaatggcagacggccatacagactcgtacagcacatctgccgtcctcagaagacctcagaaaggacgcctggctgccctgcgcgacgagccgagcaaggttcagacccttaacgagcaggactgggagagagctcagcaggcttccgtactcgccaatgtagcccaggccttcgagagtgatgccgatgtgagcgacggcgaggatgatcgtgataccctcctaagctctgtcgacctgctttcccctagtggccaggcggacgcccacacactggccatgatgctgcaggagcagcttgatgcaatcaataaagaaatcagattgatccaggaggagaaagaaaacaccgagcagcgcgcagaagaaatcgagtcaagagtgggctctggatcgcttgataacctcgggagattcagaagcatgtcctctatcccaccttatccagccagctcacttgcctcttctagtcccccagggtccggacgcagcacccctagacgcatcccccattcaccagcccgtgaagtggatcggcttggcgtaatgacccttctgccgcctagtcgtgaggaagtacgggatgacaagactactatcaaatgcgaaacctcccccccatcctctcctagggcactgagactcgacaggctgcataagggcgctctgcatacagtgagccatgaggacatcagagatattcgtaactctacagggtcccaagatggtccagtatcaaacccttcttcttccaatagttctcaggatagcctgcacaaggcccctaaaaaaaagggtattaaatcttctattgggaggcttttcggtaagaaagaaaaggggagacctgggcagacaggtaaggaagctctgggccaagcaggggtgtccgagacggataacagcagccaggatgcacttggcttgtcaaaattgggagggcaggcagagaagaatcggaagctccagaagaagcacgagttgttagaagaggctaggagacagggactcccattcgctcaatgggatggaccaacagttgttgtctggttggaactgtgggtgggcatgcctgcttggtacgtcgccgcttgccgggcaaatgtcaaatctggagctataatgtccgctctgtccgacactgagatccagagagagataggtatatcgaacccgctgcaccgactgaagttaaggttggctatccaagaaattatgtccctgacctcccccagcgcgccacccacgagtcgaacaacgttggcctacggcgatatgaaccacgagtggattggaaacgaatggctgccttctctcggtctgccgcaatacaggagttacttcatggagtgtcttgtagacgcacggatgctggaccacctgacgaaaaaggatctgcgcggtcaattgaagatggtggactccttccataggaactcgtttcagtgtggcattatgtgtctgcgcaggctgaattacgaccgcaaagagctggagagaaagagggaagagagccagtcggagatcaaagatgtcctagtctggagcaacgatcgcgtcatacggtggatcctgagcatcggcctcaaagagtatgccaacaacttaatcgaatcaggggtgcatggtgctcttctggccctggatgagaccttcgacttttctgctctagctctcctactgcagatccctacccagaatacacaggctagagcagttctcgaaagagaattcaacaatctcctggttatgggcaccgacagaagattcgacgaagacgatgacaaaagctttcggcgagccccatcctggcggaagaagtttagacctaaagacatacgaggccttgccgctgggagcgctgaaactctcccagccaacttccgcgtaacctctagtatgagttccccttctatgcagcccaaaaaaatgcaaatggacgggatgtag

SEQ ID NO: 237134 - DNA, 477 bp, synthetic construct
  misc_feature 1..477: note = Description of Artificial Sequence: Synthetic coding sequence
  source 1..477: mol_type = other DNA
atgatgtgtgaagtgatgcccaccatctccgaagccgagggccctccaggaggcggaggcggacatggttcaggcagtccctctcagccagacgcagattctcatttcgagcagttgatggtgtctatgctagaggagcgtgacagattgttggacactctacgtgagacacaggagaccctggccttaacacagggcaaattacatgaagtcggtcacgaacgagactccctccagcgccagttgaataccgcccttccgcaagagtttgcagctttgacgaaggaacttaacgtgtgtagagagcagctattggagagggaagaagaaattgctgagctgaaggcagagcgcaacaatacccgattgctgctggaacatctggagtgtctggtcagccgacatgaacggagcctgagaatgacagtagttaagaggcaggcgcaatcaccagccggtgtttcttctgaagtgtag

SEQ ID NO: 237135 - DNA, 300 bp, synthetic construct
  misc_feature 1..300: note = Description of Artificial Sequence: Synthetic coding sequence
  source 1..300: mol_type = other DNA
atgatgtgcgaagtaatgcccacaattagcgaagctgagggtccacccggtgggggtggcggtcatggtagcggcagtccctcacagcccgacgcggactctcatttcgagcagctcatggtgagcatgctggaagaacgcgacaggctgctggacactctccgggagacgcaggagaccctggctctgacacagggtaagcttcacgaagtgggacacgagcgagatagtcttcagagacagttgaacaccgccctgcctcaggagtttgctgctctgaccaaggaactcaatgtgtag

SEQ ID NO: 237136 - DNA, 2100 bp, synthetic construct
  misc_feature 1..2100: note = Description of Artificial Sequence: Synthetic coding sequence
  source 1..2100: mol_type = other DNA
atgcgactacggggagcctccctccaccacgggcgaccccatttaggctccgtgcccgacttccgttttccaatggcagacggacatactgatagctatagcacaagtgccgttctccggcgacctcaaaagggtaggctggccgctcttcgagacgagcctagtaaggtacagacacttaacgaacaggactgggagcgagctcagcaggcttctgtgttagccaatgtggcccaggcttttgagtccgacgcggacgtgagcgatggggaggatgatagggatacactattatcttctgttgatttgctgtcacccagtgggcaggccgatgcccacacgctggcaatgatgctgcaggagcagttggatgcgattaataaggagattcgcctcatccaggaggagaaggaaaatacggagcagcgggcagaggagatcgagagtcgggtggggagcgggtctctggacaatcttgggaggtttcggagcatgtctagtattcccccatatcctgcttctagtctggccagtagctctcctcctggctctgggagaagcactccacgtagaataccacacagtccagccagggaggttgatcggttaggcgtgatgacccttccatccgatctgcggaaacataggagaaaactgcccccaagtcgggaggaagtgagggatgataagacaactataaaatgtgagacttcccccccatcctcgccgcgtgccctgagactggaccgcttgcacaaaggcgcactgcataccgtttctcacgaggacatccgtgacatacgtaactctaccggaagccaagacggccctgtgtccaacccttcgtcatctaattcctcgcaggatagtcttcacaaagcccctaagaaaaaaggcataaagtctagcatcggacgactatttggtaaaaaggagaagggaagacctggacaaacggggaaggaggccctgggccaagccggagtatccgagactgataatagttctcaggacgccctcggactgtccaaacttggtggacaggccgagaagaacagaaaattgcagaaaaagcacgaactgcttgaagaggcccgacgacaggggctcccatttgcgcagtgggacggaccaacagtggtggtgtggctggagctatgggtcggcatgcccgcttggtatgttgctgcatgtagggcaaatgtcaagagtggcgctataatgagtgctctctctgacaccgagattcagagggagattggaataagcaaccccttacaccgcttgaagttaagactagctatccaggagattatgtccctgacatccccgagcgctccccctactagccgcaccacccttgcgtatggagacatgaaccacgagtggataggcaatgaatggctgccttcactcggacttccacagtacaggtcctactttatggaatgtctcgtagatgccaggatgttggaccacttgaccaaaaaggaccttagaggccagttaaagatggtcgattcttttcaccgaaactcctttcagtgtggcatcatgtgcctacggaggctgaattacgatcgcaaggagctggagagaaagagagaagaatcccaaagtgaaataaaggacgtgctagtatggagtaacgacagggtcatccgctggattctatctatcggcttgaaggaatacgcgaataacctgatcgaatctggagtgcatggagctctcttagccctcgacgaaaccttcgatttctctgccctggccctgcttctgcagatccctactcaaaatacacaggctagggccgttttagaaagggagttcaacaatctattagtgatggggaccgaccgtaggttcgacgaggatgatgataagagttttcggagagcccctagctggagaaaaaaatttcgacctaaggacatcagaggtctcgcagcaggatccgccgaaactctaccagctaattttagggtcacaagcagcatgagctccccaagtatgcagcccaaaaaaatgcagatggacggcaacgtgtctggcacccagagactagatagtgccaccgtgaggacctactcctgttag

SEQ ID NO: 237137 - DNA, 3585 bp, synthetic construct
  misc_feature 1..3585: note = Description of Artificial Sequence: Synthetic coding sequence
  source 1..3585: mol_type = other DNA
atgatgtgcgaggtgatgccaaccatatccgaggacgggcgtcgaggtagcgctctgggccctgatgaagccggtggagagctcgagaggctgatggttacgatgttaactgagcgcgagcgactcctagaaactctgagggaagcccaggacggactcgccacagcccagttgcggctgcgagagctggggcacgaaaaggactcgctgcaaaggcagctgtcgatcgcactgcctcaagagtttgctgctcttacaaaagagctgaatctatgtagagagcaacttctggaacgggaggaagagatcgctgagctgaaggctgaaaggaacaataccagactgcttctggagcaccttgagtgcctggtctcacgacacgagcggtctctgcgaatgacagtggtgaaacggcaggcgcagtctcccggaggggtctccagcgaagtagaggtgctgaaggccctcaaatccctcttcgagcaccataaggccttggatgagaaggtgcgtgaaagactccgaatggccctggaaagggtggctgtgctggaggaggagctggagctgtcaaaccaggagacacttaatcttcgggagcaactgagcaggcggaggtctgggctggaggaaccaggtaaagatggagacggtcagaccctggcgaacggtctggggccagggggtgattcaaatcgcagaaccgccgaattggaagaggccttggaacggcagcgcgctgaagtttgccaacttcgagaaaggctggccgttttgtgtagacaaatgtcgcagctggaggaggaactgggcactgcccacagggaattgggaaaggcggaagaggccaactctaaactccagagagatctgaaggaggccctggcacagcgggaagacatggaggagaggattaccacattggagaagcggtatttgtcagcacaacgggaagcaacctctctacatgacgctaatgataagttggaaaatgaactagcatccaaagagtctttatatagacagtccgaagagaaaagccggcaactcgctgaatggctcgacgatgctaagcagaagctccaacaaacccttcagaaggcagagactctcccggagattgaggctcagctggctcagagagtggctgccctgaataaagccgaggagagacatggcaatttcgaggaaagactgcgtcaactcgaagcccagcttgaagagaaaaaccaggaactgcaaagagcacggcagagagagaaaatgaacgatgaccataataagaggctatcagagaccgttgacaaactgctcagcgagagcaatgagcgcctgcagctgcatctgaaggagcggatgggagccctagaggagaagaattctctgtcggaagaaatcgcgaatatgaaaaaattacaggacgaattactgttaaataaggagcaattactcgccgagatggaacggatgcaaatggaaatagaccagcttcgcggaagaccgcctagcagctactctcgttccctgccaggcagcgccctggagttacgctacagccaggctccaacattaccttctggagcacacctggacccatacgtcgccggaagcggaagagcaggcaagaggggaaggtggagcggtgttaaagaggaaccgtcgaaggactgggaaagaagcgctcccgctggatcaattccacccccatttccaggcgaactcgatggatccgacgaagaagaggctgagggcatgtttggcgctgagctgctctcgccaagcggccaagctgacgtacagactctcgctatcatgctgcaggaacaactggaagctatcaataaagagatcaaactgattcaggaggaaaaagagaccaccgaacaacgtgcggaggaactggaaagcagagtgtcaagctcgggactcgactcgctgggcagataccgtagcagttgctctttaccaccctctctgacaacgtcaactctggcatccccatctcccccatcatccggacactcaacgcccagactcgccccaccctctcctgcgagggagggaactgataaagcgaatcatgtaccaaaagaagaggctggggctccaaggggcgagggccctgcaatcccgggagatacacctccgccaacccctagatctgcgaggctcgaacgcatgacccaagcccttgcactgcaggccggttcactcgaggacggcggacctccacgagggtccgaagggaccccggacagcctgcacaaggcacctaagaaaaaaagcataaagagttccatcggaagactgtttggtaagaaggaaaaaggacgcatgggcccacctggacgtgactcctccagtctcgctggaacaccctctgacgagaccctcgccaccgacccactcggactggctaagcttacagggcctggcgacaaggaccgcagaaacaagagaaagcacgagttactggaggaagcttgtcgccaggggttaccctttgccgcttgggacggtcccaccgtggtgagttggctagaactatgggtcggcatgccagcatggtacgtggccgcttgcagagctaacgtgaaatcaggagcaattatggctaacctgtctgacacagagatccagcgcgagattgggattagcaatcccctgcataggttgaaactccggctagccattcaggagatggtcagccttacctctccatccgctcccgctagtagccggacgagcacaggtaacgtctggatgactcatgaggaaatggagagcctgactgcaacgactaagccggaaacgaaggaaattagctgggagcagattctagcctacggcgacatgaaccatgagtgggtgggtaacgattggttgccttcccttggtctcccacagtacaggtcctactttatggagtccctggtcgatgctcggatgctggaccacttgaacaaaaaagaactccggggacagctcaagatggtggatagctttcaccgagttagccttcactatggaataatgtgtctgaagcgcctcaactatgatcgcaaagatctggaacggagaagagaggaatctcagacacaaattagagatgtgatggtgtggagcaatgaacgggtgatggggtgggtcagcgggttagggctgaaagaatttgccacaaaccttactgagagtggggtccacggcgctctgttggccctagatgaaacattcgactactctgacttggctctactgctacagatccctactcagaatgcccaagctcgccaactcctggagaaggaattcagcaacttaataagcctgggcactgaccgccgtctcgatgaagactccgcaaagagtttttccagatcaccaagctggagaaaaatgtttcgagaaaaggacctgcgcggtgtcacgccggattcagctgagatgttgccccctaatttccgaagtgcagctgctggagcactgggctctccagggctgccattgcgtaagctccaacctgaagggcagacgtctggctcaagccgcgctgatggggtgtcagtgcggacatactcgtgttag

SEQ ID NO: 237138 - DNA, 1731 bp, synthetic construct
  misc_feature 1..1731: note = Description of Artificial Sequence: Synthetic coding sequence
  source 1..1731: mol_type = other DNA
atgtctggccaggagttcgcagctctcacaaaggaactcaatttgtgtagagagcagttgctggagcgagaagaggaaatcgctgaactgaaggcagagcgaaacaatacacggctactgctggagcacctggagtgtttggtgagcaggcacgagaggagtttgcggatgaccgtggtgaagcgccaggcccaaagcccgggaggtgtttccagtgaagttgaggtgctgaaggccctgaaaagcctcttcgaacatcataaagctttagacgaaaaagtcagggaaaggctgcgaatggccctggagagggtagctgtcctggaggaggagctggagctgtccaatcaggagacacttaatctcagagagcagctgtcccggcgtcggtccggactcgaagagcccggaaaagacggggacggtcagactctcgccaacgggctggggccagggggagactctaatcgccgtaccgcagagctggaagaggccctagaacgccagagggccgaagtgtgtcagctgagagaacgtctggccgtactgtgcagacaaatgtcacagctcgaggaggagttaggcacagcacaccgggaactcggcaaagccgaggaggccaattccaaactgcaaagagacctcaaagaagcgcttgctcagcgggaagatatggaagaacggattacaacgctggaaaaaagatacctcagtgcgcagcgtgaagcgacatcattgcacgatgctaacgataaactggagaacgagttggcctctaaggaaagtctgtatcgccaaagcgaggaaaagtctcgtcagctggctgagtggctagatgatgcaaaacaaaagctccagcagacactccagaaggccgagactctccctgaaatcgaagcccagctggcacagagggtcgcagcgctgaacaaggccgaggagcgacatggcaattttgaggagcgtttgcggcagctggaggcacagctggaagaaaagaaccaggaacttcagagggcaagacagcgcgagaaaatgaatgacgaccacaataagcgcctatcagaaaccgtcgataagctgctcagcgaaagcaacgagcggctgcagcttcacttgaaggaaagaatgggtgcactggaggaaaagaactccctgagcgaggaaatagctaacatgaagaaactccaggatgaactgctgctcaataaggagcagctgctcgccgagatggaacggatgcagatggagattgaccagctgcgaggacggccaccgtcaagttactcccgctctctgcctgggtccgctctggaacttcggtactcccaggcccctacactacccagtggggcacatctggatccttatgtcgcagggtccggaagagccggaaagagaggtagatggtctggagtgaaggaggagccctccaaagactgggagcggtcagcacccgctgggagcataccccctcccttccctggcgaattggacgggagcgacgaagaagaagcagaggggatgttcggcgctgaactgctgtcaccgagtgggcaagcagacgtccagactctggcaattatgctgcaggagcagctggaagcgatcaataaggagatcaagatcatgagccttcgccgaaagctggaactccacgaagggcgtggcaggccctctcaggaaaccccacaccacccgcttcccgcactgccagttctgagggaatag

SEQ ID NO: 237139 - DNA, 4338 bp, synthetic construct
  misc_feature 1..4338: note = Description of Artificial Sequence: Synthetic coding sequence
  source 1..4338: mol_type = other DNA
atgcggcgattactggaaccttgctggtggattctgtttctgaaaattacctcttccgtactgcattacgtggtctgctttcccgctctgactgagggctacgtcggggctttgcatgaaaaccgccacggttccgccgtgcagatcagaagacgcaaagcaagtggggatccctactgggcgtactccggggcatacggcccagagcactgggtgacctccagtgtgtcctgcggcggtcgccatcaatcgccaattgatatcctggaccagtacgccagagtgggggaagaatatcaggagctgcagttggacggcttcgacaatgaaagcagcaataaaacatggatgaagaataccgggaagacagtggctattctcttgaaggatgactattttgtctccggggcaggtcttcccggacgcttcaaagccgaaaaagtggaattccactggggccatagtaatggctcagccggtagcgagcacagcataaatgggagacggtttccggtagaaatgcagatctttttttacaaccctgatgattttgactcatttcagactgctataagcgaaaatcgcattatcggggctatggcaatttttttccaggtttctccgcgagataattctgccctcgatccgattatccacgggctcaagggggttgtgcaccacgagaaagagacatttctggatccttttgtgctccgggatctattgcctgcaagcctgggcagctactacaggtacaccggcagtctgactacacccccatgcagtgaaattgtggagtggatcgtgttcaggagacccgtgcccatctcctatcatcagcttgaagcattctactctatattcaccacggaacagcaagatcacgtgaagtccgtcgagtatctcagaaataacttcaggccccaacagaggctccacgatagggtcgtatccaaatcagcagtccgggactcctggaaccacgacatgacagactttctggagaaccctctgggtaccgaggcatcaaaggtctgcagctcccctcctattcacatgaaggtacagcccctcaatcaaaccgccctgcaagtttcatggtcacagcccgagactatctaccaccctccaattatgaactatatgatcagctactcctggaccaagaacgaggatgagaaagagaagacattcacaaaagacagcgataaggacctcaaagccacaattagtcatgtctctcccgatagtctgtacctgtttcgcgtgcaggctgtctgtagaaatgatatgagatccgacttctctcagactatgctgtttcaggcgaacacaacccgcatcttccagggaacccgtattgtcaagaccggtgttcccaccgcatcaccggcttccagcgcagacatggctccgatcagcagtgggtccagcacatggacctcctctggtatccccttcagcttcgtatcaatggccacagggatgggtcccagcagttcaggctcacaggctacagtggccagcgtggtcacctccacactattggcgggtctcgggttcggtggcggtgggatatcttcattccctagtaccgtttggcctaccaggcttcctacagcagccagcgcatccaagcaggctgctcggcctgtgctggccactacggaggccctcgcctcacccggtcccgacggcgactctagtcctaccaaggatggagaaggtaccgaggagggggaaaaggatgaaaaatccgaatctgaggacggggaaagagaacacgaagaggatggagagaaagattcggagaaaaaggagaagagtggagtcacacacgcggcagaagagaggaaccaaaccgagccttcaccaacacccagcagtcctaacaggacggccgagggcggacaccagaccatacccggtcacgagcaggaccataccgccgtcccaacagatcagactggcggacgtcgcgacgcaggtccgggattggaccccgacatggttaccagtacccaggttccaccaacagcaacggaggagcagtacgcaggttccgacccgaagcggcctgaaatgccctctaaaaagcccatgtcaagaggagacaggttttcagaagatagccggtttatcacagtgaaccccgctgaaaaaaacacctcggggatgatctctcgaccagcgccaggacgcatggagtggattatccccctcatcgtcgttagcgcgcttacgtttgtgtgtctgattctcctgatagccgtcctcgtgtactggaggggttgcaataagatcaagagtaagggtttccccagaagattcagggaagtccccagtagtggagaaaggggcgagaaaggtagtaggaagtgtttccagaccgcacatttttatgtggaggactcatccagtccaagggtggtgcctaacgagagtatacccatcatccccatccctgacgatatggaggccattcccgtgaaacagttcgtaaagcacatcggagaattgtattcaaataaccagcacggcttcagcgaagattttgaggaagttcagcgatgcacagcagacatgaacatcacagccgaacattccaatcatccagagaataagcataaaaatagatacatcaatatcctcgcctacgatcactccagagtgaaactgcgtcctttgccagggaaagattcaaaacactcggattatatcaacgccaattatgttgacggatataacaaagccaaagcatatattgccacacaagggccactgaagtccactttcgaggatttctggaggatgatctgggagcaaaatactgggatcatcgtcatgattacaaacttggtggaaaagggacgaaggaagtgtgatcagtactggcccacagagaattctgaggagtacggtaacatcattgtaaccctcaagtctaccaaaatccatgcgtgctataccgtgcgcaggttctccattagaaacaccaaggtgaagaaggggcagaaagggaatcccaaggggcgtcagaatgagcgcgtagtgatccaatatcattacacccagtggccggatatgggtgtgcctgaatacgcgcttcctgtgcttacgtttgtccgacgctcatctgctgcgagaatgcctgaaaccggaccagttctcgtgcattgttcggcaggagtgggcaggacaggtacctacatcgtcatagactcaatgctgcagcaaattaaagacaaaagcactgtcaacgtcttaggctttctcaaacatatccgcactcagaggaattatctcgtgcaaaccgaggagcagtacatttttatccacgatgcactgctcgaagcgatcctggggaaagaaactgaagtatccagcaatcagctgcattcttatgtcaattcaatactcattccaggcgttgggggaaagacgcgcctggaaaaacaattcaagctcgtgacccagtgcaacgctaaatatgtcgagtgtttctccgctcagaaggagtgtaataaagagaagaaccgtaacagctcagtggtaccgtcagaacgcgctagagtgggtctggcgcctctgcccggtatgaagggtacggactacataaacgcctcatacatcatgggttactatcggtccaatgagttcataattacccaacaccctctgccgcatactactaaagacttttggcgtatgatctgggaccacaatgcccagatcattgtgatgctgcctgacaaccaatccctggccgaggacgagttcgtctattggccaagtcgcgaagagagcatgaactgtgaggcctttacagttacactgatctcaaaagatagactctgtctgtctaacgaagaacagatcatcatccatgattttattctggaggccacacaggacgattacgtcttagaggtgagacatttccaatgcccgaaatggcccaatcccgacgcccctatcagttccacatttgagctgataaatgtcatcaaggaagaggcgctcactcgcgacgggccaacaattgttcacgacgaatacggcgctgtctctgcaggaatgctatgcgctcttacaacactcagtcagcagcttgagaacgaaaatgccgtggacgtctttcaagtagcaaaaatgatcaatctcatgagacccggtgtctttaccgatattgagcagtaccagttcatctacaaggctatgctgagtctcgtgtccactaaagaaaatggcaatggacccatgacagtggataaaaacggagccgtgctgattgcagatgagagcgaccctgccgaatctatggagagtttagtctag

SEQ ID NO: 237140 - DNA, 309 bp, synthetic construct
  misc_feature 1..309: note = Description of Artificial Sequence: Synthetic coding sequence
  source 1..309: mol_type = other DNA
atgcggcgactcttggaaccctgctggtggatcttatttttgaagattacctcttccgtactacactacgtggtgtgctttccagcgttgaccgagggttatgtgggggctctccatgaaaaccgccacggctctgcagtccagatccgccgtagaaaagcaagtggtgatccctactgggcttacagtggcaagtcttcatgcagcaacggggaccacaccgggcagctgactagccactctacacatctgaaagcccactttgaatctctgctctgtctatccagtgtgtgcagcaacttgtcttag

SEQ ID NO: 237141 - DNA, 2814 bp, synthetic construct
  misc_feature 1..2814: note = Description of Artificial Sequence: Synthetic coding sequence
  source 1..2814: mol_type = other DNA
atggccggtgctggcggtgggctgggggtttggggcaacctggttctactggggctttgttcctggactggggcaagggcacccgcaccgaaccccggaaggaacctcaccgtcgaaacacaaaccaccagtagcattagcctatcatgggaggtccccgacgggctcgactcccagaatagtaattattgggtccaatgcacaggtgatggaggcacaacggaaacaagaaatacaacagcgactaacgtcaccgtcgatgggctgggcccaggatcactgtacacctgttctgtctgggtggaaaaggatggagttaactctagtgtgggtacagtcactactgcaactgctccgaatcctgttcgcaaccttaccgtcgaggcacagacaaactcgtctatagcgcttacctgggaggtgcccgacggaccagacccacaaaatagcacatatggcgtggagtatacaggcgacggcggtcgggctggcacgcgctcgacagcacacacaaacattaccgtggaccggcttgagcccggatgcctttacgtgttctcggtctgggttggtaaaaacggaatcaattcctctcgggagactagaaacgccacgactgcccctaaccctgtacgaaatctccatatggagacccagaccaacagtagtatcgccttatgctgggaggtcccggatggcccatatccacaggactacacatactgggtcgaatacacaggggacggcggaggaacagagacccgcaacaccacaaatacgagtgtgaccgccgaacgactggagcctgggacgttgtacaccttctccgtttgggcagaaaaaaacggcgcaaggggctctcgacaaaatgtttcaatttcaactgtacccaatgcagttacctcactctccaaacaggattggacgaacagtactatcgccttaagatggacagccccacaagggccaggacaatcaagttactcctactgggtgtcatgggtgcgggagggcatgaccgaccctcgcactcagtctaccagtggcactgacattacactgaaggagctcgaggccggtagcctctatcatctgacggtgtgggccgaacgaaacgaagtccgtggttataatagcactctgactgccgcaactgctcctaatgaggtgactgatctgcagaacgagacccaaaccaaaaactccgtcatgctgtggtggaaagcgcctggggaccctcattcccagctctatgtgtactgggtgcagtgggctagcaagggccacccgaggaggggtcaagatccccaggccaattgggtgaaccaaaccagtaggaccaacgagacctggtacaaggtagaggcgctggagcccggaacactgtataacttcaccgtttgggcggagaggaacgatgtggcttcctccacacaatccctctgtgccagcacgtatccagacacagtgaccattacgagctgtgtatctacctccgctggctacggcgtaaatctaatttggagctgcccgcagggcggatatgaggctttcgagctggaggttggtggccagcggggaagtcaggatagatccagttgtggagaggccgtgagtgtcctcggcttgggacccgcacggagttaccccgcaacgatcacaactatttgggacggaatgaaagttgtatctcactcagtggtgtgtcacaccgaaagtgcaggggtcatcgcaggagcttttgtgggcatcctgctgtttttgatcctggtgggacttctcattttttttctgaaacggagaaataagaaaaagcagcagaagccggagttgagggatctcgtgttttcatctcccggtgacatcccagctgaagactttgcggaccatgtgcgcaagaatgagagagattccaattgcggatttgccgacaaataccagcaactcagtctggttgggcactcccaaagccagatggtagcctcagccagcgagaataatgccaaaaaccggtacagaaacgttctcccgtatgattggtcccgcgtaccactgaagccaattcatgaagagccgggttcagattacattaacgccagttttatgcctggattgtggtcgccgcaggagttcattgctacccaaggacctcttccgcagacagtaggcgacttttggcggctcgtttgggagcaacagtcacacacactggttatgctcacaaactgtatggaggccggacgggtgaagtgcgaacactactggcctcttgacagccagccctgtacacatggccacctgcgcgtaactttagtcggggaggaggtcatggagaactggaccgtgcgcgaactgcttctgctgcaagtggaggaacaaaagaccctcagcgtaaggcaatttcactatcaagcatggccagatcatggtgtgccttcctctcctgatactctgttggccttttggaggatgctaagacagtggctggaccagacaatggaagggggtccacccatcgtccactgctcagccggtgtagggagaaccggcaccctgatagcccttgacgtccttctcagacagctgcagagcgaaggcctcctgggcccattctctttcgtgagaaaaatgcgcgagtctcggccactcatggtgcagactgaggcccagtacgtatttcttcatcagtgtattctccgtttcctgcagcagagcgcgcaggcccctgcggagaaagaagtaccatatgaagacgtcgagaatttaatctatgagaatgtagctgctattcaggcccacaaacttgaggtgtag

SEQ ID NO: 237142 - DNA, 3348 bp, synthetic construct
  misc_feature 1..3348: note = Description of Artificial Sequence: Synthetic coding sequence
  source 1..3348: mol_type = other DNA
atggccggtgccggtggagggctgggtgtatggggaaatctcgtgttactagggctgtgcagctggacgggtgcgcgagcacccgctccaaatccagggagaaatttgaccgtggagactcagacaactagctctatttctctctcctgggaagtgccggatggacttgatagtcagaattcaaactattgggtgcagtgcaccggtgatggtggtactaccgagacgagaaataccaccgctactaatgtgactgtcgacggtcttgggccaggaagtctgtatacatgcagcgtgtgggtagagaaagacggtgtgaactctagcgtgggaacagtgacgacagcaacggccccaaaccccgtcaggaatctgcgggttgaagcccaaaccaactcaagtatcgccctgacctgggaggtgccagacgggcctgaccctcagaattccacatatggcgtagagtatacaggcgatgggggaagggcaggaacccgctcaactgctcacactaacataacagtagatggactcgagcccggatgtctctacgctttctctatgtgggtgggcaagaatggaatcaattcctccagggaaacccgtaatgcaactaccgcacacaatcctgtgaggaatctgagggttgaggcacaaactacatcttccatcagcctgtcgtgggaagtcccagacggtacagatccccagaattctacctactgtgtgcagtgcactggggacggagggaggactgagacccgcaacaccactgacacaagggttacggtcgacggattaggcccaggatctttgtacacatgtagcgtatgggtcgaaaaagacggagtgaattcctctgtagagatcgtgacgtccgcaacagctcccaatccagtccgcaatttgactgtggaggcccaaacaaattcttctatcgccctgacttgggaggtgcccgatgggcctgatccacaaaactccacctacggggttgagtacactggcgatggcggtcgcgcaggcaccagatccactgcacacaccaatatcaccgtcgaccgcttggaaccaggctgcctttacgtcttttccgtctgggtggggaagaacggtattaactcgagccgggaaacccggaacgccaccacggcccctaaccccgtcagaaatcttcacatggaaacacagacaaactccagtatcgcactgtgctgggaggtgcccgacgggccttacccccaagattatacctactgggtagaatataccggtgatggagggggtaccgaaacacgcaataccacgaatacatcggttaccgcggaaaggctggagccaggcactctgtacacattcagcgtctgggccgaaaagaacggcgctcgcggttcccgccagaacgtgagtatttctacagtgcctaacgcagtgacctccttgtccaaacaggattggaccaatagtaccatcgccctcaggtggaccgctccccagggacccggtcagagcagctactcttactgggtgagttgggtgcgggagggaatgaccgaccccaggactcagagcacaagtggcaccgacatcactctgaaagagctagaagccggatctctgtatcacctgactgtctgggcagagcggaacgaggtccgtggctataatagtacactgacggcagcaactgccccaaatgaggtcaccgatctgcagaatgagacccagacaaagaattcagtaatgctatggtggaaagcaccgggtgacccgcactctcagctgtacgtctattgggtgcagtgggccagcaaagggcatcccagaaggggtcaagaccctcaggctaattgggtgaatcagacctcaagaacaaacgagacttggtacaaagttgaagcactcgagccaggaacactgtacaactttaccgtgtgggccgagagaaacgacgtggcctcctcaacgcagtccctgtgtgcctcaacgtatcccgataccgtgacaattacctcatgcgtttctacttcagccggttacggggtgaacctgatttggagttgtccccagggcggatatgaagccttcgaacttgaggtggggggtcagcgaggcagccaggaccgttccagctgcggggaagcagtatctgttctcgggcttggcccagcacggtcctatccggctactataacaaccatttgggacgggatgaaggtcgtgagccacagcgtcgtgtgtcacactgagtccgctggcgttattgccggagcattcgtgggcattcttctttttctgatcttggttggtctgttaatttttttccttaaacgcaggaataaaaagaagcaacaaaagcccgaactgagggacctggtcttcagcagcccaggggacatccccgctgaggatttcgctgatcatgtgcggaaaaacgagagagatagcaactgcggcttcgccgacaaataccagcagctcagtctggtcggtcattctcagtcacaaatggtggcaagtgcctctgagaacaacgccaagaacaggtatcgaaatgttcttccatacgattggtctagggtcccactgaaaccgattcatgaggagccaggaagcgactatataaatgcatcttttatgccaggcctttggagccctcaggagtttatcgccactcagggacccctcccccaaaccgtcggggacttctggaggctggtatgggaacagcaatcacacaccctcgtgatgttaacgaactgtatggaagctgggagagtcaaatgcgagcactattggcccctggacagccaaccctgtactcatgggcacttgagggtgactctggtgggcgaagaagttatggagaattggacagtccgggagttactgctgctccaagtcgaagagcagaagacactgtctgtaaggcaattccactatcaggcctggcccgaccatggagtgccaagctctcccgacaccctgctcgccttttggagaatgttacgtcagtggctggaccaaacaatggagggaggcccacctatcgttcattgctccgcgggtgtgggtcgtaccggtaccctaatcgctctggatgtcctgctgagacagcttcagagcgagggtctcctgggcccatttagcttcgtgaggaagatgcgcgagagtcgacctctgatggtgcagaccgaagctcaatatgtgttcctgcaccaatgcattttacggttccttcagcagtctgcccaggcacccgcagagaaagaagtcccctacgaggacgtcgagaacctaatatatgagaatgtcgcggcaatccaggcacataaattagaagtttag

SEQ ID NO: 237143 - DNA, 1278 bp, synthetic construct
  misc_feature 1..1278: note = Description of Artificial Sequence: Synthetic coding sequence
  source 1..1278: mol_type = other DNA
atgaaacccgctgcccgtgaagcgaggttgcccccaagaagccccggattgagatgggctctccccctcctgctgcttcttctgcgcttaggtcagattctttgtgccggaggaacaccctccccaataccggatcccagcgtagctaccgtcgccaccggggaaaacggtatcacacagatttccagcaccgcggaatccttccataagcaaaacggtacagggaccccccaggtggaaactaacaccagtgaggatggagaatccagcggggcaaacgactctctgcgcacaccagagcaagggtctaatggcacagacggggctagtcagaagacccctagctccaccgggccatctccggtcttcgatatcaaggctgtgtccatctcgcccaccaatgtaatcctcacttggaaatccaacgacaccgctgcctctgagtacaaatatgtcgtaaagcataagatggaaaacgaaaagaccataaccgtcgtgcatcaaccctggtgcaatattacgggcctgagacccgctacgtcatatgtgttctcaatcacgccgggtattggaaacgagacttggggcgatccccgagtaattaaggtcattaccgagcctatccctgtaagcgacctccgcgtcgccttgaccggggtgcggaaggcggctctgtcatggtccaacggtaacggaactgcaagctgcagggtcctcctagagagtatcggaagtcacgaggagttaacacaagattcacgcttacaggtgaacattagtggtctgaagcccggagtccagtacaatatcaatccatacctactgcagagcaacaaaacgaagggagaccccttgggaacagaaggtggcctggatgctagcaacacagagaggagtcgcgctggatcacccacagccccagtgcacgatgaaagcttggttggccctgtggaccccagtagcggacagcagtcacgagacacagaggtattactagttggcctcgagccaggcacccggtacaacgctacagtgtattcccaggccgctaatggcaccgagggtcagccccaggccatcgagttcagaacaaacgctattcaagtcttcgacgtgaccgccgttaacatcagcgcaacttctctgactctgatctggaaagtttctgataatgaatctagctcaaactacacttacaagatacatgtagccggtgaaactgactcgtccaaccttaatgtgtccgagccaagagccgtcatacctggcttgagatag

SEQ ID NO: 237144 - DNA, 4014 bp, synthetic construct
  misc_feature 1..4014: note = Description of Artificial Sequence: Synthetic coding sequence
  source 1..4014: mol_type = other DNA
atgaagccggctgcgagggaggctcgtctgccccctcgtagccccggtctgagatgggccctacctttactgctcctgcttctgaggctgggacagatactctgcgccggtgggacaccatctccaattccggacccctccgtcgccacagtggcgacaggcgagaatggaattactcaaattagctctactgctgagtccttccataaacagaacgggaccgggactccgcaggtcgaaaccaacactagtgaagatggcgaatcctcgggcgcaaacgatagcctgcggactccggaacagggctctaatggtaccgatggggcaagtcaaaagacaccctcaagcactgggccaagccccgtgttcgacattaaggccgtcagcatatcccccaccaatgtgatcctgacatggaaaagtaacgacacggctgccagcgaatataagtacgtcgttaagcataagatggagaacgagaagaccataacagtcgtccatcaaccctggtgcaatatcacaggattacgcccagctacgagctacgtcttctctattacccccggtattggaaatgaaacatggggcgacccccgtgttattaaagtaattaccgagcctatccccgtgtccgatcttagagtggccctcaccggcgtacgcaaggcagcgctgagctggagcaacggcaacgggactgccagctgcagagtcctactggagagtataggcagccacgaggaactcacccaggactcaagacttcaggtgaacatttctggcctaaagccaggcgtgcagtacaatataaacccctacctcctgcagagcaataagacgaaaggagacccactgggcactgagggtggactggatgcaagcaacaccgagaggtctcgggcaggcagtccaacagcccctgtgcacgacgagtccctggtcggaccagtggacccttcgtcaggacagcaaagtcgggacacggaggtgttgctagtaggcttagagcccggaaccaggtataatgccacagtgtactcacaggccgctaatggtactgaaggacagccacaggcaatagagtttaggacaaatgctatccaggtatttgacgtgacggctgtcaacatcagcgcaacctcactgactctaatttggaaggtgtctgataatgagagctcatcaaattacacttacaaaattcacgtcgccggtgagaccgattcttccaacctgaacgtgtcagaaccaagggctgtcatacctggacttagatccagcacattttacaacatcactgtctgccccgtgctgggcgacattgaagggacacctggtttcttgcaggttcacactcctcctgtgcccgtgtctgattttagggtcactgtggtcagcacaacggagataggcctggcgtggagcagccacgacgcagaaagctttcaaatgcacatcactcaggagggtgctggaaattcccgagtggagatcaccaccaatcaaagcatcataatcggcggtctgttcccgggtacaaagtactgcttcgaaattgtcccaaagggtcctaacggcacggagggcgctagccgcacagtatgtaatagaaccgtgccttctgcagtgttcgatatccacgtggtgtacgtcaccactaccgaaatgtggttggactggaaatcccccgacggtgccagtgagtacgtgtaccacttggtgattgagtctaagcatgggagcaatcatacttctacctacgacaaagccattactttgcaaggattgatccctggcacactctataacatcaccatcagtcccgaggtcgatcacgtgtggggggacccaaacagtacagcgcagtacacacgcccttccaatgtatccaacatagatgtcagcaccaacaccacagccgcaactttatcctggcagaacttcgatgacgccagcccaacctactcttactgtctcctcatcgagaaagcaggtaatagtagtaacgccactcaagtggtcacggacattggcataacagacgcgaccgtgaccgaactgatacctggttcttcatacaccgtcgagatatttgcacaggtgggagatggtattaaaagcctggagccaggcagaaaatctttttgtaccgacccagcctctatggccagcttcgattgcgaggtcgtgcccaaggagcctgcgctcgtgttgaagtggacttgcccaccaggagccaatgctggattcgagctggaagtctcctccggggcatggaacaacgccacccacctggagtcatgctctagcgaaaacggaacagagtacagaactgaggtcacctacctcaacttctcaacaagctataacatttcgataacaactgtctcctgcgggaagatggccgcacccaccagaaacacttgcacaactggtatcacagatccgccacctcccgatggctcgccaaacattacctctgtttcccacaactctgtgaaagtgaagtttagcggcttcgaagccagccatgggcctatcaaggcttatgccgtgattcttaccactggggaggcaggacacccctctgctgacgtgcttaagtacacgtatgaggatttcaaaaagggggcttccgacacttatgtcacgtacctgattcgtacggaggaaaaagggcgatctcagtcccttagtgaggtgttaaagtatgaaattgatgttggaaacgagagtactacactgggctactataatggcaaactggaacccctgggaagttatcgcgcttgcgtcgccggattcactaacattacgtttcacccccagaataaagggctgatcgatggggcagaaagttatgtcagcttttcccgttatagtgacgccgtctccttaccccaggatcctggagtgatttgtggcgcagtatttggctgtatcttcggcgctctggtgattgtcacggttggaggctttatcttctggcggaaaaagagaaaggacgcaaagaataatgaagtttccttctcgcagattaagcccaagaaatctaagctgatccgggtggaaaatttcgaggcgtattttaagaaacaacaggccgacagcaactgtggctttgccgaagaatatgaagatctgaagctggtgggcatctctcagcctaagtatgccgcagaactggccgagaatagaggaaagaaccggtataacaacgtccttccctatgacatctcgagagtcaaactgtccgttcagacccacagcaccgacgattacataaacgctaactacatgcctggttaccactccaagaaagattttatcgctactcagggccctttaccaaataccctgaaagacttctggcgaatggtctgggagaagaacgtgtatgccatcatcatgttgactaagtgtgttgagcaaggccgaactaagtgtgaggaatattggccttcaaaacaagcacaggactacggagatattaccgtggctatgacatctgagatagtactgccagaatggactatccgggactttactgtaaagaacatacagacgagcgaaagccatcctctgaggcagttccacttcacatcttggccagaccacggcgtgcctgatactaccgacctcctcatcaacttcaggtacctggtgcgggattatatgaaacagagcccccctgaaagcccgattctggtgcattgctcagccggagtgggacggacgggaaccttcattgcaatcgacagattgatttaccagatagaaaatgagaatacggtagacgtatacggcatcgtttacgaccttcgcatgcatcgacccctcatggtgcaaacagaggaccagtacgttttcttaaatcagtgtgtcctggacatcgtgaggtcccaaaaagatagcaaggtggaccttatttatcagaataccaccgctatgactatttatgagaatttagcgcctgtcacaacgttcggcaaaaccaatggctatattgcatag

SEQ ID NO: 237145 - DNA, 1620 bp, synthetic construct
  misc_feature 1..1620: note = Description of Artificial Sequence: Synthetic coding sequence
  source 1..1620: mol_type = other DNA
atgaagcctgctgcaagagaagcacgcctgcctccaagatcaccgggtttgagatgggccctgccattgttattactcctgcttcggctgggccagatactgtgtgccggtggcactccatcccccattcccgatccatccgtggcgacggtcgctactggcgagaatgggatcacacagatttcctccacggccgaaagctttcataagcagaacgggactgggactcctcaagtcgagacaaacacctctgaagatggcgagagctccggagctaatgactccctgcgtacacccgagcaagggtcgaatggaacagatggtgccagccagaagacacccagctcaacaggcccaagccccgtgtttgacattaaggcagtaagcatctcaccaactaacgttatcttaacttggaaatcaaatgacacagctgcctccgagtacaaatatgtggtgaagcacaaaatggagaatgaaaaaaccatcacagtggtgcaccagccatggtgcaatataaccggcctgaggccagcgacgtcatacgtgttcagtatcacgcccggaatcggcaatgagacgtggggggacccgagggtcatcaaggtcattaccgaaccgatccccgtctccgatctcagggtggcgctcaccggggtgcgtaaggccgctttgtcttggagtaacggaaatggcacagcctcctgtagagtgctgctggaatcgattggctctcacgaggagctcacccaggacagcagactgcaagtgaatatctcaggactgaaaccaggggtacagtacaacataaatccgtacctcctacagagcaataaaactaaaggcgatcccctcggcaccgagggaggactggacgcttccaatacagaaaggtcaagggccggtagcccgactgctccagtccacgatgaatccttggttggccctgtggacccaagctccggacagcagtctagagataccgaggtgctgctcgtaggcctggaacccggaacccgatataatgccaccgtgtatagtcaagcagccaatgggactgaaggacaaccacaggccatcgaatttcggactaacgccattcaggtgtttgacgtgaccgccgttaatatatccgcaactagcctcacactcatttggaaagtgagcgacaatgagagcagttctaattatacttacaaaattcatgtggctggcgaaacagattccagtaatctgaacgtgtcagagccacgggcagtcattcctgggttgaggtctagtacattctacaacatcaccgtgtgtccagtgctgggcgatatcgagggcacaccaggtttcctgcaggtgcacacacctccggtgccagtttctgacttcagagtgacagtagtaagtactacagagattggccttgcatggtcttctcatgacgctgaaagcttccagatgcatattacacaggagggcgctggaaactcccgtgtggagatcacaactaatcaatccatcatcatagggggtctgttcccaggtaccaaatactgtttcgagatcgtccctaaggggcctaacggaaccgaaggagctagcaggactgtctgcaataggactggctag

SEQ ID NO: 237146 - DNA, 4419 bp, synthetic construct
  misc_feature 1..4419: note = Description of Artificial Sequence: Synthetic coding sequence
  source 1..4419: mol_type = other DNA
atggacacgaccgcggcagccgcactgcccgctttcgttgcacttttactcctgtcaccttggccactgctcggttccgcccaggggcaattctctgcagggggatgtactttcgacgacgggcctggcgcatgtgactatcaccaggatctgtacgacgattttgaatgggtgcacgtcagcgcccaggagccccactatctgcccccagagatgccacaggggagctacatgattgtggacagcagcgatcacgatcctggagagaaggcccgtctgcaattgccaacaatgaaggagaatgacacacattgtatagacttcagctacctactgtacagtcaaaaggggctaaatccaggtaccttaaatattctagtaagagtgaacaagggtcccctggcgaaccccatctggaatgttacaggcttcacgggtcgcgactggcttcgcgcagaactggccgtgtccaccttctggcccaacgaataccaagttatttttgaagcagaggtctcaggaggacgctcgggctacatcgctatcgatgacattcaagtgctcagctacccctgtgataagtccccccactttttgaggctgggcgacgttgaggtgaacgcagggcagaatgccacttttcagtgcatcgccacgggtcgcgacgctgtacataataaactctggctccagcggagaaacggcgaggatattcccgtggcccagactaagaatatcaatcaccgaagattcgctgccagctttcggctgcaggaggttacaaaaaccgatcaagacctgtaccggtgtgttacacaaagcgagcgcggtagcggtgtgagtaacttcgcccagctcattgtgcgggaacccccacggcctattgcccctccccaactattgggggtgggacctacctacttgctgatccaattaaatgccaactctatcatcggagatggaccaataatcctgaaggaggtagagtatagaatgacatctgggagttggacggaaactcacgctgtcaatgcccctacgtataaactgtggcacttggatcccgacaccgagtacgagattcgcgtcctgctgactcggcctggtgagggtggcacgggacttcccggacctcctttgataaccaggacaaagtgtgctgagccaatgaggacgccgaagaccctgaaaattgctgaaatccaggcgaggcgcattgcagtcgattgggaatccctaggatacaatataacaagatgccatacattcaacgttactatctgctaccactatttccgcggtcataacgagtctaaggctgactgcttagatatggatcccaaggcccctcagcacgtagtgaatcacttgcctccctatacaaatgttagcctgaaaatgatcctcacaaatcctgaggggaggaaggagtccgaagagacaatcattcaaactgacgaagacgtgccgggacccgtgcctgtcaagtccctgcaggggacatcattcgagaacaagattttcttaaattggaaagaacccctagacccaaacggtataataactcagtacgaaatatcttactcctccatcagaagttttgatcccgctgttccagtggcaggtccccctcagactgtgtcaaatctgtggaactcaacacatcatgtgtttatgcaccttcatccaggaaccacctaccaatttttcatccgcgcatccactgtaaaggggttcggacccgctaccgcaatcaatgtcactaccaatattagcgctcccactctgcccgactacgagggcgttgacgctagcctgaacgaaaccgccacaaccataactgtgctcctgagaccagcccaggcgaagggggcacccatcagtgcatatcagatcgtcgtggaggaactgcatccacatcgcactaagcgagaggctggagcaatggagtgttaccaagtacctgtgacctatcaaaacgccatgtctgggggagctccttactactttgccgctgagctcccacccggtaatcttccagaacctgccccatttaccgtcggcgataacagaacttaccaaggcttttggaatccgcctctcgctcccagaaagggatacaatatctacttccaagccatgtcatctgtggaaaaagagacaaaaacccagtgcgtacgcattgccaccaaagccgctgctacggaagaaccagaggtgattcccgacccagccaagcagaccgacagagtggtcaagattgcgggtatttccgcgggaatcttggtttttattctgctgctacttgtggttatcctaatagtgaaaaagagacggagttactactcttattcgtattatctaaagcttgcaaagaagaggaaggatgcaatggggaatactagacaagagatgacacatatggttaacgcgatggaccgatcttatgcggaccaaagcacactgcatgccgaggatcctctgtccattacctttatggatcagcataacttctccccaaggctgcctaatgaccctctggtacctacggccgttctcgtccctatcaccgacgagaaccactcagccacggctgagtctagtagacttctggacgtgccgcgatatttgtgtgaaggcacagagagtccttaccagaccggccagcttcatcccgcaatcagagtggccgacttactgcaacatatcaacttaatgaaaacctctgactcctacgggtttaaagaggagtacgagtctttcttcgaaggacagtcagcctcttgggatgtggcgaaaaaggaccagaatcgcgcaaaaaatcgttatggcaacatcatcgcctacgaccacagccgcgtgatccttcagcccgtggaagatgaccccagctccgactatattaacgctaactatatcgatatatggctgtaccgggatgggtatcagcgcccaagccactacatcgccacccaaggccctgttcatgagactgtgtatgatttctggagaatgatttggcaggaacagtccgcctgtattgtgatggtgaccaatctcgtggaggtgggcagggtcaagtgctacaagtattggcccgatgacaccgaagtgtatggcgatttcaaggttacatgtgttgagatggaaccattagccgagtacgtcgtgcggacatttaccttggagcgcagaggctataacgagatccgggaggtcaagcagtttcattttaccgggtggcctgatcatggagttccataccacgccaccggtctgttgagcttcattaggagagtgaagctttcaaaccctccatccgctggccctattgtggtccattgctcagccggtgccggacggacaggatgctacattgtcatcgacattatgctggatatggcagagagggaaggtgtggtggacatttacaattgcgtgaaggccctgcgaagtaggagaataaacatggtgcagacagaagagcagtacattttcatccatgatgcaatcttagaagcatgcctgtgtggggagacagcaatccctgtgtgcgagtttaaggctgcatattttgacatgatacgcatcgactctcagactaacagctcccacctgaaagatgaatttcagaccttgaattcagtgaccccgcgactgcaggctgaggattgttctatcgcctgcctgccaagaaatcacgataagaaccgatttatggacatgttgccccctgataggtgcttaccttttttgatcaccatagacggggaatcttcaaattacattaacgcagccctgatggattcctatagacagcccgcagctttcattgttactcagtaccctctgcccaacacagtgaaggacttttggcgactggtttatgattatggttgcaccagcatcgtcatgctcaacgaagtggacctgtcccaaggatgtccccaatattggcccgaggagggtatgttgcgctatgggccaatccaggtcgaatgcatgagctgtagtatggactgcgatgtgattaatagaatttttcgaatctgtaacctgaccaggccccaagaaggatacctgatggtgcaacagttccagtacctcggctgggcctcgcaccgtgaggtccctggaagcaaaagaagcttcctgaagctaattttgcaagtggagaagtggcaagaagagtgtgaggagggggagggtaggacaatcatccattgcctgaatggcggagggagatccggaatgttttgcgccatcggaatcgtggtggagatggtgaagaggcagaacgttgtcgacgtatttcacgctgtgaagacactgcgcaactcgaagcctaatatggttgaggctccagaacagtacagattctgctatgatgtcgccctcgaatacctagaatcctcctag

SEQ ID NO: 237147 - DNA, 4377 bp, synthetic construct
  misc_feature 1..4377: note = Description of Artificial Sequence: Synthetic coding sequence
  source 1..4377: mol_type = other DNA
atggataccacagcagccgcagccctacctgcatttgttgcactcctcctcctgtctccctggcccctgcttggtagtgcccagggacaattctcagccggaggatgtacatttgatgacgggccaggtgcatgtgattatcatcaggacctctatgacgattttgaatgggtccacgtatccgcacaggaaccacattacttgcctcccgagatgcctcagggctcctacatgatagtcgattctagcgatcatgacccaggggaaaaagcgcgtcttcagctgcccacgatgaaagagaacgacacccactgtatcgacttttcatatcttctgtattcacagaaaggccttaaccctggaactcttaacatactggtgcgggtgaacaagggcccattggctaatccaatctggaacgtaactggattcaccggccgtgactggctgagagccgagctagcggtctctactttttggccaaatgagtatcaggtcatctttgaggcagaagtcagcggcggtcgcagcggttatattgccatcgacgacattcaggtgctgtcatacccctgcgacaagagtccccacttcctacggctcggcgatgtagaagtcaacgctggccagaatgccacgtttcaatgtattgctacaggacgcgatgccgtgcacaacaagctttggctgcagaggcggaatggcgaggacatccccgtggcccaaacaaagaatatcaatcacaggcggtttgcagcctcgtttcggttgcaagaagttaccaaaacagaccaggatctgtaccggtgcgtgacccagagtgagcggggttcaggtgtgtccaacttcgcccaattaatcgtcagagagcccccaagaccgatagcccctccccagctgcttggcgtgggccctacgtacctgctgattcagcttaacgcgaatagtatcataggggatggacctataatactgaaggaagtggagtatagaatgacaagcggtagttggaccgagacgcacgctgtgaacgcccctacctataaactgtggcacttggaccccgacaccgagtatgagatccgagtattattgacacggcctggcgagggcggaacaggcctgcccggtccacctctgattacgcgaaccaaatgtgcggaaccaatgcgaacaccaaagaccctcaagattgccgagatccaggcaagacgtatcgcggtagattgggagtcactaggttataatattaccagatgtcatacatttaatgttacaatatgctatcattatttcaggggacacaatgaatccaaggctgactgccttgatatggacccaaaggcccctcagcatgttgttaatcacctgcccccttacaccaacgtgtcacttaaaatgattctgaccaacccagaagggaggaaggaatctgaagaaacaataatccagaccgatgaggatgtgccaggcccagttccggtgaagtcgttgcagggaacttccttcgagaataagatcttcctgaactggaaagagccgctggatccaaacggcataatcacccagtatgagataagttattcctcaattagatctttcgaccctgctgtgccagtggcaggccctccacagacggtcagtaacttatggaattccacccatcacgtcttcatgcacctccatccgggaacaacatatcagttttttattcgtgcatccaccgtaaaggggttcggacctgccactgccattaatgtgacgaccaacatatccgctccgacactgccggattatgagggagtggacgcttcactgaacgagaccgcaaccaccatcaccgtcctcctgagacccgcacaagcaaaaggggctccgatctcagcctaccagattgtggtggaagagttgcacccccatcgaacgaaacgcgaggctggagctatggaatgctaccaggtgcccgtcacataccagaacgccatgagtggcggagccccttactatttcgccgctgagctgcctcccggtaacctcccagagcctgctcctttcactgtaggggataataggacctaccagggcttctggaaccccccattagctccccgaaagggatataacatttattttcaagccatgtcctccgtagaaaaagagacgaaaacccagtgtgtaaggatcgccactaaagcagccgcaacggaagagccggaggtgatcccggaccccgcaaaacaaaccgacagggtggttaagattgctggtatctcagccggaatcctcgtttttattctgctgctccttgtcgtgatcttaatcgtgaaaaaaagtaaactggcgaagaagcggaaggatgccatgggaaatacgagacaagagatgacccacatggttaacgccatggataggagctacgcagatcaaagcacactgcatgcggaggatcctttgtccataacttttatggaccagcacaacttttcacctcgcctgccaaatgatcctctggtacctaccgctgtcctggacgaaaaccattccgccaccgcagaatcttcaagacttctggacgtaccaaggtatctttgcgagggaactgagagtccttaccagaccgggcagctccaccccgctatccgagtggccgacctcctgcagcacattaaccttatgaagaccagcgactcttatggatttaaggaggaatacgagtccttctttgaaggacagtccgcatcctgggacgtcgccaaaaaggatcagaaccgtgccaagaacaggtatggaaacattatcgcttacgatcattcgcgggtgatcttgcagcccgtcgaggatgacccttctagcgattacattaatgccaattatatcgacatctggttgtaccgggatggatatcagagaccttcacattatatcgccactcagggaccagttcacgagactgtttatgatttttggcgaatgatctggcaggaacagagcgcatgtattgtgatggtgaccaatctggtagaggtcggaagggtgaaatgttacaaatattggcccgacgacactgaagtgtacggggattttaaagtgacttgcgttgaaatggagcccctggctgaatatgtggtgagaactttcaccctcgagcggagagggtacaacgagatcagagaggtcaaacaattccactttacaggttggcccgaccacggcgtgccttatcacgccactggcttactgagttttattcgccgtgttaaactctctaatccccctagcgccggtcccatcgtggtacactgctccgccggagctgggaggactggatgttatatcgtgatcgacattatgctggatatggcggagagagagggagtcgtggacatctataactgcgtcaaggcattacgctctagaaggataaatatggtccagacagaggagcagtacattttcatccacgatgcgattctcgaggcatgtttgtgcggcgagaccgcgattcctgtgtgtgagtttaaggccgcatattttgatatgattaggatagactctcagactaattcatcccatctgaaagacgaatttcaaaccttaaactccgtcactccacggctgcaggcagaggactgttccattgcatgtctccctcggaaccacgacaaaaatcgcttcatggatatgctcccccctgaccgctgcctgccctttcttatcacaatagacggagaaagctcaaattacatcaatgccgctctcatggattcctacaggcagccggcagctttcattgtaacccagtatcccttgccaaacacagtgaaagacttttggaggctggtgtacgattatgggtgcacaagtatcgtcatgctgaatgaggttgatctatcccagggttgcccacagtattggcccgaagaggggatgctcagatacggccctatccaggtagagtgcatgtcatgtagcatggactgcgatgtcattaatcggatctttagaatctgtaaccttactaggccacaggaggggtatctcatggtgcagcagttccagtacctgggctgggcaagccaccgggaagtgccaggcagcaaaaggagcttcttgaagctgatcctgcaggtggagaaatggcaagaggagtgcgaggagggcgaaggccgaactattattcactgtttgaacggtggcggacggtctggtatgttctgtgcaatagggattgttgtcgagatggtgaaacgccaaaatgttgtcgacgtctttcacgccgtcaaaaccttaagaaatagcaaacccaacatggtcgaagctcccgaacagtatcgattttgctatgacgtggctcttgaatacttggagagtagctag

SEQ ID NO: 237148 - DNA, 4341 bp, synthetic construct
  misc_feature 1..4341: note = Description of Artificial Sequence: Synthetic coding sequence
  source 1..4341: mol_type = other DNA
atggataccactgccgctgcagcactaccagcattcgtggccctgttgttgctgagcccatggccacttctcgggtcggcccagggccagttcagcgcgggtgggtgcacatttgacgacggacccggagcctgtgactatcaccaggatctgtacgatgacttcgaatgggtccatgtaagcgcccaggaacctcactacttgccaccagagatgccccaaggtagctacatgattgtggattcttccgaccatgatcccggtgaaaaagctcggctccagctccctacaatgaaggaaaatgacacgcactgtattgatttttcttacttgctttacagtcagaaaggcctgaacccgggaacactaaatatcctggtgcgggtcaataagggacctctcgctaatcctatttggaatgtgaccggatttaccggccgtgattggctccgggcagaattagccgtaagtacattctggccaaacgaatatcaggttatctttgaggcagaggtgtccggagggaggtccggttatattgccattgacgacatccaggtgctgagctacccatgtgacaaaagtcctcattttctgcggctgggcgacgtggaagttaatgccggtcagaacgcgactttccagtgcattgcgacgggcagagatgccgtgcataataaattgtggctgcaaagacgtaatggggaggatattcctgtcgcacagacgaagaacattaatcacagacgcttcgctgcgtcattcagactccaggaggtcacgaagacagaccaggacctttatagatgtgtgacccaatctgaacgcggaagcggggtgtcaaacttcgcccagctgatagtgcgggagccacctcgccctattgccccacctcaactgcttggcgtaggaccaacttacctcttaatccagttgaatgcaaattccatcattggcgacggccctatcattctgaaagaggttgaataccgcatgaccagtggcagttggactgagactcatgctgtcaatgcaccaacgtacaagttgtggcatttagatcctgatacagaatacgagatcagagttctgctgacacgacctggcgaaggaggaacgggcttgccaggacctcccctgataacgagaactaagtgtgcggagcccatgcgcactcccaagacacttaagattgccgagattcaggcaagacgaatcgcagtggattgggaatccttgggatataatatcacacgttgtcatacctttaacgttactatatgctatcattacttccggggacacaacgagtctaaggctgattgcctagacatggatccaaaggcccctcaacacgttgtgaatcatctgccaccttataccaatgtgagtttgaaaatgatactgacaaatcccgaagggcgaaaagaatctgaagagacaatcatacagacagacgaagacgttcccggacctgtgcctgtaaagagcctgcaggggacttcgtttgagaacaagattttcctgaattggaaggagccactcgatccaaatggcatcatcactcagtatgagatcagctattcgagtatacgctcgtttgacccagctgtaccagtcgcagggccaccacagacggtcagcaatctttggaactccacccatcatgtcttcatgcacctacaccctgggacgacgtatcagtttttcattcgtgccagcacagtcaaaggtttcgggccagccacagctatcaacgtgaccaccaatatttctgctcccacgttgcccgattatgagggagttgatgccagcctgaatgagaccgctactaccatcactgtcttattaaggcccgcacaggctaagggggcaccaatctcagcataccagattgttgtggaagaactgcacccccacaggacaaaaagagaagcaggcgcaatggaatgctaccaggtgcccgtcacataccagaatgcaatgtctggcggagccccatactatttcgccgcagagctcccaccaggcaatctgcccgagccagctcccttcactgttggggacaatagaacctatcagggcttttggaatccaccactggctccgaggaagggctataatatttacttccaagcgatgtcttctgtcgagaaggagaccaagacccagtgtgtgcggattgccaccaaagccgctgcgaccgaggaacccgaggtcattccagatcctgctaaacaaacagaccgcgtagtaaagatcgccggtatcagtgcaggcattctcgtatttatactgctactgctggtggtcatacttatcgtaaaaaaaagcaagctggctaaaaagaggaaggatgccatgggaaacacacgacaggaaatgactcacatggtcaatgccatggatcgaagctatgccgatcagtcaaccttgcatgctgaggatcccctgtccataacctttatggatcagcacaacttctcaccaagatacgagaaccatagcgcaacagcagagtcatcaagactcctggatgtgccgagatacctctgcgaaggcaccgaaagcccctatcagacgggacagctgcatcccgctatacgggtggctgacctgctccagcatataaacctgatgaagacatccgactcatacggcttcaaggaggaatacgaatcattctttgaggggcagtcagcatcctgggatgtggcaaaaaaagaccaaaacagggctaagaaccgatatggtaacatcatcgcctacgatcacagtagagtgattctgcagccagtggaagacgacccgtcatccgattacataaatgctaactatattgatatctggttgtaccgtgatggctaccagagaccatcacattacatcgctacgcaagggcctgtgcacgagactgtgtatgatttctggcgaatgatatggcaagagcagagcgcttgcatagtcatggtgaccaacctggtggaggtagggagggtgaagtgctacaagtactggccagacgataccgaggtctacggggactttaaagtaacctgtgtggagatggagccattagctgaatacgtggtgcgcaccttcactctggagaggaggggttataatgagattagggaagtgaaacagtttcactttacgggatggcctgatcatggggtaccctatcacgcgaccggcctcctgagcttcatccgccgagtgaagttaagtaaccctccatcagctgggccaattgttgtgcactgcagcgctggcgctggccgtaccgggtgttacatcgtgattgacatcatgctcgatatggccgagcgggagggagtggtggacatttacaattgcgtgaaggctctgcggagccgcagaataaatatggtacagaccgaagagcagtatattttcatccacgacgcaatcctggaagcgtgtctgtgcggagagaccgccatccccgtctgtgagtttaaggctgcatattttgatatgatccgaatcgatagccagactaattccagccatttaaaagatgagttccagacactgaatagtgtcacaccgagactgcaagcggaggattgctctattgcgtgtctgccccgtaatcacgataaaaatagattcatggatatgttacctccggaccgctgtctcccctttctgattaccatcgacggggagtcatcaaattatatcaatgcagcactgatggacagttaccgccaaccagccgcttttattgtgacgcagtatccattgccgaatactgttaaagacttttggcggttggtctacgactacggctgcacctctatcgtgatgctgaacgaagtggatctgagccagggatgtccacaatactggccagaagagggaatgttgcgttacgggccaatccaggtcgaatgcatgagctgttcaatggattgcgacgtgatcaaccggatcttcagaatttgtaatctgacacgcccacaggaaggctacctcatggtacagcaatttcagtacctgggttgggcgtctcaccgcgaggtgccaggaagtaaaagaagcttcctgaagctgatacttcaggtggagaaatggcaggaggagtgcgaagagggtgaaggacggacaatcatacactgtttaaacggcggaggacggagcgggatgttttgcgcgattggcattgtggtggaaatggtcaaaagacagaatgtcgtggacgttttccacgccgtgaagacactacgaaactctaagcctaacatggtggaggcccctgaacagtatcggttctgttatgacgtggctcttgaatacctcgaaagtagctag

SEQ ID NO: 237149 - DNA, 4320 bp, synthetic construct
  misc_feature 1..4320: note = Description of Artificial Sequence: Synthetic coding sequence
  source 1..4320: mol_type = other DNA
atggatacgacagcggctgctgcgctgcccgcttttgtagctttgctcctcctctcaccctggcccctactgggtagcgcccagggccaattttccgccggaggttgcaccttcgacgatgggcctggagcctgcgattaccatcaagacctgtacgatgacttcgagtgggtccacgtcagtgcccaggagccacactatcttccaccagagatgccccagggaagctacatgatagtggatagtagcgatcacgatcccggagagaaggccagacttcagttgccgaccatgaaggagaacgatactcattgtattgattttagctacctgctgtactcacagaaaggcctgaacccaggcacactcaacatactggtcagagtgaataagggccctctggcaaacccaatctggaatgtcacagggtttaccggacgcgattggttgcgggctgagctggctgtaagcactttttggcctaatgagtatcaggtgatttttgaggccgaggtctctggaggcaggtcaggatatatcgccattgatgacatccaggttctgtcttatccttgtgacaagtcaccccacttcctgcgtttgggcgatgttgaagtaaatgccggtcagaatgccacatttcagtgcatcgccactggccgtgatgcagtacacaataagctgtggctacagagacgtaatggggaggacatcccggtcgcccagaccaaaaatatcaatcacagacgctttgctgcaagctttcgactccaagaggtcactaagactgaccaggacttgtaccgctgtgttacgcagagtgagcgaggcagcggcgtgtccaatttcgctcagctgatagttcgcgagccacccaggcctatcgcaccccctcagctactcggcgtaggcccaacctacctcctgatccagctgaacgcaaactccatcataggggatgggcctataatcttgaaggaggtcgagtatagaatgacatcggggagctggacagaaactcacgccgtgaacgctccgacatataagttgtggcatctcgatccagataccgaatatgagatcagagtgttgctgaccaggcctggggaaggaggcactgggttgcccggacctccattgataacccgtacaaagtgcgctgagcccatgcggaccccgaagacacttaaaatcgcggagatacaggccaggagaattgccgtcgactgggaaagcttgggatataacataactcgctgtcatacgttcaacgtcacaatctgctaccattacttccggggtcataatgaaagcaaggccgattgcctggacatggatcctaaggcccctcagcacgtggtgaatcatctgcctccatacaccaacgtgagcctaaaaatgattctgactaatccagaaggcagaaaggaaagcgaggaaaccatcattcagacagatgaggacgtgccaggacctgtcccagtgaaaagtctgcaaggaacctctttcgaaaataagattttcttgaactggaaagaaccacttgaccctaatggtataatcactcagtatgagatatcctattcatctattaggtcattcgacccagccgtacccgtggccggaccgcctcagacagttagcaatttatggaactctacacaccatgtcttcatgcaccttcatcccggaacaacttaccaattctttattcgggcaagcactgtgaagggctttgggccagccacagctattaatgttaccactaatatttcagcccctacgctgcctgattacgagggcgttgacgctagcctgaatgagacagccactaccatcacagtcctactgcgaccagctcaggccaaaggcgcacccatcagcgcttatcagattgttgtggaagaactgcaccctcataggaccaaaagagaggccggagccatggaatgttaccaggttccggtaacatatcaaaatgcaatgtctggcggagccccatactattttgcagctgaacttcctccaggcaatctgcctgagccagcgccattcacagtcggagacaacagaacgtaccaggggttttggaatcccccattagcgccaaggaaaggttataatatctacttccaagcgatgagctcagtggagaaggaaacaaagactcagtgcgtgagaatcgcaaccaaagctgccacagaagagcctgaggtgatcccggatcctgcgaagcagacagacagagtagttaagattgcaggcatctcggcgggaatcctcgtgtttatcctccttctgctagttgtaattctgatagttaagaagagcaagctggctaagaaacggaaagatgcgatgggaaatacgagacaggagatgacccatatggtaaacgcaatggaccgctcttatgccgaccagtccactctgcacgccgaagatcccctgagtatcaccttcatggaccagcataatttctctccacggtacgagaaccactccgccacagcggaatcctcccgcctgctggatgttccgcgatacctctgcgaaggcacggaaagtccttaccagacaggacaactccatcccgctatcagagtcgcggatttgttacagcatattaatctcatgaagacatcagacagctatggattcaaggaagagtatgagtcattctttgagggccagagtgccagctgggacgtagctaagaaagatcaaaatcgagccaagaaccgttacggtaatattattgcctatgaccatagtcgcgtcatcttgcagcccgtggaggacgatccctcgtctgactatatcaatgccaattacatagatggatatcagcgtccaagtcactatatcgccacacaagggcctgtgcacgaaacagtatacgacttctggaggatgatctggcaagagcagtccgcttgcatcgtgatggttacaaacctggttgaagtcggcagggttaagtgttataagtactggcctgatgatactgaagtttacggagactttaaggtgacctgcgtggagatggaaccattggctgagtacgtcgtccgaacgtttaccttagaacggagaggatataatgaaataagagaggtgaagcagttccactttacggggtggccagaccacggggtaccatatcacgccacgggccttctttcgtttatcagacgggtgaagctctcgaatcctccgtctgcgggacctatcgtagtccactgcagcgccggagccggaagaacagggtgttacattgtcatcgacattatgctggacatggccgaaagggaaggagtggtagacatctacaactgtgtgaaagctttgcggtctcggaggatcaatatggtgcaaacggaggagcagtacatttttatccatgacgctattctcgaggcctgtctctgcggggagaccgcaattcctgtctgtgaatttaaggctgcctacttcgatatgattcgtatcgacagtcagaccaacagttcgcacctaaaggacgagtttcagaccctgaatagcgttacccccagactgcaggccgaggactgctctatcgcgtgcctgccacggaatcatgacaagaatagatttatggatatgctgcccccagacagatgtctgccctttcttatcactatcgacggggagtcttcaaactacatcaatgctgccttaatggacagttataggcagcctgctgcctttattgtcacccaatatcccttaccgaacacagtgaaggacttctggcgcctggtctacgactatggttgcaccagtattgtgatgctcaatgaggttgacttgtcacaggggtgcccacaatactggcctgaagaaggtatgcttaggtatgggccaatccaggttgaatgcatgagctgcagcatggattgtgacgtgattaacaggatctttcggatctgtaacctgactcgcccacaggaaggatatctgatggttcaacagttccagtacttaggttgggcgtctcatagggaggtgccgggttcaaagagaagctttttgaagttaattctgcaggtggaaaagtggcaggaagaatgcgaagagggcgagggcaggactattattcactgtctaaatggcggaggacggtcgggtatgttttgcgctatcggcatcgtggtggagatggttaagcgccagaacgtcgttgacgtcttccacgcagtgaagacattgcggaattccaagccaaacatggtcgaggctcccgagcaataccgattttgttacgatgtggcgctcgagtatctcgagtcctcatag

SEQ ID NO: 237150 - DNA, 4323 bp, synthetic construct
  misc_feature 1..4323: note = Description of Artificial Sequence: Synthetic coding sequence
  source 1..4323: mol_type = other DNA
atggacactacagccgctgcagcacttcctgcatttgtggctctccttttgctcagcccctggcctttgctcggatctgcacagggacaattctctgcaggcggatgcacctttgacgatggacctggcgcttgcgactaccatcaggacctctacgatgactttgagtgggtgcatgttagcgcccaggaaccacactatctgccgcctgaaatgccccaggggagctatatgatcgtcgacagcagcgatcacgacccaggagaaaaagccagactccagcttccaaccatgaaagagaacgatacacactgcatagattttagttatctcttgtacagccagaagggactcaatcctggaactttaaacattctcgtgcgggttaataaaggccctcttgcaaaccccatctggaacgtgacggggtttaccggtcgcgattggctgcgggctgagctggcagtttcaaccttctggcccaacgagtaccaagtgattttcgaggctgaagtatctggtggccgttctggatacattgccattgacgatatacaagtcctgtcttacccttgtgataagtcaccacactttttgagactcggagacgtagaagttaatgctggccagaacgccacctttcaatgcatcgctaccggcagggacgctgtgcacaataagctctggctgcagagaaggaacggcgaagacatacccgtggcccagacaaaaaacatcaaccataggaggtttgcagccagtttccgtttgcaagaagttactaaaaccgaccaggacctttaccgctgtgtgactcaaagcgaaagggggtcaggtgtatcgaatttcgcacagttgatcgtgcgagagccaccccgtcccattgcacctccccagttactgggcgtcggccctacctatctattgattcaactgaacgccaacagtataataggggacggacccattattctgaaagaggtagaataccgtatgaccagcggcagctggacagagactcacgcagtgaatgctccaacgtacaaactatggcacctcgacccagatactgaatatgaaatccgtgtcttactgactagaccgggagaggggggaacgggactgcccggtcccccattgatcacccggacaaaatgcgcagagcctatgcgtacccctaagaccttgaaaattgccgaaatccaggcacgaaggattgccgtggactgggagtccttgggatataatatcaccaggtgccatactttcaatgtgactatctgctaccactactttagaggccataatgaatctaaagccgattgtctcgatatggaccctaaagccccacagcatgtggtaaaccatctgcctccctatacaaacgtgtcactgaaaatgatcttaactaatccagagggtaggaaggagagtgaagagactatcattcaaacagatgaagatgtccctgggcctgtgcctgtcaagagtctccaaggaactagcttcgagaataaaatattcctgaattggaaagaacctcttgaccccaacggaattatcacccagtatgaaatttcgtactctagtatccgttcatttgatccagccgtgccagtcgctggacctccacagactgtgtctaatctttggaacagtacacatcatgtattcatgcaccttcacccaggtaccacatatcagtttttcatcagggcctctaccgttaagggcttcggtcccgcaaccgccattaatgtgacaaccaatatctcagcacccaccctgcccgactatgaaggagtggatgcctcactgaatgaaacagccactaccatcaccgtgttgctacggccagcccaagctaaaggggctcctatcagcgcatatcagatcgtcgtggaagagttgcacccccacagaaccaagcgggaagccggagcaatggagtgttaccaggtgccggttacataccagaacgcaatgtccggaggtgccccatactattttgctgccgagttgcctccaggcaacctgccagagccggctcctttcaccgtcggagacaaccggacgtaccaggggttctggaatccccctctggcaccaagaaagggctacaacatctatttccaggccatgtctagcgtggagaaggagaccaagacccagtgtgtccgtatcgccactaaggcagccgcaactgaggagccagaagtcatccccgacccagccaagcagacggaccgagttgtcaagatcgcagggataagcgcaggcattctagtcttcatccttttgctcctcgttgtgatcctcattgtcaaaaagtctaaattagccaagaagcgcaaggatgcaatgggaaataccagacaagagatgactcatatggtgaacgcgatggaccgcagctatgccgatcagtccacattacatgccgaggacccactgagcataaccttcatggaccaacataacttctcccctaggtatgaaaaccacagcgctacagccgaatctagccgcctgctcgatgttccccgatacctgtgcgaaggcaccgagagcccgtaccaaaccggccagctgcatccggctatccgagtcgctgatctgcttcagcacattaacttaatgaaaacatcggactcatacggatttaaagaggagtatgaaagtttcttcgagggacagagcgcttcttgggacgtggcaaaaaaggatcagaaccgagctaagaacagatacggtaacattatcgcctatgaccattcgagagtgatcctgcagcccgtagaggatgatccttctagcgattacatcaatgcaaactacatagacggctatcaaagaccatctcattatatagctacacaaggtcccgtccacgagacagtctacgatttttggcgcatgatctggcaggagcagtccgcatgcatcgtgatggtcacaaacttggtggaggttgggagagtaaagtgttataagtactggccagacgataccgaagtttacggcgattttaaggtcacgtgcgtggagatggagcccctcgctgagtatgtcgtgcggacctttaccttggagagacgtggctataatgagattagggaagtcaaacagtttcacttcacggggtggccagaccatggtgtcccgtatcatgctaccggcctgctctctttcattcgcagggtcaagttgagtaatcctccgagtgccggacccatcgtggtgcattgtagcgcaggggctggccgaaccgggtgttacatagtgatagacataatgctggacatggcggagcgagagggcgtagttgacatttataactgtgtaaaagctctccgatctagaaggatcaacatggtgcagaccgaggagcagtacatcttcattcacgacgccatcttggaagcatgcctctgtggagaaactgccattcccgtgtgtgagttcaaggcggcatattttgacatgatccgaatcgactcacagacaaactcttcgcaccttaaagacgagtttcagactctaaatagtgtcactcctcgacttcaggctgaagactgttcgattgcttgcctccctcgaaatcacgacaaaaacagatttatggacatgctgcctcctgatcgctgtctccccttcttgatcaccatcgacggcgagagtagtaattatatcaatgccgctctcatggatagttatagacagccagctgctttcattgtgacccagtacccccttcccaatactgtcaaggatttttggcgcttggtgtatgattacggctgcacctctattgtaatgctcaacgaggtcgacctttcacaaggttgcccccagtattggcctgaggagggcatgctgagatacggcccaatccaagtggagtgcatgtcttgctccatggactgcgatgtcatcaacagaatctttagaatttgtaacctgaccagaccacaggagggttacctgatggtccagcaattccaatacttgggttgggctagccatcgagaagtacccggatctaagagatcttttcttaaactgatactgcaggtagagaagtggcaggaggaatgcgaagagggggaaggaagaactataatccattgcctcaatgggggaggcagaagtggtatgttctgcgcgatcggtatcgtggtggaaatggtcaaacggcagaacgttgtggacgtctttcacgctgtgaaaaccctcaggaattctaagcccaacatggtggaggctcccgagcagtaccgcttttgttatgacgtagcactggagtacctcgaaagtagttag

SEQ ID NO: 237151 - DNA, 4374 bp, synthetic construct
  misc_feature 1..4374: note = Description of Artificial Sequence: Synthetic coding sequence
  source 1..4374: mol_type = other DNA
atggacacaaccgccgctgccgcactaccagcattcgtagccctgctgttgctgagtccctggccactcttgggtagcgctcagggccagtttagtgcgggaggctgcactttcgacgacgggccaggggcatgcgactaccaccaggatttgtacgatgacttcgaatgggtccacgtgagcgcccaggaaccacactatctgcccccagagatgcctcagggtagctacatgatcgttgattctagtgaccatgaccctggagagaaggcccgactgcaactgccaacgatgaaagaaaacgatacccactgtatcgatttcagctatctgctgtacagccagaaaggcctgaatcctgggacactcaacatcctggtcagggtaaacaaagggcctctggctaatcccatatggaacgtgacgggattcacaggcagagattggttacgagccgaactcgcggtttctactttctggcccaacgagtatcaggttattttcgaggccgaggtgagcggcggtcgcagcggctacatcgccatcgacgacatccaagttctgagttatccttgcgataagagcccgcatttcctccgcctgggagacgtcgaagtgaacgccggacaaaacgcgacatttcaatgtatcgcaacgggacgagatgccgtgcataataaactgtggttgcagcggaggaacggggaggacattcccgtcgctcagaccaagaacataaaccacaggaggtttgccgctagtttcaggttacaggaagttaccaagacagatcaagatctatacaggtgtgtgactcagagtgagagggggagcggcgtttcaaactttgcacagctgatcgtgcgggaaccacctcgtcccatcgcgccaccccagcttctgggcgtcggaccaacctacctactgatccagctgaatgccaacagtattatcggggatgggccaataatactcaaggaggttgaataccgcatgactagcggctcatggaccgagacccatgcggtcaatgctcccacttacaagctgtggcacctcgatccagatactgagtacgagatcagggtgctgttgacaagaccaggcgagggcggaaccggtcttccgggaccaccgttaatcacacggacgaagtgtgcggagccgatgagaactcctaagacccttaaaattgccgaaattcaagcaaggcgcattgccgtggattgggaatccctgggctacaacattactcgctgccatacattcaatgtgaccatctgttatcactacttcagaggccacaacgagtcaaaggctgattgtctcgacatggaccctaaggcaccacaacatgtagttaaccatctgccaccatacactaacgtgtccctgaagatgattctaactaaccctgagggacgcaaggaaagtgaggaaaccataatccaaacagacgaagacgtgccaggtccagtccctgtgaagtccctgcaggggacttcatttgagaacaaaatcttcctgaactggaaagagccactggaccccaacgggattataacacagtacgaaatttcttactcttctattcggagcttcgacccagctgtgccagtggcagggccacctcagactgtgtccaacctgtggaacagtacccaccacgtattcatgcatcttcaccccggtaccacgtatcagttcttcatccgggcaagcaccgtgaagggatttgggccagctactgcgattaatgtaactaccaatataagcgctcctacgctacctgactacgaaggtgtggatgcttctctgaacgagactgcaacaacgattaccgtcctgcttagaccggctcaagccaaaggagcacccatctcagcctatcagatagtcgtagaggaattgcatccccatcgcacgaagcgagaagccggtgcaatggaatgctatcaggtgcccgtgacttatcaaaatgccatgagcggaggcgctccttattactttgcagccgagctgcccccaggcaaccttcccgagccggctccgttcaccgtgggagataatcgcacgtaccagggcttctggaatccaccgctcgcgccacgcaaaggttataatatctatttccaggctatgagctccgtggagaaggaaactaaaacgcagtgtgtgcgaatcgcaactaaggctgcagctaccgaagagccagaagttatccccgatcccgctaagcaaaccgatagggtcgtaaagatcgcaggaatctcggcagggatcttggtattcattctgctcctcttagtggtgatactgatcgttaagaagagcaagctggcgaagaagaggaaagacgccatgggcaacacacggcaggagatgacccatatggtgaatgcaatggatcgctcatatgctgaccaaagtacgttgcacgcagaggaccctttaagcatcacattcatggatcagcacaacttctcaccccgactgccaaatgaccccctggtgccgacagcagtgctggacgaaaaccactccgccactgcagaaagcagcaggctcctcgacgtgcctagatacctttgtgaaggaaccgaatccccctaccaaactggacagctgcacccagccattcgagtagccgaccttctccagcacattaatctgatgaagacctctgacagctacgggtttaaggaagaatatgagagtttttttgaagggcaatctgcaagttgggatgtggcaaagaaagaccaaaatcgcgctaaaaataggtacggcaatataattgcatacgatcacagcagggtgatactccagccagtagaggatgacccatctagcgactatataaacgctaactacatcgatgtcagcattttcatcggttaccagcggcctagccactacattgcaacacagggacccgtgcacgagaccgtttatgatttttggcgcatgatatggcaagagcagtccgcgtgtatcgtgatggtgaccaatctggtggaggtcggtcgtgtgaagtgttataaatactggcccgacgacaccgaagtctatggagacttcaaggtgacatgcgttgagatggaacctctggctgagtatgttgtgcgcacattcaccttggagcgcaggggatataacgagatccgcgaggttaaacagttccactttaccggttggcccgaccatggggtgccataccatgctactggcttactgtcatttatccggcgtgtgaaattgtccaaccctcccagcgcaggccctatcgtggttcactgcagtgcaggggctggcaggacaggatgttatattgtcatcgacatcatgctggatatggccgaacgggaaggggtggttgatatttataactgtgttaaggcgttgaggagtaggcggatcaatatggtgcagaccgaagagcagtatatatttattcatgacgctatactcgaagcctgcctctgtggcgagaccgcgatcccggtgtgcgagttcaaggccgcatattttgatatgatcagaattgattcacagaccaattcgtcccatctgaaagacgaattccaaaccttgaacagcgtgacacccaggcttcaagcagaggactgctctattgcatgcctgcccaggaatcacgataaaaataggttcatggacatgcttccacctgatcggtgcctgccttttctgataacgatcgacggtgagtccagtaactatattaacgcagcactcatggatagctaccgtcagcccgctgcattcatcgttactcaatatcctttgccgaacacagtcaaagacttctggagactcgtgtacgactatggatgtacatctatagttatgctcaatgaagtggatctgagtcagggctgccctcagtactggcccgaagagggcatgctccggtacgggcctattcaggtggagtgcatgtcctgcagtatggactgtgacgtgatcaacaggatttttcgaatttgcaatctcacccgacctcaagaagggtacctcatggtgcagcagtttcagtatctgggctgggcgtcccacagggaggtcccagggagcaagaggtcgtttctgaagttgattctgcaggtcgaaaagtggcaggaggagtgcgaagaaggagaggggagaacgattatacattgtctcaacgggggtggcagatccggaatgttctgtgcaataggtatcgtcgtggagatggttaagcggcagaacgttgtcgacgtattccacgccgtgaaaaccctgcgcaatagcaaacccaatatggtcgaagctcctgagcagtacagattttgctatgacgtggcattggaataccttgaaagctcctag

SEQ ID NO: 237152 - DNA, 2244 bp, synthetic construct
  misc_feature 1..2244: note = Description of Artificial Sequence: Synthetic coding sequence
  source 1..2244: mol_type = other DNA
atgactctgaacggttgcatgctggtgctgaagtccctgattatctatcatcctagatgccccaaagtgatcttcgaggcagaagtgtctggcggaaggagcggctacatcgctatcgatgatatccaggttcttagttacccatgtgacaagtccccacacttcttaagacttggagacgtcgaagttaatgctgggcagaacgctacattccagtgcattgctacaggccgagacgctgtgcataataagctgtggctgcagcggagaaatggcgaggatatacccgtcgctcaaactaagaacatcaatcatcgcaggtttgctgcctcattccgcctgcaggaagtgactaagacagaccaggatctgtaccggtgtgttactcagtccgaacgcggttccggagtatccaatttcgcacagctcattgtgcgcgaaccccctcgcccaatagcgccaccccagctcctgggagtaggcccaacataccttcttattcagttgaacgcaaactcaattatcggagatggtcctataatcctcaaagaagtcgaatatcgaatgacttctgggtcctggactgaaacccatgccgtgaacgcccctacatataagttgtggcatctcgaccccgacaccgagtacgaaattcgagtgctgctaactaggcccggagagggagggaccggtctgccaggtcccccactcattacaaggactaagtgtgcagagcctatgcggacccctaagaccctgaaaatcgcagagatccaagcacgcaggatcgctgtggactgggagtctctgggctataacattacgcggtgccatacctttaatgtcaccatctgctatcactacttccgaggacacaacgaatccaaggcagattgccttgatatggaccctaaagcccctcagcacgtggtgaaccatctgcccccatacacaaatgtgagtctgaaaatgatccttacaaacccagagggtcgcaaggagtcggaggaaaccatcattcagactgatgaggacgttcccggtccagtgccagtcaagagcctccagggcaccagctttgagaataagatattccttaactggaaggaaccccttgatcccaacggcattattacccagtacgagatctcctatagctctatcagatcttttgatcccgctgtgccggtggccggtccccctcagacagtgtccaatctttggaattctactcatcatgtttttatgcaccttcaccctggcacaacctatcagttctttatcagggcttcaactgtgaaaggcttcggtcctgcgaccgctatcaatgtcaccactaatatctcagcgcctactctccccgactatgagggtgtggacgctagcctcaatgaaaccgctacgactatcactgtcttgttacggccagcacaggctaaaggtgctcctattagcgcttaccagatcgttgtggaggaattgcaccctcaccgaacaaaaagggaagcaggggcaatggaatgttatcaggtgcctgtgacctaccagaatgcgatgtctggcggagcgccttactacttcgctgccgagctccctccagggaaccttccagagcccgctccttttactgtgggtgacaaccgtacataccagggcttctggaacccacctcttgcgcctcgaaagggctacaacatttattttcaggccatgtcctctgttgaaaaggagacaaaaactcagtgcgtcaggattgctacaaaagcggctgctactgaagaacccgaggtgattccagacccggcaaaacagacagacagggtggtgaagattgccggaattagcgcagggatcctcgtctttatcctcctgcttctcgttgttatactgattgtcaagaaacgctatatctgctggcggcgtcatatttgtatccggaatatcaggcggagctattatagttactcatactatttgaagctggccaaaaagagaaaagacgcaatgggcaatacaaggcaagaaatgacgcacatggtaaacgccatggacagatcatacgctgatcaatcgaccttacacgcggaggatccactttcaatcacctttatggatcagcacaacttttctccgcgactgcctaatgatcccctggtcccgacggccgtgttagttccatcaccaggacgcaagaacgtatatcacggggataacaacagctttttcgccataagttacctgtag

SEQ ID NO: 237153 - DNA, 4389 bp, synthetic construct
  misc_feature 1..4389: note = Description of Artificial Sequence: Synthetic coding sequence
  source 1..4389: mol_type = other DNA
atggatacaacagccgcagccgctctgccagcatttgttgctctgctgctcctgagcccttggcctctactcggttccgctcagggtcagttctcagcagggggatgcacctttgatgacggaccaggcgcatgcgattatcaccaggacttgtacgacgacttcgagtgggtccacgtgtcagcacaggaaccccattatttaccccctgaaatgccccagggttcctacatgattgttgacagttctgatcacgaccccggagaaaaggccagactgcagttaccgacgatgaaagaaaacgatactcactgtatcgactttagttaccttctttactcacagaaaggtcttaaccccggtacactcaacatcttagtacgtgttaataagggacccctagcaaatcctatctggaatgtcaccgggtttactggtagggattggttacgcgctgagctggccgtctccactttctggcccaacgagtaccaggtcatcttcgaggccgaggtcagcggtggacgctccggctatatagccatcgacgacatacaagtgctctcctatccatgtgacaagtccccacacttcctcaggcttggggacgttgaagtaaacgcaggccagaacgccactttccagtgcatcgccactggacgggatgctgtgcataataaactctggttacaaaggagaaacggagaggacatccctgttgcacagacgaaaaacatcaaccatcggcgtttcgcagcatcattccgcctgcaggaggtcactaaaactgatcaggatctttatcggtgtgttactcagagtgagcgcggatccggggtatctaacttcgcacagctcatcgtacgtgaaccccctaggcccatcgctcctccacagctgcttggggtaggccctacctacctgctgatacagctaaatgccaatagcatcattggagatggtccgattattttgaaggaagtggaatataggatgaccagtggttcgtggactgagactcacgccgtgaatgcacccacatataagctctggcacctggatcccgacactgaatacgaaattagggtgcttctgacccgaccgggagaggggggaacagggctgccgggacccccacttataacaaggacgaaatgcgctgagccgatgcggaccccgaagacgctgaaaatagccgagatacaagcccgtcgaattgcagttgactgggaaagtttaggatataatatcacgcggtgccatacattcaatgttacgatttgctatcactatttccgaggccataacgagtctaaagccgattgtcttgatatggatccaaaagcccctcagcatgtcgtgaaccatttgcccccatacactaatgtgagtcttaaaatgatcctgacaaaccccgaaggacgtaaggagagcgaggaaaccattatccagacagatgaggatgtaccgggacctgtgccagtgaagagtctccagggtactagtttcgagaacaagatctttctcaactggaaggagccactggaccccaatggcattatcacacagtacgagatctcttattcaagcatcaggtcttttgaccccgcagtgccagtagcaggtcccccacagaccgtgagcaacctctggaactcaacccaccacgtgttcatgcacttacacccgggaactacgtatcagttcttcataagggcgagtacagtgaagggtttcggccctgccactgccatcaacgtgaccactaatatttcagcaccgacactgcctgattatgagggcgtggatgcatctctcaatgaaaccgcaaccactatcacagtgctgttgcggcctgctcaggctaaaggtgcaccaattagcgcctatcagatcgtcgtggaggagctccacccccacagaacgaaaagggaggccggagccatggaatgctaccaggttccagtaacataccaaaacgccatgagtggcggagctccctactattttgcagccgagcttccacctggcaatctgcctgagcctgctcctttcaccgttggcgacaatcgaacatatcagggcttctggaatcctcccctggcacccaggaaggggtacaacatctactttcaagccatgagctccgtggaaaaggagactaaaacccagtgcgtgaggatcgccaccaaagccgcagcaaccgaggagcctgaagtgatcccagatccagctaaacagaccgatcgggtggttaagatagctgggatcagcgcgggaattttagttttcatcctgttgctattagttgtcatcctaatcgtgaagaaatctaagctggcgaagaagagaaaggatgcaatgggaaacaccagacaggagatgacccacatggttaacgcaatggataggagttacgccgatcagagcaccctgcacgctgaagatccactctccattacgttcatggaccagcataatttcagtccgagactgccaaatgacccacttgtgcctacagccgtgctggttcccatcacagatgagaaccatagtgctacggctgagagctccaggctgctggatgtaccaagatatctgtgtgagggaaccgagagcccttatcagaccgggcaactccacccagccattagggttgcagacctattgcaacacatcaacctcatgaagacctcggacagttacggttttaaagaagagtacgaatctttttttgaaggccagagtgcctcatgggatgtagcaaaaaaagaccagaatcgggcaaaaaacagatacggcaatatcatcgcctacgatcattctcgggtcatcctccagccagttgaggacgatcccagcagtgactacattaacgccaactacattgacatttggctctatagggacggttaccagagaccaagccactatatcgctacgcagggccctgtgcatgaaacagtgtatgatttctggcggatgatttggcaagaacagagcgcctgcattgtgatggtgactaaccttgtcgaggttggcagagttaaatgttataaatactggcccgatgataccgaggtgtacggcgatttcaaggtaacgtgcgtggagatggaaccgctggccgagtacgtcgttcgtacctttaccttggagcggcgtgggtacaatgagatccgggaggttaagcagtttcacttcacaggatggcccgatcacggcgtgccatatcacgcaacaggtctgctctccttcatacgcagggtgaagttaagcaatcccccttccgccggacctatcgttgtacactgttctgcaggcgctggacgcaccggatgttacatcgtcatagatattatgctggatatggcagaaagggagggcgttgtcgacatttacaattgtgtcaaggccctaaggagtaggaggataaatatggtgcagacagaagagcaatacattttcattcacgacgcaatcctggaggcctgtttgtgcggtgagaccgctatacccgtctgtgaattcaaggccgcttatttcgacatgatacgaatcgacagccagaccaacagcagccacctcaaggacgaatttcaaaccctgaacagtgtcacacctcggctgcaggccgaagactgcagcatagcctgcctacctaggaatcacgataagaaccggttcatggacatgctgcccccagacaggtgtttacccttccttataacgattgacggtgagagctccaactacattaatgccgctttgatggattcttatagacagcctgcagcattcatcgtgacacagtaccctctgccaaatacagtcaaggatttttggcggctggtctatgactatggttgtaccagtatagttatgctaaacgaagtagatttgtctcaggggtgcccacaatattggccggaggagggcatgctgcgctacgggcctatccaggtcgaatgcatgagctgtagcatggattgtgatgtgatcaatagaattttccggatttgtaatctcacacgccctcaggagggctaccttatggttcaacagttccagtacttgggctgggcatcccacagggaagtccctggctccaagcgcagtttcctgaaattgatactgcaagtcgaaaaatggcaagaagagtgcgaagaaggcgaggggaggacaataatacactgcttgaacgggggaggaagatccgggatgttctgcgcaatcggaattgttgtggagatggtgaagaggcagaacgtggtggatgtgtttcacgcagtcaagactctcagaaatagtaagcccaatatggtcgaggcccctgagcagtaccggttttgttacgatgttgcgctggaatatctggagtcgagctag

SEQ ID NO: 237154 - DNA, 4359 bp, synthetic construct
  misc_feature 1..4359: note = Description of Artificial Sequence: Synthetic coding sequence
  source 1..4359: mol_type = other DNA
atgaggggtctgggcacatgtcttgcaacactggccggtctactgctcacagctgctggcgagactttttccggcggttgcctgtttgacgagccttacagcacctgcggttacagccagtcggagggtgacgactttaattgggagcaggtaaacacactcacaaaaccaacttcagatccatggatgccctcgggctcttttatgctagtcaacgcatcaggacggccagaaggtcagcgggcacatctgctcctgcctcagctgaaagaaaatgatactcactgcatcgatttccactatttcgtgtccagcaaatccaatagcccaccgggacttctcaatgtgtacgtgaaggtcaataacggtcctcttggcaacccaatttggaatattagcggtgatccaactcgcacttggaaccgcgctgagctagcaatctcaaccttctggcctaacttttaccaggtgatctttgaggtgattacgtctgggcaccagggctatctcgccattgacgaggtcaaggtgctgggccatccatgcacgagaaccccgcacttcctccgcattcagaatgtcgaagtgaatgccggacagtttgcgacattccagtgttccgcaattgggagaaccgtcgctggtgatcgactgtggctgcaggggattgacgtcagggacgcacccctcaaggagatcaaagtgacttctagccgacggtttatcgcttccttcaacgtcgttaatactactaaaagggacgcaggtaagtacagatgtatgatacggacagaaggaggggtaggtatctctaactacgctgaactcgtggtcaaggagccgcctgtccccatagctcctccccagctagcttccgttggtgccacttatctgtggatccagcttaacgcaaacagtattaatggggatggcccaattgttgcacgcgaggtggaatattgcaccgctagcggatcatggaacgaccggcaacctgtcgactctacctcatacaaaataggacatttggatcccgataccgagtatgaaatctcagtgcttttgaccaggcctggggaaggaggaaccgggtcccccggacccgcactcagaactcgtactaaatgcgcggatcccatgcgagggccacgtaagctggaggtggtcgaagttaaatccagacagatcactatcagatgggaaccttttggatacaacgttactaggtgccattcctataacctcactgtgcactattgctaccaagtcggtggacaggagcaggtccgcgaagaagtgtcctgggatactgagaacagccacccccagcacaccattaccaacctaagcccttacacaaacgtgtcagtgaaactcattctcatgaaccctgagggcaggaaagaaagccaggagttaatagttcaaactgacgaggaccttcccggtgctgttcctaccgagagcattcagggcagtaccttcgaggaaaagatattcctgcagtggcgggagccaacgcaaacatacggtgtcattaccctgtatgagattacttataaggccgttagttcttttgacccagaaatcgacctttcgaatcagtcaggacgcgtgtctaaactcgggaatgagacccatttcctgttcttcggcctctatccagggactacatattccttcaccatacgcgcaagtaccgccaagggcttcggtccccctgccactaatcagttcaccacaaagatcagcgcaccatccatgccagcttacgaactggaaaccccactgaaccaaacagacaacactgtcaccgtcatgctgaagcccgctcacagccgcggtgctcccgtgtcagtctaccaaattgtcgtagaagaagaaagaccacgcagaactaagaagactacagagatcttgaaatgctaccctgtccctatccattttcaaaacgcatccctgctgaattcccagtattacttcgcagctgagtttccagccgatagtttgcaggctgctcagccttttacgattggtgacaataagacttataatggatactggaacactccacttctgccctacaaaagctaccggatttactttcaagctgcaagccgcgcaaatggggagactaaaattgactgcgtacaggtcgccacaaaaggagctgcaacacctaaacctgtgccagaacctgagaaacagacagaccacacagtcaagatagccggagtgatcgccggtattctcctgttcgtgattatcttcctgggagtggtgttggtcatgaaaaagcgcaaactggctaagaaaaggaaagagaccatgtccagtacaagacaggagatgacggtgatggtgaactcgatggataagagctacgccgagcaggggacaaattgcgacgaggccttctcgttcatggatacacataatctaaatggacgttcagtctccagtccatcatcattcactatgaaaaccaatacactgagcaccagcgtgccgaattcttactacccagatgaaacccacactatggcctccgatacctcttcgctggtgcagagccacacctataagaagcgagaaccagccgatgttccttaccagactggccaactacaccccgctattcgcgtggctgacttactccagcacataactcagatgaagtgcgcagaaggctacggattcaaggaagagtacgaaagtttctttgaaggtcaatccgctccatgggacagcgcaaaaaaggatgaaaaccggatgaagaaccgatacggaaatatcattgcctacgatcattcccgcgtcaggttgcagaccatcgagggtgacactaactccgactacatcaacggaaactacatcgatggttatcataggcctaatcactatatcgcaacgcaaggccctatgcaagagaccatctacgacttttggcgaatggtgtggcatgaaaacactgcgtcaattataatggtgacaaacctagttgaagtcggcagagtgaaatgttgtaagtactggcctgacgacactgagatctacaaggatattaaggtgactctcattgagactgaactgctagcagaatacgtgattagaacatttgccgtggagaagagaggcgtgcatgagattcgggagatcagacagtttcattttacaggttggccagaccatggggtgccctaccacgccactggactcctgggttttgttcgtcaggtcaagtccaaaagccctccctctgctggtcccttggtggtgcattgcagtgccggagccggtcggaccggttgtttcatagtgatcgatatcatgctggacatggctgaaagggaaggcgtggtggacatctataattgtgtccgtgaactgaggagcagaagagtgaatatggtccagacagaggaacagtacgtgtttattcatgatgctatccttgaggcatgcctgtgcggcgatacatcggtgcctgcttcccaggttcgcagtttgtattacgatatgaataagctggacccccagacaaactcctcacaaataaaggaagagtttagaaccttaaacatggtgacgccaaccttgagagtggaagattgttccatagccctgctgcccagaaatcacgaaaagaacagatgtatggatattctgccccctgatcgctgtctgccttttctgattaccatcgatggtgaatccagtaactacatcaacgccgcactcatggatagctataagcagccctcggcctttatcgtgacccagcatccactgcctaataccgtaaaagacttctggagactagttctggattaccactgtaccagtgttgtaatgctgaatgatgtggatcctgctcagctctgtccgcagtattggcctgagaacggcgtccatagacacggacccatccaagtcgagttcgtgagtgccgacctggaggaggatattatcagcagaatcttccggatatacaacgccgcaaggcctcaggatggctacagaatggtgcaacaatttcaattcctaggttggccaatgtaccgggacacaccagtctcaaaacggtcgtttctgaaacttatccgacaggtggacaaatggcaagaggagtacaacgggggagaaggcagaactgtagttcactgcctgaacggtgggggtaggtccggtactttttgtgccatcagcatcgtatgtgaaatgctgaggcatcagaggaccgtggatgtttttcacgccgtcaaaacactaaggaacaataagcccaatatggtggatctgttagatcagtataagttttgctatgaagtggctctggaatacttaaattccggctag

SEQ ID NO: 237155 - DNA, 4173 bp, synthetic construct
  misc_feature 1..4173: note = Description of Artificial Sequence: Synthetic coding sequence
  source 1..4173: mol_type = other DNA
atgcccagtggctctttcatgttggtgaacgcctctggcaggccagaggggcagcgtgcacacctcctgcttccacaactcaaggagaatgatacacattgtattgactttcactatttcgttagctccaagagcaattcccccccagggctccttaatgtgtatgttaaggtcaataacggcccactcggcaaccctatttggaatatcagtggtgatcccacgcgaacatggaacagagcggaactggcgatctctacattttggcctaatttctatcaggtgatcttcgaagtgatcacctctgggcaccaagggtatctggctatagacgaggttaaagtgctcggtcatccgtgcacgcgcacaccccactttttgcggattcagaacgtggaagttaacgcgggtcagttcgcaaccttccagtgttccgccatcggacggaccgtcgctggcgatagactctggcttcagggcattgatgtgagagatgcaccactcaaagaaatcaaggttacaagttcaaggaggtttattgcttcgtttaacgtcgtcaatactacgaagcgcgatgccggaaaatatagatgtatgatcagaacagagggcggtgttggaatttctaattatgcagaacttgttgtgaaggagccccctgtccccatcgcaccacctcagctggcatcagtgggggcaacctacctatggattcaactaaacgctaattccatcaatggagacggtccaattgtggcacgcgaagtggaatactgcactgcatcaggtagctggaatgatcgtcagcctgtggattccacatcatacaagatcggccatctggatcccgacaccgagtacgagatttccgttttgttaacaaggcctggagaagggggaactggcagcccagggccagcacttcgcacacgaactaagtgcgccgaccctatgagggggcctcgcaaactggaggttgtggaggtgaagtccaggcagattaccatacgatgggaaccgtttggctacaacgtgaccaggtgtcactcatacaacctgaccgtgcactactgctatcaagtaggcggacaggagcaggtaagagaggaggtgagttgggacaccgagaactcccatccgcagcatacaatcacaaacctgtccccatacaccaacgtatccgtgaaactcatcctcatgaaccccgagggtcgaaaagaatcacaggaactcattgtacagaccgatgaagacctgcccggagctgttcccacagaatcgattcaaggctctacttttgaggagaagattttcttgcagtggagggaacccacgcagacatatggtgtcatcacactttatgagatcacgtacaaggctgtgtcatcctttgacccagaaatcgacctatcaaaccagagtggcagggtgagtaaactcgggaatgaaacccacttcctgttcttcggtctctaccccggtactacctattccttcacaatccgcgcatccaccgccaagggtttcggaccacctgcgacaaaccaattcaccactaaaataagcgcgccttcaatgcctgcctatgagctggagactcccctgaatcagaccgacaacaccgtcaccgtgatgctgaagccagctcatagtcggggagctccagtgtcggtctatcagattgtggtagaggaggaacggccacggaggaccaagaagactacggagatcttaaagtgttatccagtacccatacacttccagaacgcaagccttctcaactcacagtactactttgcagccgaattccccgcagacagtcttcaggctgcccagccctttactattggcgacaataaaacctataacggctactggaatactcccttgctgccgtacaaatcttataggatctactttcaggccgcaagccgcgctaacggagagactaagatcgattgtgtccaggtagccacgaaaggcgcagccacccccaagcccgtgcccgaaccagagaagcagaccgatcataccgtgaaaatcgcaggcgtaattgccggaattctcctgtttgttatcatcttcctcggcgtcgtgctggtgatgaaaaagcgtaagctcgctaaaaagagaaaggaaaccatgtcatccactcgtcaggagatgacagtgatggtgaatagtatggacaagtcatacgccgagcaaggaactaattgtgacgaagctttcagttttatggatacacacaacctcaatgggagatccgtcagttccccctcgtcctttaccatgaagactaatactctctcaacatctgttccaaatagctattatcctgatgagacgcacacaatggcatccgatacctcttctctggtacagagtcatacgtacaaaaagcgagagcctgcagatgtgccataccagacaggccaactccacccagccatccgtgtcgctgacttgctgcagcacattacccagatgaagtgtgccgagggctatggcttcaaggaggagtacgagtcattcttcgagggacagtcagctccgtgggactccgccaaaaaagatgagaacagaatgaagaaccgttatggcaatatcattgcttacgatcattcacgagtgcgactgcaaaccatcgagggagataccaactcagactacatcaatggaaactacattgacggttaccacagaccgaatcattacatcgctacgcagggaccaatgcaggaaactatttatgatttttggaggatggtgtggcacgagaatacggctagtataattatggtgacaaacttggttgaggtgggcagggtgaaatgttgcaagtactggccagatgacacagagatctacaaggatattaaggtaaccctcattgagactgagttactggctgaatacgtgatacgtacctttgccgtcgagaaacgcggtgtgcatgagatacgcgaaattaggcaatttcatttcacaggctggcccgaccacggagtcccctaccatgcaactggtttgctcgggtttgttcggcaggtgaaaagcaaaagcccccctagtgcgggtcccttagtggtacactgttcagccggagcgggtcggacaggctgttttattgtcattgacatcatgttggatatggccgagcgggagggagttgtcgacatctataattgcgtgcgcgagctgaggtcccggagagttaatatggtgcagacagaggaacaatatgtgtttatccatgacgctattctggaggcctgcctgtgcggggatacctctgtccctgcctcccaggtgcgatcgctatactacgatatgaacaaactagacccacagacaaattctagccagattaaggaagaatttagaaccctaaacatggtgacaccgacactgagagtggaggactgctccatcgccctgctgccacggaaccacgaaaagaaccggtgtatggacattttgccccctgatcggtgcttgcctttcctgatcactattgacggcgaatccagcaactatatcaatgccgctttgatggattcatataagcagcctagcgctttcattgtgacccagcaccctctgccgaatacggttaaggatttctggagattggtgcttgactaccactgcactagcgtggtcatgctaaacgacgtcgatcccgctcagctgtgcccccagtattggcccgagaacggtgttcaccgtcatggaccgattcaagtcgaattcgtatccgctgatcttgaagaggatattatcagtcgtattttcaggatatataatgctgcccgaccacaggatggctacagaatggttcagcaatttcagtttctggggtggccaatgtatcgggatacccctgtatcaaagcggtcttttctaaaactaattaggcaggttgacaagtggcaggaggagtacaacgggggagagggacgcacagtggttcactgcttgaatggagggggacggagcggaactttttgcgctatctccattgtctgcgaaatgctgagacaccaacgtaccgtggacgtgtttcatgccgtgaaaacgctccggaacaataagcccaatatggtagacctgctggatcagtacaaattttgctatgaggtggcactcgaatacctgaattcagggtag

SEQ ID NO: 237156 - DNA, 4401 bp, synthetic construct
  misc_feature 1..4401: note = Description of Artificial Sequence: Synthetic coding sequence
  source 1..4401: mol_type = other DNA
atgcgcggactcgggacgtgtttagcgactctggccggtcttctcctgactgcagctggcgaaactttcagcggcggttgtttattcgatgagccgtactccacgtgcggctattcccagagcgagggcgatgatttcaattgggaacaggtcaatacactgacaaagcctacttctgatccctggatgcctagcggaagctttatgcttgtgaacgcctctgggcgtcccgaggggcaaagggcccacttgctcctgcctcaacttaaggaaaacgacacccactgtattgatttccattatttcgtaagctcgaagtcaaactccccaccagggctgcttaatgtatatgtgaaagtcaacaacggccctctggggaaccccatatggaatatctccggcgatccaacacgaacctggaatcgcgctgagctagcaattagtactttctggcctaacttctatcaggttatctttgaggtgattaccagcggccatcaaggatacttggcgattgacgaagttaaagtgcttgggcacccatgcacaaggaccccccacttcctgagaatccaaaatgtagaagttaatgcgggacagtttgccacctttcagtgttccgctataggtaggacagttgccggagacaggctgtggctgcagggcatcgatgtgcgggacgcccctttaaaggagatcaaagtgacctccagtagacgcttcattgcgtcttttaacgtcgtcaacacgactaagagagacgcaggtaagtacaggtgtatgataaggacggaaggcggagtgggcatctctaattacgctgaattggtcgtaaaggagcctccagtgcctatcgcaccacctcaattggcatccgtgggtgctacttatctctggattcaactgaatgccaacagcataaacggagacggccctattgtcgctagagaagtggagtattgcacagcctcaggatcctggaatgatagacagcccgtcgactcaacatcttacaagatcggccacctggaccccgacactgaatatgaaatctcagtcctgttgacaaggcccggtgagggcggaacagggagtccgggacctgcactgagaactaggactaagtgtgctgaccccatgaggggccctcggaaactcgaagtcgtagaggtgaaatccaggcaaatcaccatcagatgggagccattcggttataacgtcacgcgctgccacagctataatctgaccgtgcactactgctaccaggtgggtggtcaggaacaggttagagaggaagtttcatgggacacagaaaatagtcacccccagcacacaataaccaacctgagcccctatacgaatgtgtctgtgaaattaatcctgatgaaccccgaagggaggaaagaaagtcaagaactgatcgtgcagacagacgaagatctgccgggagccgttccaaccgagtctattcagggaagtaccttcgaggagaagatcttccttcagtggagagaacccacccagacgtacggggtgattaccctctatgaaataacctataaagccgtttccagttttgaccctgagattgacctgtcaaaccaatctggcagagttagcaaactaggcaacgagacacatttcttgttctttggtttatatccgggaactacctacagtttcaccattcgcgcatctaccgcgaagggcttcgggcctcccgctacaaatcagttcacgaccaagatttcagcaccgagcatgcccgcttatgaactggaaaccccactcaatcagacggataacaccgtgactgttatgctgaagccagcacatagtagaggcgcacccgtatccgtctatcaaatcgtcgtggaggaggaacgaccgagaagaactaaaaaaactaccgaaattctgaagtgctatccggtacctattcactttcaaaatgcatcacttttgaactctcagtactattttgcagcagagttcccagcagactcgttgcaggcggctcagcctttcacaatcggtgataacaaaacctacaatgggtactggaacaccccactactgccctataaaagttatagaatctacttccaagctgccagtcgggcaaatggagagaccaaaatcgactgcgtgcaggtggctacgaaaggcgcagcaacccctaaacctgtgcccgagccagagaagcagacagaccataccgtaaaaatagccggtgtgatcgctggcatacttttatttgtgattatctttctcggtgtcgtactagtaatgaagaaaagaaaactggcaaagaagcggaaagaaacgatgtccagcacaagacaggagatgactgtaatggtgaatagcatggacaaatcctacgccgaacagggaacgaactgcgacgaagccttttctttcatggatacccacaatctgaacggccgatcagtgagctcaccctcctctttcactatgaaaaccaataccctgagtacctcagtgcctaacagctactatcccgatcccttcgttcctacagccatcctagattttagtctgaacaacgagacccatactatggcctccgacaccagttccctggttcaatctcacacgtacaaaaaaagagaaccagcagacgttccatatcagactggccagctacatcccgctatccgggtggccgatcttttacagcatattacccagatgaagtgcgcagaagggtacgggttcaaggaggagtatgagagtttctttgaaggacagagcgccccttgggactcggcaaagaaggacgaaaacagaatgaaaaatcgatacggaaatattatcgcgtacgaccatagccgcgtgcgcctgcagacaatcgagggcgacactaactccgattacattaacgggaactacattgacggctaccaccgccctaaccattatattgctacgcaaggacccatgcaagagacaatctacgatttttggcgcatggtttggcatgagaatacagcatcaatcataatggttactaatcttgtggaggtgggtagagtgaaatgttgtaagtattggcctgatgacactgagatatataaagatattaaggtgacattgatagagacagagctgctggccgaatacgtcattagaacatttgcagtggaaaagcgaggtgtgcacgagatccgggaaatccggcagttccattttacaggctggccggaccatggcgtgccctaccacgccacgggactgctgggctttgtgagacaggttaaatccaaatctcctcctagtgctgggcctctcgtcgtccactgcagcgcaggggcaggcagaaccgggtgtttcattgtcattgacattatgttagacatggcagaaagggaaggcgtcgttgatatatacaattgtgtgcgggaactcaggagccggagagttaacatggtacagacggaggagcagtatgtcttcattcacgatgccatcctggaggcttgcctgtgtggagacacatcagtcccggcaagccaggtgcggagcctgtactacgacatgaataagctggacccccagacaaattcctcccagatcaaggaggaatttagaaccctgaatatggttacacctacccttagagtggaagactgttcaattgcgctactcccgaggaaccacgaaaagaaccggtgtatggatatccttccgccagacagatgcttgccctttctcatcaccattgacggagagtcgtccaattatattaatgccgctttgatggactcttacaagcaaccctccgccttcatcgtgactcagcacccactgcctaacaccgtgaaggacttctggagattggtgcttgattaccattgtacttccgtcgtcatgctcaacgatgtggaccctgctcagctgtgtcctcagtactggccagaaaatggtgtccacaggcatgggccaatccaagtagaatttgtctccgccgatctcgaagaggatattataagcagaattttcagaatttacaacgccgcaagaccgcaggacggctacagaatggttcaacaatttcagttcctggggtggcccatgtatagggacacccccgtgtcaaaacgatcattcctgaagctgatcagacaggtggacaaatggcaagaggaatacaacggcggtgaaggaaggacagtcgtccactgtctcaatggagggggacgctccggcaccttctgcgctatcagcattgtatgtgagatgcttcgacaccagcggaccgtggacgtctttcacgctgtgaaaaccctgcgcaataacaaaccgaatatggtcgatctcttggaccagtataaattctgttatgaggttgcactggaatatctcaactccgggtag

SEQ ID NO: 237157 - DNA, 3720 bp, synthetic construct
  misc_feature 1..3720: note = Description of Artificial Sequence: Synthetic coding sequence
  source 1..3720: mol_type = other DNA
atgggcactctcagcttgcaccccggtatcgacgtgcgcgacgcccctctaaaggagatcaaagtgacatcctctcggagattcattgctagtttcaatgtagttaatactacaaagcgggatgcaggtaaataccggtgtatgatccggaccgagggcggagttggaatctccaactatgccgagctcgtcgttaaagagccgccagtcccaatcgcaccaccacaattggcctcagtgggggctacatacctttggatccagctaaacgcaaactcaattaacggcgacggtccaattgtagccagggaggtggagtactgcaccgcatcaggatcctggaatgataggcaaccagtggactctacctcttacaagattggtcatttagaccccgacaccgagtacgaaatctccgtcctactgactcgaccaggagaggggggaaccgggtcacccggtcccgcattgcggactaggaccaagtgcgcagatcccatgcgtgggcctagaaaacttgaggttgtcgaagtcaagtctcggcagattaccatccgctgggagccattcggatataacgtcacacgctgccacagctataacctgaccgtgcactactgctaccaggtgggaggccaggagcaagtgcgcgaagaagtaagttgggatacagagaactcccacccccagcacacaatcacaaatctgagtccatacacgaatgtgagcgtcaaactgatattgatgaaccccgaaggccgtaaagagtcacaggaacttatcgtgcagacagatgaagacttaccgggagcagttcccaccgaaagcattcagggatcgaccttcgaggagaagattttcctccaatggcgggagcccacacagacttacggcgtcatcactctgtacgaaattacctataaagctgttagtagcttcgatccagagattgacctgagcaatcagtccggacgggttagcaagttagggaacgagacccacttcctcttcttcggattgtatccaggaacaacgtattcttttaccatccgggcatcaaccgctaagggcttcggtcctcctgccaccaatcaatttaccactaaaatatctgccccatctatgcctgcatatgagctggagacacctctgaatcagaccgacaacacagttactgtcatgttaaaaccagcacactcccgcggagcccctgttagtgtgtatcagatcgtggttgaagaggagaggccacgccgtacaaaaaaaaccacagagatcttaaaatgttacccagttcccatccactttcaaaacgcttccttgctaaactcgcagtactatttcgccgctgaattccccgcagatagtcttcaggctgctcagcctttcacaataggtgataataagacctacaatggctattggaacacgcctctccttccttataagagttaccgtatttattttcaagctgcctcgagggccaatggtgaaacaaagatcgactgcgttcaggtggccactaagggcgcagcgacccctaagccagtgcccgaacccgagaagcagaccgatcatacagtgaagatcgccggagtgatagcaggcattctgttgttcgtaatcatctttctgggagttgtcctcgtgatgaagaaacggaagctcgcgaagaagcgcaaggagaccatgagcagtacccggcaggaaatgaccgtcatggtcaactcaatggacaaaagctacgccgaacaggggactaactgcgacgaggcattcagctttatggacacgcacaatctcaatggtcggagcgtttcttcaccaagctcattcaccatgaagactaacacactcagcacttccgtccccaatagttactacccagacgagacccacactatggcctctgacacttcatcactcgtacagtctcacacttataaaaagcgggagcctgccgatgtgccctaccaaacaggccagctgcatcctgcgatccgggtcgcggacttgctgcaacatatcacccagatgaaatgtgctgagggctatggatttaaagaagagtacgagtcatttttcgaagggcagagcgccccatgggactctgcaaagaaggatgagaaccgtatgaagaaccggtacgggaacataattgcatatgaccactccagagtccgcttgcagacaatagagggcgacaccaattccgactacattaatgggaactatatcgacggatatcaccgcccaaaccattatatcgcaactcagggacccatgcaagaaacaatttacgacttttggagaatggtatggcatgagaatactgcctccattattatggttacgaacctcgtagaggtgggtagggtcaagtgctgcaaatactggcccgacgatacggaaatttacaaagatattaaggtgaccctgatcgaaaccgagttactggccgaatacgtgattagaacattcgccgtggagaagagaggcgtgcacgagattagagaaatcaggcagttccattttaccggctggcccgatcatggagtgccctatcatgcgacagggcttttgggttttgtgcggcaagtaaaatcaaagtcccccccaagcgctggtcctctcgtggtgcattgcagcgctggcgcaggcaggacaggatgtttcatcgtcatcgacatcatgctggatatggctgagagagagggcgtcgtggacatctataattgcgtgcgggaacttcggtcccgaagggtgaacatggtccagacagaggaacagtatgtctttatccacgatgccattctcgaagcctgtctgtgcggtgacaccagtgttcctgcatcccaggtgaggtctctttactacgatatgaacaaactagatccacagacgaatagcagccagataaaggaagaattccgaaccctgaatatggtgaccccaactcttcgggtagaggactgtagtattgccctcctgcctaggaaccacgaaaaaaatagatgcatggatattttgcctccagaccggtgcctcccctttttaattacaatcgacggggagagttcgaactatatcaatgctgcgttaatggatagctacaaacagccgtccgctttcattgtcactcaacaccccctgcccaatactgtgaaagacttctggcgcttggtgctggattaccattgtacatctgtggtcatgttgaacgacgtggaccctgctcaactttgtcctcaatattggcctgagaacggcgtacacagacatgggccaattcaagttgagtttgtcagcgcggatctggaagaggacatcatctccagaatattcaggatttacaacgctgcacggcctcaggacggttacagaatggtgcagcaatttcagtttttgggctggcccatgtatcgagacacaccggttagtaaaagaagtttccttaaacttattagacaagttgacaaatggcaggaggagtacaacggcggtgagggtaggacggtcgtgcattgtctgaatggcggaggtcgatctggaactttctgtgctatctccatcgtatgcgagatgcttagacaccagcgcactgtcgacgtttttcacgccgtgaagacactgagaaacaacaaacctaatatggtcgacctcctcgatcaatacaagttctgttatgaggtagctctggagtatctgaactccgggtag

SEQ ID NO: 237158 - DNA, 2940 bp, synthetic construct
  misc_feature 1..2940: note = Description of Artificial Sequence: Synthetic coding sequence
  source 1..2940: mol_type = other DNA
atgcgcaggcccaggcgcccagggggacttggcggatctggaggtctccgcttgctgttgtgtttgctgttactctcatccaggcccggaggctgcagcgctgtctcagctcatggttgtctgttcgataggagactttgcagccaccttgaggtgtgcatccaagatggactcttcggccagtgccaggtgggcgtgggccaggctagaccgctcttgcaggttacctcaccagttttgcagcgtctccagggagtactgcgacagttaatgagccagggactctcttggcatgacgatctgacgcagtatgtcatctcacaggaaatggaacggatccccaggctccgtccacccgaacctagaccaagagaccgatctggactggctccgaagagaccgggacctgcaggcgaactgctgctgcaggatatcccaacagggtccgctcccgcagctcaacataggctgccgcagcctccagttgggaagggcggagctggagcttctagtagcctttccccgctacaggcagagctgctgcctccactgcttgagcaccttttgcttcccccacagcctcctcacccttcactatcctatgagcctgctctgcttcagccatatttgttccaccagttcggcagcagggacggctcgagagtgtcagaagggagccccggaatggtgagcgtaggcccactccctaaagccgaagctcccgcactgttctctagaactgccagcaaaggaattttcggcgaccaccccggtcattcatatggggatttgcctgggccaagtcccgcacaacttttccaggattccgggttgctgtatctggctcaagaactgccagccccttccagagctagggtacctaggctgcccgagcaggggagctcgagccgcgcagaggattctcccgagggatacgaaaaggagggcctcggtgacaggggtgagaagccagcatctcctgcagtccagcctgacgctgctcttcagaggctcgcagcagtcctggcaggctatggtgtcgagctgagacagctgacccctgaacagctgagcacactgcttaccctccttcaactgctgcccaaaggagccggacgaaatcccggaggagtggtgaatgtaggagcagacattaagaagaccatggagggccctgtcgaaggtagggacactgctgagctccccgctcggacttcaccgatgcctgggcatccgactgctagccccacttccagcgaggtacagcaggtgccatccccagtgagcagcgagccccctaaggcagctagacctcctgtgacccccgtcctgctggagaagaaaagcccgctgggccagtcacagccgacagtcgccggacaacctagtgcccgacctgcggcagaagaatacgggtatattgtgacggatcagaaacccctttccttagcggctggcgtgaaacttttggaaatcttggctgagcacgtgcacatgtcttcgggctcctttattaacatctctgtggtgggcccagcacttacatttcgcatacgccataatgagcagaacctgtctctggctgatgtgacacaacaggccggacttgttaagtccgagctcgaggcacagaccggcctacagattttgcagaccggcgtgggacagagggaggaagccgctgcggttctgccacagaccgctcactcaacaagcccaatgcgaagcgtgctcttgaccctcgttgccctcgcaggggtcgccggattacttgtggctctggccgtggccctgtgtgtacgacagcacgcacggcagcaagataaggaacgcctcgccgctctagggcctgagggggcacatggagacactacctttgagtaccaggatctgtgccgccagcatatggcaactaaatccctgttcaatagagccgaaggaccaccagaaccttctcgagtgagcagtgtcagttcacagttctcagacgccgctcaggcatctccgtcctcgcactctagcaccccgagttggtgtgaggagcctgctcaggctaatatggatatatcaacagggcacatgatcctggcttatatggaagaccatctcaggaatcgagatcgtctggctaaagagtggcaggccctgtgcgcctatcaggccgagccgaatacgtgtgctacggctcagggggagggcaatattaagaagaatcggcaccccgactttctcccatatgatcatgctaggataaagctgaaggtagaaagctccccaagtcgtagcgattatatcaacgctagcccaatcatcgagcacgaccctagaatgcccgcttacatagccacccagggcccattatcgcacaccattgcggacttctggcagatggtgtgggagagcggttgtaccgtcatcgtgatgcttactccactggttgaggacggcgtgaagcagtgcgacaggtactggccagacgaaggagccagtctgtaccacgtttacgaagtgaacctggtgtcggaacatatttggtgcgaagattttctggtccgctccttctatctcaaaaacgtccagacccaggagactaggacacttacccagttccacttcctgagctggcctgcggagggaaccccagctagcacgcgtcctctactggatttccggaggaaggttaacaagtgctaccgaggacgttcttgccccataatcgtccattgttctgatggagcaggacggactggcacttacattcttatagatatggtcctaaacaggatggccaaaggcgtgaaggaaatcgatatcgcagctacgctcgagcacgtacgcgatcagagacccggattggtcaggtcaaaagatcaattcgagtttgccttgaccgcagtggccgaggaggtgaacgcaatactgaaggccctgccccagtag

SEQ ID NO: 237159 - DNA, 2853 bp, synthetic construct
  misc_feature 1..2853: note = Description of Artificial Sequence: Synthetic coding sequence
  source 1..2853: mol_type = other DNA
atgcgaaggccccgtaggcctggcggtctcggtggatctgggggtctgagactcctgttatgtctgctcctcctgtccagccgtcctggcggttgttctgctgtgagcgcacatggatgcttgttcgacaggcgtttatgtagccacttggaagtgtgcatacaggatggcctgttcggtcagtgccaagtcggggtgggccaagcacggcctcttcttcaggtgacctcgcccgtgcttcaacgtctccaaggcgtgctacggcagttaatgtcacaggggctctcatggcatgacgatctgacacagtatgtcatcagccaggagatggaacgtattccaagactgcggccacctgaaccacgaccgagagacaggtcaggcctcgccccaaagagacccggaccagcaggagagctgctacttcaggacattccgactggctccgcccctgccgctcagcataggctgccgcaaccccctgtcggcaagggtggcgctggggcatcctcttctctgtcaccactgcaggctgaactactcccgccactactggaacacctgctgttaccaccacaacccccacaccccagtctctcatacgagcccgctctgctgcagccctacctatttcaccagttcggtagtagagatggcagccgtgtgtccgagggaagcccaggaatggtgagcgtcggacccctgccaaaagccgaggcccctgcactgttctcacggaccgcatccaagggtatcttcggggaccatcccggtcatagctacggcgatctcccgggacctagtccggctcagctatttcaagatagtggcctgctataccttgcccaggagctgcccgctccctcacgcgcacgggttccaaggctccccgagcagggctccagcagtcgcgctgaagacagccctgagggctacgaaaaggagggcttgggcgataggggtgagaaacctgccagtcccgctgttcagcctgacgcagcactgcagaggttagccgcagttctggcaggatacggcgtcgaattacggcagctcaccccagagcagttgtctaccctcctgaccctcctgcagttgctacctaaaggggctggcaggaatcccggtggcgtagttaacgttggcgcagacataaaaaagacgatggaagggcctgtggaaggccgtgacactgccgaattgccagcccgtacttcaccaatgccgggtcatccaacagcctcgcccacaagctctgaggtccagcaggtgccttcacccgtgtcctctgagccacctaaggccgctcgcccaccagtcactcctgtgctgctggaaaagaaaagtccactcggacagtctcagccgaccgtggccggacagccatcagctagaccagccgcagaagaatacggctacatcgtaaccgatcagaacgtggtgggtcccgctctgaccttcaggattcgacacaatgagcaaaacctgtccttggcggacgtcacccaacaggccggattagtcaagtcagagttggaagcccaaacagggctgcaaatcctgcagaccggcgtcgggcagcgggaagaagcggctgcagttctaccacagaccgctcactcgacgtcacctatgcggagcgtgcttttgaccctcgtcgctctcgccggtgtggccggattgctggtggccctggctgtggccctatgcgtccggcaacacgccagacagcaggacaaagagagactcgccgcacttggccctgagggtgctcacggggatacaacctttgaataccaagacctgtgccgccagcacatggcaaccaagtccctattcaacagagcagaagggcctcccgagccatctagagtatcctctgtgtcttcccagttctccgacgcagctcaggccagcccatcatctcactcttcaactccctcttggtgtgaagaacctgcccaagcaaacatggacatctctaccggacacatgattttagcttacatggaagaccacctacgcaaccgtgaccggctcgctaaagagtggcaggcactctgcgcgtatcaggcagagccgaatacctgtgccactgcacagggagaggggaacatcaaaaaaaatcgccacccagattttctcccttatgaccacgcacgaataaaactgaaggtagagagcagcccttctcggtcggattatatcaacgcatccccaatcatagagcatgaccccagaatgcctgcctatattgcaacgcagggtccgctgagccacaccatcgctgatttttggcagatggtctgggagagtgggtgcacggtgattgtgatgctgacccccctggtggaggatggcgtcaagcagtgcgatcggtattggcccgacgaaggcgcatctctgtaccacgtttacgaggtgaatctggtgtcggagcacatttggtgcgaagacttcctcgtacgcagcttttacctgaagaatgtgcaaactcaggaaacaaggaccctgacacaatttcacttccttagctggcctgcagagggtaccccggctagcactaggccactgcttgatttccgacgtaaagtcaacaagtgttatcgaggtagatcttgccccataatcgtccactgcagtgatggagctggaaggactgggacatacatccttatcgatatggtcctcaataggatggctaagggggtgaaggagattgatatcgcagccaccctggaacatgtgagggaccaacgacctggactcgtcaggtccaaggatcagttcgagttcgcgttgaccgccgtcgctgaggaggttaacgctatattgaaggctctgcctcagtag

SEQ ID NO: 237160 - DNA, 489 bp, synthetic construct
  misc_feature 1..489: note = Description of Artificial Sequence: Synthetic coding sequence
  source 1..489: mol_type = other DNA
atgcggcgtcctcgcaggcccggagggttaggagggtctggcggacttaggttgctgctctgcctgctgctcttgagctctagaccaggtggctgtagtgcagtaagcgcacacgggtgcctgttcgaccgccgtctttgcagccacttagaggtctgcatacaggacggactcttcggacaatgccaagttggggtaggccaggcacgtccattactgcaggtcacatccccagttctgcaacgcctgcagggcgtactacgacagctgatgagtcagggactgagttggcacgacgacctgacccagtacgtgatttcccaggagatggaaagaatccctagactgaggcctcccgagcccagaccaagggataggtctggtctcgcacctaaacggcctggcccagccggtgaactgctgctccaggacatccccaccgggtcagcaccagctgcacaacttttgagcgtgccaagtgccggatag

SEQ ID NO: 237161 - DNA, 2670 bp, synthetic construct
  misc_feature 1..2670: note = Description of Artificial Sequence: Synthetic coding sequence
  source 1..2670: mol_type = other DNA
atgagccaagggctctcctggcatgacgacctcactcaatatgttatcagccaggagatggagagaatccctaggctgcgcccacctgagccacggccacgcgaccgaagcgggttggccccaaagcggcctggacctgccggagaacttctcctccaggacattcccactggtagcgcacctgcggctcagcatcggctgccgcagccccctgttggcaaagggggtgcaggagcatcctccagtctctctccgctgcaggcagaactgctcccgccactccttgaacatctcctgctgccacctcagccaccccatcccagtctgtcatatgagcccgctctcctgcagccatatctgttccaccagttcggcagccgtgatggctcacgtgtaagcgagggcagtcctggaatggtgtccgtgggacctctgcctaaggccgaggccccagcactgttttccagaactgcatcgaaaggcatatttggcgatcatccaggccatagctacggggatctgccaggcccttccccagcccagttatttcaggacagcgggcttttatatcttgcgcaggagttgccagcaccctcacgagctagagtgccacggctgccagaacagggctctagtagccgggcagaggactccccagaggggtacgagaaagagggattaggagatcgaggggagaaaccggcttctcctgctgtccaaccagacgctgccttgcagcggctcgcagccgttttggctgggtatggggttgaactgaggcagcttacacctgaacagctgtctacgctgctgacactactgcaattgctgccaaaaggggcaggcaggaatcctggcggagtcgtcaacgtgggcgcagatattaaaaagacaatggaagggccagtggaaggaagggacacagcagagctccccgcacgcacgagtcctatgccgggacaccccactgccagtcctaccagcagcgaggtacagcaggtgccttcccctgtgagttctgagcccccaaaagcggcacgccctcctgtgacaccggttcttctggaaaagaaaagtcctctaggtcaaagccaacccacagttgccggtcaacctagcgcacgacccgcagccgaagaatacggctacatcgtaaccgatcagaagccgttaagcttagcggctggcgtcaaattgctggagattttggcagaacacgttcacatgagttccgggtcttttattaacataagcgtggtgggccctgcccttacatttcgaatcaggcacaacgagcagaacctaagcctcgctgacgtgacacagcaggcgggactggtgaaaagtgagctcgaggctcaaacgggattgcagatcctgcaaaccggcgtaggccagcgggaggaggccgctgctgtcctgccccaaacggcacactctacaagtccaatgcgctccgtgcttctcactctggtcgcactggcgggtgtggccggactcctggtggctttggccgtggccttgtgcgtccgtcagcacgctcgacaacaggataaggagaggttggctgccctgggacctgagggcgctcatggagataccacttttgaataccaagatctatgccggcagcatatggccactaagtcactctttaatagggccgaggggcctccagagccttcaagagtgtcaagcgttagctcacaatttagtgatgcagcccaggcatccccatcaagccattcctctactccatcttggtgtgaggagcccgctcaggcaaacatggatattagcactggacatatgatattggcatatatggaagatcatttacgcaatagggacagactagctaaggagtggcaggcgctgtgcgcttaccaggcagaacctaacacctgcgccacagcccagggtgagggcaatattaagaagaacaggcatcctgatttcctgccctatgatcatgcgagaatcaagctcaaggttgaaagtagccctagcagatctgactatatcaatgcttccccaattattgagcatgacccacggatgccagcatatattgccacccagggcccacttagccatactattgccgatttctggcagatggtctgggaatcaggctgcaccgtaatagtgatgttgacacccttggtggaagacggtgtaaagcaatgcgaccggtactggcctgatgagggggcttcactctaccacgtttacgaggtgaacctggttagcgaacatatctggtgtgaagactttctcgtgaggtctttctacctcaagaacgttcagactcaggagacccgaactttgactcagttccacttcctgtcctggccagccgagggtacccccgcatccaccaggccgttacttgatttccggcgaaaggtcaacaagtgttaccggggaaggtcttgtccgattattgtccactgcagtgacggggctggcagaaccgggacctacattctgatcgacatggtgctcaatcggatggctaagggggtcaaagaaatcgatattgccgcaacccttgagcatgtcagagatcaacgcccaggactggtgcgctcgaaagaccagtttgagttcgccttgaccgctgtcgccgaagaggtcaatgctatactgaaggccctccctcaatag

SEQ ID NO: 237162 - DNA, 2853 bp, synthetic construct
  misc_feature 1..2853: note = Description of Artificial Sequence: Synthetic coding sequence
  source 1..2853: mol_type = other DNA
atgagaaggccacgtcgccctggtggcctgggtggttctggaggactgagactactgctgtgtctattgctgctgagctccaggccaggaggctgttctgctgtttccgctcacggttgtctttttgacaggcgtctgtgtagccatctagaggtttgcattcaagacggcctcttcggacagtgtcaggtgggcgtgggccaggccagaccactgctacaagttacaagccctgtgctgcagaggctgcaaggcgtgctccgtcagctcatgagtcagggcctgagctggcacgatgatcttacccagtacgtgatttctcaggagatggagaggatcccgaggctgaggcctcccgagcctagacccagagacaggtctggattagcccctaagagaccaggcccagcaggtgaactgctgctgcaggacatccccaccggatctgccccagccgcacagcaccggttgccacaacctccggtcgggaaaggcggagctggtgcctcgagctccctctcccccctgcaggccgaactgctgccacccctgctggagcacctactgttgcctccccagcctccccacccgagcctttcttatgaacccgctcttcttcaaccctatcttttccatcagtttggcagccgggatggaagtagagtgtccgaaggcagccccggaatggtaagcgtgggacctctgccgaaagctgaagcacccgcactgttctcgagaacggcttccaaagggattttcggagaccacccaggccactcctatggggatctgccaggcccttccccagctcagttatttcaggacagcgggctgctgtacctggcccaggaattgcctgccccatcccgcgcacgggtccctagactaccagagcagggcagttctagcagggcagaggactctccggaaggctatgagaaggaagggctaggggaccgcggagaaaagccggctagcccggcagtccagccagacgcggctctgcagaggttagccgcagttttggcagggtatggcgtggaactccgacagctgacaccagagcagcttagcacgctactcacactcctgcagctgttgccaaaaggcgcaggtcgaaatcctggtggggtggttaacgtgggagcagatatcaaaaagacaatggaaggacccgtggaggggagagacaccgcagaacttccagctagaactagtccgatgccaggccatccaactgctagccccacgtcatccgaggtacagcaagtcccttctccagtgagctccgagccaccgaaagccgcacggcctccagtgactccagttctgctcgagaagaaatctccgctgggacagtcacagcctaccgtggccggacagccgtctgcacgccctgccgctgaggaatatggctacatcgtgaccgatcagaatgtggttgggcctgccctgacttttcgtatccgtcataatgaacagaatctatctctggctgatgtcacccagcaggcgggactggtgaaatccgagttagaggcacagacaggactgcagatactgcaaaccggtgttgggcaacgcgaagaggccgcagccgtgctgcctcagaccgcccatagtacttcccctatgagatccgtgttgctgacccttgtcgcccttgccggtgttgcagggctgttagtggcattagccgtcgccttgtgcgtaagacagcacgccaggcaacaagataaggagcgtctggccgctctgggtccagaaggagctcatggcgataccacattcgagtaccaagacctttgccgccagcacatggccaccaaatccctgttcaatagggctgagggcccacctgagccttctcgggttagctctgtctcatcccaattctcagacgccgcacaagctagtccctcttcacatagctccaccccgtcctggtgtgaggagcccgcacaagctaacatggatatatccacgggccacatgatactagcctacatggaggaccacttgcggaatcgagaccggttggcgaaggaatggcaagccctttgtgcttatcaagccgaacctaacacttgtgcaactgcacagggcgagggaaacattaagaaaaacaggcaccccgacttcctgccttacgaccacgcccgaattaaacttaaggtcgaaagtagtccctcccgcagcgactatatcaacgcatcccctataatcgagcatgacccaaggatgcctgcctatattgcaacccagggcccactcagccatacaattgccgatttttggcagatggtctgggaaagtggttgcacagtcatagtgatgttgactccacttgtagaggatggcgtgaagcagtgcgaccggtattggcccgatgagggcgcttctttataccatgtgtatgaagtgaacctcgtctctgagcacatctggtgcgaagactttctcgtacgctcattctatctgaaaaacgtccagactcaagaaacccgcaccctcactcagttccacttcttgtcgtggccagccgaaggcacaccagcatctactaggccactgctcgacttcagacgcaaggtcaacaaatgctataggggccgttcctgtcctattatcgttcactgttctgacggggcagggagaactggcacctacattcttatcgatatggtgctgaaccggatggctaagggggttaaagagatcgacatcgcagctacactggaacacgttcgagatcagcggcctgggctcgtgaggtcaaaggaccaattcgaatttgcgcttacagcagtggcagaggaagtgaatgccattctgaaggccctccctcaatag

SEQ ID NO: 237163 - DNA, 2961 bp, synthetic construct
  misc_feature 1..2961: note = Description of Artificial Sequence: Synthetic coding sequence
  source 1..2961: mol_type = other DNA
atgggcccacccctgcccctgttgctgctgctgctgctgctcctgcctccaagagtcctgccggctgctcccagctcagtgcccagggggaggcaactccccggaaggttgggatgtctgcttgaagaagggctgtgtggagcttcagaggcctgcgtgaacgacggcgtgtttggcagatgccagaaggtgccagctatggacttttacaggtacgaagtatctcctgtcgcgctacagaggctccgagtggctcttcagaaactatcaggcacaggatttacatggcaggatgattacactcaatatgtgatggatcaggaactcgcagacctgccgaaaacctatcttagaagacctgaagcctcctccccggctagacctagtaaacactcagttggaagtgaacgacgctatagcagggaaggaggggctgcgctcgctaatgccttgcggcgacatctgccctttctggaagccctgagtcaagcaccagcctcggatgtgcttgcccgaacccatactgcccaggatcgaccaccagctgagggtgacgatcggttcagtgagagcatcttaacctacgtagcccacacctcagccctgacctacccgccaggcagtcgcacacagcttagggaagacctgcttccacgaaccctcgggcagttacagccggacgagctgtctccaaaagtggactcaggggtggaccgccaccatctaatggctgctctgtcggcatatgctgctcagagaccgccagcccctccgggtgaaggatccctagagcctcagtacctcctgagagccccttcccgcatgcccaggcccctattggcgccagcggcaccccagaagtggccttctcccctgggggattcagaggaccccagtagcacaggggacggtgctagaattcacaccctgctgaaagatcttcagaggcagcctgctgaagttagagggctctctggactcgagctggacgggatggcagagttgatggcaggattgatgcagggtgtggaccacggcgtggcaagagggagtccgggacgagcagccctcggggaatcaggggagcaggccgatggccctaaagctactctccggggtgattctttccccgatgacggggttcaggatgatgacgaccgactttaccaggaagtgcataggctctcagcaacactgggcggactactacaggaccatggttctcggctactccctggggctctacctttcgcacgccctctggacatggaacgaaagaagagtgagcaccctgaatctagcctgtcatcagaggaagagaccgctggggtcgagaacgtgaagagccaaacatactcaaaggaccttttgggccagcaaccgcattcagagccgggtgcggctgccttcggtgagcttcagaatcagatgcctgggccaagcaaggaagagcaatctttgcctgcaggagcccaggaagccctgagcgatggtttgcagttggaggtgcagccgtcagaggaagaagcccgagggtacatcgtcaccgatcgtgaggtcctaggccctgccgtgacattcaaagtctctgcaaatgtccagaatgtcaccaccgaggacgtcgaaaaagccactgtggataataaagataagctggaagagacctccgggctgaaaattctgcaaacaggggtaggttctaaatccaaactcaagtttctgcccccacaggcagagcaagaagattctaccaagttcatagcactgaccctggtgtccctggcttgcattttaggcgtgctcctggcatccggtctgatttattgtctaaggcattcttcacaacaccggttgaaggagaaactgtcaggtttggggggtgatcccggtgctgacgcaacggccgcttaccaggagctatgcagacagagaatggcgaccaggccaccagaccgtccagagggccctcatacctcccgaatcagctccgtgtcctcgcaattctccgacgggccaatcccaagcccctccgcacgaagcagtgccagtagctggtctgaagagcccgttcaaagcaatatggacattagcaccggacacatgatcctctcctacatggaagaccacctcaagaacaaaaacagactggagaaggagtgggaggctctgtgtgcatatcaggctgagccgaactccagcttcgtggctcagcgcgaagagaacgtaccaaaaaatcggtcacttgcagttctgacctatgaccacagtcgcgttctcctcaaggccgagaattcacattcacattcagattacatcaacgcctcccctatcatggaccatgaccctcgtaatcccgcttacatcgctactcagggcccactcccagcaacagtcgctgatttttggcagatggtttgggagagcggctgcgtggtgatcgtgatgctcacccccctcgcagaaaacggggttcgccagtgctatcattactggcccgatgaaggtagtaatctgtaccacatttacgaagtgaacttagtgagtgaacacatctggtgcgaggacttcctggtgcgcagcttctacctgaagaatctacagacaaacgagactcggaccgtgacccaatttcacttcctttcctggtacgacaggggggttccttcctccagtaggtctctgctagattttcggagaaaggtgaacaaatgttacagagggcgatcatgccccataatcgtgcattgtagtgatggtgccggaagaagtgggacttatgtactgatagacatggtgctgaataaaatggctaaaggggctaaagaaatcgatatcgccgcaactctcgagcatctcagggatcagcgcccaggaatggtgcagacgaaagagcagttcgaattcgcccttactgctgtggctgaggaggttaatgctatcttaaaagcactgccacagtag

SEQ ID NO: 237164 - DNA, 2997 bp, synthetic construct
  misc_feature 1..2997: note = Description of Artificial Sequence: Synthetic coding sequence
  source 1..2997: mol_type = other DNA
atgggtcctcctctccccctactcctgctgctcctgcttctgctaccaccgagagtgttgcctgccgcacccagcagcgttcctcgcggtaggcagctgccaggtagactggacggggttttcggcaggtgccagaaggtcccagctatggacttttatagatacgaggtgtccccagtcgccctgcagagattgcgggtggctctccagaaactgagcggcaccggcttcacttggcaggatgattacactcaatacgtcatggaccaggaactggccgacttgcctaaaacgtacctgagacgccctgaggcctcttccccggctaggccatcaaagcactcggtggggtctgaaaggcgatatagccgtgagggaggagctgccctggcaaatgctctcagacggcatcttcccttcctagaggccctttctcaggccccagccagtgatgttctcgcaagaacgcacacggcacaagatcggcctcctgcggaaggagacgatcggttctctgagtccattttaacctatgtggctcacaccagtgccttgacctatcctccagggtcccggacccagttacgagaggacctactaccgaggaccctgggccagctacagccagatgaactgagcccgaaggttgattccggcgtcgataggcaccacctgatggccgcactcagcgcctatgcggctcaaagaccacctgcgcctcccggagaaggcagtcttgagccccagtatctgctcagagcccctagcaggatgcctcggcctctcctggccccagccgcaccccaaaaatggccttcacctctaggtgacagcgaggatcccagttccacgggggatggggctcgtatccatacacttctaaaagatcttcagcgacaacctgcagaagtgagaggcctgagcggtctcgaactagatggaatggcagagctcatggctggattaatgcagggagttgatcacggcgtggccagaggttctccaggccgagctgccctaggggagagcggggaacaagcagatggccctaaagcaactctgagaggcgatagcttccctgatgacggagtgcaggacgatgatgatagactgtatcaggaggtgcataggctgagcgcgaccctgggtggtttgctccaggaccacggatccaggctactcccgggtgcgctcccgtttgccaggcctctcgatatggagaggaaaaagagtgagcacccagagtcaagtctaagcagcgaggaagaaactgccggtgtagaaaacgtaaaatcccagacttactcaaaggacctgctcggtcagcagccacactcagagccaggggctgccgcattcggtgagctacaaaatcagatgccgggaccctcaaaggaagagcaaagcctccctgctggagcgcaggaggctttatctgacggattgcagcttgaagtgcagccttccgaagaagaggcacgcggttatattgtcacggaccgagaccccctccggcctgaggagggacgtaggcttgtcgaagacgtggcgagactcctgcaagtcccgtctagcgcatttgcagatgtagaggtcttaggccctgccgtgacctttaaagtatccgctaatgtccagaatgtgacaacagaggacgttgagaaggccaccgtcgataacaaagacaaactggaagaaaccagcgggttgaaaatcttgcagacaggcgtggggagcaagagtaaattgaagttcctccctccccaagctgagcaagaggacagcaccaagttcattgcgcttaccctggtcagtctggcatgtatcttgggcgtcctgttagcctccggactgatctactgcctccgtcacagctcccagcataggctgaaagaaaaactttccggacttggaggggaccctggcgcagacgcgaccgcagcttaccaggaactgtgtcgtcagaggatggcaacgagacctcctgacaggcctgaagggccacatacatccaggatttcctcagtttcgtcgcagttctctgacggcccaatccccagcccctccgctcggagttcagcctcttcctggtccgaggagcccgtacagagcaacatggacatttccactggtcacatgattctatcttacatggaggatcacctcaaaaataagaacagactggaaaaggaatgggaggccttgtgcgcctatcaggctgagccgaacagttcctttgtggcccagcgggaagagaatgtacccaaaaatagaagcctggcagtgttgacttacgatcacagcagggtgttactgaaggccgagaacagccacagtcattctgactatattaatgcatcacccatcatggaccacgatccaaggaacccagcctatatagcaactcaggggcctctgcccgcaactgtggcggacttttggcagatggtatgggagtcaggttgcgtggtcattgtgatgcttaccccgctagcagaaaatggtgtccgccagtgctaccactactggcctgacgagggcagcaacctgtatcatatttatgaggtgaacctggtctccgagcacatttggtgcgaggattttctggtgcgctctttctatctcaagaacctccagaccaacgagacgcgaaccgtgactcagtttcattttctcagctggtatgatagaggagtgcccagcagtagcagaagcctgctcgatttcaggcgcaaggtgaacaagtgttatagaggtcgcagttgccctatcatagtccactgttcggatggcgcaggccgatccggcacctacgtgctcatagatatggtcctgaacaaaatggccaagggggctaaagaaatcgatatcgccgcaacactcgagcatctcagggaccagcgcccaggcatggtccagaccaaggaacagtttgagttcgcccttaccgccgttgcagaggaggtgaacgcaatcctgaaagctctgccacagtag

SEQ ID NO: 237165 - DNA, 3048 bp, synthetic construct
  misc_feature 1..3048: note = Description of Artificial Sequence: Synthetic coding sequence
  source 1..3048: mol_type = other DNA
atgggcccacccctacctctcttgttactcctgctgcttcttctgccaccccgagtcctgcccgcagctccttcttctgtgcccagggggcgacagttacctggacgcctcgggtgcctcctggaggagggtctttgtggagcctctgaggcctgcgtcaatgatggcgtgtttgggaggtgccagaaagtacccgcaatggatttctatagatatgaggtctcccccgtggcgctgcagaggcttagagtggcattgcagaagctttctggcaccggcttcacctggcaggacgattacacacagtacgtcatggaccaagagctggccgacctacccaagacatacttaaggaggccagaggcatccagtccagctagaccgtctaagcattccgtcggttcagaacgccgatatagccgggagggaggtgccgctttggccaacgcccttcgacgccatttgccctttctggaagctctgagccaggcaccagcttcagatgtgttggccagaactcataccgcacaggataggcctccagcagaaggggacgaccgtttcagtgaaagcatccttacatacgttgcacacacctccgccctgacttatcctccaggcagccgcacacaattgcgcgaagatctgctaccccgtacattgggccagttgcagcccgacgagttgagccccaaagtcgactcaggcgtcgacaggcatcaccttatggccgcactttccgcctacgcagcgcagcgcccacccgcaccgcctggggagggatccctagaaccccaataccttttgcgggcacctagtcggatgccccgaccacttctggctcctgctgcacctcagaaatggccctcacctcttggcgactctgaggatcccagctcgactggtgatggggctagaattcacactctactgaaggacctacagagacagccagccgaagttcgcggtttaagcgggctggaacttgatgggatggcagagctgatggccggactcatgcaaggagtagatcacggtgtggctcggggatcccctgggagggccgctctcggggagtccggcgagcaggccgacggacccaaagctaccctgcgcggagactccttccccgatgacggagttcaagacgatgacgaccgcctgtatcaggaagtgcaccggctttcagcaaccctgggagggcttctccaggaccacggttcaagactgttacccggagctctgcctttcgcacggcctcttgatatggaaaggaagaaatcagaacaccctgaaagctccctgtctagtgaggaagagaccgctggagtggaaaacgtcaaaagccagacttactcaaaggacctgttgggtcagcagcctcacagcgaaccaggagcagccgcttttggcgagcttcagaaccagatgcctggaccttctaaggaagaacagagccttcccgctggggcacaagaggctctgtccgacggcttacaattggaggtgcagccgagcgaggaggaggcccgaggatacatcgtgaccgatagggacccactcaggcccgaggaggggcgaaggcttgtggaggatgtggcacggctattgcaggtgccctcttcagccttcgccgacgttgaggtcctgggcccagcagtaacattcaaggtgtccgcgaacgtgcagaacgtcacgaccgaagatgtggagaaggccactgtggacaataaagacaagctggaggaaacatcaggtcttaaaatcctgcagacaggggtgggcagtaagtctaaacttaaatttctgcctcctcaagcggaacaagaggactccacaaaatttattgctctgactttggtatcactcgcgtgcatcctgggcgtccttctggcatctggtttgatttactgtcttcgtcatagctcgcagcatcggctcaaagagaaacttagtgggctggggggtgatcccggagcggacgccacggcggcttaccaagagttgtgtaggcagcggatggcaacccgcccacctgaccgtcccgagggccctcatacctctcgtatatccagtgttagcagtcagttctctgatggaccaataccttcaccatcagcgagatcatcggcttcaagctggtctgaggaacctgtgcagtcaaacatggatatcagtacaggacatatgatcctgagctacatggaggaccacttaaaaaataaaaatagactggagaaggagtgggaagccctctgcgcctaccaggctgagcctaacagctcctttgtggctcagcgtgaggaaaacgtccccaagaataggtctctcgcagtcctcacctacgatcactcacgtgtactcctgaaggccgagaactctcacagccatagtgattacatcaacgctagccctatcatggaccatgatccaaggaatcctgcctacattgccacccaaggtcctcttcccgctaccgtcgcggacttctggcaaatggtatgggagagcggatgcgtcgtaatcgtaatgctgactcctttggccgaaaatggggttagacagtgctatcattactggcccgatgaaggttctaacctctaccacatctatgaagtgaatctggtgtctgagcacatttggtgcgaggattttttagtgcggtctttttacctgaagaacctgcaaaccaatgaaactcgtacagtgacacagttccatttcctgtcatggtatgatcgtggcgtccctagcagcagtcgatccttgttggactttcggcgaaaggtaaacaaatgctaccgtgggagatcttgtcccattattgttcattgttctgacggcgcagggaggtccggcacctatgtactgatcgacatggtgcttaataagatggctaagggggctaaagaaattgatatcgcagcaacccttgaacatttgagggatcagcggcctggcatggttcagacgaaggaacagttcgaatttgctctgacggcagtggcagaagaggtaaatgctatcctcaaggccctgcctcaatag

SEQ ID NO: 237166 - DNA, 3117 bp, synthetic construct
  misc_feature 1..3117: note = Description of Artificial Sequence: Synthetic coding sequence
  source 1..3117: mol_type = other DNA
atggctgtcgagtccgagtactcccttctgaggaccgaagcctcctttccgaccatgaaaatgttctgtgtgtcccacacactgccacgagttgaagtaatgtttgtgagcggaccacagacccgcgaacggaccgaacctgttgatccacgttggcagtgtttagtccagatgtgggcaggctgcctattggaggagggcctctgcggagcctcagaagcatgtgttaatgatggagttttcggcaggtgtcaaaaagtgcctgccatggatttctaccggtatgaggtatcacctgttgctctgcagcgtctgcgggtcgccctccagaaactgtcaggcactggattcacctggcaagatgattacacccagtatgtgatggaccaggagctggccgacctcccaaaaacgtatctccgcagaccagaagccagtagcccagcacgcccatccaaacactctgtcggctcagaaaggaggtacagtcgagagggcggagccgctctcgccaatgcacttcggcgacacctgccatttctggaagctctaagtcaagctcctgcctctgatgtgctggccagaacgcataccgcacaggaccggcctccagccgagggtgacgacaggttttccgagagtatccttacttacgtcgcccacacgtctgctcttacatatccacccggaagccggacacagctgcgggaagatctgctaccaagaacactgggtcaactccaacctgatgagctgtcgcctaaagtcgactccggagtggatcgtcaccacctgatggctgcactgtctgcatatgctgctcaacgcccaccagccccacctggcgaggggagcctggaaccgcagtacttgcttagagccccatcaaggatgccacgccctctgttggcaccagccgcaccacagaagtggccatcgccacttggagacagcgaagacccctcttctacaggagatggcgcacgaatacatacgctcctgaaggacctacagaggcaaccagctgaggtgagaggtttatcagggctggagcttgatggcatggcggagttgatggcagggctgatgcagggcgtggatcatggcgttgccagaggttcaccgggaagagccgcactgggggaaagtggggagcaggccgatggccctaaagctacccttcgcggtgactcatttccagatgatggggtgcaggatgacgacgaccgactctaccaggaagtccatcgcctgagtgctaccctcggtgggttgctgcaggatcatgggtcaaggttgctacccggtgccctaccttttgctaggcctctggacatggagcgcaaaaagtctgagcatcctgagtcctcattgagtagcgaggaggagacagcaggtgtcgaaaacgttaagagccagacgtatagcaaagacctgctgggtcagcaaccccatagtgagcctggtgctgccgcttttggagaacttcagaatcagatgccaggcccatcaaaggaggagcaaagcctgcccgctggagcgcaggaagcactaagtgacgggttgcagctggaagtgcagccgtcagaggaggaagccagagggtatatcgtgactgaccgggatccattgcgtcccgaagaaggtcggaggctggtggaagatgtggcaaggttgctccaagtgccctcatcagctttcgccgacgtggaagtgcttggaccggcagtaacatttaaggtgagcgctaacgtgcaaaacgtaacaaccgaggacgtggaaaaggcgacggtggacaacaaagacaaacttgaggaaacatctggcttgaagatacttcagactggcgtgggttctaaatcaaagctgaagtttctcccacctcaggcggagcaggaagactctaccaaatttatcgcgttaaccctggtgtccttggcatgcattctgggggtgctgctggccagtgggttaatatactgcttgcggcactcatctcagcaccgcctcaaggagaaactgtccggactaggcggagatcctggcgcagacgccactgccgcttaccaggaactgtgtcggcaaagaatggctacccgccctcccgatcgacccgagggtccacacacttccaggatttcttccgtgtcgtctcagttctcagacggccctatcccatccccaagcgccaggagctccgcctcctcctggagtgaggagcctgtccaaagcaatatggatataagcactggtcacatgatcctctcctacatggaggatcaccttaaaaataaaaacagacttgaaaaagaatgggaagcattgtgcgcataccaggctgagcctaactctagcttcgtggcccagagggaagagaacgtgccaaagaatcgctctctcgcagtactgacctacgatcatagcagagttttactgaaggctgaaaacagccattcgcactccgactacatcaacgcctcacccattatggatcatgaccctcgtaaccccgcatacattgctacccagggacccctgcccgcaactgtggcagatttctggcagatggtgtgggagagcggatgtgtggtcatcgtgatgttaacaccccttgccgaaaatggtgtgcgccaatgctaccattactggcctgatgagggatcgaacctgtaccacatttatgaggtgaacctcgtgtctgaacacatctggtgcgaggacttcctggtgcggtccttttatttgaaaaatctccagactaatgagacacggactgtgacgcaattccattttctgtcctggtatgatagaggcgtgccaagcagcagtaggagtttgttggatttcaggcgcaaggtaaacaagtgctacaggggcaggtcctgtcccattatcgtacattgttcagatggggcaggcaggagcggaacatacgtgttaatagacatggtccttaataagatggcaaaaggggctaaagaaatcgatatcgctgcaaccctcgaacacctgcgagaccagaggcctggtatggtgcagaccaaggaacagttcgagttcgccctcacggccgtcgccgaggaagtgaacgctattctgaaggctctgcctcaatag

SEQ ID NO: 237167 - DNA, 2934 bp, synthetic construct
  misc_feature 1..2934: note = Description of Artificial Sequence: Synthetic coding sequence
  source 1..2934: mol_type = other DNA
atgggacctccgctgccgctgctgttgctactgctcctgctgttgccgcctagagtccttcctgctgctccaagctccgtaccgaggggcagacagttgcccggaagactcggatgcctccttgaggagggactgtgtggtgccagtgaagcctgcgtcaatggattcacctggcaggacgactacacccagtatgttatggatcaggagctggccgatctacctaaaacctatctccgcaggcccgaagcaagctcaccggctaggccttcgaagcactccgtcggctctgagcggagatattcgcgagaaggcggtgcggcattggctaatgctcttaggagacatttgccattccttgaggccctttcccaagcccctgcctccgatgttctagctcggacccatacagcccaagaccgtccacccgctgagggtgacgataggttttctgagtcgatcctgacgtacgtcgcgcataccagcgctttgacatatcctcccggaagccgcacacaactccgggaggatttgctcccgaggaccctcgggcagctccagcctgatgaactgtctcctaaggtagactccggtgtcgatcgtcaccatctcatggcggctctgagcgcatacgcggctcagcgtcctcccgcaccacctggggaggggtctctggagccacaatacctactgagggcgccttcacgtatgcctagaccacttctggcacccgcagctccacagaagtggccgtctcctctgggcgatagtgaggatccctcctcgacaggcgacggagcacgaatccacaccctgctcaaggatttgcagaggcagccagccgaggtacggggtctcagcggcctggagctggacggcatggccgagctgatggctggccttatgcaaggcgtggatcatggtgtggctcggggtagcccaggtcgcgctgccctgggcgagtccggagaacaggccgatggtccaaaggccacactgcggggagattcgtttccagacgacggtgttcaggatgacgacgataggctataccaagaggttcataggctaagtgccactctcggaggcctgttacaggaccatgggagcaggctgctacccggagccctgccattcgccagaccactcgatatggaaagaaaaaagtccgagcatccagaatcttccctatcttcggaggaggaaacggcaggtgtggagaatgtgaagtcacagacctactccaaggatttgctgggacagcagccacactctgaacctggtgcagccgcttttggcgagctgcagaaccaaatgccgggaccctcaaaggaagaacaaagtctaccagccggagcgcaggaggccctgagtgacggacttcaactggaggtgcagccctccgaggaagaggcaaggggctacatcgtcacggatcgggatccattgcgacctgaggaagggcgaaggctagtagaggacgtcgcacgcctgcttcaagttccttcctctgcgtttgccgatgtggaggtcttggggcctgcagtgacgtttaaggtgagtgctaatgtgcagaacgtcaccacagaggatgtggagaaggccaccgtagacaacaaagataagctcgaagaaaccagcgggctgaagattctgcagaccggagtgggcagtaaaagtaaactcaagttcttaccacctcaggctgagcaggaggacagcaccaagttcattgcccttacattagtgtcgttggcttgcatacttggagttcttcttgccagcggactgatttactgtctgaggcatagtagccagcatcgactgaaggaaaaactctctggcttaggaggagatcccggagctgatgcaaccgctgcctaccaggagctttgtcgacagcgcatggcaactaggccaccggatcgccctgaaggcccacatacttcaaggatttcttccgtgtctagtcagttctctgacggacccatcccctccccgtccgccagaagcagcgccagttcatggtccgaggaacctgttcagtcaaatatggacatctcgaccggacacatgattctgtcttacatggaagatcacctgaaaaataaaaaccggctggagaaggaatgggaggctctgtgtgcatatcaagcagagccaaattccagctttgtagcccaacgcgaagaaaatgtgcccaagaacaggtccctggctgtgctgacctacgatcacagcagggtccttctgaaggcagaaaactcccatagtcatagcgactatattaatgcttcaccaatcatggaccatgatcccagaaacccagcttacatagcaacacagggcccactacccgcaacagtggctgatttctggcagatggtttgggaatcagggtgcgtcgttattgtcatgctaacaccgctagccgagaatggtgtgcgtcagtgctaccattattggcccgatgagggaagtaacctatatcacatatacgaggtgaaccttgtctcagagcatatctggtgtgaggattttctggtgagatccttctatctgaaaaacttacaaactaacgaaacccgcactgtgactcagtttcattttcttagttggtatgatcgaggcgtcccttcttcctcccggagtctgctggacttcagacgaaaggtcaacaaatgttatcgcggtcggagctgtcctatcatcgtccactgtagtgatggggctggccgttccggcacctatgtgttgattgacatggtcctgaataaaatggccaagggtgcgaaggagatcgacatcgctgctaccctggagcacctgcgagatcagcgtcctggaatggtccaaactaaagagcagtttgaatttgctctgactgctgtggccgaggaggttaatgccatactgaaagcgctgccccagtag

SEQ ID NO: 237168 - DNA, 3651 bp, synthetic construct
  misc_feature 1..3651: note = Description of Artificial Sequence: Synthetic coding sequence
  source 1..3651: mol_type = other DNA
atggggcatctcccaaccggcattcacggagcccgaagactgctgcctctcctgtggctcttcgtgttgtttaagaacgcaaccgcatttcacgtgacagtgcaggatgacaacaacattgttgtctccctcgaagcttcagacgttatttcacctgccagtgtctacgtggtgaagatcactggcgagtctaaaaactacttctttgaatttgaggagttcaattcaacattaccaccaccagtgatcttcaaggcgtcgtatcatgggctgtattatatcattacactggtggtggttaatggcaatgtggtcacaaagccttcccgctctataacagtgttgactaagccccttcccgtgacgtccgtgagcatctatgactacaagccctcaccagaaaccggcgtcctgttcgaaatccactaccccgagaaatacaatgtgtttactcgtgtaaacattagttattgggaaggtaaggatttccggactatgctgtacaaggacttttttaaaggtaagaccgtctttaaccactggcttcctgggatgtgctactcgaacataacctttcaacttgtctctgaagccacattcaataagtcaactctcgttgagtactcaggggtgagccacgaacccaagcaacatcgaacagcaccctatcctccccagaacattagcgtgagaattgtcaacctaaataagaacaactgggaggagcagagcggcaattttcccgaggagtctttcatgcggtcccaggatactattggaaaggaaaagctgttccacttcaccgaggaaactcccgaaattccctctggaaatatctccagcgggtggcctgactttaatagtagcgattacgaaaccacgagtcagccctattggtgggactccgcttcggccgctccagagtcggaagatgaatttgtgagcgttttgccaatggagtacgagaacaactctacactgtcggagaccgagaaatctaccagcggcagcttcagcttctttcccgttcagatgatcctcacatggctgccgcctaagcctcctaccgccttcgatggcttccacatccacatcgagagggaggaaaacttcaccgaatatctaatggtggacgaggaggcacatgagtttgtggcagagctgaaggagcccggtaaatacaagctcagcgtgacaacttttagttccagtggcagttgcgagaccaggaaatctcaatccgctaaaagcttgtccttttatataagtccttccggggaatggatcgaggagttaaccgaaaaacctcagcacgtatcagtccacgttctgagttccaccactgccctcatgtcgtggacaagctcccaggagaactataactctaccatcgtgtccgtagtgtccctcacctgccaaaaacagaaggaatctcagcgcctggagaaacagtactgcactcaggtcaatagcagcaagccaattatcgaaaatctcgtccctggcgctcaatatcaggtggtcatctaccttagaaaaggaccactgattggaccaccatccgatcccgtgacattcgcaatagtgcctacaggaattaaagatctgatgctctaccctctgggcccaactgcggtcgtgctcagttggacacgaccttaccttggagtctttcgcaaatatgtcgtcgagatgttttattttaatccagccaccatgactagtgagtggaccacttattacgagatcgccgctaccgtgagtcttacagcaagcgtccgcatcgccaatctgctgcctgcttggtactataatttccgcgtaaccatggtgacatggggagatcccgaactctcctgctgcgattcctccactataagtttcataacggccccagttgctccggagataacgagcgtggagtacttcaatagcttgctatatatctcttggacctacggtgacgacacgacggacctctctcatagcaggatgctgcactggatggtggtggcggagggaaagaagaaaattaaaaaatctgtcactaggaatgtgatgacagccatcctctcactgcccccaggggatatttacaacttatcggtgaccgcctgcacagagcgcggatcgaatacttctatgctgaggctagtcaagctcgagcctgcaccccctaaaagtctgtttgcagtaaacaaaacccaaacttcggtcacgctactctgggtagaagaaggagtagcagactttttcgaagtattctgtcagcaggtggggagttcccaaaagactaaacttcaggaacccgtggcagtctcctcgcatgttgtcacgatcagcagtctgctcccggcaacagcttacaactgtagcgtaacatctttctcccatgattccccctccgtgcctaccttcatcgccgtatccactatggttacagaaatgaaccctaacgtggtggtaatctccgtgttagccattctgagcaccctgctaattggtctcctgctggttacattaattattctaaggaagaaacatctccagatggcccgagaatgtggggcaggtacttttgtgaattttgcatctttagagagggacggcaagttaccctacaattggcgtagaagtatcttcgcctttctgacactgctgccatcttgtctgtggacggactacctgctggccttctacattaacccatggagcaaaaatggattaaagaaaaggaaactgacgaaccccgtgcagctggatgattttgacgcatatataaaggacatggcgaaagacagcgactacaagttcagcttgcagttcgaggagctaaagcttattgggctcgatattccacactttgctgcagatttgccgctgaatcggtgtaaaaacaggtacacaaatatccttccttatgatttttctcgtgttagacttgtgagtatgaacgaggaagagggtgccgactacattaacgctaactacatccctggctacaattctcctcaggaatacatagccacccagggacccctccctgaaactcgcaacgatttctggaagatggtgctacaacagaaatcccagattatcgtgatgctgacgcaatgtaacgagaaacggcgagtgaaatgcgaccattattggcccttcacagaggagcctatagcttacggcgacattacggtggagatgatctccgaagaggagcaggacgactgggcttgccggcactttcggattaattacgctgacgagatgcaggacgtgatgcattttaattatacagcatggcctgaccacggcgtcccaacggctaacgctgccgaaagcattctgcagttcgtgcatatggtcagacagcaggccaccaaaagtaaggggcctatgattattcattgcagcgctggtgtggggagaacaggaacatttattgcacttgatcgcctcctccagcatatcagggaccacgagtttgtggatatcctcggcctggtgagcgagatgcggagctaccgaatgagtatggtgcagaccgaggagcagtatatattcatccaccaatgtgtgcagctcatgtggatgaagaaaaagcaacagttctgtatatccgatgtcatctacgagaacgtctcgaagtcatag

SEQ ID NO: 237169 - DNA, 3567 bp, synthetic construct
  misc_feature 1..3567: note = Description of Artificial Sequence: Synthetic coding sequence
  source 1..3567: mol_type = other DNA
atgggccatttacctacaggcattcatggcgctaggcgcctgttgcccctgttgtggcttttcgtgctttttaagaacgctacagcctttcacgtcactgtgcaagacgacaataacatagtcgtttccctcgaagcctctgacgtgataagccccgcttcagtatatgtggtcaagatcaccggcgagagtaagaactatttttttgaatttgaggaatttaactctactcttcctccacccgtgatctttaaggcttcgtatcacggcctttactacattatcaccttggtcgtagtgaatggcaatgtggtgaccaaaccttcccgatcaatcacggtactgaccaagccactgccggttacatctgtgtctatttatgactacaaaccatcacctgagaccggtgtcctctttgagatccattaccccgaaaaatataacgtcttcacccgggtgaacatctcttactgggaaggcaaagacttccggacaatgctctacaaggacttttttaaggggaagacagtttttaatcattggcttcccggaatgtgctactcaaacattacttttcagctggtctccgaggctacgttcaacaagtccaccttggtcgagtactccggggtgagccacgaacctaagcaacacaggacagcaccatatcctcctcagaacatcagtgtgagaattgttaacttgaataagaataactgggaagagcagtcagggaactttccggaggaaagtttcatgaggagtcaggatacaatcggtaaggagaaacttttccacttcacagaggaaaccccagagatcccatcgggcaatattagttctggatggcccgatttcaattcttctgattacgagaccacgtctcagccctactggtgggactccgccagcgctgccccagagtccgaggatgagttcgtgtccgtactgcctatggagtatgaaaacaactccacgttgtccgaaaccgagaagagcacgtccggttcctttagtttctttcctgtgcagatgatcctgacgtggctcccgcctaaaccacctaccgccttcgatggctttcatatccacatcgagagggaggaaaacttcaccgagtatctaatggttgatgaagaagcccatgagttcgtggctgagctcaaggagccgggaaagtataagctatccgtgaccacattctcgtcctcgggttcatgtgagacccggaagagtcagagtgcaaagtctctcagtttctatatctctccttccggggagtggattgaggagctgactgagaaaccacagcacgtgagtgtccacgtgctctcatccacaacggctctgatgtcctggacttcttcgcaagaaaactacaattccacgattgtctccgtagtctccctgacatgccagaaacaaaaagaaagtcagcgcctcgagaagcagtactgtacacaggtcaattccagtaagcccatcatagaaaatctcgtgccgggagcccagtatcaggtagtgatttatctccggaaagggccattgataggacccccatccgatccagtgaccttcgccatcgtacccacgggcattaaggacctgatgttatatccactgggacccacggcggtcgtgctgtcctggacccgaccctacttgggagttttcagaaagtatgtggtggaaatgttctatttcaaccctgctacgatgacctcggagtggacaacatactacgaaatcgctgctacagtatctctgacagcttcagtcaggatcgccaatctacttcccgcttggtactataattttcgcgtcactatggtgacctggggagacccagagctgagctgttgtgatagtagcaccattagcttcatcacagctcctgtggcacccgagataacatctgtggagtacttcaattctttactctatatttcctggacgtacggcgatgatacgacagatctgagtcactctagaatgttgcactggatggtcgtggccgaggggaaaaaaaaaattaagaaatctgttacaagaaacgtgatgaccgccatcctctctctgccacccggtgatatttacaacctatctgtgactgcttgcacagaaagaggctctaatacctctatgctgagattagtcaagctcgaacccgctccccctaagtcactattcgctgtgaataagactcagacttctgtgacactcctctgggtggaagagggggtggccgatttttttgaagtgttttgtcagcaggtaggctcttctcaaaaaaccaaattgcaagaacccgtggctgtttcctctcacgtggttaccatatcctctctactacctgctacagcttataattgttccgtgacatccttttcgcacgattccccgtcagttcctacctttatagccgtgagtaccatggtgaccgagatgaatccaaatgtggtagttatctccgtactcgctattttatctactctcctcattggcttgctcctcgtgactctcatcatcctgcggaaaaagcatctccagatggccagggagtgcggtgctggaacattcgtaaacttcgcatcactagagcgcgacgggaagctgccctataactggtctaagaacggactgaaaaagcgtaagttgaccaacccagtgcagctggatgacttcgacgcctacattaaagacatggcgaaggacagtgattacaagttcagtctccagtttgaggaattgaagttgattgggttagatatcccacacttcgccgctgacctccctctgaaccgctgcaagaataggtacaccaatattctgccgtatgatttcagtcgcgtgcgcttggtttccatgaacgaagaggaaggagctgactatatcaacgcaaattatatacctggctataattcaccacaggaatatatcgccactcagggcccactgcctgagactagaaatgatttctggaaaatggttctgcagcaaaaatcacagattatcgtcatgctgactcagtgcaacgaaaagcgccgagtgaagtgcgaccactattggccatttacggaggagccaatagcctacggagacattaccgtggagatgatcagcgaagaagaacaggacgactgggcgtgcagacattttagaataaactacgctgatgaaatgcaggacgtcatgcatttcaattatacagcctggccagaccatggagttcccacagcaaacgcggctgaaagtatcctgcagttcgtgcatatggttaggcaacaggctactaagagcaagggtccaatgataattcattgttccgcaggcgtcggtcgcaccggtacctttatcgccctcgatcgcctgttgcaacacatacgggatcatgagttcgtggatattcttggactcgtcagcgagatgaggtcttatcgaatgagcatggttcagaccgaggaacaatacattttcattcatcaatgcgtgcagcttatgtggatgaaaaagaaacaacaattttgtatttccgatgtgatctacgaaaacgtgtccaaaagttag

SEQ ID NO: 237170 - DNA, 1218 bp, synthetic construct
  misc_feature 1..1218: note = Description of Artificial Sequence: Synthetic coding sequence
  source 1..1218: mol_type = other DNA
atggtgactgagatgaaccccaacgtggtcgtgatttccgtgctggccattctcagcacactgcttataggcctcttgctggtgaccctgatcatcttgcgaaaaaaacacctgcagatggctagagagtgtggagccggaacgttcgtcaacttcgctagtctcgagcgtgacggaaagcttccgtacaattggcgcagatctattttcgcatttctgactctgctgccttcctgcctgtggacagactacctgctcgctttctacatcaatccttggagcaagaacggtttaaagaagaggaaactaaccaaccccgtccagctcgacgatttcgacgcttatataaaagatatggcaaaggacagcgattacaagttctctctgcagtttgaggaactcaaattgatcggactcgacatccctcattttgcagcggatttgcctcttaaccgttgcaagaatcgctatactaatattctgccgtacgatttcagccgtgttagactggtgtcaatgaatgaggaggagggagccgattatatcaatgccaattacatcccgggttataatagcccacaggagtacatcgccacccagggccctctgccggagacccgtaatgacttctggaagatggtcttgcagcagaaatctcagatcatagttatgctaacacagtgtaacgaaaagaggcgggtgaaatgtgatcactactggccatttacagaggaacctatcgcctatggcgatatcacagtggaaatgatttctgaagaggaacaggacgattgggcttgccgccattttaggataaactacgccgacgaaatgcaggatgtcatgcactttaactacaccgcctggcctgatcacggggtgcctacggcaaacgcggcagagtccatacttcagtttgtgcacatggtaaggcagcaggcaaccaagagcaaaggccctatgattatacattgctccgctggggtgggcaggacaggtacgttcatagcgttggatcggctcctacaacacatccgcgatcacgaattcgtggacattctggggcttgtttcagagatgcgaagttatcgaatgtctatggtccaaaccgaagagcagtacatattcatccaccagtgcgtgcagttgatgtggatgaagaagaaacaacagttctgcatcagtgatgtcatatatgaaaacgtgagtaaatcttag

SEQ ID NO: 237171 - DNA, 1218 bp, synthetic construct
  misc_feature 1..1218: note = Description of Artificial Sequence: Synthetic coding sequence
  source 1..1218: mol_type = other DNA
atggtgacggagatgaatccgaacgtggtggtcatctccgtgcttgcgatattgtcaacactcttgattgggctgttactggtgacactgattatactacgtaaaaaacatctgcagatggccagagagtgtggggctggaacgtttgtgaacttcgcttccctagaaagggatggcaaactcccttacaactggaggaggtctattttcgcatttctgacgctcctaccgtcctgcctgtggactgactaccttctagctttttatataaacccttggagcaaaaatgggttgaagaaaaggaaattgactaaccctgtgcaactggacgattttgacgcctacatcaaagatatggccaaggacagtgattataagttctctctgcagtttgaggagctgaagctgatcggtctggatattcctcattttgctgccgacctccccctgaacaggtgcaagaatcggtacaccaacattctgccttacgactttagccgagtgagactcgtcagcatgaatgaggaggaaggagccgactatatcaacgctaattatattcccggttacaactctccgcaggagtatatagcgacacagggacctctccctgaaacacggaacgacttctggaagatggtgctgcagcaaaagtcccagatcatcgtcatgttgacccaatgtaacgaaaagcggagggtgaaatgcgatcactactggcctttcaccgaggagcctatcgcgtacggggacattactgttgagatgatcagtgaagaggagcaagacgattgggcgtgcagacatttccggataaattatgcggacgagatgcaagacgtgatgcacttcaactacacagcctggccagaccacggagtgcccacagccaatgcagctgaaagtatcctgcaattcgttcatatggtgcggcaacaggcaacgaaatcaaaaggcccaatgattatccactgttccgccggagtggggaggacggggacattcattgcgctggacaggctccttcagcacatcagagatcacgagttcgtggacattctcggactagtgagcgagatgcgatcttacagaatgtcgatggtccagaccgaagagcagtacatcttcatccaccagtgcgtgcagctcatgtggatgaaaaagaaacagcaattttgcatttcagacgtgatatatgagaatgtgtcaaaaagctag

SEQ ID NO: 237172 - DNA, 1134 bp, synthetic construct
  misc_feature 1..1134: note = Description of Artificial Sequence: Synthetic coding sequence
  source 1..1134: mol_type = other DNA
atggtgacggaaatgaaccccaacgttgtggtcatatctgtgttggcaatcttgagcactttgctgattgggctcttactggtaaccctgattatacttcgaaagaaacatctccagatggctagggagtgcggggctggtacttttgtgaattttgcgtccctggagagggatggtaagctaccatacaattggtcgaagaacggtctgaagaaaagaaaactgactaatccagttcagctcgatgactttgacgcctacatcaaagacatggcaaaagacagcgattataaattctcactccagtttgaggagcttaaattaatagggctcgacattccacatttcgccgcagacttacccttgaacaggtgtaaaaaccgctacaccaacatcctgccttacgatttcagtcgagtgagactggtgtctatgaatgaggaagagggtgccgactacatcaacgccaattacataccaggatacaattctcctcaagagtacatagcaacccagggacctttacctgaaactaggaacgatttctggaaaatggtgttgcagcaaaagtctcagattattgtgatgctgacgcagtgtaacgagaagagaagagttaagtgtgaccactattggcctttcaccgaggagccaattgcatatggggacataacagttgaaatgatcagcgaggaggagcaggacgactgggcttgtcggcattttagaatcaattacgctgatgaaatgcaggacgtcatgcacttcaactatacagcctggcctgaccacggggtgccaacggcaaacgccgctgaaagcatcttgcagtttgttcacatggttcggcagcaggccactaagtccaaaggcccaatgatcatacattgctcagccggtgtcggaaggaccggcacttttattgccctggacagattgctgcagcatatacgcgatcacgaatttgtggatattcttggcctcgtgagtgaaatgcggtcttaccggatgagcatggtgcagacagaggaacagtacatcttcattcaccagtgcgtgcaattgatgtggatgaaaaaaaagcagcagttttgcatttcagacgtgatctatgaaaacgtgtctaaaagctag

SEQ ID NO: 237173 - DNA, 1134 bp, synthetic construct
  misc_feature 1..1134: note = Description of Artificial Sequence: Synthetic coding sequence
  source 1..1134: mol_type = other DNA
atggtcacagaaatgaacccgaatgtggtggtgatcagcgtcttagccattctgtccacattgctgatcggtctgctgctcgtgaccctcatcatcctgagaaaaaagcacttacagatggcacgggagtgcggagccggaactttcgtgaattttgcttctctggaacgggacggtaaacttccctataactggagtaagaacggactgaaaaagaggaagctgacaaatcccgttcaattggacgacttcgacgcgtacatcaaggacatggctaaggactccgactacaaattttccctgcagtttgaagagttaaagctaattgggcttgacatcccccatttcgcagctgacctgcctctgaaccgctgtaagaatcggtatacaaacattttgccatacgacttcagcagagtgagactcgtttctatgaatgaagaggagggcgctgattacataaacgccaattatataccaggctacaattcacctcaggagtacattgcaacacaaggaccactacccgagacgcgtaatgatttctggaaaatggttctgcagcagaaaagtcagatcatagtcatgctgacccagtgtaatgagaaaaggcgggttaagtgcgaccattattggccctttacagaagaaccaatagcttacggagacattacagtcgagatgatctctgaagaggagcaggacgattgggcttgcaggcattttagaataaattatgccgacgaaatgcaggacgtcatgcatttcaactataccgcgtggccagatcatggggtgccgacggctaacgccgctgagagcatcctgcaattcgtccacatggtccgccagcaggccaccaaatctaagggacccatgattatccactgttcagccggtgtgggacggacaggcacctttatcgctctggatcggctgttacagcacattcgtgaccatgagtttgtggatatcctcggactggtctctgaaatgcgtagttatcgcatgtctatggtccaaactgaggaacagtacatttttattcatcagtgcgtgcaacttatgtggatgaagaagaagcagcagttctgtataagtgatgtgatatatgagaacgtgtcaaagtcgtag

SEQ ID NO: 237174 - DNA, 6888 bp, synthetic construct
  misc_feature 1..6888: note = Description of Artificial Sequence: Synthetic coding sequence
  source 1..6888: mol_type = other DNA
atggactttctgataatttttctgttactcttcatcgggaccagcgaaacccaagtcgacgtgtctaatgtcgtccctgggacccggtatgacatcacaatcagctccatctctactacctatacatcccctgtgacccgcattgtgaccactaatgtgactaagcctggcccacctgttttcctggccggagaacgcgtgggctcagccggaattttgctctcttggaatacccctccaaatccaaacggcagaatcatttcttatatcgtgaagtacaaggaggtgtgtccctggatgcaaacagtgtacactcaggtaagaagcaagcccgactcattggaagtgttgctgacaaatctcaacccgggtacaacctacgagatcaaggttataatccttaatgcaactaaagtgggctgcctgctctctcccattctgttgaacacagtcctcgaaggactggcgcgtgccataaatctcactagagaatgccagaccgtagatgcgggacagtgcgtgcagtgcgccgtgcgagaacccaaacaaggtagcacttccgggggacgggctcaaacaaataagaaaactgcagttacatcagcagacctcaaccacaccgccggagacttaaggacgggtaggctgcctccacagccattgactgcggagcagccgaactgggaagctccaccatcgcgtggaaggctgaccccccacaaagccggttactcttctgcgacagcagcaggaacacaggctaatcgggtgtggtccagacctttagctaagatccaaactactatccgggaatattataaacacctgtacgctaagaaggagggaattcttcccaactccttttacgaggcctctattattctgatccccaagccagttcccgaagggccacctcagaattgtgttacagggaacataaccggtaaatcgttctctatcctttgggacccgccaactattgtgacaggcaaattctcctacagagtcgagctctatggaccttcagggcgtatattggataacagtactaaggacttaaagtttgccttcaccaatcttactcccttcactatgtacgatgtttacattgccgcagagacttcagcagggaccggcccaaagtccaatatttccgtctttacgcccccagatgtccctggagccgtgttcgatctgcaactggctgaggtcgaatctacccaggtccggatcacctggaaaaaacccagacagcccaacggcatcatcaaccagtacagggtcaaggtactggtgcccgagaccggcatcatcctcgagaacaccctcttgaccggtaataatgaatacatcaacgaccctatggcccctgagatagtgaatatcgttgaaccgatggtcgggctctacgagggatccgctgaaatgtccagtgatctgcactcactcgctactttcatttacaatagtcaccccgataaaaacttccctgctcgcaatcgtgccgaggaccagacaagccctgtagtcacaacacggaaccagtacatcaccgacatcgccgcagagcagctcagctatgtaattcgtcgactggtgccattcactgagcacatgatctcagtctccgcctttacaattatgggagaaggccctcccaccgttttgagtgtgagaacacgccaacaggtgccttccagcattaaaattataaattacaaaaatatctcttcctcttccatcctgctgtattgggatcctcctgaataccctaatggcaaaattactcattacacaatctacgcgatggagctggacacaaatcgggcatttcaaatcacaaccatagataacagcttccttatcacagggcttaaaaagtacactaaatacaaaatgcgcgtggccgctagtacccatgtgggcgagtcaagcctgtccgaggagaatgatatattcgtaaggacatcagaggacgaaccagagtctagtccgcaggatgttgaagtgatcgacgtgacggccgacgaaattcgcctcaagtggagccctccagagaagccaaacggcataataattgcctatgaagtgctctacaagaatatcgacaccctatatatgaagaacacaagcaccaccgacatcatcctgagaaacctcagaccacataccctctataacattagtgtgcgctcctacaccagatttggtcacggaaaccaagtgagctccctcctgtcagtgcgcaccagcgagacggtaccagactccgctccagaaaacatcacatacaagaatatctcatcgggcgagatcgaactgagcttcctacccccatcaagccctaatggaattattcagaagtacacgatctaccttaaacgatcaaatggcaacgaggagcgaacaattaacaccacatcgcttactcaaaatattaaggttctgaagaaatatacacagtacatcatcgaagtgtcagcatcaactcttaagggtgaaggagtgaggtccgccccaatcagcatcctgaccgaagaggacgcccctgacagccccccacaggacttttctgttaaacagctgagcggggtgacagtcaagctaagttggcagccacccctggagcccaacgggattattctctattacactgtttatgtctggaatagatctagcctcaaaacaattaacgtgactgaaacatctttagagctgtctgacttggactacaatgtggagtattcagcctacgtgaccgctagcacgcgattcggtgacgggaagacgcggagtaacataatctcgttccaaacacctgagggagcaccgtctgacccacccaaagacgtgtattatgcaaacttgagctcaagctctattatcctgttttggactcctccttccaaacccaacggaattattcagtactactccgtatactaccgaaataccagcgggacatttatgcagaattttaccttgcatgaagtgactaatgatttcgataacatgaccgtctccactattattgataagttaaccatatttagctattataccttttggttgacagcaagcacctcggtcggtaacgggaataagtcaagcgacatcattgaagtatacacggaccaagacattcccgagggttttgtcggaaacctcacatacgagtcaatcagtagcacggccattaatgtgtcctgggtccctcctgcgcagcctaacgggctggtcttttattatgtcagcctcattctccagcagacgcccaggcatgtacggcctccacttgttacctacgagagatctatctacttcgacaatctggaaaaatacactgattacatcctgaaaatcacaccgtccacagagaagggtttcagtgacacttatacagcccagttatatatcaaaactgaggaagatgtgcccgagactagcccaatcatcaatacttttaagaatctaagctccacctccgtgctccttagttgggatccccctgttaaacccaacggcgcaatcatctcctatgacctcacactccaaggacctaatgaaaactactcatttatcacttctgataattatatcattctcgaagagctaagtcccttcaccctttactcattctttgccgcagcgcgaacacgcaaaggcttaggcccttcctccatcctgttcttttacaccgacgagtccgtaccactggctccaccccaaaacttgactctgatcaattgcacgtctgatttcgtctggctcaagtggtcaccaagccctctcccaggtggtatcgtgaaggtatatagctttaagatccacgaacatgaaacagacactatttactacaaaaacatttcaggcttcaaaacagaggctaagctggtcggcctggagcctgtttctacctatagcatcagggtcagtgcctttactaaggttgggaacggcaaccagttttctaacgttgtgaagttcaccacgcaggagtctgtgccagatgttgtgcaaaacatgcagtgcatggccacttcctggcagtcagtgctggtgaaatgggacccccctaaaaaagctaacggtattattactcagtacatggtgacagtcgagagaaatagcacaaaggtgagcccacaggaccatatgtatacctttattaaactgcttgccaacacaagttatgtcttcaaagttagagctagcacaagcgctggcgagggcgacgagtcaacatgccacgtgtccactctgcccgagacagtgccttcagtgcccaccaacatagcattctctgacgtccaatctactagtgctactttgacttggatacggcctgatactattttaggatacttccagaactataagattactacccagctgcgggcacagaagtgcaaagaatgggagtccgaagagtgcgtggaatatcagaagattcagtacctctacgaggcccatctgacggaggagacggtatacggtcttaaaaagttccgctggtaccggtttcaagtagctgcatctacgaatgccggatatggtaatgcttccaattggatatcaactaagacgttgccaggcccaccggacgggccacctgaaaatgtgcacgttgtggcaaccagccctttcagtataagcatttcctggagcgagcctgccgtgattaccggaccaacctgttatctgattgacgtaaagagcgtggataacgacgaatttaatataagcttcattaaatcaaacgaggaaaacaaaacaatcgagatcaaggatttggagatatttacccgttactctgtcgtaatcactgccttcactggcaacatatctgccgcttacgtggaaggcaagagtagcgccgaaatgattgtcaccacacttgaatctgctcctaaagacccaccgaataacatgaccttccagaagattcctgacgaagtcacaaaattccagctgacctttttgcctcccagccagcccaacggcaatattcaagtctaccaggccttggtgtaccgggaggacgatcccaccgcggtgcagatccataatctctccattatccaaaagacgaataccttcgtgatagccatgctggagggactgaaaggcggtcacacatacaatattagcgtgtacgctgtaaattctgcaggcgcaggacctaaagtgcctatgcgcatcactatggacattaaagccccagcgaggccaaaaacaaagcccactcccatttatgacgccacaggaaaacttctggtgacctccaccactattacgattaggatgccgatttgctactactcagacgaccatggcccaataaagaatgttcaagtgttagtgaccgagacaggagctcagcacgacggaaacgtaacaaaatggtatgatgcctatttcaacaaggccagaccctacttcaccaacgaggggtttccaaatcccccatgcaccgagggcaagaccaagttctcagggaatgaagaaatttatattatcggagccgataatgcttgcatgatccccggtaacgaggacaaaatctgcaatggtcctttaaagccaaaaaagcagtacctctttaagttcagagccaccaatataatgggacagttcacagactctgattactcggatccagtgaagacattgggggaaggtttatcagaaaggactgtggaaatcatactcagtgtgaccctgtgcattctgagcatcatactgttgggcacggcaatctttgcgtttgcccgaatcaggcagaaacagaaagagggaggcacatattctccccaagatgcagagattatagatactaaactgaagctggatcagctgatcactgtagccgatctcgagttgaaggatgaacgcctgactcgactgctgtcatatagaaaaagcattaaaccaatcagtaagaagtccttccttcagcatgtggaagagctatgtacgaacaacaacctgaaattccaggaagaattctccgagctccccaagttcttacaggatctctcctcaacagacgccgatctcccttggaaccgcgctaaaaacaggttccctaacatcaaaccttacaacaataaccgagtaaagctcatcgctgatgcctctgttccaggctctgattacatcaatgcctcttacatttctggctatttgtgccctaatgagtttatcgctacccaggggccattaccgggtaccgtcggagatttttggcgtatggtgtgggaaaccagagctaagaccctggtgatgctgacacagtgttttgagaagggcaggattaggtgccaccagtattggcccgaagacaataagcctgtaaccgtcttcggcgatattgtcattacaaagctaatggaggacgttcaaatcgattggactattcgggatctgaaaatagaacgacatggcgattgcatgacggttcgtcaatgtaactttaccgcatggccggagcatggggtccccgagaattctgcccctctaatccactttgtcaaactggtcagggcctctcgcgctcatgatacaactcctatgatcgtccactgcagcgctggagtgggtaggaccggcgtgttcattgcacttgaccacttgacacagcatatcaacgatcatgacttcgttgacatttatgggctcgtagcggagctccgcagtgagcgaatgtgtatggttcagaatttggctcagtatatcttcctgcatcagtgcattctcgacttattatcgaacaaaggaagtaaccagcctatttgtttcgtgaattactcagctctccaaaagatggattcccttgatgccatggagggcgacgtggagctcgagtgggaggagaccactatgtat

SEQ ID NO: 237175 - DNA, 5786 bp, synthetic construct
  misc_feature 1..5786: note = Description of Artificial Sequence: Synthetic coding sequence
  source 1..5786: mol_type = other DNA
atggcacccacctgggggccaggaatggttagtgtagtgggaccaatggggctgctcgtggttctcctggtagggggatgtgccgctgaggagccacccaggtttattaaagaacccaaagatcagattggcgtgagcgggggagtcgcatccttcgtttgccaggctactggggacccaaagcctcgagtcacctggaacaaaaagggaaagaaggtgaatagtcaacggttcgagaccatagaatttgacgaatcagctggggcagtcctgcgtatacaaccactccgaacccctagggatgaaaacgtgtatgaatgcgtagctcaaaatagtgttggtgaaataacagtgcatgccaaacttacagtcctccgagaagaccagttaccctctgggttccctaacattgacatgggcccacagctgaaggtggtagagagaacccgcactgccaccatgctgtgtgctgcttccggtaatccggatcccgagattacctggttcaaggactttcttcccgtcgatcctagtgcatcaaatggcaggattaaacagctcaggtccgaccaggctttctctcacctgcccacaggcgctcttcagattgaatcttcagaggaaactgatcaaggcaaatatgaatgtgtcgccaccaactccgctggggtgcggtattcctcgcctgcaaatttgtacgtgagagtgcggagagtggcaccgcgattttctatcctccccatgagccacgagattatgccaggcggtaacgtcaatattacatgtgtcgctgtgggcagcccaatgccttatgtcaaatggatgcagggagccgaagacctgacacctgaggatgatatgcccgtggggaggaacgttctcgaattgactgacgttaaggattctgctaactacacatgtgtcgcaatgtcttcacttggcgtgatcgaagcggtggcacagattaccgtcaagagcctcccaaaggcgccaggaacacccatggttaccgaaaatactgccacatccatcacgatcacttgggacagcggaaatcccgatccagtgtcttactatgtcattgagtacaaatcgaagtctcaggacggtccatatcagatcaaagaggatattacgacgacccggtacagcatcggtggcttgagccccaattctgaatatgagatctgggtgtcagctgtgaatagtatagggcagggccctccaagcgaaagcgtagtaacgcgtaccggcgagcaggctcccgctagcgccccacgcaacgtgcaggccagaatgctaagcgcaactactatgatcgtccaatgggaagagcccgtggagccgaacggcctgatcaggggctatcgagtgtactacacgatggagccagagcatccggtgggcaactggcagaagcacaatgttgacgatagcttgctgacgaccgttggaagtctgcttgaggatgagacatacaccgtgcgcgtgctcgccttcacatccgtgggcgacggccctctgtccgacccaattcaggtgaagacacagcaaggagttccgggtcagccaatgaatcttcgcgctgaggcaaggtccgagacttcaattacactgtcctggtccccccctcggcaggagagcattatcaaatatgagctgctgttccgggagggcgaccacggcagggaagtgggcagaaccttcgaccctactaccagttacgtagtagaagatttaaagccgaacaccgaatatgcctttcgactggcagcaaggtccccccaggggctgggggctttcactcctgtggtgaggcagcgaactctgcaatctaagccgagtgctcctcctcaagatgtcaagtgtgtgtcggtgagaagtactgcgatcctcgtaagctggcgccctcctccacctgagacacacaacggcgctctggtcggatacagtgtgcgataccggcctctggggtctgaagatcccgagcccaaggaagtcaatggcatacctcctacgactacgcagatcctgctcgaggctctcgaaaagtggacgcagtacagaatcacaacagtggcccacaccgaagtcggccctgggcctgaaagctcacctgttgtcgtgaggactgatgaggatgtgccctcagctccaccccgtaaagtcgaggctgaggccctgaacgccacagccattcgggtactttggagaagccctgcaccaggcaggcagcatgggcaaatcagaggctatcaagtccactacgtaagaatggaaggcgcagaagccagggggccaccgagaatcaaggatgtgatgctggccgatgcccagtgggagacagacgatactgcggaatacgaaatggttattacgaacctgcagcccgagaccgcgtactctatcactgtggcggcttatactatgaagggcgacggagccaggtcaaagcctaaggtggtcgtgaccaagggcgcagtgttagggagacctaccctcagcgtacagcagactcccgaaggcagtctcctggcccgatgggaaccgcctgctggaaccgccgaggatcaggtcctgggataccggctgcagtttggacgtgaggactccactccgttggcaactctggaattccctccaagcgaggatcgctataccgcctctggcgtgcacaaaggcgcaacttacgtctttaggttagccgcaaggtctcggggaggccttggcgaagaggctgccgaggtcctgtctatcccagaggacacccctcgcggacacccacaaatcctggaggccgcagggaatgcgtcggctggtacagttttgttgcgatggttgccaccggtgccagccgaacgcaatggcgcaatcgtgaagtacacagtggccgtacgggaggcaggcgctctcggtcctgcacgtgaaacagagttacccgcagccgcagagcctggggctgagaacgcgctgacactgcagggactgaagccagacactgcctacgacctccaggtgagagcacacacacggcgtggaccgggtcccttttctcccccagttaggtaccggactttcctgagggatcaggtgtctcccaaaaacttcaaagtgaagatgataatgaaaacatcggtactgttatcttgggaattccctgacaattacaattctcctacaccatacaagatccaatataacggtctcaccctggacgtcgacggcaggacaaccaagaaactgatcacccatctcaaaccacacacattttacaacttcgttctgacaaacagggggagctccctaggaggcttacagcaaacggtgacggcgtggacggcctttaatttgctaaacgggaaaccaagcgtggcaccaaaaccagacgctgacggcttcataatggtctatctgcccgacggccagtcaccggtgcctgtgcaatcatatttcatcgtgatggtgccgcttagaaagtcaaggggtgggcagttcctcaccccccttggatcccctgaagatatggatctggaagagctgattcaggacataagcaggctgcaaaggcggagtctgcgacacagcaggcagctcgaggtacctcggccatatatcgcggcaaggttctcggttctgcctcctacatttcatcctggggatcagaaacagtacggaggcttcgataaccgcggactggaacctggccatcgctatgtcctcttcgttctagctgtgctgcaaaagtctgaacctacatttgccgcttccccatttagtgatccttttcagctcgacaatccagatcctcagcccatagtggatggcgaagaggggctcatttgggtgatcggccctgtactggcggtggtgttcattatttgtattgtgatagccattctcctgtataagaataaacccgattcgaaaagaaaagactccgagccaagaacgaaatgtctccttaataatgccgaccttgctccccaccacccaaaagacccagtggagatgcggcgaattaatttccaaactccaggcatgctttcacaccccccaatccctattgcagatatggccgaacatacagagcgtttgaaagctaacgactctctcaaactttctcaagagtatgagagcatcgaccccggacagcaatttacatgggagcacagtaaccttgaagttaacaaaccgaagaatagatacgctaatgtgatagcttatgatcactctcgagtgatcctgcagcccatcgaaggaattatgggaagcgactatatcaacgccaattacgtcgatggctaccgttgtcaaaacgcctacatcgccactcaagggccacttcccgagacgttcggggacttttggcgtatggtgtgggaacagcggtccgccacgattgtgatgatgactagactcgaagagaaatcacgaattaagtgcgatcagtactggcccaatagagggacagagacttatggttttattcaagtgaccctacttgacaccattgagctcgccactttttgtgttcggacattctctcttcataaaaacggctcgtccgagaaaagagaggttaggcagttccaattcactgcttggccggaccacggggtgcccgagtacccaaccccattcctggccttcctgcggcgagtgaaaacttgtaaccccccagacgccggacctatcgttgtccactgctcagcaggcgtgggacgaaccggatgttttatagtcatagatgcaatgctcgagagaatcaaaccagagaagacagtcgacgtttatgggcacgtcaccctgatgagatcgcagcggaactacatggtgcagactgaagatcaatattccttcattcatgaggccctgttggaggctgtaggctgcgggaatacagaagtgccggcacgttccctgtacgcgtatatccagaagttggcccaagttgagcccggagaacatgttacagggatggaacttgagtttaagaggttagccaactcaaaagctcacacctctagatttatcagcgcgaacctgccatgtaataaatttaaaaatagattggtcaacatcatgccctatgagtctacacgggtttgcttgcaacccattcggggagtggagggcagcgactacatcaacgctagttttatagacggctatagacagcagaaggcctatatcgcaactcagggacctttggccgagactacggaagacttttggcgaatgctctgggaaaataatagcactatcgtggtcatgctcacaaagctgagggaaatggggcgtgaaaaatgccaccaatactggcccgcagaacgctcagccaggtaccagtacttcgtcgtggacccaatggctgaatacaatatgccccagtacatcctgagagaattcaaagtaaccgacgccagggacgggcagtcaagaacagtcaggcagttccaattcacagattggcctgaacagggtgttccgaagtctggagagggcttcatcgatttcatcggtcaggttcataaaaccaaggagcagttcggacaggacggtcccatctccgtgcattgtagcgcaggcgtcgggagaacaggcgtcttcatcaccctgagcatagtgcttgaaagaatgcgctacgaaggcgtagtggacatttttcaaaccgtaaaaatgctgcgtacccagcgcccagccatggtccagacagaagatgaatatcaattctgctaccaggccgcactggaatatttgggatcttttgatcactacgcgacata

SEQ ID NO: 237176 - DNA, 5732 bp, synthetic construct
  misc_feature 1..5732: note = Description of Artificial Sequence: Synthetic coding sequence
  source 1..5732: mol_type = other DNA
atggccccaacctggggaccaggcatggtaagcgtcgtagggccaatgggactacttgtagtgttgctggtgggaggatgtgccgcagaggagccgcctaggtttataaaagagccgaaggatcaaataggagtgtctggaggcgtcgcctcatttgtgtgccaggctacaggtgatcccaagccgagggtcacctggaacaagaaagggaaaaaagtgaatagccagcggttcgaaacgatagaatttgacgaaagcgccggagctgtcctgcgcatccagccactgcggactcctcgggacgagaacgtgtacgaatgtgtggcccagaatagtgtcggggagattacagtgcacgcgaaactaaccgtcctacgcgaggatcagctgccaagtgggttcccaaacattgatatgggaccccagttgaaagtcgtcgaacgaactcgaacagccacgatgctgtgcgccgcaagcggaaaccctgatccggagatcacctggtttaaggattttctcccagtggacccatctgcctcaaatgggcgaatcaagcagctacggtcgggcgcattgcaaatcgaatcaagcgaggagactgaccagggcaaatatgagtgcgttgccacgaatagtgcaggagtgcgctactcttcacctgccaacctctacgtaagagttaggcgggtggcaccccgtttcagcatcctcccaatgagccacgaaatcatgcccggaggaaatgtgaacataacatgcgtggctgtcggctccccaatgccctatgtcaagtggatgcagggagcagaggatcttaccccagaagacgacatgccagtagggcgtaatgtgctcgagctgacagatgttaaggattccgccaattatacctgcgtggctatgagttctctaggggttatcgaggctgtggcccagattaccgtcaaaagcctccccaaggctcctggaacgccaatggttactgaaaatacggctacctccatcacgatcacttgggacagtggaaatccggatcctgtgagctactatgttattgagtataagtccaaatcacaggatgggccttaccaaatcaaggaggatattaccactactagatattcgataggcggtctgagccctaacagtgagtacgagatttgggttagcgcagtcaatagcattggacaggggccacctagtgaaagcgtggttactcggaccggtgaacaagccccagcatctgccccacggaacgtgcaggctaggatgttgagcgcaacgacaatgattgtgcaatgggaagaaccagtcgaacccaacggtctgatccgtggatatcgggtctactatactatggaaccggagcaccctgtcggaaattggcagaaacataacgttgacgatagcctgctgacaactgttgggtctttactggaggatgaaacttacactgttcgcgtgctggcctttacaagcgtgggagatggaccgctgagtgatcccatccaggttaagacgcagcagggcgttccaggccagcctatgaaccttagagccgaggctagaagcgagacatctatcacactttcatggagcccccctaggcaagagtccatcattaaatatgagctcttgttccgcgagggcgaccatggccgtgaagtcgggagaacattcgatcccacaacatcctatgtcgtagaagacctaaaacccaataccgagtacgctttcagactggccgctcgcagccctcaaggcctaggcgcattcacaccagttgttcgacagcggaccttacagtctaagccatcagccccaccacaagacgtgaaatgcgtgagtgtacggtccactgctattttggtaagttggagacccccaccgcctgagactcacaacggtgctctcgttggctactccgtgcggtacaggccgctgggcagcgaggatccagaaccaaaagaggtcaatggaatccctcctacaacaacccagatcctgctggaggccctggaaaagtggacccagtacagaatcaccactgtcgcccatacagaggtagggcctggcccagaatcctcacccgtggtcgtgcggaccgatgaagacgtgcccagcgctccacccaggaaagtcgaggcagaagctttgaacgccacagcaatcagagtcctctggcgcagtcccgctccagggagacagcatggccaaatccgaggataccaggtccactatgtaagaatggagggcgctgaggcgagaggaccccctagaattaaagacgtcatgttggctgacgcgcaggaaatggtaatcacgaatttacagcccgaaacagcctattctattactgtggcagcctacactatgaagggcgacggggctaggagcaagccgaaagtagtagttaccaaaggggcagtgctggggaggcccacactgtccgtccagcaaacacctgagggaagtctgctcgcacggtgggagcccccagcgggaaccgcagaggatcaggttctcggttatagattgcagttcggacgagaagacagtacccctctcgcgaccttggagttccccccttccgaagacaggtacacagcgagtggcgtgcataaaggagcgacctatgttttccgcttagccgctagatcccgcggaggcttgggagaggaggctgctgaggtcctctcaattccagaggacactccacgagggcacccccagattctagaggctgccggaaatgcaagtgccggtacagtgctgttgcggtggctcccccctgtccccgctgagcgcaacggcgctatagtcaaatatacggtagctgtgcgggaagcaggcgctctgggcccagcccgagaaactgagctccccgcagctgccgaaccaggggcagagaatgcactgactcttcagggcctgaagcccgatactgcgtatgacttacaggttcgtgcgcacactaggcgtgggcctggcccttttagtccccctgtgagatatagaacctttttgcgcgaccaggtttcaccaaaaaatttcaaagttaaaatgattatgaaaacctctgtgctgctcagctgggagttccccgataactataactcacctacgccatacaaaatccagtacaacggcctcacacttgacgtggacggcagaactactaaaaaactgattacgcatttgaagccccatacattctacaattttgtattaacaaataggggcagctcattggggggactgcagcagaccgttacggcttggacagcttttaatctcttgaacgggaaacccagcgtggcccctaagccggatgcggatgggttcatcatggtttaccttccggacgggcaaagtccagtgccagtacagtcctatttcatagttatggtgccacttagaaagtcacgaggcggacagtttctcaccccactagggagccctgaggatatggacctggaggaactgatacaggatatttcccggcttcagagaagatccctgcgtcactcacgccaattagaagttccccgtccttatatcgcagcccgtttcagtgtgctgccccctaccttccaccctggcgaccagaaacagtatgggggtttcgacaatagaggcctagaacctgggcacaggtatgtgctgtttgtgctggccgttctgcagaaaagtgaaccaaccttcgcagcttcccctttcagtgacccattccagctggacaacccagatccacagccgatcgtagatggcgaagaagggctgatctgggtgatcggccctgtactcgcagtggtttttattatctgcatagtcatcgcaattctactttacaagaataaaccagatagcaagaggaaagatagcgaacctcgcacaaagtgtctgctgaacaatgccgatctggcccctcatcatccaaaagaccctgtggaaatgcggaggattaacttccagacaccaggaatgctgtcccaccctcccatcccaatcgccgacatggccgaacacaccgagagactgaaggccaatgactcactgaagctgagtcaggaatacgagtcgatagatcctggtcagcagtttacttgggaacattctaatttagaagtcaataaacctaagaaccggtatgccaacgtcatcgcttatgatcattcccgcgtaatcctgcagccgatcgaaggcatcatgggctctgattatatcaacgcaaactacgtggatggctatcggtgccaaaacgcttatattgccacacaaggccctctgccagagacctttggggacttctggagaatggtgtgggagcaacgctctgcaacaatcgtaatgatgacaagacttgaggagaaaagccggatcaagtgtgatcagtattggccaaatcggggaactgagacttacgggttcatccaagtaactctacttgacaccatcgaattggctaccttttgcgttcgaacatttagtttacacaagaatggctcaagcgaaaaacgggaggtgcgccaatttcagtttactgcatggcctgaccacggagtgcccgagtaccctaccccctttctggccttcttgcgcagggtcaagacctgtaatccccctgacgctggcccaatcgttgttcactgttccgccggagtagggaggaccggttgcttcattgtgatcgatgccatgctagaaagaatcaaacctgagaagactgtggacgtgtacgggcatgtaacattaatgcgcagtcaacgtaattatatggtgcagaccgaggaccagtactcttttattcacgaagccttgctcgaagccgtgggctgcggcaatacagaggtgcctgctagatctctatacgcttacattcaaaagctggcccaggtggagcccggtgaacatgttaccgggatggagctggagttcaaacggctggctaatagcaaggcacatactagtaggttcatctccgctaatctgccttgcaataaatttaaaaacagactggtcaacatcatgccttatgagtctactcgggtgtgtctgcagcccatacgcggagtcgaggggtctgattacataaacgcatcatttattgacgggtaccggcagcagaaggcctacattgcaacacagggcccattagccgagacaaccgaggacttttggcggatgctgtgggagaataacagcactattgtggtcatgttaacaaagcttcgtgaaatggggagagaaaagtgccaccagtattggccggctgagcgtagcgccaggtaccaatatttcgtggtcgatcccatggctgagtacaacatgcctcagtatatattgcgggagttcaaggttactgacgcccgtgatgggcagagtagaactgtgcgtcagttccagttcactgattggcccgagcagggggtcccgaaatcaggggaaggcttcatagattttatcggccaagttcacaaaacaaaagagcagttcggccaagatggacccatctccgttcactgtagcgcaggggtcggcagaacgggggtatttataactctgtcaatcgtgctagagcgaatgcggtatgagggagtggtagatatttttcagacagtgaaaatgttgaggactcagcgacctgccatggttcagactgaagacgagtaccagttttgttaccaggcggcattagaatacctgggcagctttgaccattatgctacata

SEQ ID NO: 237177 - DNA, 4506 bp, synthetic construct
  misc_feature 1..4506: note = Description of Artificial Sequence: Synthetic coding sequence
  source 1..4506: mol_type = other DNA
atggcaccaacctggggtcctggtatggtctctgtcgtaggaccaatgggactcttagtcgtgctcctggtggggggatgcgccgcagaggagccccctcgatttattaaggaacccaaggaccaaataggcgtatctgggggagtggcttcgttcgtgtgtcaagcaactggtgaccccaagcctcgggtcacctggaataagaaaggcaaaaaggtgaactcccagagattcgagactatcgaattcgacgagtccgctggcgcagttttacggattcaaccactgcggactccacgggacgagaatgtgtacgagtgcgtcgcccagaacagtgtgggtgaaatcacagtgcacgctaaactgaccgtccttagggaggatcagctcccgtctgggtttccaaatatagatatgggacctcagctcaaggtggttgagcgcactcgaactgcaacaatgttgtgtgctgcgtccggcaaccctgatcccgaaatcacctggttcaaagattttctgccagtggatccctctgcatctaatggcagaattaaacagctgcgctcgggtgctttacaaatcgaatcaagcgaagagacagatcaaggaaagtatgaatgtgtggcgacgaattcagccggagttaggtattctagccccgctaatctttatgtgcgggttaggcgtgtggctcccaggttctccatcctaccaatgagtcatgaaattatgccgggtgggaacgttaacataacgtgcgtggccgtaggttcaccgatgccctacgttaaatggatgcagggcgcagaagatctgactcccgaggacgatatgcctgtgggtcggaacgtgctggaactgaccgatgtgaaagattcagcaaactacacctgcgtggccatgagcagtctgggggttatcgaagccgtcgcacagatcaccgttaaaagtttgccgaaggctcctggaaccccaatggttaccgaaaatacggcaacctccatcaccattacttgggatagcggaaacccagacccagtctcctactacgtcattgagtacaagagcaaaagccaggatggtccataccagatcaaagaagacatcacgacgactcgctactcaataggcggactgagccctaatagtgagtacgagatctgggtgagtgccgtgaactctattggccaaggtccgccttctgagagcgtggtgacccgaactggcgagcaggcaccagcttcggcacccagaaacgttcaggcccgaatgctgtccgccaccaccatgattgtgcagtgggaggagcccgttgaacccaatggtctgattcggggatacagggtttactacactatggagccggagcacccggtcggtaactggcagaaacacaatgtagacgattccttgttaactactgtgggctccctcctcgaggacgagacctatacggtaagggtcctggcatttacaagtgtaggagacggacccctgtcagatcccattcaggtaaagactcaacaaggtgtcccaggtcagcccatgaatctaagggcagaagctcgttctgaaaccagcatcacactgagttggtcaccaccccgacaggagtccataatcaagtacgaactattatttcgggagggtgaccatggacgagaagtgggcagaacatttgatcccaccacatcatacgtggtagaagatttaaaacctaatactgagtacgcctttaggctagccgcacggagcccacaggggctcggtgcattcacccctgtggtgcgtcagcgcaccttgcagagcatttcgcccaagaattttaaggtaaaaatgattatgaagacttccgtactactgtcatgggagttcccagacaactataacagcccaactccatacaaaatccagtataatgggctcacactcgatgtggacggccgaactaccaaaaaactaattacacatctgaaacctcatactttctataatttcgtgttgacgaatcgcggatccagcttgggcggacttcagcaaactgttacggcttggactgcgtttaatctcctgaacggaaagccctccgtcgcaccgaaacccgatgctgacgggttcattatggtttacctgccagatgggcagtccccggtgcctgtgcaatcttacttcatcgtgatggtaccactgcgaaaatctagaggcggtcagtttctcactcccttgggcagcccagaagacatggacctggaggagcttattcaggatattagccgacttcagaggcgcagtctgaggcacagtcgacagctagaagttcccaggccctatatcgcggctcgattctctgttctgccgcctacgtttcaccccggtgatcaaaagcagtacggtgggttcgacaatcggggattggagcctggccacagatacgtcctcttcgtcctcgcagtgctacaaaaaagcgaacctacttttgctgcatctcctttttcggatcctttccagctggacaatccagatccccagcccatagtagacggtgaagaggggcttatctgggtgataggtcctgttttagctgttgtcttcattatatgcattgtcatcgccattctgttatataagaataagcccgattccaaaaggaaggactcagaacccaggacaaaatgcctcctcaacaatgccgatttagcccctcatcatcccaaggacccagttgagatgagaaggataaactttcagactcctggcatgctgagtcatcccccaatccctatcgcagacatggccgaacacacggagcggctgaaggcaaacgattcactgaaattgtcccaggaatatgaatccatcgatccgggacagcagttcacctgggaacacagcaacctagaagtgaacaagcccaaaaatcgttatgcgaacgtcatcgcttacgaccatagtagggtcattctccagcccatcgaagggatcatgggatctgattacataaatgccaattacgtggacggctaccgttgccaaaacgcctacattgccacgcaggggccactcccagaaacattcggagacttctggcgcatggtctgggaacagagatcagccaccatagtaatgatgactcgacttgaggaaaaaagtagaatcaaatgtgatcaatactggccaaatcgtggaaccgagacttatggcttcatccaggtcaccttgctcgacaccatcgaacttgcgacattctgcgtgcgcacattctcactccataagaacggctcttccgagaaaagagaagtgcgtcaatttcaattcactgcatggccagaccacggcgtgcccgagtaccccaccccattcctcgcgttcctcaggcgcgtgaaaacttgcaatccgccagatgccggtcctatcgtagtacactgtagtgccggtgttggtcgcacaggttgtttcatagttatcgatgctatgttggaaaggattaagcccgagaagacagttgatgtgtatgggcatgtgacactgatgaggtcacagcggaactatatggtccagaccgaagaccagtacagcttcatccacgaggctctactcgaagccgtcggatgcggtaatactgaggtgcctgccaggtctctgtatgcttatatccagaagttggcacaggtagagccaggggagcacgtcacaggtatggaattagagttcaagcgcttggcaaacagtaaggctcacacgtcacgctttatcagtgctaatctgccttgcaacaagttcaaaaatagactcgttaacatcatgccctacgagtccacccgggtttgcttgcagccaatcagaggggtggaggggagcgactatatcaatgcgagcttcatcgatgggtacaggcagcagaaggcctacatcgccacacaagggcctctcgctgagactacagaagatttttggaggatgctgtgggagaacaactcaacaatcgtcgtgatgcttaccaagctgcgagagatgggcagggaaaagtgccaccaatactggccagctgaaaggtcagcaaggtaccagtacttcgtcgtggatccaatggcggagtataacatgccgcagtacattttgcgcgagtttaaggtgacagatgccagagatgggcaatctcggaccgttaggcaattccagtttaccgactggcccgaacagggcgtcccgaaatcaggtgaggggttcattgactttatcgggcaggtgcacaaaacaaaggagcagtttgggcaggatggccctattagcgttcactgttcagcaggggtgggccgaactggggtgtttataactctctccattgtcctggaacgtatgcgctacgagggtgtcgtagatatcttccagaccgtcaagatgctcagaacacagagacccgcaatggtccaaaccgaggatgagtatcagttttgctaccaggcagctttagagtacctgggaagtttcgaccactacgccacctag

SEQ ID NO: 237178 - DNA, 5846 bp, synthetic construct
  misc_feature 1..5846: note = Description of Artificial Sequence: Synthetic coding sequence
  source 1..5846: mol_type = other DNA
atggcccctacgtggggtcctggaatggtatcagtagtaggacctatggggttgcttgttgtccttttggtagggggatgtgccgcagaggaacccccaaggtttatcaaggaacccaaggaccagatcggcgtgagtggcggagtggctagttttgtgtgccaggctacaggagatcctaagcctcgtgtgacctggaacaaaaaaggaaaaaaggttaacagtcagaggttcgaaaccattgagtttgacgaaagcgctggggctgtcctgagaattcagcccctccggacacctcgtgacgagaatgtctatgagtgcgtcgctcagaactcggtgggggagataacagtgcacgcaaaactgaccgtccttcgcgaggaccagttgccgtctggcttccctaacattgatatgggaccccagttaaaggtggttgagcgtacaaggacagccacaatgctttgcgcggcatcaggcaatcctgacccggaaatcacctggttcaaggacttcctgccagtcgacccgtctgctagcaacggcagaataaagcagcttcggagcgatcaggcctttagccacttgccaaccggggctctccagatcgagtcatccgaggaaactgatcaaggaaagtacgagtgcgtggctaccaactccgcaggggtgaggtattcctcccctgcaaatctatatgtccgcgtgtggcgtacggtgaggagagtggccccaaggttcagtatcctccctatgagtcacgagatcatgcctgggggaaatgtcaacattacctgcgttgccgtgggcagtcctatgccatatgtgaagtggatgcaaggagccgaagatctaacccccgaagacgacatgcccgtcggacgtaatgtgctcgaattaactgacgtcaaagactcagccaactacacctgtgtggccatgtcctcactgggggtgattgaagccgtggcacagattaccgtcaagtccctcccaaaagccccagggactcccatggtgactgaaaacaccgccaccagtattaccatcacttgggattctggcaaccccgacccagtctcctactatgttatcgaatataagtccaaaagccaagatgggccataccagattaaagaagatataaccacgacaaggtactcaatagggggactctcaccaaacagtgaatacgagatttgggttagtgcagtcaactcgatcgggcagggccctccttcagaaagtgttgtcacacggacaggggaacaggcgcctgcctccgcccctagaaatgtgcaagctcgcatgctgagcgctaccactatgatagtgcagtgggaggagcccgtggaaccaaacggactgattcgcggttatagggtgtattacacaatggagcccgaacaccccgtcgggaactggcaaaagcataacgttgatgatagcctccttacaaccgtaggatcacttctggaagacgagacttatactgtgagagtgctggcctttacatctgtgggcgacggcccactgtcggatcccatccaggtcaagacacaacagggtgtgcccggacagcctatgaacctgagggcggaggcacgcagtgaaacttctataaccttgtcttggagcccccctcgtcaggagagtataattaagtacgagcttctgtttagagaaggggaccacgggagggaggtggggcgaaccttcgaccctacaaccagttacgtggtcgaggacctgaagccaaacaccgagtacgccttccggcttgcagcacgctcaccacaaggtctaggagctttcacaccagtcgtcagacagagaacactgcaaagtaaaccaagcgcccctcctcaggatgtgaaatgtgtgagcgtgaggagcaccgccatcctggtgagctggcgcccaccgcctccagagacacataacggggctctggtcggatactctgtcaggtacaggcctctgggaagcgaggacccagagcccaaagaagtgaacggtatcccacccacgactacacagatactactggaagcactggaaaagtggacccagtaccgaattaccaccgtggctcatacagaagtgggaccagggcctgagtcatcgcctgtggtggtccgcactgacgaggacgtgccaagtgctcctcctaggaaggtggaggcagaggccctgaacgccactgccatacgggtgctgtggcgctctcccgcaccaggcagacaacacggccagattcggggatatcaagtgcactacgtgagaatggagggggctgaagccagaggccctcccaggataaaggatgtgatgttggccgatgcccagtgggagactgatgataccgccgaatacgagatggtgattactaatcttcagccagaaactgcatactcaatcacggtcgctgcctacaccatgaaaggcgatggagctcggtctaagcccaaggttgtggtgacgaagggagcggtgctgggcagacctactttgtcagtccagcagaccccagagggatctctgttagctaggtgggagccacctgctggcaccgctgaggaccaagttctggggtatcggctgcagttcggtagggaagactctaccccgttggcaaccctggaattccctccttccgaagatcgttatactgcaagtggagtccataagggcgctacctacgtgtttagacttgcagcccgatctagggggggtttgggtgaggaagcggcagaggttcttagtatcccagaggacacccccaggggtcatccccaaatcctagaggccgcaggaaacgcctctgcagggacagtcctgctgcgctggctcccacccgtccctgccgaaaggaacggcgctatagtgaaatatactgtggccgtgcgtgaggccggtgcacttggtcccgctagggaaaccgaattaccagcagccgctgaacctggagctgaaaatgcattgacactccaaggtctgaaaccggacacagcatatgatctgcaggttcgggcacacacaagaagaggcccaggtccttttagcccacccgtgagatatcgcacattcttgcgcgatcaggtcagtccaaaaaacttcaaggtgaaaatgataatgaagactagtgtgttactgagctgggaatttcccgacaactataattcaccaaccccttacaaaatccagtataacggcctcacgctggacgtggatggtcggacgactaagaagttgattacccatttaaaaccacacacgttttataactttgtactcacaaatcggggaagttccctgggcggattgcagcagactgtaaccgcatggaccgcgtttaatctgctcaacggtaaaccaagcgtggcaccaaaacccgacgccgacggctttattatggtctaccttccggatggacaaagccccgtcccagtacagagctatttcatcgtaatggtccccttgcggaagtcaagaggcggacagtttttaacccccctgggttcccccgaagacatggatctggaggagttgatccaggacatttcccgcctgcaacgcagatccctgcgtcacagtaggcagctggaggtcccaaggccttatatcgcagctcgctttagcgtgcttcctcccacctttcaccccggagaccagaagcagtacggaggctttgacaatagagggctcgagccaggccataggtatgtcttatttgtgctggctgtgctccaaaaaagtgaaccaacgttcgccgcaagtcctttttcagacccatttcaactggataaccccgacccccagccgatagtggatggagaagaagggctcatctgggttattgggcctgtcctggcagtggtatttattatctgtatcgtgatcgccattttactttacaagaataagccagatagcaagagaaaggatagcgagccgagaactaagtgcctactgaacaacgcagatctggccccacaccatcccaaagatccggtggaaatgaggcgtatcaacttccagacccctgactcaggcttgagatctcctctgcgggaaccagggtttcacttcgagtctatgctgtcccaccctcctatccctatcgccgacatggcggaacacaccgagagactcaaggcaaatgacagcctaaaattgtctcaggagtacgaaagtattgatccaggccagcagtttacctgggagcattcaaaccttgaagtgaacaaaccaaagaaccggtatgccaacgtgattgcatatgaccacagtcgtgtgatactgcaacctatcgaagggattatgggtagtgattacatcaatgccaactacgttgatggctatagatgccagaacgcgtacatcgcaacacaagggccactgccagagacgtttggagacttctggcgcatggtgtgggaacaaaggtcagcgactatcgtcatgatgacacggctggaagagaaatcccggattaaatgcgatcagtattggccaaaccgaggaactgagacctacggttttatacaggtgacactgctggatactatcgaactggccacattttgcgtgcgtacgttttccctgcacaaaaatggctcaagcgagaaacgtgaggtcaggcaattccagtttacggcttggcctgatcacggagtgccggaataccctacccctttcttggcctttctccggagggtcaagacatgcaaccccccagacgctggcccaatcgtcgtgcactgttctgcgggtgttgggaggacaggctgcttcatcgtgattgacgccatgcttgagcggattaagcccgaaaagacagtcgacgtgtatggtcacgtcacattaatgcggtcacagaggaactatatggtgcaaacagaggaccagtactcttttatacatgaggccctcctggaagctgtgggttgcggtaacaccgaggtacctgcacgctcgctgtacgcctatatacagaaattggcacaagtggaaccaggcgagcacgtcacaggcatggagctggagttcaagaggttggctaattctaaagcccacacatcacgctttatctccgccaaccttccctgtaataaattcaagaataggctggtcaacattatgccttatgaaagcactcgagtttgtttgcagccgatccgaggtgtggagggttcagactatattaacgccagcttcattgatgggtacagacaacagaaggcgtatatagccacgcaaggcccactcgcagagacaactgaagacttctggcgaatgttatgggagaataactccactatcgttgtgatgctaaccaaactgcgggagatggggagagagaagtgtcatcagtactggccggctgagcggtccgctagatatcagtactttgtggtggaccccatggctgaatacaatatgccacaatatatcctgcgcgaatttaaggtcacagacgccagagatggccaatcccgcaccgtccgacagtttcagtttacagactggcccgaacagggggtgcccaaatcaggtgaaggtttcattgactttatcggacaggtgcataaaacaaaagaacagttcgggcaagacggacccattagcgtgcactgcagcgccggagtcggcagaacaggtgtcttcatcactctttccatcgtactggagcgcatgcgctacgaaggagtggtggacattttccagacggtcaagatgttgagaacacaaagaccagccatggtccaaaccgaggatgagtaccagttctgttatcaagccgcactggagtaccttgggtcatttgaccactacgccaccta

SEQ ID NO: 237179 - DNA, 4593 bp, synthetic construct
  misc_feature 1..4593: note = Description of Artificial Sequence: Synthetic coding sequence
  source 1..4593: mol_type = other DNA
atggcaccaacatggggtcccggaatggtaagcgttgtggggcctatgggcctgctggtagttttgctggtcggtgggtgcgcagccgaagaacctccgagattcataaaggagcccaaggaccaaatcggcgtcagcgggggagtagcctcatttgtgtgtcaggcaaccggcgatccgaagcctcgcgtgacatggaacaaaaagggcaaaaaggttaatagccagagattcgagaccatagaattcgatgagagtgcaggtgctgtcctgaggattcagcccctgagaaccccccgagatgaaaatgtgtacgagtgcgtcgctcagaatagtgttggcgagattacagtccacgccaaactaaccgtgctgcgagaggaccagctcccgagcggatttcctaatatcgacatgggccctcaactcaaagtggtggaaaggacccggacagccacaatgctttgtgcagcttccggcaaccctgacccagaaattacctggttcaaagattttcttcctgtcgatccaagcgcatcgaacggcagaatcaaacaactgagaagcgatcaggccttcagccacctcccaacaggagccctgcagattgagagctctgaggagaccgaccaagggaaatacgagtgtgttgccacaaacagcgctggcgtcagatatagctctccagccaatctgtacgtgcgcgtgtggcgcacagtgcggcgagtcgcaccgagattttcaatcctgcccatgtctcacgagatcatgccaggcggaaacgtgaatattacctgcgtggccgtaggctcaccaatgccatacgtcaaatggatgcagggggcagaggacttgacaccagaggatgacatgcctgtgggcaggaacgtcctcgaacttacagatgtaaaggatagcgccaactatacgtgcgtggccatgtcttccctcggggtaatcgaggccgttgcccagataacagttaagagcctcccgaaggctcccggaaccccaatggttaccgagaacactgcaactagtataaccatcacatgggattccggcaaccctgaccctgtctcttactatgttatcgagtataaatccaagtcacaggacggcccttatcagattaaggaggacatcacaacaacaaggtactccatcggcggactgagtcctaatagtgagtatgagatctgggtgagcgccgtcaatagtatcggacagggcccaccatcggagtctgtggtaacacggacaggcgagcaggctcctgccagcgcccctagaaacgtgcaggcaaggatgctgtctgccacaacaatgattgtgcagtgggaagaacctgtggagcctaatggcctgattagggggtaccgcgtgtattacacgatggaacctgagcatcctgtcggcaattggcagaagcacaacgtagatgatagtcttcttacaactgtgggctcacttctggaggatgaaacgtatacagtcagggtccttgcctttacatcggtgggtgacgggccactcagtgatcccatccaagtcaagacacagcagggagttcctggtcagcctatgaacctgcgtgctgaagccagatctgagacttcaatcacactctcctggtcgcctccacggcaagagagcatcattaagtacgagcttctgttccgcgaaggagaccacggacgcgaagtggggagaaccttcgatcccaccacatcttatgtagttgaggacctgaagccaaacaccgagtatgcctttagactcgccgcacggagcccccaaggactgggcgcttttacgccagtggtccggcaacgtacccttcagagtatcagcccaaagaacttcaaggtgaaaatgatcatgaagacatccgtgcttctgtcctgggaattccccgacaactataattctccaacaccttacaaaattcaatacaacgggttgacactggacgtagacggaaggacaactaagaaacttatcactcacctcaaaccccacaccttttataattttgtgctgacaaaccggggtagctccttaggcggattgcaacagacagtgaccgcctggacagcctttaacctgctgaacggcaaacccagtgtagcgcctaagcctgacgcagacggattcatcatggtttacctccctgatggacagtcccccgtgcctgtccagagctatttcatcgtgatggtgccgctgagaaaatctagaggcggacagttcctcaccccactgggatccccagaagacatggaccttgaagagctgatccaggatatttcgagactgcagcgcagatccctcaggcattctcgccagttggaagtgccacggccatatatagccgcacgcttctcagtactgcctcctacattccaccccggtgaccagaagcagtacggaggcttcgacaataggggcctggagccaggtcatagatacgtgctgttcgtattggccgtcctgcagaagagtgaaccaactttcgccgcatccccgttctccgatccctttcagctggacaaccccgacccccagccaattgtggacggcgaggaaggcctgatctgggtcatcggaccagtgctcgccgtcgttttcatcatatgtattgtcattgcgattcttctgtacaaaaacaagcccgattcaaagagaaaggacagcgaaccgaggaccaagtgtctcttgaacaatgcagatttggctccgcaccaccccaaggatcctgtcgagatgcgcaggattaatttccagacacctgactctggactccgcagtcctctgagggagccgggatttcattttgaaagcatgctgagtcacccgccaattcctattgccgacatggccgagcatacagagcgactgaaggcgaatgactcccttaagttgagtcaagaatacgaatctatagatccgggacagcaattcacatgggagcacagcaatcttgaggtgaataaacctaagaaccgctatgcgaatgtcatcgcttacgaccattcgcgcgttattctgcagcccatcgaaggaatcatgggcagcgattacattaacgctaattacgtcgacgggtatcgatgtcaaaacgcttacatagcgacacagggaccactgcctgaaacctttggggatttctggcgaatggtatgggagcagcggtcagcaacaatcgttatgatgacccgcttggaggagaagtccagaatcaagtgcgaccagtattggccgaacaggggcacagagacctacggcttcattcaggtgacactacttgacactattgaactggctaccttttgtgtccgaaccttctctctacacaagaacggatcaagtgaaaagcgagaggtacgccaattccagttcaccgcttggccagaccacggagtgcccgaatatcccacacctttccttgcttttcttaggcgcgtcaagacctgtaatccacccgatgccggacccattgtggtgcactgttccgctggggtgggccgtactggatgcttcatcgtgattgatgccatgctggaaagaataaaacccgagaagaccgtggacgtgtatggacatgtgacactaatgcgttctcagcgcaactatatggttcagaccgaggaccagtatagcttcattcacgaagcgctgctggaggccgtgggttgtggcaacacagaggtacctgctcgcagcctgtatgcatatattcaaaagctggctcaggtcgagccaggggaacatgtcaccggaatggagctggagttcaagagacttgccaattccaaagcccatacctcgagattcatatcagccaaccttccatgcaataaatttaagaataggcttgtgaatataatgccctacgagagcactcgggtatgtcttcagcccatccgtggagtagaggggtccgattatattaacgcctcctttattgacggctaccgtcagcagaaggcctacattgctacacaggggccactggccgaaaccaccgaggacttttggaggatgttatgggaaaataactcaacaatcgtggtgatgctgacgaagttaagggagatgggccgtgagaagtgtcaccagtactggccagccgagcgatccgctagatatcagtatttcgtcgttgaccctatggccgagtacaacatgccccagtatattctgagagagtttaaggtcactgatgcacgcgacggccagtcccgaacagtgcggcagtttcagttcacagattggcccgagcagggggtgcctaagagtggggagggatttatcgatttcatcggacaggtgcataagacgaaagagcagtttgggcaggacggcccaatcagcgtacattgttcagctggggtgggcaggacgggggtatttatcacgttaagcatcgttctagaaagaatgaggtacgagggagtggtggatatctttcaaacggtaaagatgctccgaactcagagacccgctatggtgcagacggaggatgagtaccagttctgctaccaggccgcattggagtatctgggttcctttgatcactacgctacctag

SEQ ID NO: 237180 - DNA, 5819 bp, synthetic construct
  misc_feature 1..5819: note = Description of Artificial Sequence: Synthetic coding sequence
  source 1..5819: mol_type = other DNA
atggctcccacctgggggcctggtatggtttcagtggttggaccgatgggcctcctggtagttctcctggtgggcggttgtgccgctgaagaaccacccaggttcattaaagaaccgaaagatcagataggggtgtcgggaggagtagcgtcattcgtatgtcaggccactggagaccctaaacccagggtgacgtggaacaagaagggaaaaaaggtgaacagccaaaggttcgagacgatagagttcgacgaatctgctggggcagtgctcaggattcagccgttgagaaccccacgagacgagaacgtctacgagtgtgtagcacaaaacagcgtaggtgagatcaccgtgcacgcaaaacttactgtcctcagggaggaccaactgccatcaggcttccccaatatcgacatgggtcctcaattaaaggtggttgagcgaaccagaacagctacaatgttgtgcgccgcttccggcaaccctgacccagaaattacgtggtttaaagatttcctgccagtggatccctcagcctctaatggccgaatcaagcagctcagatccgatcaggccttttcacaccttcctaccggcgcattgcagattgaatcgtcggaagagacagatcagggtaagtatgagtgtgttgctacaaactctgccggagtgcggtactcctctcccgcaaacctgtatgttagagtctggcggacagtaagacgggtggccccaaggttttccattctgcctatgtctcatgaaataatgcctgggggaaacgtgaatattacatgcgtggcagttggatctccaatgccctacgtgaagtggatgcagggcgcagaggatctcacgcccgaagacgatatgccagtgggacgaaacgtgcttgaactgaccgacgtgaaggattctgcaaattacacgtgtgtagccatgagctcgctgggggttattgaagccgtggcccagattaccgtgaaaagtctcccaaaggcgcctggtacgcccatggtcaccgaaaataccgccacatccataaccataacttgggacagtggtaaccccgaccccgtgagttactatgtcatcgagtacaaatcaaagtctcaggatgggccttatcagattaaggaggacattacaaccacccgctactctatcggtggtctcagtcctaatagcgagtacgaaatctgggtatcagccgtgaacagtattgggcagggtcccccaagtgaaagcgtcgtcaccagaaccggagagcaggcccctgctagtgcccctagaaatgtgcaggctcgcatgctaagtgcgactaccatgatcgttcagtgggaagaacctgtagagcccaacggacttatccgcggttatcgcgtgtactataccatggaaccagagcaccctgtgggcaactggcagaagcataatgtggacgatagcctgctgacaaccgtgggctccctgcttgaggacgagacatacactgtgagagtgcttgcctttacctctgtgggtgacggtcccctgtccgatcccattcaagtgaaaacccagcagggcgtgccgggtcagccaatgaatctccgggctgaggcacggtccgagacctcaatcaccctgtcctggtccccacccagacaagagagcatcatcaagtatgagttgctgttccgagaaggtgaccatgggcgtgaggtcgggagaacgttcgaccccacgacctcctatgtggtcgaggacttaaagcccaataccgagtacgcctttagactggcggctaggtcaccacaaggtcttggcgcttttacacccgtggtacgccaaaggacactgcagagtaagccctcagcacctccccaggatgtcaagtgtgttagcgtgcggtctacagcaatcttagtgtcatggcgcccacctcccccagagacacacaacggcgctctggtgggatactctgttcggtaccgacctttaggctctgaggatcccgagccaaaagaagtgaacggcattcctccaaccacaactcagattctgcttgaggcactagaaaagtggacacagtacaggataactaccgttgcccacaccgaggttgggccaggtcctgaaagtagccctgtggtggtacgcaccgatgaggatgtgcccagtgcccctcccaggaaggtcgaagccgaagccctcaacgctactgctatacgggtcctgtggaggtcgcccgctcctggtagacaacacggccaaataaggggttaccaggtgcactatgtgcgaatggagggagccgaagcccgaggcccaccgcgaatcaaggatgtcatgctcgcggatgcccaggaaatggtgatcacgaatctccagccagaaactgcttatagcattacggtggctgcatataccatgaaaggcgatggagccagatccaagcctaaggtggtcgtcacaaaaggcgcagtgctaggtagacctactctgagcgtgcagcagacaccggagggctccttactcgctcgatgggagcctcctgcagggacagctgaagaccaggttctggggtataggctgcagtttggcagggaagattccactcccctagcaactctggaatttcctccgagcgaggatcggtatactgcttcaggcgtgcacaaaggagcgacttatgtatttcgcttggccgctcgttccagaggcggactgggggaggaagcagctgaggttctctctatacccgaggataccccgcgaggccatccccagatcctggaggccgcaggaaacgcaagtgcaggcactgtgctgctgcgctggctgcctccagttcctgctgaaagaaacggggctatagtgaaatacactgtggcagtccgcgaggctggcgcactagggccagctcgcgagactgaactgccagccgcagctgagcccggtgctgaaaacgctctcacactgcagggtcttaagcctgatactgcctacgatctgcaggtgcgagcacacaccagacgcggtcccggaccattcagtccacctgtgcgttaccgaaccttcctgagagaccaagtctctccaaagaacttcaaggttaagatgatcatgaagacgagcgtgctgctaagttgggagttcccggataattacaattctccaaccccttacaaaatccaatacaatggtttgacgctggatgtggatggcagaacaaccaagaaattgataacccatctcaagccccacaccttttacaatttcgtgctgaccaaccgaggctcatccctgggcggattgcagcagactgtgactgcatggacagcttttaacttactaaacggcaagccttcggtggctcccaagcccgatgcggacggttttattatggtatatctacctgacgggcagtccccagtgcctgtacagagctatttcatcgtaatggtccctcttaggaagtcacgagggggacagttcctcactccactcggttctcctgaggatatggacttggaagagctcatccaagacatcagtagactgcagaggcggtccctacggcactccagacagctcgaagtgccacggccatacatagccgcaaggttcagcgttctgccaccgaccttccaccctggagatcagaaacagtatgggggattcgacaaccgaggactcgagccagggcatagatatgtactttttgtcctggccgtgctgcagaagagcgaacctacgttcgcagccagtcccttcagtgacccctttcagctcgataaccctgatccccagccgatcgtcgatggtgaggaggggctaatatgggtgatcggtcctgtgctcgccgtggttttcataatatgtatcgttatagccatcctcctatataagaacaagccagatagtaaacggaaggattctgagcctcggactaaatgtctgctgaacaatgctgatctcgcacctcaccaccctaaggacccagtagagatgagaagaattaactttcagacacccgatagcggcctcagatccccgctgcgcgaaccgggatttcacttcgagtccatgcttagccatcctcctattcctatcgccgacatggccgaacacacagaacgacttaaagccaacgacagtctgaaactgagtcaggagtacgaatctattgaccctgggcagcagtttacctgggagcactccaatctggaggtaaataagccaaagaatagatatgctaacgtgatcgcatacgaccactccagagtaatcctgcaaccgatcgagggcatcatggggtcagactatataaacgcaaattatgtagacggttacagatgccagaacgcttacatcgccacccaggggcctctaccagagacattcggcgatttttggaggatggtatgggaacagagatctgcgactatcgttatgatgacccggctggaggaaaaaagccgaataaagtgcgaccagtattggccaaaccgaggcactgaaacttacgggtttatacaggttacgctacttgacactattgaactcgcgactttctgcgtccgtactttctccttacacaaaaatggcagcagcgagaagagggaagtcaggcaattccagttcacagcttggcccgatcacggagttcctgagtaccccacaccttttctggccttcctgcgacgtgtgaaaacatgtaacccccctgatgcagggcctatcgtcgttcactgcagtgccggagtggggagaacaggctgcttcatagtgatcgacgcaatgctggagcggattaaacctgagaagaccgtagacgtatacggtcatgtcacgcttatgagatcccagagaaattacatggtgcagaccgaagaccagtactcgtttatccatgaggcgctactggaagccgtgggatgtggtaatactgaggtaccagcccgatctctctacgcctacatccagaaactggcgcaggtggaaccaggggagcacgtcacgggtatggaactagaatttaaacggctggcaaactctaaagctcatacatccaggttcatctcagccaatcttccctgtaataagtttaagaatcggctggtcaatattatgccctacgaaagcacacgcgtatgtctccagccaattcgcggagtagaaggctctgattatatcaatgccagcttcatcgacggatatcgccaacagaaggcttacatcgccacccaagggccattggctgaaactaccgaagatttttggcggatgctttgggagaacaacagtaccatcgttgttatgctcacgaagttgagggagatgggcagggaaaagtgtcaccagtattggcccgctgagaggagtgccagataccagtatttcgtagtggaccctatggccgaatacaatatgcctcaatacatcttgcgcgagttcaaagttactgatgcaagagacggtcaatcccgcacagtccgacagtttcaattcaccgactggcctgagcagggtgtaccaaaaagcggtgaaggttttatcgattttatcggccaggttcacaagacgaaggaacagttcggtcaggacggtccaatctctgtgcactgttccgcgggtgtgggcagaaccggagtgttcatcaccctatcgattgtgcttgaaagaatgaggtacgagggagtcgttgacatattccagaccgtcaagatgctgagaacccagcgcccagctatggtgcagacggaagatgagtatcagttctgctaccaggccgctttagaatatctgggttcattcgaccactatgcaaccta

SEQ ID NO: 237181 - DNA, 5846 bp, synthetic construct
  misc_feature 1..5846: note = Description of Artificial Sequence: Synthetic coding sequence
  source 1..5846: mol_type = other DNA
atggctcctacttgggggccagggatggtcagtgtagttgggccaatgggcctgctagtagtcctcctggtcggtggatgcgccgcagaggagccaccaaggtttatcaaagagcccaaagatcagataggcgtgtccggaggcgtggccagctttgtgtgccaggctactggcgatccgaagccacgcgtaacctggaataagaaaggcaagaaagtgaactcccaacggtttgaaacaatagagtttgacgagagtgcaggggctgtcctccggattcagccactgcgcactcctcgggatgagaacgtttacgagtgtgtcgcccagaatagtgtcggggaaatcaccgttcatgccaagctaacagtgctgcgggaagaccagcttccttcaggctttccaaatattgatatgggaccccagttaaaagttgttgagcgcacacgaactgcaactatgctgtgtgcagcctctggcaatcctgatccagagattacatggtttaaagattttctgcccgtggacccctctgcgtctaatggcaggattaagcaactgaggagtgagactttcgaatccacccctatccgcggagctctgcagatagaatctagcgaagagacagaccagggaaaatacgaatgcgttgccaccaattccgctggcgttagatattcaagccctgctaatctttacgtccgcgagctcagagaggtacggagggtagctccaagattttcaatcttacctatgtcgcacgagattatgccaggtggaaacgtgaacatcacctgcgtggctgtgggctcacctatgccttatgtgaagtggatgcagggagctgaggacttaacacccgaagacgacatgcccgtcggtaggaatgttctggagctgactgatgtgaaggactccgccaactacacttgtgttgctatgagctctttgggggttatcgaagctgtggctcaaatcacagtgaagagcttgcctaaggccccaggtaccccgatggtgaccgaaaacaccgctacctccattacaattacgtgggacagcggtaatccagacccggtcagctattatgtgattgagtacaaatccaagtctcaggacggaccttatcagataaaggaggatattaccactacacggtactccatcggtggactgtctcccaacagtgagtacgaaatttgggtctcagctgtcaactctatcgggcaaggtcccccatctgagagcgtagtcaccaggacaggggagcaagcgccagcaagtgcgccacgcaatgtccaagctcgcatgctcagcgccacaactatgattgtgcagtgggaagagcccgttgaacccaacgggctgatccgcggatatagggtctactatacaatggaacccgaacaccctgttggcaactggcagaaacacaacgtcgacgatagcctcttgaccacagttggttctttgctggaggacgaaacttatacagtgcgggtactggcgtttacatctgtcggtgatgggccactgagtgatccaattcaagtcaagacacagcagggcgtcccaggacagcccatgaacctccgcgctgaggcacggtcggaaacctcaattacgctgtcttggtccccgccacgccaagagtccataattaaatatgagctcttatttagggaaggagatcatgggagagaagtaggcagaacattcgatcctaccacttcatatgtcgtggaggatttaaaaccgaatactgaatacgcctttcggctggcagcgagatcgccacagggcctgggcgctttcacaccagttgttagacagcgaactctgcagtctaagccatcagcccctcctcaggatgtgaaatgcgtttccgtgcgcagcactgctatactggtttcttggagaccccctccacctgagacgcacaacggagctctggttggctattcagttagatatagacctctggggtcagaggaccccgagccaaaggaggtgaatggaattccacctacaacaacgcagattctcttagaagccctggagaagtggacccaataccgtattacaaccgtagctcatactgaagtgggtcctggaccagagtctagtcctgtggttgttaggactgatgaagacgtgccttctgcccctccacgcaaggtcgaagccgaggctctgaatgcaacagctattagagtgctgtggcggagcccagctccgggacgtcagcacggccagatccgcggatatcaggtccattatgtgcgtatggagggggctgaggcaaggggacctccacgcatcaaggatgtcatgcttgcggacgcacagtgggagaccgacgatactgccgagtacgagatggttattactaacctgcagcccgagactgcatactccattactgttgccgcttatacaatgaaaggggacggtgccaggagtaaaccaaaagtagtcgtgaccaagggcgcagttcttggccgtcctacccttagtgtccagcagacgcccgaaggctcactcctggccaggtgggagccccctgccggaaccgcagaagaccaagtactcggatacaggctccagttcggcagggaagactcaacacctcttgccacgcttgagttcccacccagcgaagaccggtacaccgccagtggagtacacaagggagctacttacgtcttccgactggccgcaagaagccggggaggcctcggtgaggaggccgcagaggtgctctctattcccgaagacaccccgcgtggccacccacagattcttgaggccgctggcaacgctagtgccggaaccgtgcttttacgttggctgccccctgtgcccgctgagagaaatggagcgatcgtgaaatatacggttgctgtaagagaggcaggggcactgggccctgcaagggagacggaactccccgctgccgctgagcccggagccgaaaatgcactaactctgcagggactgaagccagatacagcctacgatctgcaagtcagagcccacacgagaagaggccctggcccttttagtcctccggtccgatacagaacttttctgcgagaccaggttagtcctaaaaatttcaaagtgaagatgatcatgaaaacctccgtgctgctcagctgggaatttccagataactacaattcccccacaccttacaaaatccagtataatggcttgacactggacgttgatggacgaaccactaagaagcttatcactcatttaaaacctcacaccttctacaatttcgtcctgacaaaccggggaagctcgctcggaggcctccagcaaactgttacggcttggaccgccttcaatttgctcaacggaaaaccaagcgttgcacccaagccagatgcagacgggttcatcatggtgtatctgcccgacggtcagagcccagtgcccgttcagtcctactttattgtgatggtgccactaagaaaaagccgcggtgggcagtttttaacccctctgggaagtcctgaagatatggaccttgaggaattgatccaggatatctcccggctgcagaggcgatccctcaggcactcacgccagcttgaggtgccaaggccctatattgcagccagatttagtgtgctgccccctacgtttcatcctggtgatcagaagcaatacggagggtttgacaatagaggcctggagccgggacaccggtatgtcctttttgtgcttgctgtcctgcagaaatctgagcccacattcgcagcatctcccttcagtgatccattccaactggacaatcctgaccctcagcctatcgtcgacggtgaggagggccttatttgggttataggtcctgtgctggcagtagtgttcataatttgtatcgttatcgcaatactcctgtacaagaacaaaccagattctaagcgtaaggactccgaaccgagaactaagtgcctgctgaacaacgcagatctcgctccacaccacccaaaagacccagttgaaatgcgccgtatcaattttcagacaccagactctggtttgcgctcccctctaagggaaccaggtttccactttgagtcaatgcttagccacccacccattcccatcgctgacatggccgagcacactgagcgcctcaaggcaaacgatagcctgaagcttagtcaggaatacgaatccattgaccccggtcagcagtttacttgggagcattccaaccttgaggtcaataagcccaagaatcgctacgcgaacgttatcgcgtatgatcattcccgagtcattctgcaacctattgagggtatcatggggagcgattatattaacgcaaattatgttgacggatacaggtgccagaatgcctatatcgccacccaaggccctctgcctgagacctttggtgatttttggcggatggtttgggagcagaggtcggctaccatcgtgatgatgacaaggctcgaggaaaagagtcgcatcaaatgtgatcaatattggccaaaccggggtactgaaacttatgggtttattcaggtgaccctcttggacacaattgaactagccacgttttgtgtaaggacattctctctgcacaagaatggcagttcagaaaagagggaagtccggcagttccagttcactgcctggcccgaccacggggtaccagaataccctactccctttctcgctttcctaagaagagtgaagacatgtaaccctcctgatgcaggtccaatagtggttcactgcagcgctggcgttggacgaacaggttgctttattgtcatagacgcgatgctggaacgcatcaaacccgagaagacagtagatgtgtacggccatgtgaccttaatgcgtagtcaacggaactacatggtccagaccgaggaccaatatagttttatccacgaagccttgctagaagcggtaggctgcggcaatacagaggtacccgctcgttccctttatgcttatattcaaaagttggcccaggtcgaaccaggcgaacatgtcactggtatggagctggagttcaaaaggttagctaacagtaaggcacatacctcacgtttcatttctgcgaacttaccctgcaataagttcaaaaaccggcttgtaaatatcatgccttatgaatccactagagtttgcttgcagccgatccgtggtgttgaaggctccgattacatcaacgcttctttcatcgacggttaccgccaacagaaagcatacattgcaactcagggacccctggccgaaacaaccgaagacttctggcgcatgttatgggaaaacaatagtacaatcgtcgtgatgctcaccaagctcagagaaatgggtcgcgaaaaatgtcaccagtattggccggctgagaggagcgccagatatcagtatttcgtcgtggaccccatggcagagtacaacatgccacaatatatcctgcgcgaatttaaggtgactgacgccagagacggccagagcagaacagtccgccagttccaattcaccgactggcccgaacaaggtgtgccgaagagcggggaggggtttattgatttcatcggacaagtgcacaaaacaaaggagcagttcggacaggacgggcctatttcagtccactgctccgccggagtgggcaggaccggtgtatttattaccctgagcattgtcttggagcgtatgcgctacgagggagtggtagacatctttcagaccgtcaaaatgctgcgcacacaacgcccagcaatggtgcagactgaggatgaatatcagttttgttaccaagccgcactggagtacctaggaagcttcgaccactacgcaacata

SEQ ID NO: 237182 - DNA, 5849 bp, synthetic construct
  misc_feature 1..5849: note = Description of Artificial Sequence: Synthetic coding sequence
  source 1..5849: mol_type = other DNA
atggccccaacctggggcccaggcatggtgtccgtggtaggcccaatgggtttactggtggtgctgctcgtcggtggatgcgcagcggaagagcctcctcgctttattaaagaacccaaagaccagatcggcgtctctggtggcgtggccagcttcgtttgccaggcaaccggagaccccaagccccgagtgacatggaacaaaaaggggaaaaaggtgaactctcaaagattcgagaccatcgagttcgacgaatccgccggagccgttctgcggattcagcctctgaggacaccaagagatgagaacgtgtatgagtgcgtggcccagaacagtgtgggagaaatcaccgtgcacgctaaactgaccgtgctaagggaagaccagcttccatctggttttccgaatattgatatgggaccccagcttaaagtcgtggagcggaccaggaccgccactatgctgtgcgccgctagtgggaaccccgatccagaaatcacatggttcaaggattttctacctgttgacccaagcgcctctaacggcaggattaagcagttgcgcagatccgaaacctttgagtctaccccgatacgcggagcactgcagatcgagagctccgaggagactgaccagggcaaatacgaatgtgtggcaacaaatagcgctggcgtgcggtattcaagtcctgcaaacctatacgttcgggagctgcgggaggtgagacgcgtcgccccaagattcagtatcttgcccatgagtcatgaaatcatgcctgggggtaacgttaacatcacgtgtgttgcagtgggatcacccatgccatacgtgaagtggatgcagggtgccgaggatctgacccctgaggacgatatgcctgtgggaaggaatgttttagagctgacagatgtgaaggacagtgccaattatacgtgcgtggcaatgagcagccttggagtgattgaagccgttgcccagatcactgtcaagagcctgccaaaggctcctgggacaccgatggtgactgaaaacacggccaccagcatcacaataacttgggatagtgggaacccagatcccgtatcctattatgtgatcgaatacaagtccaaatctcaggacggcccttaccagataaaagaagatatcacgactaccaggtactcgataggcggtctgagccccaatagcgaatacgagatttgggtttctgcagttaacagtataggtcaggggcctccctcggagtccgttgtcacccgcactggagaacaggcccctgctagcgcacccaggaatgtacaggccagaatgctctcagcaacgaccatgatcgttcaatgggaggagcccgtggagccaaacggcctgatcagagggtacagagtgtattatacgatggaaccagaacaccctgtgggtaactggcagaagcacaatgtcgatgactctcttttaactaccgtggggtcacttctggaggatgaaacctataccgtacgggtgcttgcatttacaagtgtgggggatgggcctttaagcgatccaatccaggtgaaaacgcaacagggcgtgcccggtcaaccaatgaaccttagggccgaagccaggtccgagacctccatcacactcagctggtccccacccagacaagagtcaattataaagtatgaactgctgtttcgggagggggaccacgggagggaggtcggaagaactttcgacccaaccacaagttatgtcgtggaggatctcaagccgaatacagagtacgcattcaggttagccgctagaagccctcagggactgggcgctttcacccctgtggtaagacagcgaaccctacagtccaagccaagtgctcccccacaggatgttaaatgtgtgtccgttaggtcaacagcaatactggtcagttggaggcctccccctcccgagacgcacaacggcgcactggtgggttattccgttcggtacagacccctgggatcagaggatccagagcccaaagaggtgaacggaatccctcccactaccacacagatcctcctcgaggctcttgagaagtggacccagtatagaataactacagtggcccatacagaggttggacctggcccagaatcctcccccgtcgtggtgcgaacagacgaagatgtgccttctgcacctcctcgaaaggtggaagcggaagctctgaacgccacagctattagggtcctctggcggagcccagcgcctggcagacagcacggccaaataaggggctatcaggtccattacgtacgtatggagggtgccgaagctagagggccaccgcgtattaaagatgtaatgttggcagacgcacagtgggagactgatgatacagctgagtacgagatggtgataaccaatcttcaacctgagaccgcttacagcatcaccgtggcagcgtacaccatgaaaggggacggcgcacggagtaagccaaaggtggttgtgacaaagggggctgttcttggtcgaccgaccctttccgtgcagcaaactccggagggatccctgcttgccagatgggagccaccagctggcaccgctgaggaccaggtgttgggctataggctgcagtttgggagagaagattccactcctctcgccacgctggagttcccaccatccgaagacagatataccgctagcggggtgcacaaaggcgcaacttacgtgtttcgcttggccgctcgctccagaggcggtctgggcgaggaggctgctgaggtgctctcaatacctgaagatacgcctcggggtcatccacagatcctggaagccgcaggaaacgcatctgccggtactgttctgcttcggtggctacccccagttcccgctgagcggaacggcgctattgtcaagtataccgtggcagtgagagaagcgggagccctcgggccagccagagagactgagctccctgccgcagcagagccgggagccgagaatgcgctgaccttacagggcctgaaaccagacacagcatacgatctgcaggtgagggcgcacacaaggcgaggacccggacctttttccccccctgtgcgatatcgcacctttctgcgtgaccaagtttcacccaagaactttaaagtgaaaatgattatgaaaacctccgtgctgttgagttgggagttcccagataactacaacagtccaactccctacaagatacaatataacgggctgacacttgacgtagacggcaggaccacgaagaaacttatcacacatcttaagcctcacacattttataatttcgtgctcactaatcggggtagtagtctggggggactgcagcagactgtgaccgcctggacagctttcaacctgcttaacgggaaaccttctgtggctccaaaaccagatgcagatggttttatcatggtgtatctgcccgatggccaatctccggtcccagtccagtcgtacttcatagttatggtgccattaagaaagtcaagaggcggacagttcctgacgcccctgggatcccccgaggatatggatttagaagagctgatccaggatatttcaagactgcagaggcgatcactgagacatagcaggcaactggaagtgcccaggccgtacatcgctgcacgattcagcgtgcttccaccaacatttcaccccggagaccaaaaacagtacggaggttttgataacaggggtctcgagccaggacaccgatacgtgctgttcgtgctggccgtgttacagaaatctgagcccacctttgcggcatcaccgttcagcgatcctttccagctggacaaccctgatccacaacccattgtcgacggggaggaagggctgatctgggttatcggcccagtgctggcagtggtgtttatcatttgtatagtgatcgccatcctcctgtataagaaaaaaccccacagcaagcggaaagattccgaacccaggactaagtgtttgctcaataacgcagatctcgccccacaccatcccaaagatcctgttgaaatgaggcgaattaatttccagaccccagactccggactgagaagcccccttagggaacccggattccactttgagagcatgcttagtcacccacccatccctatcgccgacatggccgagcacactgaacggctcaaggcaaatgacagcctgaagctcagccaggaatatgaatccatcgaccccggtcagcagttcacatgggaacactcaaatctggaggttaacaagcctaaaaaccgatatgcaaatgtaattgcctacgatcactctcgcgtgatcttacagccaatcgagggcatcatgggttcagactacataaatgccaactacgtcgatggctatcgctgtcagaatgcatacatagcaacccaaggaccgctccctgaaactttcggggatttttggaggatggtttgggagcagcgatcggctacaatcgttatgatgacaagactggaggagaagtcccgaataaagtgtgatcaatactggcctaatcgcggtactgagacatacgggttcatccaggttacactgctggatactatcgaactggccactttctgcgttagaacattcagtctgcataaaaatggttcctccgagaaacgtgaggtacggcaatttcagtttactgcctggccggaccatggggtgcctgagtacccaactcccttccttgcatttcttaggcgagtgaaaacatgtaacccacccgacgcaggtcccatcgtcgtccattgtagcgcaggggtggggcgtaccggctgtttcattgtgatcgacgccatgctggaaagaatcaaacctgagaagacggtagatgtgtatggtcatgtaacgcttatgcgatcacaacgcaattatatggtgcaaacagaagaccagtactcttttatccacgaagcccttctagaggctgtgggatgtggcaatactgaggtccccgctcgctcactgtacgcctatatccagaaacttgcacaggtggagcctggcgaacatgtgacaggaatggagctggagtttaagaggttggcgaactccaaggctcatacgtccaggtttatttccgccaacctcccttgtaataagtttaaaaaccgccttgtgaacatcatgccctacgaatcgaccagagtgtgtctccagccaatccgaggagtggagggatctgattacatcaatgcctccttcatcgatgggtaccgacagcagaaagcgtatatcgcgactcagggccctttggccgagaccaccgaagacttttggcgaatgttgtgggaaaacaactctacaatcgtcgttatgttgactaagttgcgagaaatgggtcgagaaaaatgccaccagtattggcccgcagaacggtccgcacgctaccagtacttcgtagtcgacccaatggccgaatacaatatgccgcaatacatcctgcgtgaatttaaggtgaccgatgccagggacggtcagagcaggaccgttaggcagttccagttcactgattggcccgagcagggtgtccctaagagcggagaaggatttattgattttattggccaagtgcataaaacaaaagaacagttcggccaggacggcccaatttccgtccactgtagtgccggagtgggccgtactggcgtgtttataacgctcagtatcgtgcttgagcgcatgaggtacgaaggagtggtggacatcttccagaccgttaagatgctccgaacacagaggcccgctatggtgcagacagaggacgaataccaattctgctaccaggctgccctggagtacttggggtcatttgatcactacgcgacata

SEQ ID NO: 237183 - DNA, 4683 bp, synthetic construct
  misc_feature 1..4683: note = Description of Artificial Sequence: Synthetic coding sequence
  source 1..4683: mol_type = other DNA
cgcagcgcgagaggcctgagtgtcagagaccgaggtgccatcccacttcaaggaggggacaggaggtccttaccttccatggctccaacatgggggcctggcatggtgtctgtggtgggaccaatgggcctgcttgttgttctccttgtgggtggttgtgcggcagaagagcctccacgctttattaaggagcccaaagatcagatcggcgtctcagggggtgtggcctcatttgtgtgtcaggctactggcgaccccaaaccaagggtaacctggaacaagaagggcaagaaggtgaattctcagcgttttgagaccatcgaatttgacgagtctgcaggggctgtgttgcgtatccagccacttagaaccccccgagatgaaaatgtttatgagtgtgtggcccagaattctgttggcgagataacagtgcacgctaaacttacggtactgagagaggatcagctccccagtgggttcccaaacattgacatgggtccccaactcaaagtggttgagcgcacgaggaccgcgacgatgttgtgtgctgccagtggaaatccggatccagaaattacctggttcaaagattttcttcctgtcgatccttctgcaagtaacggcagaattaagcagctccgctcaggggctctgcagattgagtcatccgaggagacagaccagggaaagtatgagtgcgtcgccacgaattccgccggtgtgaggtactccagccctgcaaatctgtatgtgagggtacgcagagtggccccaaggttctctattctccccatgtcacacgagatcatgcctggaggaaatgtcaatattacttgcgtagccgtagggagtccaatgccctatgtgaagtggatgcaaggtgcagaggatctcactccagaggatgatatgcctgtgggcagaaatgtgcttgagttgacggacgtgaaggatagcgccaattatacatgcgtggccatgagtagtctcggggtgatcgaggccgtggctcagatcactgtgaagtctttacctaaagccccaggaaccccaatggtgacagagaatacagccacatctattaccattacatgggactccggtaatcctgaccccgtctcttattacgttatagagtacaagagtaagtcgcaagacggaccttatcagataaaggaggatatcaccactacacggtactcgattgggggactcagccccaatagcgagtatgagatctgggtatcagccgtcaattccataggtcagggccctccgtcggaatccgtggtgacccgtactggggagcaagcccctgcttccgccccaagaaacgttcaggccaggatgctcagcgccacgacaatgatagtacagtgggaagaacccgttgaacccaatggcctgattagaggatatagggtgtactataccatggagcctgagcaccctgttgggaactggcaaaagcacaatgtcgacgactctctcctgacaacagtaggttcattactcgaggacgagacgtacacggttcgagtgctcgcctttaccagcgtgggcgatggcccattgagtgaccctatacaggtcaagacccagcagggtgttccaggccagccgatgaacctgagagctgaagctagaagtgagacgagtatcactttgtcctggtctccgcctcgccaagagtccatcattaaatacgagcttttgtttcgtgagggcgatcatggcagagaagtggggaggacttttgaccccactacaagctatgtggttgaggatctaaagccgaatactgagtatgcattccgtttggccgctcgtagccctcagggcctgggagcattcactccagtcgtgaggcagagaactctccaaagcatttccccaaagaatttcaaagtcaagatgatcatgaaaaccagcgtcctactgagctgggagttccctgacaactataactctcctacaccctacaagattcagtataacggcctcacactcgatgtagacgggagaactactaagaagttgattacccacttgaaacctcacaccttctataactttgtcctaactaataggggcagttcgctcggcggactgcagcagacagtgacagcatggaccgcctttaatctgctcaatggcaagccgtccgttgcacctaagccagatgctgacggctttatcatggtgtatttgccggacgggcagagccccgttccggtgcagagttacttcatcgtgatggttccactcaggaagagcaggggtggccagtttctgacgcccctcggaagcccagaagatatggatctggaggagctaatacaggacatctccaggctgcagaggcgctctttgcggcatagtcggcagttggaggtgccacgcccatacattgctgctaggttttcggtgctgccacccacatttcacccgggagatcaaaagcagtacgggggtttcgataaccgcggtctcgagcctgggcataggtacgtgctatttgtgctggctgtgttgcagaaaagcgagcccacgtttgctgccagccctttcagtgatccttttcaattggataaccctgatccacagcccatcgtagatggcgaggagggactaatctgggttatcggtccagtactggccgtcgttttcatcatctgtatcgtcatcgccattttactctataaaaacaaaccagactcaaagcggaaggacagcgagcctcggactaaatgcctgcttaataatgctgacctcgctcctcatcaccccaaggatccagtggagatgcgaaggatcaattttcaaacccctgacagcggattaaggagcccactaagagagcctggttttcactttgaaagtatgctcagccaccctccaattcccatcgccgatatggcagaacacacagagaggttgaaagcgaacgatagcctgaagctgagccaagagtacgaaagcattgacccaggccagcagttcacttgggagcactcaaatcttgaagtgaacaagcccaagaaccggtacgccaacgtgatcgcttacgaccacagcagagtaatcctccagcccattgagggaatcatgggcagtgactatattaacgctaattacgttgacggttaccgctgtcaaaatgcgtacattgccacacaaggacccctgccggagacctttggagacttttggaggatggtctgggagcagcgtagcgctaccatagttatgatgacgcggctggaagagaaaagtcggattaaatgcgatcagtattggccgaaccgtggtaccgaaacatatggttttattcaagtgactcttctggacacaattgagctagcaacattctgtgtgaggacgttttccttacacaagaatggctcatccgagaagcgcgaggtacgtcaatttcaatttaccgcatggccagatcatggagtccccgaatatcccacgcccttcctggcctttcttaggagagtgaagacctgcaatccgccagacgcaggtcccattgtggtacattgcagtgcaggtgtagggagaactggttgttttatagtcatcgacgctatgcttgaacgcattaaacccgagaaaaccgtagacgtgtatgggcatgttacactgatgcggagccaaaggaattatatggtacagactgaggatcaatactccttcatccacgaagcacttttggaggccgtgggatgtggaaatacagaggtgccagctcgatcactttacgcctacatccagaagttggcccaggtggagccgggtgagcacgtgaccgggatggaattagagtttaagaggttagccaatagtaaggcgcacacctctcgctttatcagcgctaatctgccatgcaataagtttaagaacaggctagtgaatatcatgccctatgagtcaaccagggtttgcctgcaacctattaggggcgtggagggtagtgactatattaatgcttcgttcatagatggctatcgccaacagaaggcttacattgcgactcaggggcctctggctgagacgactgaggatttctggagaatgctgtgggaaaataattcaacaatcgtggtgatgctcactaaactgagagaaatgggcagggagaagtgccaccagtactggcccgcagaaaggtctgccaggtaccagtactttgtcgtcgaccccatggccgagtacaacatgcctcaatacatcttaagggagtttaaagtcactgacgccagggacgggcagtcccgaaccgtgaggcaatttcagtttacagactggcctgagcagggtgtgccaaaatccggcgagggtttcatcgactttattggtcaggtgcataagactaaggagcagtttggccaggatggccctattagcgtacattgctcagccggagtgggcagaaccggcgtgttcatcaccctgtccattgtcctggagagaatgaggtacgagggggtcgtggatatttttcagacagtcaagatgctgaggacccagcgcccagccatggttcagaccgagaccgagtctaggccagggtggagtgcagtcgcccaaagccggctgaccgcctcgtctgcgtcctggatccatgctattctgctcccccagccccctgaatggttgggtcttcaggtgtag

SEQ ID NO: 237184 - DNA, 4518 bp, synthetic construct
  misc_feature 1..4518: note = Description of Artificial Sequence: Synthetic coding sequence
  source 1..4518: mol_type = other DNA
atggctcccacttggggccctggcatggtaagcgtggtaggtcccatggggttacttgtggttctgctcgtcggcggttgcgctgctgaagagcctcctcgctttatcaaggagcccaaggaccagattggcgtatccggtggagtagcttcctttgtgtgccaggctacaggcgaccccaagcctagagtcacttggaataagaagggaaagaaggttaattcacaacgctttgagactatcgagtttgatgagtctgccggtgccgtcttgaggattcagccattgagaactccaagggatgagaacgtgtacgagtgcgtagctcagaactcagtgggagagatcaccgtgcacgccaagctcactgttcttcgagaggaccagctccccagtggtttccccaacattgacatgggcccacagttgaaggtcgtggagcgtactagaacggcgactatgctctgcgccgcttccggtaatccggatcccgaaatcacttggtttaaggatttcctacctgtcgatccctccgccagtaacggccgaataaagcagctgaggtcaggcgcattgcagatcgaaagttcagaggagacagaccagggaaagtacgagtgtgtggctactaactcagctggtgtcaggtatagcagtccagcgaacttatacgtgcgcgcactgagggaagtccgccgtgtggcaccgagattctctattttgcccatgagtcacgagatcatgcctgggggtaacgtgaacatcacctgcgtagccgtgggctctcccatgccctacgtgaaatggatgcagggggctgaggatctgactccagaggatgacatgccggttggcagaaatgtgctcgaactaactgatgtgaaggactctgcaaattacacctgcgttgccatgtccagcctgggtgtcatcgaggccgtggcccaaatcactgtgaagagtttgcccaaggcacctggaacgcctatggttacggagaacacagcaacaagtatcacaattacctgggatagcggcaaccccgaccccgtttcatattatgttatcgagtacaaaagtaaatcccaggatggcccataccaaataaaggaagacattacgactacccgctactccattggaggtctcagcccaaactcagaatacgagatctgggtgagcgccgtcaactcaatcgggcaggggcctccctcggaatccgtggtaacccggacaggtgagcaggcaccggcatccgctccaagaaacgtgcaggctcgaatgttaagtgccaccaccatgatcgtgcagtgggaggaacccgtggaaccaaatgggctcatccggggatatagggtctattataccatggagccagagcatcctgtaggcaactggcagaagcacaacgtggacgacagtctgctaacaaccgtggggagtctccttgaggatgagacatatacagttcgggttctcgcgttcacgtccgtgggagatggccctctcagcgacccaatccaggtgaaaacccagcagggagtcccagggcagccaatgaacttaagggccgaagcgagaagtgaaacctccatcactctaagctggagtcctccccgacaggagtctattatcaagtacgaattgctgtttagagagggggaccatgggcgagaagtcggtcggaccttcgatcccactacgtcttacgttgtggaagacctcaaacctaacaccgaatacgcgtttagattagccgctaggtctccccagggtctgggggctttcactcccgtagttagacagaggacgttacagagtataagcccaaaaaacttcaaggtcaagatgattatgaaaacctcagtcttgctgtcctgggaatttcccgataactataattcgccgacaccttacaagatacaatacaacggcttgactcttgacgtggacgggcgaacgaccaaaaagctcattacgcacctgaaaccccacacattttataacttcgtcttgactaataggggcagttctctgggcggactccagcagaccgtgactgcttggacagcctttaatctcctgaacggcaagccaagcgtcgcccctaaacctgatgctgatggctttatcatggtgtacctgcccgacggacagagtcccgtccccgtacagtcctattttattgtcatggtccctctgcggaagagcaggggcggacaattcctcacacctctcgggagtcctgaggacatggatctggaggaactgatacaggacatctcgaggcttcagcgcagaagcctgcgccactcccgtcagctggaagtgcctcggccatatatcgcagccaggtttagtgtgctgccacccacttttcaccctggcgatcagaagcaatatggtgggttcgacaataggggcctggagcccggacacaggtacgtgctctttgtgctggccgtattgcagaagagcgaacctacctttgccgcatcccctttcagtgatccttttcagctcgacaaccctgatcctcaacccatcgtcgatggagaagaaggccttatatgggtcatcgggccagtgctcgcagttgtgttcattatctgcattgtaatcgccatccttctctacaaaaacaagccagatagcaagaggaaggatagcgaacctagaacgaaatgcttgctgaataacgccgatctggcaccccatcaccctaaggaccccgttgaaatgagacgtattaattttcagacacccggaatgcttagtcatcctcctataccaatcgcggacatggccgagcatactgagcgactaaaggctaacgactccctcaagctgtcccaggagtatgaatctatcgatcccggtcagcagttcacatgggagcatagcaatctggaggtaaataagcccaagaatagatatgctaacgtgatcgcgtatgatcacagcagagtaattctgcagcctattgaggggatcatggggtctgactacataaatgccaactatgtcgacggctacaggtgtcaaaatgcctacatcgccacccagggccctcttccagaaaccttcggagacttctggagaatggtctgggaacagcgatccgccacaatagtgatgatgaccaggctagaagaaaaaagtcggattaagtgcgatcagtattggccaaaccgcggtaccgaaacctatggcttcattcaggtgacccttctggacaccatagaactggctaccttttgcgttcggacattttccctgcacaaaaacgggtcgtctgaaaagcgtgaagtcagacagttccagttcactgcctggcccgaccacggcgtgcctgaatatccaacgcccttcttggcctttctgcgtagggtgaagacttgcaatccccctgacgccggaccgattgtcgtccactgtagcgctggggttggcagaaccggctgtttcatcgttatcgacgctatgctggaaagaatcaagccagaaaagaccgtggacgtttatgggcacgttacgctaatgcgctcacaacgcaattacatggtacagaccgaggaccagtactcttttatccatgaggccctgcttgaagctgtggggtgcggtaacacagaagtgccagctcggtctctttatgcatatattcaaaagttagcacaagtggaaccaggcgaacatgtcacagggatggagctggaattcaagcgactcgccaattccaaggcccacacttcccgttttatcagtgcaaacctcccgtgcaacaaattcaaaaacagacttgttaatatcatgccttatgaatccacaagggtttgcctgcagcctataaggggggtcgagggctctgactatattaacgctagtttcatcgatggataccggcagcaaaaggcctatattgccactcagggtcctcttgcagagaccacagaggacttctggcggatgctatgggagaacaactccacaatcgtggtgatgctgacaaagctccgggagatgggccgtgagaaatgtcatcaatactggcctgcagaacgctcagctcggtaccagtactttgtcgttgaccccatggcggagtataacatgcctcagtacattctccgcgagttcaaagtgaccgacgctcgagacggccagtctaggaccgtgcgccagttccaattcacggattggcctgagcagggagtgccaaaaagcggtgagggattcatcgactttattggtcaagtccacaaaacgaaagaacagtttgggcaggacggacctatttccgtgcactgttcagcgggagtgggacgcacaggggtcttcattacactgtccatcgttctggagagaatgcggtatgagggcgtggtagatatcttccagaccgtgaaaatgctgcgcacacagaggcccgcaatggtgcagaccgaggacgaatatcagttctgctaccaggctgctctcgaatacttgggctcatttgatcattacgccacctag

SEQ ID NO: 237185 - DNA, 4329 bp, synthetic construct
  misc_feature 1..4329: note = Description of Artificial Sequence: Synthetic coding sequence
  source 1..4329: mol_type = other DNA
atggctcgggctcaagcgctggtcctcgctctgacatttcagttgtgcgccccagagacagagacccctgcagctgggtgcaccttcgaggaggccagcgatccagcagtgccatgcgagtactcccaggcccagtacgacgactttcagtgggagcaggtcaggatccacccaggtacacgtgccccagcagacctcccccacggttcctacctgatggtcaacactagccagcatgcgccagggcagagagcccacgtcatatttcagagcctgagtgaaaatgacactcactgtgtgcagttttcgtactttctctactctagagacgggcactcacccggtacattgggggtgtatgtgagagtgaacggaggacccttggggagtgccgtgtggaatatgaccgggtcccacggtagacagtggcaccaggcagagctggctgttagcaccttttggccgaacgaatatcaggttctgttcgaggccctgatcagccctgatcgacgcggatatatggggctggatgatatccttctcctgtcttatccctgtgctaaagcgccacatttttcacgactcggagacgttgaagtcaacgcaggtcaaaacgcctccttccagtgtatggccgctggacgagccgcagaggctgaaagatttctgcttcaacggcagagtggggcactggtgccggctgccggagtccgccatatatcacatagacggtttctcgcaacatttcccctggcagcggtgtcccgggctgagcaggacctctacagatgcgtctcccaggcgccacgaggcgctggtgttagcaattttgcagagctgatcgtgaaagagccaccaacccccattgctccaccacaactactgagagccggtcccacctatcttatcattcaattaaacacgaacagcattatcggggatggcccaatcgtgaggaaagaaatcgagtacagaatggctagaggaccttgggctgaagtgcacgcggtgtctctccagacttataagctgtggcatctcgatcccgacacagagtatgaaatatcggtgctgcttacgcgtccaggagatgggggaaccggtcggcctggacctccactgatctctcgcacaaagtgcgccgagcccatgcgtgcccctaaggggctcgcctttgccgagattcaggcccgacagctcaccctgcagtgggagccccttggatataacgtcacaagatgtcacacttatactgttagtctgtgctatcattatactttgggatctagccataatcagaccattcgagaatgtgtgaagaccgagcagggcgtgtccagatataccatcaaaaatctgctcccgtacaggaacgtccatgtaaggcttgtgttaaccaatccggaggggcgaaaagaggggaaggaggttacgttccaaaccgacgaggatgtaccctcaggtatagcagctgagtccctgacgttcactcctctggaagacatgatcttcctaaagtgggaggaaccccaggaaccaaacggactcatcacacagtatgagatttcttatcaaagcattgaaagttccgatccggctgtgaacgtgccaggtcctagacggactatcagcaagctaaggaacgagacctaccacgtgttcagtaatctccaccctggcacaacctacctcttcagcgtccgagctcgcaccggtaaggggttcggccaggccgctcttacagagataacaacaaacatttccgctccttcatttgactatgctgacatgcccagccctctgggcgaatccgaaaataccattacagtgctgctacgcccagcccagggacgcggagcacctattagtgtataccaggtcattgtcgaggaagaaagagctcgtagattgcgcagagaaccaggtggccaggactgctttcctgtgcctctgaccttcgaggccgcacttgctagggggcttgtgcactacttcggggcagaattggctgcgtcatctttgccagaggccatgccctttaccgtgggcgacaaccagacttacagaggtttctggaatcctccactcgagcctcggaaagcctacctgatatattttcaggctgcatcacacctaaagggtgagacacggctcaactgcatacgaattgctaggaaggccgcttgcaaagagtctaaaaggccgttggaggtgtcacagcggagtgaagaaatgggccttattctcgggatctgcgcaggcggactcgccgttctgatcttacttctgggtgctatcatagtgataatccgcaagggcaaaccagtgaatatgacaaaggccactgtaaattataggcaagaaaagacgcacatgatgtcagctgtagatcgaagctttaccgatcaatctactctacaggaagacgaacgcttggggctatcattcatggacactcatggatactcaaccagaggagatcaaagatctgggggagttacggaggcaagctctctgctcggaggatctcctcggcgaccatgcggaaggaaaggatctccatatcacacagggcagctccacccagcagtcagagtcgctgacctcctgcagcatatcaaccagatgaagactgcagagggctatggttttaagcaggaatacgagtcgtttttcgaggggtgggacgcgactaaaaaaaaggacaaggttaaaggcagccgacaggagccaatgccggcatacgatcgccacagggtgaagctgcatcctatgctcggtgaccctaacgcagactacatcaacgcaaactacatcgacctgcgaggtggcaggactggataccaccgttcgaatcattttatcgcaactcaagggcctaagcccgaaatggtctacgacttctggagaatggtgtggcaggagcattgctcttctatcgtcatgattactaaactcgtcgaagtgggccgtgtaaaatgtagtcggtactggcccgaagactctgatacctacggtgatattaagattatgcttgtcaaaacggagacactcgcggagtatgttgtgaggacctttgcacttgaaaggcgcggttacagcgcacgtcacgaagttcgccagttccatttcacggcctggcctgaacatggtgttccctatcacgctactggacttctggcattcattagacgggtgaaggcaagcactccgccagacgctggacccattgtaatccactgttccgcgggaaccggcaggacgggttgttacatcgttctagacgtgatgttggatatggccgaatgcgagggcgtcgttgatatctacaactgtgtcaagaccctgtgctcacgtcgcgtcaacatgatacagactgaagaacagtacattttcatccacgacgcaatcttagaggcttgcctctgtggtgaaacgaccattcctgtgagtgagttcaaggctacctataaagaaatgatccggatagacccacagtccaactcctctcagctaagagaggagtttcaaacgctcaactccgtcacaccgcctttagacgtggaagagtgtagtattgcgctgttacctcggaatagagacaagaatagatccatggatgttctgccacccgatcgttgcctccccttccttataagcaccgatggcgactccaataactatattaatgccgcactgacagacagttacacccgcagcgccgcatttatcgttaccctgcaccccctccagagtaccacaccggacttctggcgtctagtgtacgattacggctgtacgagcatcgtgatgctcaaccagctgaaccagtccaactcagcatggccctgcctccagtactggcctgagcccggacgccagcaatacggtctgatggaagtggaatttatgtccgggactgcggacgaagatctagtcgcccgagtcttcagagtccagaatatctctaggctccaagaaggacacctgctggtgcgccacttccagttccttaggtggtcagcttatagagatactcctgatagcaagaaagcgttcctgcatctgctcgccgaagtagataaatggcaggccgaaagtggcgatggacgcacaatcgtacattgcctgaatggcggaggaagatcaggcactttctgcgcctgcgccacggtgctagagatgattagatgtcacaacctggtggatgtgtttttcgccgctaaaaccttgagaaactataagccgaacatggttgagacaatggatcagtatcacttttgttacgatgtcgccctcgagtacttagaaggactagaatcccgatag

SEQ ID NO: 237186 - DNA, 4341 bp, synthetic construct
  misc_feature 1..4341: note = Description of Artificial Sequence: Synthetic coding sequence
  source 1..4341: mol_type = other DNA
atggcaagggcacaggctctagtgctcgcactaacttttcagctgtgtgccccagaaacggaaacccctgcggctggttgcaccttcgaggaggcttcagacccggctgtaccctgtgaatactctcaggctcagtacgatgacttccagtgggagcaggttcgaattcaccctgggacaagggctcccgctgaccttccacacggatcctatctgatggtcaataccagccagcatgcccctggacagcgagcccacgtgatattccagtctctgagcgaaaatgacacccactgtgtacaattcagctattttctatattccagagacgggcacagccccggtacgttgggagtttacgtgcgggtcaatggtgggccactgggttctgctgtgtggaacatgactggatctcacggcagacagtggcatcaggcagagctggcggtgtctactttctggccgaatgagtaccaggtcctgttcgaagctctcatcagtcccgatcggagaggctatatgggcctggatgatatcctgctgctttcctatccctgtgctaaagcaccccatttctcccgccttggtgatgttgaggttaacgcaggccagaacgctagcttccagtgtatggcagccggtagggctgccgaggccgaaaggttcctacttcagaggcagtccggtgccctagtaccagccgcaggagtgagacacatttctcatcgtcggtttctcgccaccttccctctcgccgcagtgagccgagccgagcaggatttatatagatgtgtgtcacaagctcctagaggtgctggagtgagcaacttcgccgagttgatcgtgaaggagccacctacacccatcgcacccccacagctcctgcgggcaggccctacttatctgatcatacagctcaatactaattctataattggggatggtccaatagtgcgtaaggaaattgaatacaggatggccagaggtccgtgggcagaggttcacgcggtttctctgcaaacatataagctttggcatctcgacccagataccgaatacgaaatctcagttttgctgactcggcctggagatgggggaactggccgtcctggccctcctcttatcagtcgtaccaaatgtgccgaacctatgcgtgcgccaaaggggctggcattcgcagagattcaagctcggcaacttacgttacagtgggagccgctagggtataacgtgacacgctgtcacacttacaccgtgtcgctgtgttaccattacacgctgggttctagtcataaccagaccatacgggagtgcgtgaagactgagcaaggtgtctctaggtataccattaaaaaccttctaccttaccgcaacgtgcatgtgcgccttgttttgacaaatcccgaaggacggaaggaaggaaaagaggtaaccttccagaccgatgaagatgtcccatccggcatcgcagcagagtctctcacttttaccccactggaagatatgattttcctgaaatgggaggaaccgcaggagcctaacggattgatcacccagtatgagatcagctatcagagcatcgagagcagcgaccctgctgttaacgtgccaggtcccagacgcacgattagtaagctgagaaatgagacataccacgtgttttctaacctgcaccctggcactacatacctcttttcagtgcgggctaggacaggaaaggggtttggacaggccgctctgacggagattaccactaatatctccgcaccctccttcgactatgcagatatgccttcccctctcggagagagcgagaataccatcaccgtgttgctgaggccggctcagggcagaggtgccccaatctctgtctaccaggtgattgtggaggaggaacgggctcgtagactgcgacgggaacctggcggacaagattgtttccctgtccctctgacattcgaggccgcattagccagaggcctggtccattatttcggagcggagctggccgcttccagtctgccagaagccatgccattcactgtcggcgacaatcagacgtataggggcttttggaacccccctctggaacccagaaaggcatatctaatttacttccaggctgccagtcatctcaagggcgagactcgattgaactgtattagaattgctcgtaaggctgcttgcaaggagtcaaagaggccgttggaagtctcacagcgcagtgaggagatgggcctcatcctcggtatctgcgcgggtggccttgcagtgttgatcctgctgttgggcgctattatcgtgattatccgaaaaggcagagaccactatgcatatagctactatccgaagccggttaacatgaccaaagctaccgtcaactatcgccaggagaaaacacacatgatgtcagccgttgaccggagtttcacggatcaaagcactcttcaagaggacgaaaggctcggtctttccttcatggacacacacggctattcaacgcggggagaccaaagatccggcggagtgacagaagccagttctctattaggcggttctccccgtaggccctgtgggagaaaaggcagcccttatcatacgggccagctgcatcctgcagtgagggtcgctgatctcctgcaacacattaaccagatgaagaccgccgaaggatacgggttcaagcaggaatatgaatccttctttgaagggtgggatgcgacaaaaaagaaggataaagttaagggatcacgacaggaacccatgcccgcttatgatcggcacagagtgaaattgcacccaatgctgggcgacccaaatgctgactacatcaacgcaaactatattgatgggtaccacaggtctaaccacttcatcgccacccaaggtcccaaaccagagatggtatatgacttctggaggatggtgtggcaagaacattgtagcagcatcgtgatgattaccaagctggtggaggttggtcgggtgaaatgctcgagatattggccggaggattcagacacctacggagatataaaaattatgctcgtgaagaccgaaacactagcagaatatgtggtgaggacattcgctctggaaagacggggatattccgcacggcacgaggtgaggcagttccacttcactgcttggcccgaacacggtgtgccttaccacgccactggcttgctggccttcattagaagggtgaaagcgtctactccgccagacgcaggaccgatcgtgattcactgtagcgccggaacaggaaggaccggatgttatatcgtgcttgacgtgatgctggacatggctgaatgtgaaggagtagtggatatatataattgcgtgaagactttatgctccagaagagtcaacatgatccaaactgaggagcagtatatttttatccatgatgccattctcgaagcatgtctttgcggagaaacgaccattcctgtgagtgagttcaaggcgacttataaggagatgattaggattgaccctcagtctaactcttctcaactacgcgaggagtttcagaccctgaatagcgtcacaccccctctagatgtcgaggagtgttctatagccctcttacccagaaatagggataagaaccggagtatggacgtgctgccacccgatcgatgccttccattcctcatctctaccgatggggattccaacaactatattaatgcagctctaacagactcatatacacggtccgccgcattcatcgtgacgttgcatcctctgcaatctactactcccgacttttggaggctggtttacgattacggctgcacttcaatcgtcatgctcaaccagctgaaccaaagcaacagcgcctggccatgtctgcagtactggccggagcctggcagacaacagtatgggttgatggaagtcgagtttatgtctggaaccgctgacgaggatctggtggcgcgtgtgtttcgggttcagaacataagccgccttcaagaagggcacctgctcgtaagacatttccagtttttgaggtggagcgcttaccgcgacactccagactccaaaaaagcattcttgcatctactggccgaagtagacaagtggcaggctgagagtggcgatgggagaaccattgtgcactgccttaacggcggaggcaggtccggcaccttctgtgcttgcgcaaccgtgcttgagatgattcgctgtcataatttggtagacgttttttttgcagccaagaccctgagaaattataaacccaatatggttgaaactatggaccagtatcatttttgttatgatgttgctctggaatacttggagggattagagtctcggtag

SEQ ID NO: 237187 - DNA, 4329 bp, synthetic construct
  misc_feature 1..4329: note = Description of Artificial Sequence: Synthetic coding sequence
  source 1..4329: mol_type = other DNA
atggcgagggctcaggccctggtgcttgctctcacttttcaactgtgtgccccagagactgaaaccccggcagcaggatgtactttcgaggaggcgagtgatcccgctgtgccctgcgagtattcgcaggctcagtatgatgactttcagtgggaacaggtcaggatacaccctggcacccgggcacctgccgacctcccccacggttcttatcttatggtcaatactagccagcacgctcctggtcagcgggcacacgtgatttttcaatccttatcagaaaacgacactcactgcgtccagtttagttattttctgtactctagagacggtcacagccctggcacactgggtgtctacgtccgggtgaacgggggaccattggggagcgcagtctggaatatgacgggctcccacggacgacagtggcaccaggctgagctggctgtatcaaccttctggcctaacgagtatcaggtgctctttgaggcactaatttctcccgatcgaagagggtacatggggttagacgacatcctactattaagctatccatgcgccaaagccccacattttagccgcctcggagatgtggaagtgaacgccggacagaatgcttcctttcagtgcatggccgcaggacgtgccgcagaagctgagagatttttgctccagagacagagcggggcactcgtgccagccgctggtgtgcgacatatctcgcaccgtcggtttctggcaacctttcctcttgctgcagtgagtcgggcagagcaagatctgtaccgctgcgtttcgcaggcgccacggggtgccggagtgagtaactttgcagaattaattgtcaaggagcctccgaccccaatcgctccaccccagctcctgagagccggtccgacctacctgatcatccagcttaataccaactccattatcggggatggtcccattgtgcggaaggagattgaatatagaatggctcgcggaccttgggccgaagtgcacgcagtcagccttcagacttacaagctctggcatcttgatcccgacaccgagtatgaaattagtgtgttgttaactaggcctggcgacggagggacagggaggcccggacctccattaatcagcagaaccaagtgcgctgagcctatgagggcccctaagggactggcttttgctgaaattcaggccagacaactgaccctgcagtgggaaccgttgggatataacgtaacaagatgtcatacctacactgtctcactgtgttatcattacacccttggtagcagccataaccagactataagggaatgcgtgaagacggagcaaggcgtgagcaggtatactatcaagaatttgctgccttaccgcaatgtgcacgtgagattggttctgaccaatcccgaggggagaaaagagggcaaagaagtgacttttcagaccgatgaggatgtccccagcggcatcgccgcagagagtcttacttttactcccttagaggacatgatcttccttaagtgggaagagccccaagagcctaatggacttataacccagtacgagatctcgtaccagagtatcgagagttcagacccagctgtgaacgtgcctgggccacgcaggacaatttccaaactccgcaatgagacctaccatgtcttttccaatttacaccctggcactacgtatctattctccgtcagggctaggaccggaaagggattcggacaagctgccctgactgaaatcacaacaaatatctcggcaccgagttttgattacgctgatatgccgagcccgctgggggagtccgagaacaccatcacagtcctactacggccagcccagggccgaggcgcacccattagcgtctatcaagtcattgtggaggaagagcgggctcgcaggctgagacgggagccgggaggccaagactgcttcccagtgccactgacctttgaggcagccttggctcgaggactggtgcattacttcggggcagagctcgcagcctcctcgctacctgaggccatgccatttacggttggtgataatcagacatacaggggtttttggaacccaccactggagcccagaaaagcatatctcatctatttccaggctgcatcacacctgaagggtgagacgaggctgaactgcattaggatcgcaaggaaagctgcctgtaaagagtcaaagagacccctggaagtgagccagcgatctgaggagatgggcctaattcttggtatttgtgccggtggcttagccgtgctgatcctgctgctgggcgcaatcatcgttatcataagaaaagggaagccggtaaacatgactaaagcgactgtgaactaccggcaagagaagactcacatgatgagcgcagtagaccgttcttttaccgaccaaagtacgctgcaggaggatgagcggttgggtttaagtttcatggacacccatggatattccacaagaggtgatcaacgcagcgggggagtcactgaggcgtcatcgctgcttggcggttcaccaaggcgaccttgcggcagaaaggggtcgccttaccacacggggcagctacaccccgcagtacgggtagccgacttgttgcagcacattaatcagatgaagacagcagaaggctatggattcaagcaggagtatgaatcgttttttgagggctgggacgccactaagaaaaaggacaaagtgaaaggcagtcgccaggaaccgatgcctgcatacgacaggcatcgagtgaagctgcacccaatgctcggagacccgaacgccgattacatcaatgccaactacatcgacatccgcattaacagggaaggttaccacagaagcaaccactttatagcaacccaggggcctaaacccgagatggtttacgacttttggaggatggtctggcaggaacactgctctagtatcgtcatgatcacgaagcttgtggaagtgggacgggtgaagtgcagcagatattggccagaggacagcgatacctatggggacattaaaattatgctcgtgaagaccgagacattggctgagtatgtggtgcgaacctttgctctggagcggcgaggctacagtgccagacatgaggtgcggcagttccactttaccgcctggccagaacatggcgtgccataccacgcaacagggcttttggcatttataaggagagtgaaagcctcgacgccccctgacgcagggcctattgtgattcactgcagcgcgggtactggacgcactggatgttatattgttcttgacgtcatgctggacatggccgaatgtgagggcgtagtggatatatataattgcgtcaagacactgtgtagccgcagagttaatatgatccagacagaggagcagtatatctttattcatgacgctatcctagaagcctgcctatgcggggagactaccattccagtcagtgagtttaaggctacatataaagaaatgatccgaatcgatccacagagcaactcctctcagctcagagaagagttccagacactgaactccgtgacgccccctctcgatgttgaggaatgtagtattgccctgttaccccgtaatcgcgataaaaaccgatctatggatgttttacctcccgataggtgtctgccattcctgatttctaccgacggagattcgaataactacatcaatgctgcactgactgactcatatacacgtagcgccgcatttatagtgacactgcatcctctgcagtctaccacccctgatttctggagattagtgtacgactacggatgtacgtcgatcgtgatgcttaatcaacttaatcagagtaacagcgcttggccatgcctccagtactggcccgaaccgggtcggcagcagtacggcctcatggaggttgagtttatgtccgggacagccgatgaggacctcgttgcacgagtttttcgcgttcaaaacatctctcggctccaagaaggacacctgctcgtgcgccactttcagtttctgaggtggagcgcctaccgggacactccggattctaagaaggcattcctgcacctgcttgctgaggtcgacaaatggcaagccgagtctggagacggtcgtacgattgtccactgtctgaatgggggtgggagaagtggcactttttgcgcctgcgctactgtgttggagatgattcggtgccataacctggtggacgtttttttcgccgcaaagactttgcggaattataagcctaatatggtagagacaatggaccagtatcacttctgttacgacgtggctcttgagtacctggaagggctcgaatcgagatag

SEQ ID NO: 237188 - DNA, 4311 bp, synthetic construct
  misc_feature 1..4311: note = Description of Artificial Sequence: Synthetic coding sequence
  source 1..4311: mol_type = other DNA
atggcacgcgcacaggcactggtgctggccctcaccttccagctctgcgccccagaaacagagacacctgcagcgggatgcacctttgaggaggcctcggaccctgctgttccatgcgagtacagccaggcacaatatgacgactttcaatgggaacaagtgcggatccacccaggcacccgagcaccagcagatctcccacatggttcctatctcatggtcaatacaagccaacacgccccagggcagcgggcacacgtgattttccagtctttaagtgagaatgacactcattgcgtgcaattcagctattttctgtatagcagggacggacactcacctgggacgctcggcgtttatgtgcgcgtgaacggcggacctttgggttccgctgtctggaatatgaccgggagtcacgggcgacaatggcaccaggctgagcttgcggtcagtactttttggccaaatgaataccaggttttgttcgaggccctgatcagccccgaccggcgaggttacatggggctggatgacatcctactcttatcttacccttgtgccaaagccccacacttcagtaggctgggagatgtagaagtaaatgcagggcagaacgctagcttccaatgtatggccgcaggaagagccgctgaagcggagcgcttcttactccagaggcagagcggtgctttggtgcctgccgctggcgtcaggcacatttctcacaggcgtttcctcgcaacgttccccttagctgcggtatctcgggctgaacaggatctttaccgttgcgtgtctcaggctcctagaggagctggggtgagtaatttcgcggagcttatcgtcaaggagcctcccactcccattgcccctccacaactgctgagagccggtcccacctatctgataatacagttgaacaccaattctatcattggagacggcccaatcgtgagaaaagaaattgaatacaggatggcgagaggtccgtgggctgaggtacatgcggtgtccttgcagacatataagctttggcatctggatcctgacacagagtacgagattagcgtgttgcttacaagacctggggatggagggaccgggagacccggtccccctttgatctcccgtacaaaatgcgccgagccaatgagagccccaaaggggctcgctttcgccgagattcaggccaggcagctgacccttcagtgggagccgttgggatacaacgtgacacgctgccacacctataccgtctccctatgctaccactacacactgggatcttcccacaaccagacaatcagagaatgcgttaaaactgaacagggtgtatccagatataccattaagaatttgctcccgtacaggaacgtacacgtgcggctggtactgactaatcctgaagggaggaaggagggcaaggaagttacatttcaaactgacgaggacgtgccctctggcatagctgcagagagcctgaccttcacaccactcgaagacatgattttccttaagtgggaagagcctcaggagccgaacggcctcattacccagtatgagatcagttaccaaagcattgagtccagtgatccagctgtgaacgttcctggacctaggcggactatttccaagcttcggaatgaaacttaccatgtgttctccaatctccatcccggtaccacctatctgttttccgttcgagcaagaacagggaaaggtttcggacaggccgctctcacagagataacaaccaacatttctgccccttcgttcgattatgctgacatgcccagccccctgggtgagagcgagaacacaatcactgtgttattgcgaccggcacagggccgtggagccccaatctctgtataccaggtgatcgtggaggaggaacgggctagaaggctgcgcagggagcctggagggcaggactgctttcccgttccgctgactttcgaggctgcactagctcgtggactggtgcactatttcggagcagagctggctgcctcttctcttcccgaagccatgccttttactgtcggcgataatcagacttaccgcggtttttggaaccccccattggaacccagaaaggcgtatctaatctactttcaagcagcatctcacctaaaaggcgaaacacgtttgaactgcattcggatcgcacgcaaggcagcctgtaaagaaagtaagaggcctttagaagtcagccagagatccgaggagatgggtttaatacttgggatctgtgcgggaggcctggcagtgctcatcttactcttgggggctattatcgtgattatccggaaaggcaaacccgtaaacatgactaaggcgaccgtgaactaccgccaagagaagacgcacatgatgtccgccgtagatcggtcattcacagaccagtcaacacttcaagaagatgagcggctgggtttgtcatttatggacacccacggttattcgacacgcggagatcaaaggtctggaggcgtgactgaggctagctctctcttaggtggttcacctcggaggccttgtggaagaaagggatcaccttaccatactggccagctgcacccagcggttagagtggcagacctcctccagcatataaaccagatgaagaccgctgaggggtacggctttaagcaggaatacgagtccttcttcgagggatgggacgctactaagaagaaagataaagtcaagggtagccggcaggagccaatgcccgcttatgataggcatcgtgtgaaactgcatcctatgttaggtgaccctaacgccgattacatcaacgctaactacattgatggatatcaccgcagtaaccacttcatagctacacagggacccaaaccagaaatggtatacgatttctggcgtatggtgtggcaagaacattgcagcagcatcgtcatgataactaaacttgtcgaagtaggacgcgttaagtgttcacggtactggcccgaggatagcgacacctacggcgacataaaaattatgctcgttaagactgagacgttggccgagtatgtggtgcgtacatttgcgctggagcgcagggggtactccgctcgacacgaagtgcggcagttccactttactgcatggccagaacacggggtgccatatcacgccacgggcctgctcgcttttatcaggcgggtaaaagcatccacccccccagacgcaggccctatcgtgattcactgttctgctgggacaggaaggacaggctgttacattgtccttgatgtgatgctggatatggccgaatgcgagggagtggtggatatttacaattgtgtgaaaaccctgtgctcccgtagggtcaacatgattcagacagaagaacagtatatattcattcacgacgccattctggaggcttgcctctgcggggaaacgaccatccccgtctctgagtttaaggcaacctataaggagatgattcgcatagacccacagagcaacagctcgcagttaagagaggaattccagacattaaactcagtgacgccacctctagacgtggaggagtgctccatcgctctcctgcctaggaacagagataagaaccgctctatggatgtgctgccgccagataggtgtcttccttttctaattagcacggacggcgattctaacaactatatcaatgctgccttaaccgattcatatacaagatctgccgcattcatcgttacactccaccctttacagtctaccactcccgacttctggaggctggtctatgactacggttgcacgagtattgtcatgcttaatcagctgaatcaaagtaatagcgcctggccctgtctgcagtactggcccgagcccggtaggcaacagtacggactgatggaagttgagttcatgagcggcactgcagacgaagacctggtggcccgagtctttcgcgtccagaatattagcagactccaggaaggccacctgctggttagacactttcaattcctgagatggtccgcctatagggacactcccgactctaaaaaagcctttctgcacttgttggcagaggttgataaatggcaggctgagtccggggatggcaggacgattgtccattgcctgaatggcggaggtagatccggaactttctgtgcatgtgcgactgtcctcgaaatgatcaggtgtcacaaccttgtggatgtgtttttcgcggctaagactttgaggaactataaacccaacatggttgagaccatggaccaatatcacttttgctatgacgtcgcgctggaataccttgaagggcttgagagcaggtag

SEQ ID NO: 237189 - DNA, 4302 bp, synthetic construct
  misc_feature 1..4302: note = Description of Artificial Sequence: Synthetic coding sequence
  source 1..4302: mol_type = other DNA
atggccagagcacaggctctggttttggctctcacatttcagctgtgcgctccagagactgaaactccagcagctggatgtacgttcgaagaagcctctgacccagccgtgccttgcgagtacagtcaagcacagtacgatgattttcaatgggagcaagtgcgaattcatcctgggacacgggctccggcagacttacctcatggaagttacctgatggtgaatacctctcagcacgccccaggccaacgtgctcacgttatctttcagagcctcagcgaaaacgacactcactgcgtccaattcagctacttcttatacagccgggatggccattctccaggcaccctgggcgtgtacgttagagtcaatggaggaccgttgggctcagctgtttggaacatgactgggtcccatggccgacaatggcatcaggctgagctggccgtgagcaccttttggcctaacgagtatcaggtgctcttcgaggcgttgatcagccccgatagaaggggctacatgggactcgacgacatattactactttcctatccctgcgctaaagcaccacacttctcccggctgggggatgtcgaagtaaacgcgggacagaacgcctcctttcaatgcatggccgcaggacgggcagccgaggctgagcggttccttctgcagcgccagagcggagccctggtgcccgctgcaggggttagacacatctctcaccggcgatttctggctacattcccgcttgcagccgtcagccgagccgagcaggatctctataggtgtgtgagtcaggcgccacgcggagcaggcgtctccaatttcgcggagttgatagttaaagagcctcctacccccatagccccacctcaactgttgcgggctggaccaacttatttgatcattcagctcaacacgaactctatcattggcgacgggcctattgttcgcaaggaaattgagtacaggatggctcggggaccctgggctgaggtgcacgctgtgtccttgcagacatacaagttgtggcatctcgatcccgacactgaatatgagatctcagtgcttctgaccagacccggtgatggtgggacaggacgccctggtccccctctcatttcccgtactaaatgcgccgagcccatgagggctcccaagggacttgcctttgcagagattcaggcaagacaattaaccttgcaatgggagcccctgggttataatgttacaaggtgccatacatataccgtctccctgtgctatcactataccctaggatcttcacacaaccagacaattagagagtgtgtgaagactgagcaaggcgtgagtaggtacacaatcaagaaccttctcccctaccgaaatgtccatgtgcgtttagttctcacgaatcccgagggacgcaaggagggcaaagaagttacctttcagacagacgaagacgtcccttcgggaatcgcagcagaatcactcacctttaccccattggaagatatgattttcctaaaatgggaagaaccccaggagccgaatggactgattacccaatatgagatctcttaccagagtatcgaaagtagcgatccggcagtgaatgttccgggacctcggcgaactatctccaagctgagaaatgaaacttatcacgtcttctcgaacttacaccccggtaccacatatctgttttctgttcgcgcaagaacgggcaaaggctttgggcaggctgcgctcaccgagatcaccacaaatatttctgctccttcctttgattatgcagacatgccttcccccctgggggaaagcgaaaacacaatcaccgtgctcctgcgccctgcccaagggagaggtgcacctatttcagtgtatcaggttatcgtggaggaagagcgcgctagaaggctccgaagggagcccggaggccaggactgcttccccgtgccgctgaccttcgaagctgccttagctagaggtctcgtgcactacttcggcgctgagctcgccgcaagctctctgcctgaggccatgcccttcacagttggcgataaccagacctacaggggcttctggaacccaccgcttgaaccacgcaaggcctacctgatctacttccaggcagccagccacttgaagggcgagacacgtcttaactgtatccgcattgccagaaaagcggcatgtaaggaatcaaaacgccctttggaagtgagccaaaggagcgaagagatgggcctaatcttagggatctgcgccggtggtctcgctgtgttaatccttcttctaggcgctatcattgtgatcattagaaaggggaaacctgtcaacatgaccaaagcaaccgttaactacagacaggaaaagactcacatgatgagtgcagtggaccgtagcttcaccgaccaatccactctccaggaagatgaacgtctcgggctgtctttcatggacacccacggctacagcactcgaggcgatcaacgatctggaggcgttactgaggccagttctctcctcgggggttcgccaaggcggccatgcggcagaaagggcagcccctatcacaccggccagctgcaccccgctgtgagagttgctgacctactccaacatatcaatcagatgaagacagctgaaggctatgggttcaaacaggagtacgagagctttttcgaggggtgggacgctacaaaaaagaaagacaaggtgaaagggagtcggcaggagccaatgccagcttacgacaggcaccgcgtcaaactgcatcccatgctgggcgatccgaatgctgattacattaacgcaaactatatcgatgggtaccatagatccaaccatttcatcgctactcaaggccctaaacccgagatggtgtacgacttctggagaatggtgtggcaggaacattgctccagtattgtgatgatcaccaagctggttgaagtgaagtgcagcagatattggcctgaggactccgacacctacggagatattaaaatcatgttggttaaaacagagactcttgctgagtatgttgtgagaacctttgccctggaacgcaggggctactcggctcgacatgaagtgagacagttccattttaccgcatggcctgagcacggtgttccctatcatgccaccgggctcctggcattcattagacgggtgaaagcaagcacacctcccgatgctgggccaattgtgatccactgctctgccggtacagggcgtaccgggtgttatatcgtactcgacgttatgctcgacatggctgagtgcgagggcgtagtggatatctataactgtgtcaaaacgctgtgtagccggagggtgaatatgattcaaaccgaagagcagtatatcttcattcacgatgctatactcgaggcgtgcctgtgcggggagaccacaatccccgtaagtgagttcaaggctacttataaggagatgatacggatagacccgcagagcaatagcagtcagctgcgcgaggagtttcagaccctgaattcagtcactccccctctcgatgtagaggaatgctccatcgccctgctgccccgaaaccgggacaagaacagatctatggatgtcctgccacctgatcgctgcctgcccttcctgatctcgaccgatggggattctaataactacattaatgccgcactcacagactcctacacccggtccgctgctttcattgtcaccctgcaccccctacagtcaacaacgccggacttttggcgactggtttacgactatggatgtacaagcattgtgatgctcaaccagctgaatcagtctaacagcgcttggccgtgtctgcagtattggccagaacctggcagacagcaatacggcctaatggaagtcgagttcatgagtggaacagccgacgaggatcttgtggcccgtgtgttccgagtgcagaatatatctcgactgcaggaaggccacctgctggttcgccacttccagttccttaggtggtctgcataccgagatactcccgacagcaagaaagcattcttacacctgcttgcggaagttgacaagtggcaggcagagagtggagatggtcgaacgatcgtccactgtctaaatggcggaggcagatcaggcacgttctgcgcatgtgctactgtgctggagatgatcagatgtcacaacctggttgacgtctttttcgccgctaaaacgttaagaaactataaacccaatatggttgaaactatggatcagtaccacttttgctatgatgtcgctttagagtacttagaggggctggaaagtagatag

SEQ ID NO: 237190 - DNA, 6947 bp, synthetic construct
  misc_feature 1..6947: note = Description of Artificial Sequence: Synthetic coding sequence
  source 1..6947: mol_type = other DNA
atgcgcattctgaaaagattcctcgcctgcattcagctgctatgcgtctgccgtctcgattgggccaatgggtactaccgacagcagcgcaaacttgttgaggagatcgggtggagttacactggggcattgaaccagaagaactggggcaagaagtacccaacctgtaatagtcccaaacagtctccaattaacatcgatgaagacctgacacaggtcaacgtgaatttgaagaagctgaagttccaaggctgggataaaacttcccttgaaaatacatttatacataatactggaaagacagtagagataaaccttaccaatgactatagggtgtcaggtggtgtgagtgagatggtctttaaagcttcgaaaattactttccattggggcaagtgcaatatgtctagcgacgggtccgaacacagtctggagggacagaaattccctctggagatgcagatctattgctttgatgccgatcgcttttcaagctttgaagaggccgttaagggcaagggcaaactgagggctctgagcattctattcgaggtcggaaccgaagagaatctggacttcaaagctataattgatggtgtggaaagcgtgtccagatttggcaagcaggcagccctggatcccttcatactgttaaacctgctgcctaacagcaccgataagtactacatctataacggcagtctgacctctccaccgtgtaccgatacggtggattggatcgtcttcaaggatactgtgagtattagtgaaagtcaattagcggttttctgtgaagtgcttaccatgcagcagagtggatatgtgatgttaatggattatcttcagaacaactttcgtgagcagcaatacaagtttagccgccaagttttttcttcctacaccgggaaggaagaaatccatgaagccgtgtgttcatccgagcccgaaaacgtgcaggcagatccagaaaattacacgtccctactggtgacgtgggagcggccacgtgtggtttacgacaccatgattgaaaagttcgctgtcctgtaccagcagctggatggagaagaccagacaaaacacgagttcctgaccgatgggtaccaggacctgggcgctatcctgaacaacctgctgcctaatatgagctatgtcttgcaaattgtggccatatgcacaaacggcctttacggtaagtacagcgatcagctcattgtggacatgcctactgataatccagagctggatctctttcccgaactcatcggtacagaggagattataaaagaagaagaagagggtaaagatattgaggagggagcgattgtcaaccctgggagagatagcgcgacgaaccaaataaggaagaaagaaccacagatctccacaactacccactacaatagaattggaaccaagtataacgaagctaaaacgaacaggtccccgacccggggatcggagttcagcggcaaaggggatgtgcccaacaccagcctaaacagcacatcgcagccggtaacaaaattagcaacagaaaaagatattagccttacgtctcagaccgtgacggagctgccccctcacaccgttgagggtacatccgctagtttgaacgacggcagtaaaacagtattgcgctcaccacacatgaatctgagcggcaccgcagagagccttaatactgtgtctattaccgaatatgaagaggagtcattactgactagctttaagctcgacactggggctgaggattcaagtgggagcagccccgcaacaagcgcgattccctttatcagcgaaaatatctcacagggatacatcttcagttctgagaatcccgaaacaattacctacgacgtgttaattcccgaatctgcgagaaacgccagcgaagacagtacctccagtggatcagaggaaagcctcaaagacccatctatggaggggaacgtgtggtttcccagctctaccgatataaccgctcagcctgatgtcgggtcgggtagagaatctttcctccagaccaactacaccgagatacgggtggacgagagtgaaaagactaccaagagcttctctgccggaccagttatgtctcagggaccatctgtcacagatctggagatgcctcattatagcactttcgcttactttccaaccgaggtgactccccacgctttcacacccagttcccgccagcaggacctggtgagcacagtcaacgttgtgtattcgcaaaccacacaaccagtgtacaatggagagaccccactgcagccaagctactcctcagaggtgttccccctcgtcactccgctgctgctggataaccagatcctgaacacgactccggcagcctcttcttctgactccgccctgcatgctacaccagtttttccctctgtggatgtatcttttgagagcatcctgagctcgtacgacggagcccctctgctccctttttcatcagcatcgttctcaagtgagttatttcggcacctgcacacagtgtctcagattttaccgcaggtcactagtgccacagagagcgataaggttccactgcacgcatccctccccgtggcaggcggagacctgctgctcgaacccagcctggcacagtattcagatgtgctgagcaccacccatgctgccagcgagaccttagaatttggctctgagagcggagtcctctataaaactctgatgttttctcaagtggagccacccagcagtgacgctatgatgcatgccagatcttccggacctgaaccgagctacgctctgtctgataatgagggtagtcagcacatttttacggtgtcctacagttctgcaatccctgtgcacgattctgtcggggtgacataccagggaagtcttttcagcggtccctcccacatccctatccctaagtccagcttgattacgcctaccgcctccctgctccagccaacacacgccttgagcggggatggggaatggtctggggctagctcagattcagaattcctcctaccagacaccgatgggctcaccgcgctgaatatctcttcacccgtgtccgttgcagagttcacctacaccaccagcgtgtttggcgacgacaacaaggccctgtcaaaaagcgagatcatttacgggaacgaaaccgagttgcagattccctcgttcaacgaaatggtctatccttctgaaagcacagtcatgccgaatatgtacgacaatgtgaataaacttaatgcctcccttcaggaaactagtgtctcaatctccagcaccaagggcatgttcccaggatccctcgcccacaccaccacgaaagtgtttgaccacgaaatttcccaggtcccagagaacaactttagcgtgcaaccaactcacaccgtctctcaggcgagcggggacacatccctcaagcccgttctgtctgccaattctgaaccagcatcctccgatcccgcatcctccgagatgctgtctccctccacacagttgctattttacgaaacaagcgcaagctttagcacggaggtattgctgcaacctagcttccaggcctctgatgtagatacactgcttaagaccgtgctccctgcagtcccaagtgatccgattttggtggagaccccaaaagttgataagatctctagcactatgctgcatctcattgtgagtaacagtgcatcttcagaaaacatgctccactccacgtccgtcccggtatttgatgtgtcccctacctctcacatgcactctgcctctctacaagggcttacaatcagctatgcgagcgaaaagtacgaaccagttctgttaaagagcgaatcatcacatcaggtggttccgtctctctatagtaatgacgagctgttccagaccgccaatctggagatcaaccaagcccaccctcccaagggcagacacgttttcgcaacccccgttctctcgatcgatgagccactcaacacactcatcaacaaactgatccactcggatgagatcctgacctcaaccaaatctagtgtaacaggcaaggtcttcgccggaatccccaccgtggcctctgacacattcgtgtccaccgaccacagcgttcccatcgggaacggccacgtcgccatcactgccgtgagccctcaccgtgacggcagcgtcacttctacgaaactcctgtttccgtctaaggcgacatccgaattgtcacactccgccaaaagtgatgccggattggtcgggggaggggaagacggggacactgatgacgacggggatgatgacgatgacgacagagggagcgacgggctctccattcacaagtgtatgtcttgttcttcctaccgagagtcgcaggaaaaggtaatgaacgactccgacactcacgaaaactcactcatggatcaaaataatccgatctcttattcactttcagagaatagtgaggaagataaccgagtcacgagcgtgtcctccgatagccaaacgggcatggatagatctcctggaaagtctccaagcgccaatggcttgtcccagaagcacaacgatggaaaggaggaaaacgatatccaaacaggctccgccttgcttcccttatcgccagagtccaaagcatgggccgtactgacgtcagatgaagagagcgggtctggccaaggaacctcggattccctcaatgagaatgaaacatcaacagatttcagctttgctgacactaatgagaaagacgccgatggcattctcgctgcaggcgacagcgagattactcctggcttcccacagtcaccgacctcgagcgttacttcagagaatagcgaagtcttccacgtctcggaagccgaagcttcaaacagctcccacgaaagtcgcattggcctggcagaagggttagagtcagagaagaaagccgtgattccattggtcatcgtgtctgctctgaccttcatttgtttggtggtgctcgtcggtatcctaatttactggcggaagtgcttccagactgcccacttctacttggaagattcgacgtccccacgggtgatatccactccacctacaccgatcttccccatctccgacgatgtcggggctatcccgattaagcatttccctaagcacgtggccgacctgcacgccagttcagggtttacagaggaattcgagacactgaaggagttctaccaggaggttcagtcttgtaccgtagatttagggatcaccgctgacagttccaatcaccctgataataaacacaaaaacagatacatcaacattgtcgcctatgatcacagcagggttaagttagcccagcttgctgaaaaggatggaaagttgacagactacatcaacgctaattatgtggacgggtataacaggcctaaggcctacatagcagctcagggcccactgaagtcaacagcggaagatttttggaggatgatttgggaacacaacgtcgaggtcatcgtgatgataactaaccttgttgaaaaggggagaagaaagtgcgaccagtattggccagctgacgggtccgaagagtatgggaatttcctcgtgactcagaagtcagtgcaggtgctcgcatactacaccgtcaggaattttactctccgtaacacaaagattaaaaagggaagccagaaaggcaggcctagtgggagagtggtgacccagtatcattacacccaatggccagatatgggcgtgcctgaatatagccttccagtgttaactttcgtgagaaaggccgcatacgccaagagacacgcagtcgggcctgtcgtggtccattgttccgcaggcgtgggcaggaccggaacgtacatcgtgttggatagtatgcttcagcaaatccagcatgaaggcacagttaacatcttcggatttctcaaacacattagaagtcagaggaactacctggtgcagactgaggagcagtacgtgtttattcatgacactcttgtagaggccatcctgtcaaaggaaaccgaggtgctggattcgcatatacacgcctatgtgaacgctctgctgattcccggaccagctggaaaaaccaagttggaaaagcagtttcagcttctcagtcaatccaatattcagcagagtgactactccgcggctctgaaacagtgcaatagagagaaaaaccgcactagctctattattccagtcgagagatcgagagtcggaattagtagtctgtcaggggagggaactgactacattaacgcatcgtatatcatgggctactatcaaagcaacgagttcataattactcagcacccgcttctgcacaccatcaaagacttttggcggatgatctgggatcacaacgcacaacttgtcgtcatgattcctgacggtcagaatatggccgaagatgaatttgtgtactggccgaacaaagatgaacccatcaattgtgagagcttcaaggtgaccttaatggcagaggagcacaagtgtctcagcaacgaagaaaagctgattatacaggacttcatcctggaggcaacacaggatgattatgtgctggaagtaaggcactttcagtgccccaagtggccgaatcctgactctccaatttccaagactttcgaactgataagcgtaataaaggaggaggcagcaaaccgggacgggcctatgatcgtgcatgacgaacacggcggtgtcacagccggaactttttgcgccttgaccacacttatgcaccagctggaaaaagaaaatagcgtcgacgtttaccaggtggctaagatgattaacctgatgcgcccaggggtgttcgccgacatcgaacaataccaattcctttataaagtgattttgagcctcgtgagtaccaggcaggaagagaacccgagcactagcctcgattctaatggcgctgctctccccgacgggaatatagccgagagcctggaatcccttgtgta

SEQ ID NO: 237191 - DNA, 474 bp, synthetic construct
  misc_feature 1..474: note = Description of Artificial Sequence: Synthetic coding sequence
  source 1..474: mol_type = other DNA
atgggtcggctcactgaggcggcagcagcaggcagtggatcccgagccgctgggtgggccggttctccaccaaccctgttgcctctatcaccaacgagtcctcgctgcgcagccaccatggctagctccgacgaggacggcactaacggaggcgcatccgaagctggtgaggatagggaggcgcctggagagcggagacgcttgggggtcctggcaactgcctggctcactttttacgatatcgcaatgacagcaggcaggttaattctctccccccgtcttgaatgtattggggcaatctcagcccactgccagcctcaacctcccgagttcaagcggttcagttgtctgggtctgcgtagcagctgggattacaaacgaggaccacccaggcccatcaatttctgtattttcgggagggaccgagtgagtccttgttggccaggctggtcaaggacccccgacttaaagtag

SEQ ID NO: 237192 - DNA, 867 bp, synthetic construct
  misc_feature 1..867: note = Description of Artificial Sequence: Synthetic coding sequence
  source 1..867: mol_type = other DNA
atgggcagacttactgaggcagctgctgccggatccggaagccgggcagcgggatgggcgggatctccccctacacttcttcccctatcccctacgagtcctcgttgcgccgctaccatggcatcttcggatgaggacggtacaaacggtggcgcatctgaagcaggtgaagaccgggaggcacccggagaacgtcgcagactaggcgtgttggccacagcgtggctgaccttttacgatatcgcgatgacggccggatggttggtgctggcaatagcgatggtaagattctatatggagaaagggacacaccgcggtctgtataagtctattcagaaaacacttaagtttttccagacattcgccctcttggagatcgttcactgtctaattggaattgtgcccacaagcgttatcgtgaccggagtgcaggtgagctctcgtatcttcatggtgtggctaataacacactctattaaacctatccaaaatgaggagtcagtcgtcctctttctggttgcttggaccgttacagagattacgcgctattccttttatacattctctctcttggaccaccttccctacttcataaaatgggctaggtacaacttcttcattatattgtaccctgtgggcgtggcaggtgaactactaacaatctatgcagcactgcctcacgtgaagaaaaccggcatgtttagcatcagactcccgaataaatataacgttagtttcgattactactatttcttgctaattaccatggcctcttacataccgctcttcccccagctttattttcacatgttgaggcagaggaggaaagtgctccacggcgaggtcattgtagagaaagatgattag

SEQ ID NO: 237193 - DNA, 1269 bp, synthetic construct
  misc_feature 1..1269: note = Description of Artificial Sequence: Synthetic coding sequence
  source 1..1269: mol_type = other DNA
atggcaggatgtgttcccctgctgcaggggctggttctggtgcttgctcttcatcgcgtagaaccctccgccacatctctaaaagaaagacacggcttacatagtgactctgcatgcactggggtgcaagaatctctctttttaccagcctcaaaggctaacgacgtgcttgtaaggtggaaaagggctggctcatacctcctggaggaattgttcgaggggaatctagaaaaggagtgctatgaggaaatctgtgtctacgaggaggccagagaggtgtttgaaaatgaagtggttacagatgaattttggaggagatacaagggaggttctccctgcatcagccagccctgtctgcataacggctcgtgccaggacagcatttggggctacacctgcacatgcagtccgggatatgagggcagcaattgtgagttggccaaaaacgagtgtcatcctgaacgaacggatgggtgccagcatttctgtctgccaggacaagagagttacacttgctcctgcgcacaaggatatagactgggcgaggatcataaacagtgcgtcccacacgatcagtgcgcttgcggcgtgctgacctcagaaaaacgcgctcccgaccttcaggacctcccatggcaagtgaaacttaccaactccgagggaaaggacttttgcggcggagtcataatccgtgagaattttgtcctcaccacggccaaatgcagtctcctgcaccgcaacattaccgtgaagacctacttcaacagaacaagtcaggacccactcatgattaaaattactcatgtacacgttcatatgaggtacgatgccgacgcaggggaaaatgatctgtccctgttggagctggagtggcccatccagtgtcccggagcaggtctccccgtgtgcacccccgaaaaagacttcgctgagcatctgcttatccccagaacccgcggactcttgagcggctgggccaggaatgggacggacctcgggaacagcctgaccacccgtccagtcacattggtagaaggagaggagtgtggacaggttctgaacgtgaccgtgacaaccaggacatactgcgaacggagctctgtggcggctatgcactggatggatggcagcgtggttacgcgggagcacagaggttcttggttcctcaccggggttctgggatctcagccggtcggtgggcaagcccacatggtactggtgactaaagtgtcgcggtactccctgtggttcaagcaaatcatgaattag

SEQ ID NO: 237194 - DNA, 1203 bp, synthetic construct
  misc_feature 1..1203: note = Description of Artificial Sequence: Synthetic coding sequence
  source 1..1203: mol_type = other DNA
atggccggttgtgttcctctgttgcagggtctggtcctggttctggctctgcaccgcgtcgagccctccgtgttcctgcctgcgtccaaagcgaacgacgtgttggtgcgctggaaaagagccggatcatatcttctggaggagcttttcgagggcaacctggagaaagagtgctacgaagagatttgcgtgtacgaagaagctagggaggtgttcgagaacgaagtggtgacggatgaattctggaggaggtataaggggggaagcccctgtatctcccagccttgcctgcacaacgggtcatgccaggactcgatttggggctacacttgcacctgcagccccggatacgaggggtcaaattgtgagctggccaagaacgaatgtcaccccgagaggaccgacgggtgccagcacttctgtctgccgggacaggagagttacacctgtagttgtgcgcagggatatcgcctgggcgaagaccataagcagtgcgtcccacatgaccagtgtgcttgcggagtcctcactagcgagaagcgcgcaccagatttacaagacctaccgtggcaagtaaagctgacaaactctgagggaaaggatttctgcgggggtgtcattattcgggaaaattttgtgctgaccaccgcaaaatgttccttgttacacagaaatatcaccgtcaagacatactttaataggacttctcaagaccccttaatgatcaaaataacgcatgttcacgtacatatgcgatatgacgccgatgccggagaaaacgatctgtccctgctggagttagagtggcctatacagtgcccaggagcaggacttccggtgtgtactccagaaaaggatttcgctgaacaccttttaattcctcggactcggggattgcttagcggttgggcacgcaatggtaccgacctgggaaatagcctgaccacccggcctgtgactctcgtagagggcgaggagtgtggacaggtgttaaacgttaccgtgactacacgcacctactgcgagcgttcatccgtcgccgctatgcattggatggatggttccgtggtgacaagagaacacagaggaagttggtttttaaccggagtcctggggtcccagcctgtcgggggtcaggcgcacatggttctcgtgaccaaggtctcccgatatagtctgtggttcaaacagattatgaactag

SEQ ID NO: 237195 - DNA, 1053 bp, synthetic construct
  misc_feature 1..1053: note = Description of Artificial Sequence: Synthetic coding sequence
  source 1..1053: mol_type = other DNA
atggagcccaagaggataagggagggttatctggtcaaaaaaggcagtgtcttcaacacctggaaacctatgtgggtggttttgctggaggacggcattgaattctataaaaaaaagtcagacaactctcctaagggaatgataccactgaaggggtcaacattgacttcgccttgccaggactttggcaaaaggatgttcgttttcaagatcactaccaccaagcagcaagatcatttcttccaggcagcgttcctggaggagcgcgacgcgtgggtccgcgatattaaaaaagcaatcaagtgcattgaaggaggacagaagttcgccagaaaatccacaagaagaagcatccggctgccagaaaccatcgatctcggcgcactgtacctatccatgaaagacactgaaaaaggtattaaggagttaaatttagagaaagacaagaagatttttaatcactgcttcactgggaactgcgtgatcgactggctggtgagcaaccagtctgtgcgtaaccgtcaagagggactgatgattgccagttcattgctgaacgaggggtacttgcaacccgctggcgacatgtcaaagagtgctgtggatggaacagccgaaaatcccttcctcgataatcccgacgccttctactacttcccggatagcggctttttttgcgaggagaattcgagcgacgatgatgtgatcctcaaggaagaatttagaggcgtcatcatcaagcagggctgcctactcaaacagggccatagaaggaaaaattggaaggtccgaaagttcatactgcgggaggacccggcttatttgcactactacgaccctgcaggtgcggaggatcccctgggagctatacatctacgcggttgcgtcgtcacttcagttgagagtaacagcaacggcaggaaaagcgaggaagaaaatcttttcgaaattataacagcggatgaagtccactattttctgcaagctgccacacctaaggaacgaacagagtggattcgcgcaatccaaatggcctcccggactgggaaatag

SEQ ID NO: 237196 - DNA, 648 bp, synthetic construct
  misc_feature 1..648: note = Description of Artificial Sequence: Synthetic coding sequence
  source 1..648: mol_type = other DNA
atggcatcacttcagatgcggggtaatccaggtagccacttctgcggcggtacacttatccatcctagctttgttcttaccgccgctcactgtcttagggacatcccgcaacgcttggtgaatgtggtgttgggggctcacaacgttagaacccaggagcctacacagcagcacttttccgtggctcaggttttcctcaacaattatgatgccgagaataagctcaatgatgtcctgttgatacagctctcgtcaccagcaaacctatctgcatccgtcgccacagtgcagctgcctcagcaggaccagcctgtgcctcatggcacacaatgcctagcaatggggtgggggcgagttggagcccacgacccacccgctcaggtgctacaggagctaaacgtcacagtggtgacattcttctgccggccacacaacatctgcacattcgtgccccgtaggaaagccggaatctgttttggagactccggtggcccattgatttgcgacggtatcattcaaggtatcgatagcttcgtgatctggggttgcgccactaggctgtttccagatttttttactagggttgccctgtatgttgattggataaggtctacactcagacgggtggaagccaagggtcgtccttag

SEQ ID NO: 237197 - DNA, 858 bp, synthetic construct
  misc_feature 1..858: note = Description of Artificial Sequence: Synthetic coding sequence
  source 1..858: mol_type = other DNA
atgccaggggctcgcagtggcggatccggaggagacgggagtaactcggggtcatactcaggggacgcaagcggcgcagtgacagtgtgggaggttgtgtccttgcttggcaaactgctgggaactgtggttgccctcaaagtggtactttatctgcttcgggtttgcctggctatggcgtggaagagtgggggagcgtcccatagcgagctgatacacaatctccgcaaaaacggcatcatcaagaccgacaaagtgttcgaagtgatgcttgctacggaccgcagccactatgctaaatgcaatccttatatggattcgccacagtctatcggctttcaggctaccatcagcgctccccacatgcatgcttatgctctagagctgctctttgatcaattgcatgagggggcaaaggcgttggacgtcggatccggctctgggatcctgacagcttgttttgcgcgaatggtgggatgtacaggaaaagtgatcggtatagatcacataaaggaattagtggacgacagcgtcaataatgtgcgaaaagacgatcctacccttctgtcatccggccgagtccaactggtagtcggcgacgggagaatgggctatgccgaagaggccccttatgatgcaattcacgtgggggctgccgcaccagtggtaccacaggcactgatcgatcaactgaagcctggaggcaggctaatcttacccgtcggccctgccggtggcaaccagatgctggaacagtacgataagctgcaggatggcagcatcaagatgaagcctctgatgggggtaatatatgtgccactaaccgacaaggagaaacagtggtcaaggtggaagtag

SEQ ID NO: 237198 - DNA, 684 bp, synthetic construct
  misc_feature 1..684: note = Description of Artificial Sequence: Synthetic coding sequence
  source 1..684: mol_type = other DNA
atggcctggaagtccgggggagccagtcatagcgagctgattcacaacttgagaaaaaatggtattataaagaccgacaaggttttcgaagtaatgctggcgactgatcgctcccactacgcaaaatgtaatccttatatggactctccacagtctatcggctttcaagccactatcagtgcccctcacatgcatgcctacgccctggaactcctctttgaccagcttcacgagggcgctaaagctttggacgtcggtagcgggtccggaattctcactgcatgtttcgccagaatggtaggatgtacaggcaaagtgattgggatagaccatattaaggagctggtggatgactccgtgaataatgttagaaaggacgaccctactctcttgtcatccggaagggtgcaattggtagtaggcgacggaaggatggggtacgctgaagaggctccctatgacgccattcacgtgggtgctgctgcgcctgtcgtgccacaggcactgattgaccagctgaaacctgggggacgtctgatacttcctgtcggacctgctggcggtaatcagatgctcgagcagtacgataagctgcaagatggcagcataaagatgaaacctctgatgggagtcatttacgtccctctcacggacaaggaaaagcagtggtccagatggaaatag

SEQ ID NO: 237199 - DNA, 861 bp, synthetic construct
  misc_feature 1..861: note = Description of Artificial Sequence: Synthetic coding sequence
  source 1..861: mol_type = other DNA
atgccaggagcacgcagcgggggtagcggcggagacggtagcaactcaggctcctatagcggggatgcctctggggctgttacagtctgggaggtagtatcactgctaggtaagctgttgggcacagttgttgctcttaaggtggtgctgtatctgctgcgtgtgtgcttggcgatggcatggaagtccggtggggcatcccacagcgagctcatccataatctgcgcaaaaatggcattatcaagacagacaaggtcttcgaggttatgcttgctaccgatagaagccattacgccaaatgcaacccttatatggactcaccgcagtcaatcgggttccaggccactatctccgctccccacatgcatgcttatgcactggaactgctattcgaccaactccatgaaggcgctaaggccttggacgttggctctggctccgggattttgacggcctgttttgccagaatggtgggatgtactgggaaagtgatcggaatcgaccacattaaggaactcgtggatgacagtgtgaataacgtgcggaaggacgatccaaccctgctgtcgtctggtagggttcagctggtggtaggagatgggaggatgggatatgccgaggaggccccatacgatgctatccacgtgggcgcagctgcaccagtggtgcctcaggctttaattgaccagcttaaaccgggaggaaggctgattctgccagtggggcctgccggagggaaccagatgttggaacagtacgataagctccaggatggatctatcaaaatgaagcccttgatgggcgttatctacgtacccctgactgataaggagaagcagtggagcagagacgagttatag

SEQ ID NO: 237200 - DNA, 858 bp, synthetic construct
  misc_feature 1..858: note = Description of Artificial Sequence: Synthetic coding sequence
  source 1..858: mol_type = other DNA
atgccaggggcacgctctggcggatccggcggagacggatcaaactcggggtcctacagcggggacgcctctggggctgtcaccgtctgggaggttgtgagcctattggggaagcttctgggtacagttgtcgctcttaaggtggtgctctatctgctacgcgtgtgcttggctatggcctggaaatctggtggagccagccactctgaactgatccacaatctcaggaaaaatgggatcatcaaaaccgacaaggtctttgaagtgatgttggccacggaccggtcccattacgcaaagtgcaatccttacatggattctcctcaatcaatcggattccaggctacgatttcagcccctcacatgcacgcctacgctctggaattgctgttcgaccaacttcatgagggagcaaaagcacttgatgttggcagtggcagcgggatcctaacagcatgcttcgccaggatggtgggttgtaccggtaaagtgatcggcatcgaccatattaaggaattagttgacgatagcgtgaataacgtgcgcaaggacgatcccactcttctgagcagcgggagggtgcagcttgtcgtgggggacggcaggatgggctatgccgaggaggccccttatgatgccattcatgtcggggcagctgcccctgtcgtaccacaagctttgatcgaccagttgaaaccgggaggaagactgatattgccagttgggccagcgggagggaatcaaatgttggaacaatacgataagctgcaagatggctctatcaaaatgaaacccctgatgggagtcatctacgtgccattgaccgataaggagaagcagtggtctcggtggaaatag

SEQ ID NO: 237201 - DNA, 579 bp, synthetic construct
  misc_feature 1..579: note = Description of Artificial Sequence: Synthetic coding sequence
  source 1..579: mol_type = other DNA
atggcctggaagtcaggcggagcttcgcatagtgagcttattcacaaccttaggagctttcaggccaccattagtgcgcctcacatgcatgcatatgccttggaactcctttttgatcaactgcatgagggcgcaaaggcgctagacgtaggctccggctcggggattttgaccgcatgcttcgctcgtatggtaggctgcacgggaaaggtgattggaatcgaccacattaaggagctggtagatgacagcgtcaacaatgtgcgcaaagacgatcccactctgctgagttccggcagggtccagctcgtggttggcgatgggaggatgggctacgccgaggaagccccttatgatgctattcatgttggcgcagccgctcccgtcgtccctcaggcactcatcgatcaactgaagcctggcggtcgccttatcctgcccgtcggccctgcgggaggaaaccagatgttggaacagtacgataagttgcaagatggcagtatcaaaatgaagcctttgatgggagtcatttatgttccactcacggataaggagaagcagtggtctcgctggaagtag

SEQ ID NO: 237202 - DNA, 2016 bp, synthetic construct
  misc_feature 1..2016: note = Description of Artificial Sequence: Synthetic coding sequence
  source 1..2016: mol_type = other DNA
atgaaacagattttcttcctcgatgacagcgggccaccatttggtcacatggtcctggcattgggaggctaccttggaggattcgatgggaatttcttgtggaatcgcatcggggcagagtacagcagcaatgtacctgtctggtctctgcgccttctgcccgctctagcgggtgccctgtccgtccccatggcctatcaaatcgtcctggagctgcacttcagtcactgcgctgcaatgggggcagcccttctgatgcttatcgaaaacgcactaatcactcagagccggctgatgctgctggaatctgttttgatattctttaatctgcttgctgtgctaagctacctcaagtttttcaattgtcaaaaacactcacccttttcgcttagctggtggttttggctgaccctaaccggtgtcgcctgtagttgcgcggtgggaatcaagtatatgggcgtctttacctacgtattggtgctgggcgttgcggctgtgcacgcatggcacctgttaggggatcagaccttaagcaatgtttgcgtcttttgtcacctccttgcgcgtgcagtggcactgctggtcatccccgtggttctgtacctcctgtttttttacgtgcatctcattctcgtgttccggtccggcccacacgatcagattatgtcaagcgctttccaggcgtcactggagggcggactggcaaggattacccaaggccagccactggaagtggccttcggcagccaagttacactcaggaacgtgtttggcaaacccgtgccttgctggctccacagtcaccaggacacatatcccatgatctatgaaaatggcagaggcagttcgcatcagcagcaggtgacatgctatccatttaaggatgtcaacaactggtggatcgtaaaagatccacggcgacatcaactggtcgtaagctcccctccgaggccagtgcggcacggcgacatggtccagctcgtccatggaatgactacccgctccctcaacacacacgatgtggcggcaccgctgtcgccccactcccaagaggtgagctgttacatagattacaatatctcaatgcccgctcaaaatttatggagattagaaatcgttaacagaggctcagatacggacgtgtggaagaccattttgtctgaggtgagattcgttcacgtgaatacatccgccgtcctcaagctgtctggtgctcacctaccagattggggctaccgacagctcgagatcgtgggcgagaagctgtctaggggctatcatggatcgaccgtctggaatgtcgaggagcatcgatatggggcatctcaggagcagcgcgaaagggagcgggagctgcacagcccggcacaggtcgatgtgtcacgcaatctgagcttcatggctagattctctgaacttcaatggcggatgttagccctgaggtcggacgatagcgagcacaagtactcttcctctcccctggagtgggtcacgctggataccaatatcgcctactggctgcacccacggacaagtgcgcaaatacatctcctgggcaatatcgtgatttgggtgagcgggtccctggccttggccatctacgctcttctgtccctgtggtatctgctgagaagacgccgtaacgtgcatgacctcccgcaggatgcgtggctgagatgggtattggccggtgctctgtgcgcaggcggatgggctgtgaattatttgcccttctttctgatggaaaaaacactgttcctgtatcactatctgcctgcgctgacttttcagatcctcttactgcccgtggtgctccagcatatatcagaccacttgtgtagaagccagcttcaacggtcaattttttcagctctagtggttgcgtggtactctagtgcctgtcatgttagcaacactctgaggcctctgacgtatggggataagagtctgagcccacacgagctcaaagccttgaggtggaaagactcctgggacatcctgatcagaaagcactag

SEQ ID NO: 237203 - DNA, 2088 bp, synthetic construct
  misc_feature 1..2088: note = Description of Artificial Sequence: Synthetic coding sequence
  source 1..2088: mol_type = other DNA
atgtggggcttcctcaagcggccagttgtcgtgacagcggacatcaatctgtctctcgtggcactgacaggcatgggcttgctgtctcgactgtggagactgacctatcccagggcggtggtgctatttcgacggatacgatggcaattcttcgtagagcagaactggagcagcgtcgtcgctttccccgagtatagcagcaacgtgcctgtgtggagcctgcgcctgctccctgccctcgccggtgctctctcagtgccgatggcgtatcagatagtccttgagctgcatttttcccattgtgcagccatgggagccgcactgctgatgttaattgagaatgccctgattacccagtcacgccttatgctcctagagtccgtgctgattttcttcaatctcctggcagtgttgtcctatctcaagtttttcaactgtcagaagcattccccgtttagcctatcctggtggttctggctgacactgacgggagtcgcatgcagctgtgctgtgggaattaagtacatgggcgtgtttacgtatgtcctggtgcttggagtcgccgcagtacatgcatggcacctcctcggagaccaaaccctcagcaacgtctgtgttttttgtcacctgcttgcacgagccgtcgcactcctggtgattcccgtggtactctatctgctattcttctatgtgcacttaatattggtcttcagatcgggccctcatgaccagatcatgtcgagcgcttttcaggcctctctggaaggtgggctggccaggattacacaaggacagcccctggaagtagcttttggctcccaggtgaccttaagaaacgtgttcggtaaacccgtgccatgttggttgcacagccaccaagacacatatccgatgatttacgaaaacgggagaggctcttcacaccaacagcaggtgacatgctaccctttcaaggatgtaaataattggtggattgtgaaggaccccaggaggcaccaactggtcgtgagctctccaccccgacccgtccgacacggagacatggtacagctggttcacgggatgaccacccgtagcctcaacacccatgatgtcgccgctcccctgtccccccattcgcaggaagtgtcctgctatattgattataatatctcgatgccggcacagaacctttggaggctggagatcgtgaatcggggatccgatacagacgtctggaagacaattctcagcgaggtccggtttgtgcatgtcaacacttcagcagtacttaagctgtcaggggctcacctgccagactggggctaccggcagctggaaattgtgggtgagaaactgtccagagggtaccacggctccactgtctggaacgtggaagagcatcgctatggcgcttctcaggaacagagggaacgagaacgtgagctgcatagccctgcacaggtcgacgtaagcagaaacctttcttttatggccaggttctccgaattacagtggaggatgctcgccctcagatccgacgatagcgagcataagtacagttcaagcccgctggagtgggttaccctagacacaaatattgcttattggttacaccctcgcacatctgctcagattcaccttcttggcaacatcgtcatttgggtgtccgggagtctggctctggcaatctatgccctgctgtccttatggtatctgctgagacgcagacggaatgtgcacgacttgccacaagatgcctggctccggtgggtactggccggtgccctctgcgctggtgggtgggcagtgaattatcttcctttttttctcatggagaagaccttgttcctgtatcattacctgccagctctgacatttcaaattctgcttctacctgtggtcttgcagcacatatctgatcatttgtgtaggagtcaactgcagcgatccatattttccgcgctggtggtcgcgtggtactcctcagcctgccacgtgagtaatacattgagaccacttacttatggcgataaatcactgagtccacatgaattgaaggcactccgttggaaggattcatgggacatcctcattcgcaaacattag

SEQ ID NO: 237204 - DNA, 1041 bp, synthetic construct
  misc_feature 1..1041: note = Description of Artificial Sequence: Synthetic coding sequence
  source 1..1041: mol_type = other DNA
tggagaggaggcggatgcacttctcccgctaccttaggagccgctcggggagcggtgggcatagggaaagaagggcagtatcagcccctgattgcatccctgacatggggtctggtaccactgtcacaagcccaagaaattgtcaatagaggaagcgacaccgatgtctggaagacaattctttcagaggtgcgctttgtacacgtgaacacctctgcagtcctaaagctctcaggggctcatttgccggattggggataccggcagctcgaaatcgtgggggagaagctctcacgtgggtatcacgggagcacagtttggaacgtggaggagcaccgctacggagcttcacaggaacaacgggaacgggagagggaacttcactcccctgcacaggttgacgtatccagaaatttgtcttttatggcaagattctcggagctgcagtggcgaatgttagcgttgagatcagacgacagcgaacataagtattcttcctcaccactagaatgggtgactctagatacaaacatcgcatattggttgcaccctaggaccagcgcccaaattcacctcttaggcaacatagttatttgggtgtctggctccctggcccttgctatctatgccctcctgtcactttggtatttgctgcggaggaggcgcaatgtgcacgatcttcctcaggatgcgtggctgcggtgggtactggccggtgctctgtgtgcaggcggatgggccgttaactatcttcccttcttcttaatggagaagaccctgtttctgtaccactacctgcccgctcttacattccagatcttactgttgccggtggtgctgcagcatattagtgatcacttgtgtcgcagccagctccagcggagcatcttcagcgccttggtcgtcgcctggtactctagcgcttgtcatgtttccaacactctgcggccactaacgtacggtgacaagagtttatccccgcacgaattgaaggcactcagatggaaggactcttgggatatccttatcaggaaacactag

SEQ ID NO: 237205 - DNA, 471 bp, synthetic construct
  misc_feature 1..471: note = Description of Artificial Sequence: Synthetic coding sequence
  source 1..471: mol_type = other DNA
atggcgtatcagatcgtgttggagctgcacttcagccactgcgccgctatgggtgctgcattgctcatgttgatcgagaatgccctcatcacccagtcccgattgatgctactcgaatcagtcttaatcttctttaatctgttagccgtactctcctatctcaagttttttaactgccagaaacattctctaccgctgtgggcacccagacctaatcatgtgcaatgccttcctgggcaattacgaggtcgtacttctagcgatcacagtggatccgccacaggagggggactatgggtccctgggcattcagaagaaagactgtgggagacatgcgcactgctggccagtttccccccaggacaccttccacatgatgtaagatatgaaaatggcagaggttccagccatcaacagcaggtgacctgctatcccttcaaggatgtgaataattggtggatcgtcaaatag

SEQ ID NO: 237206 - DNA, 2244 bp, synthetic construct
  misc_feature 1..2244: note = Description of Artificial Sequence: Synthetic coding sequence
  source 1..2244: mol_type = other DNA
atgtggggtttcctgaaacgacctgtggtggtcaccgccgatataaatctgtcgctggtagcccttacaggcatggggctcttgagcaggctgtggagattaacatacccccgagcagttgtgttcgatgaagtttattacggtcaatacattagcttctacatgaagcagatcttctttcttgacgactccggcccaccttttggccacatggtgctggctttgggcggatatcttggcggatttgacggcaattttctgtggaatcgtatcggagctgagtacagttcgaatgtgcctgtctggtcattgcgtctcctccccgcactcgcgggagcacttagtgttcccatggcctaccaaatcgtgctggagttgcatttcagtcactgcgcagccatgggggctgcacttctaatgctgattgagaatgctctcataactcagtcacggctcatgctactcgagtcagtactcatcttctttaaccttcttgccgtactgtcctacctaaaatttttcaactgtcagaagcattctccattctccctgagttggtggttttggctcaccctcactggagtcgcctgttcatgcgctgttgggataaaatatatgggcgtgtttacctacgtcctggtgctgggcgtcgctgcagtacatgcctggcatctgctgggtgatcagaccctgagtaacgtcggggcagacgtgcaatgctgtatgaggccggcttgcatgggtcaaatgcagatgagtcagggcgtgtgcgtgttttgccacctccttgcgagagccgttgccctcctggtaatacccgtggtgttatatctgctgttcttttatgtacatctcattcttgtattcaggtcgggacctcacgaccaaataatgagttctgcctttcaggcgtcactggagggtggattagcgaggatcacccaaggccagcctctggaagttgctttcggttctcaggtcaccctacggaacgtgttcggaaaaccagtgccatgttggcttcactcacaccaggacacataccctatgatttacgagaacggacggggttcgagccaccaacagcaggttacttgttatccattcaaagacgtcaacaactggtggatcgttaaagatcctagaaggcatcaactcgttgtcagttcaccacccaggcctgtccggcacggcgacatggtgcagctggtgcatgggatgacgaccaggtctctaaacacacatgatgttgctgcccctctcagtccacactcacaggaggtgtcttgctatatcgattacaacatatcaatgcccgctcagaacctctggaggctggagatcgtcaaccgcggaagtgacaccgacgtatggaaaaccattctcagtgaggtcagatttgtccatgtaaatacctctgccgtcttgaaactgtctggcgctcatctcccagattgggggtatcgtcaactggagatcgttggggagaagctgtctagaggctatcacggttctaccgtctggaatgtggaagagcaccgctacggtgccagccaggaacaacgagagcgcgagcgcgaactacactctcccgcacaggttgacgtctcccgaaaccttagttttatggccagatttagtgagcttcagtggcgtatgcttgcactcagaagtgatgattccgaacataagtatagctcaagcccattggaatgggtgaccttggacaccaacattgcatactggctgcatcctaggacctccgctcaaattcacctactcggtaacatcgtaatctgggtcagcggttctcttgcactggctatttacgcgctgctgtccctgtggtacttattacgtcggaggcgtaacgttcatgacctaccccaggacgcctggttaaggtgggttctcgcaggcgctctgtgcgctgggggatgggccgtgaactatcttcctttctttcttatggagaagaccctatttttatatcattacctgcctgcactgaccttccagattctcctccttccggtggtactccagcacatttcagatcatttgtgtcgttcacagcttcagcggtccatcttttctgcactggtggtggcctggtactcttcagcctgtcatgttagcaatacactccggcctctcacgtacggagataagtcccttagcccccatgaattgaaggcgctcaggtggaaggattcttgggacatactcatccgcaaacattag

SEQ ID NO: 237207 - DNA, 2178 bp, synthetic construct
  misc_feature 1..2178: note = Description of Artificial Sequence: Synthetic coding sequence
  source 1..2178: mol_type = other DNA
atgtggggttttctgaagaggcccgtcgtcgtgaccgccgacatcaatctgtctctcgtggctctgactggcatgggacttttaagccggctatggcgcctgacctatccaagggcggtcgtctttgatgaggtgtactatggacaatatatcagtttctacatgaaacaaatttttttcttagacgatagcggtccccctttcgggcatatggttttagccctgggaggatacttgggcggtttcgatggcaattttctgtggaacaggatcggcgcagagtattcgagcaacgtccccgtctggagtctgagacttctgccagccctggccggagccttgtctgttcccatggcctaccaaatcgttttagagttgcattttagccactgcgctgccatgggtgcagcgctgctgatgctaatcgaaaatgcattgatcacacagtcaagacttatgcttctcgagagcgtgctcatcttcttcaatctgttggccgtgctcagttatctgaagtttttcaactgccagaaacattcccctttctccctcagttggtggttctggttgaccctcaccggtgtggcatgttcctgcgctgtcggaattaaatatatgggcgtgttcacttatgttctggtcctgggagtggcagcggtgcacgcgtggcatctgctgggggatcagactctcagtaacgtctgtgtgttttgtcatcttctggctcgggctgttgccctattggtcattcccgtggttttgtacctgttgttcttctacgtccacctgatcctggtattccgatctgggccacacgaccaaattatgagtagcgccttccaggcttctttagaggggggactggcccgtataacccaggggcagcccctggaagtggcttttgggtctcaggtgactctccgaaacgtattcggcaagcctgtaccatgctggttgcactcccaccaagacacttacccaatgatctatgaaaatggacgaggatcttcccaccagcagcaggtgacctgctatccttttaaggacgtgaacaactggtggatcgtcaaagacccccgaaggcatcaactggtcgttagtagcccacctaggcctgtccgccacggggatatggtgcagctagttcatggcatgaccacgcgctctttgaatactcacgacgtcgctgctccattgtctcctcactcacaggaggtgtcttgttacattgactacaatatcagcatgccagcccagaacctctggcggctggagatcgttaacagagggtctgataccgatgtatggaaaaccattctctccgaagttcgattcgtgcatgtaaacacttccgccgtgctgaaactctccggagcacatcttcccgattggggatacagacagctcgaaattgtgggtgagaaactgagtcggggttatcacggttctaccgtgtggaatgtcgaggaacatcggtacggcgcatctcaggagcagagagagagggaaagagagctccatagtcccgcacaggtggatgtgagtcgcaacctatcttttatggccaggttttccgagctccaatggaggatgctcgccctgcgcagcgatgacagcgagcataagtattcttcctcacccctggagtgggtgacactggataccaacattgcttattggctgcaccctcgcactagtgcacagattcatctgcttggcaatattgtaatttgggtatcagggagcctggccctcgccatttacgctttgcttagcctatggtatctgctaagacggaggaggaacgtgcacgatcttccacaggatgcgtggctgcggtgggtgttggcgggagcactttgcgccggtgggtgggccgtgaattaccttccattctttctgatggagaagacactgtttctgtatcattatctccctgccttgacctttcaaattctcttgttaccagttgtgctccagcacattagtgatcacctgtgccgatcccaactgcagaggtccattttcagtgcactcgtagttgcttggtattcatctgcatgccacgttagcaatacgctgcgcccactcacttacggtgataagtctctctctccccacgagctcaaggcactgaggtggaaagacagttgggatatccttattaggaagcactag

SEQ ID NO: 237208 - DNA, 1827 bp, synthetic construct
  misc_feature 1..1827: note = Description of Artificial Sequence: Synthetic coding sequence
  source 1..1827: mol_type = other DNA
atggcgtaccaaatcgtccttgagctacatttctcccattgcgctgcgatgggcgctgctctactgatgctgattgagaacgccttaatcacacagtccaggcttatgcttcttgagtctgtgcttattttctttaatttgctggccgttctctcctatctgaaattctttaactgccagaaacactctccttttagcctgtcctggtggttctggctaactttgacaggagtggcctgcagttgtgcagttgggattaaatacatgggcgtctttacttacgtcctggtgttgggggtggccgctgtccatgcctggcacctactgggagaccagactctttctaatgtttgcgtattctgccaccttcttgcaagagctgttgcactgttggtgatccctgtcgtcctgtatttgctgtttttttatgtgcacctcatcctggtgtttcggagcggtccacacgaccagatcatgtctagtgcattccaggcctccctcgaaggaggcctggctagaattacccagggccaacctctggaggtggcatttggatctcaggtgacactgcgaaatgtgtttgggaaacctgtcccatgctggctgcactcccaccaagatacttatcctatgatttatgagaacggtcgaggatccagccatcaacagcaggtgacttgctacccgtttaaagacgttaataattggtggatcgttaaggatcccagacgacatcaactcgtggtaagctcaccacccagaccggtccggcatggggacatggtccagctggtccatgggatgacgacccgtagcctcaatacgcacgacgtggccgctcccctgagcccccacagtcaggaggtctcttgttacatcgactacaacatctccatgcccgcacagaacctgtggaggctggagatagtaaatcgcggtagcgatacagatgtttggaagaccatactgtcagaggtgcgattcgttcacgtcaacaccagtgctgttttaaagctgagtggggctcacttgcccgactggggataccgtcagctagagatagtgggcgagaagctttcacgaggttaccacgggagcacggtctggaatgtggaggagcatcgctatggagcctcgcaggagcagcgcgaacgcgaacgcgagctccactctccagcccaagtggacgttagtcgaaatcttagtttcatggcgagattctccgaactgcagtggaggatgctggccctccgcagcgacgactcagagcataagtattctagttccccgctcgaatgggtcactctggacactaatatcgcctactggcttcaccccagaacctccgcacagatccacttgctgggcaacatagtgatttgggtctccggcagcctggccctggctatttacgctctcctgtcattatggtatttattgcggagaaggcgtaatgttcacgacttaccccaggatgcttggttgaggtgggtactggcaggggctctttgcgcaggaggatgggcggtaaactacctgccattcttcctaatggagaagaccctctttctgtatcattacctacctgccttgacgttccaaatactgctcctgcccgtggtgctgcagcacatttctgaccatttgtgtcgcagccaactgcagaggagtatcttctccgccttagtggtggcctggtacagctctgcatgccatgtgtctaacactttaaggccgctgacatacggcgacaaatctttatccccacacgagctcaaagcactccggtggaaagacagctgggacatattgattaggaaacactag

SEQ ID NO: 237209 - DNA, 471 bp, synthetic construct
  misc_feature 1..471: note = Description of Artificial Sequence: Synthetic coding sequence
  source 1..471: mol_type = other DNA
atggcttaccaaattgtcttagagctccatttctcccactgcgctgctatgggggctgccctactaatgctgatcgagaacgctctcatcacacaaagcaggcttatgctgcttgaatccgtgctgatcttctttaaccttctcgccgtgctgtcatacctgaaatttttcaactgccaaaagcattctctaccactgtgggcaccaagacccaaccacgtgcaatgtctccctggtcaacttagaggcaggacttcgagcgatcattccggctctgcaaccggaggtggactctgggttcccggacatagcgaagagcgcctctgggagacctgcgcccttcttgccagtttccccccagggcacctccctcatgacgttcggtacgagaatggtcgtgggtcttctcatcagcaacaggtaacctgttatccgttcaaagatgtcaacaattggtggatagtgaaatag

SEQ ID NO: 237210 - DNA, 429 bp, synthetic construct
  misc_feature 1..429: note = Description of Artificial Sequence: Synthetic coding sequence
  source 1..429: mol_type = other DNA
atgtggggattcttgaaacgcccagttgtcgtcactgctgatattaacctctctcttgtggcactcactggtatgggcctcttatcacgcctgtggcggcttacttacccacgtgccgtggtgtttgacgaagtttactacggccagtacatcagtttctacatgaaacagattttcttcctggacgactccggacccccatttggacatatggtactcgctttggggggatatctgggtgggttcgatggcaatttcctgtggaataggatcggtgccgagtattcctctaacgtgcccgtctggagtctaaggctcctgccagccctggccggagccctgagcgtgccgatggcatatcagatcgtgcttgaattgcactttagccactgtgccgctatgggggctgcattgctcatgctgatctag

SEQ ID NO: 237211 - DNA, 1722 bp, synthetic construct
  misc_feature 1..1722: note = Description of Artificial Sequence: Synthetic coding sequence
  source 1..1722: mol_type = other DNA
atgttgctggaatctgtattgatattttttaacctgctcgccgtgctgtcctacctcaagttttttaactgtcagaaacactctccttttagtttatcttggtggttttggctcaccctcactggcgtcgcctgcagctgtgccgtcggcatcaagtatatgggagtcttcacctatgtgctagtgctgggagttgcggctgtccatgcttggcacttactcggagatcagacactgtctaatgtttgtgtcttttgccatctcttggctcgggcagtggcattgctggtaattcccgtagtgttgtacctgctgtttttctacgttcatctcatactggtgttcagatcaggccctcacgatcagattatgtcgtctgcctttcaggcttctctcgagggcggactcgcacgaattactcagggacagccgctggaagtggcttttgggagtcaagtcacccttcgaaatgtctttgggaaacccgtgccttgttggttgcactcccaccaggacacttatcctatgatctatgaaaatggccgtgggagttcccatcagcagcaggtcacatgttaccccttcaaagacgtaaataattggtggatcgttaaggatcccaggcgccaccaactagtagtcagtagcccacccagaccggtgaggcatggcgacatggtgcagctggttcatgggatgacaacccggagcctgaatacgcatgatgtcgccgcacctttgagccctcactcccaagaggtctcttgctacatcgattataacatttccatgccagcccagaatctgtggcggcttgagattgtcaacaggggatcagatactgatgtgtggaaaacgattttaagcgaagtgagattcgtgcacgtgaatactagtgcagttctgaaactctcaggcgcacacctgcctgattggggatatagacaattggagatcgtgggagaaaagctctcaagagggtatcacggttcaactgtctggaatgtagaggagcatcgctatggcgcatcccaggagcaacgggagcgcgagagggaactgcactctcccgcacaggtggatgtgtctcggaatctcagctttatggctcggtttagcgagttacaatggcggatgctcgcactcagatcggatgattctgagcacaagtacagttcatctccactggagtgggtaacactggataccaacattgcttattggctgcatccccgaacgtctgcccagatccacttgttgggtaacatcgtgatctgggtgtcaggaagtcttgccctggccatctacgctcttctgagcctttggtacctgctgagaaggaggagaaacgtgcacgacctcccacaggacgcttggctgaggtgggttctggctggggctctttgtgcaggaggatgggccgttaactatctgcccttctttctaatggagaagacattgtttctgtatcactacctgccagctctcacatttcagattcttctgttgcctgtggtcctgcagcatattagtgaccatctgtgccgctcccagttgcagagaagcatcttttcagcgctggtagtagcatggtacagtagtgcgtgccatgtgtctaacaccttaaggcccctgacatacggcgacaaaagcctgagtccgcatgagctgaaagctctgcggtggaaagacagctgggatattcttatcagaaagcattag

SEQ ID NO: 237212 - DNA, 2178 bp, synthetic construct
  misc_feature 1..2178: note = Description of Artificial Sequence: Synthetic coding sequence
  source 1..2178: mol_type = other DNA
atgtggggatttttgaagaggcccgtcgtggtgactgccgacatcaatctgtccctcgtggctctcactggtatgggtctgctgagcagactgtggcggcttacttatcccagggccgtggtatttgacgaggtctactacggccagtacatctctttttatatgaagcagattttctttctggatgattctgggccaccgttcgggcacatggttctggcactcggagggtacctcggtgggtttgatggaaattttctctggaaccgaatcggagctgagtacagctccaacgtgccagtttggtccctgcgactgcttcccgcactggcaggggcactttctgtgcccatggcctaccagatcgtactagagttacatttttcccattgcgcagccatgggagccgctctgttaatgctgatcgagaatgctctgataactcaaagtcgcctcatgcttctggaaagcgtgctgattttttttaacctgctggccgtgctgagttatctcaaatttttcaactgccaaaagcactcccccttcagtctaagctggtggttttggctgactctgactggcgtggcctgctcctgcgctgtgggaattaagtatatgggagtattcacatacgttcttgtcttaggggtagcggctgtccatgcctggcacttactgggcgatcaaaccctgtcgaatgtctgtgtcttctgtcatttactggctagagccgtcgctctcctggtgatccctgtcgttttgtacctccttttcttctatgtgcatctcatccttgtttttcggtctgggccacacgatcagatcatgtcatcagcttttcaggccagtctcgagggtgggctggccagaattacacaaggacagcctctagaggtagcttttgggtctcaagtgacacttcgcaatgtctttggcaagcccgtcccctgttggcttcactcccaccaggatacttacccaatgatctacgagaacggcagaggctcaagtcatcagcagcaggtgacttgttacccgttcaaagacgtaaacaactggtggatcgtgaaagaccctaggaggcaccagcttgtggtcagctcacctccacgccctgtgcgacatggagacatggtgcagctggttcatgggatgaccacaaggtcgctcaacactcacgatgttgccgcaccactgtccccccacagccaggaagtaagctgctacatcgattataacatcagcatgcccgctcaaaacttatggagactagaaattgtgaaccggggatccgacaccgatgtgtggaagaccatcctctccgaggtccgattcgtccatgtaaacacctccgcagtactgaagctctctggggcacatctccccgattggggttacagacaactggagatcgtcggtgagaaactcagtagaggctatcacgggtcaactgtttggaatgtcgaggaacaccggtacggagcttcacaggaacaacgtgagcgagaaagagaactgcactctccagcacaggttgacgtgtcacgcaatctctcatttatggccaggttctctgaacttcagtggaggatgttggccctgaggagtgacgactccgagcacaaatacagcagcagtcctctcgagtgggtgacattagacaccaacattgcatactggttacatccacggactagtgctcaaatccatctgctgggaaatatagttatttgggtttcgggttcgctcgccttagccatctacgccttgttatcattgtggtaccttcttcgccgacgcagaaacgttcatgatttgccccaggacgcttggctccggtgggtgttggcgggagctctttgtgctgggggatgggcagtgaactacctgcccttcttcctaatggaaaagactctgttcctttaccattacctacctgccctgactttccagatactcttgttgccagtggtgcttcaacacataagcgaccacctgtgtagatcccagttgcagcgtagcatattcagcgccctggtcgttgcatggtacagctccgcgtgccacgtgtccaacaccctgcggcctttgacatacggggacaaatcgctctctcctcatgaattaaaagccttacgttggaaagacagctgggatatcctcattagaaagcactag

SEQ ID NO: 237213 - DNA, 507 bp, synthetic construct
  misc_feature 1..507: note = Description of Artificial Sequence: Synthetic coding sequence
  source 1..507: mol_type = other DNA
atggcttaccaaatcgtgttagagttgcacttttctcactgcgccgcaatgggcgctgccctcttgatgctcatagaaaacgctctcatcacacaatctagacttatgttgctcgagagtgttttaatcttcttcaacttgctggctgtgctgtcttacctgaagtttttcaattgccagaaacattctccttttagtttgtcatggtggttctggcttacattaacaggggtggcctgttcgtgtgctgtcgggatcaaatacatgggcgtgtttacttatgttcttgttttgggggtggctgcagtgcacgcctggcatctgctgggggatcagaccctgagtaacgtctgcgtgttctgccatctcttggccagagccgtagcccttctggtaatccctgtcgtgctgtacctgctgttcttttacgtgcatctgatccttgtgttccgaagcggaccccacgaccagataatgtcttccgcctttcaggccagcttggaatag

SEQ ID NO: 237214 - DNA, 894 bp, synthetic construct
  misc_feature 1..894: note = Description of Artificial Sequence: Synthetic coding sequence
  source 1..894: mol_type = other DNA
atggcttaccagattgtcctggagctccacttcagccactgcgccgcaatgggcgctgctctcctgatgcttatcgagaatgcactcatcactcagtctaggctcatgctcctggaatcagtactaatcttctttaacctgctggccgtactatcatacctgaagtttttcaactgccagaaacacagccctttctccctgtcctggtggttctggctgacgctcaccggggtggcctgtagctgtgccgttggtattaaatatatgggtgtgttcacttatgtactagttctaggagtagccgcagttcatgcctggcacctcctgggcgatcagactctcagcaacgtaggagctgatgttcagtgctgtatgcgacccgcatgcatgggccaaatgcagatgagtcagggggtgtgcgttttttgccacctcctggctcgagcagtggcccttctggtgatccctgttgtgttatatttgctgtttttctatgtgcacctgatcttggtgtttcgctccggaccacatgatcagatcatgagctccgcattccaagcttcattagaaggcggactggcccgtatcactcagggccagcctctcgaagtggcttttggctcccaggttacattgcgcaacgtatttggaaaaccagttccttgttggctccattctcatcaggatacataccccatgatctacgagaacgggagagggagctcccaccagcaacaggtgacttgctaccctttcaaggacgttaataactggtggatcgtgaaggaccccagaaggcatcagctcgtagtcagctcccctccaagaccagtgaggcatggggatatggttcagttggtgcacggcatgactacacggtctctgaatacctag

SEQ ID NO: 237215 - DNA, 657 bp, synthetic construct
  misc_feature 1..657: note = Description of Artificial Sequence: Synthetic coding sequence
  source 1..657: mol_type = other DNA
atgaaacagatattctttctcgatgactcagggcctccctttgggcacatggtgctggcgcttggtgggtacctggggggttttgatgggaactttctgtggaataggattggggcagaatactcctccaacgtcccagtctggtcccttagactgctgcccgctttagctggggcactgtcagtaccaatggcatatcagattgtgctagagctccacttcagccattgcgcagctatgggtgccgctttgttgatgctgattgagaacgctctcattacccagtcccgcttgatgctgctcgaatccgtactgatcttctttaacctgctcgccgttttgtcatacctgaaattctttaactgccagaaacattccccatttagtctttcttggtggttctggctcactctgacaggcgtagcatgtagctgtgctgtcggcattaaatatatgggagtattcacttacgttttggtactgggagtggccgcagtccatgcatggcacctgcttggggaccagactcttagtaatgtgggagccgacgtgcagtgttgtatgagacccgcatgcatggggcagatgcagatgtcgcaaggcgtttgcgtcttttgtcacctcctggctcgtgccgtagcactcctggtcatctag

SEQ ID NO: 237216 - DNA, 1398 bp, synthetic construct
  misc_feature 1..1398: note = Description of Artificial Sequence: Synthetic coding sequence
  source 1..1398: mol_type = other DNA
atggcaatattctgcggtaccgagttagagcaggtgtgcgtgttctgtcacctgctagccagagctgtcgcgctgttagtgattcccgtggtgctctatctgctgtttttttacgtgcacctgatcttggtgtttaggtccggcccacacgaccaaattatgagctcagccttccaagctagtctggaaggcggactggcgagaatcacacagggccagcctctggaagtagcatttggctcgcaagtcaccttgaggaatgtctttggaaagcctgtgccctgttggctgcattctcaccaggacacgtaccctatgatatatgagaacgggaggggctcttcacaccagcagcaagtgacgtgctatcccttcaaggacgtgaataactggtggatcgtcaaggatcctagaagacatcagcttgtagtcagcagtccgccacggccagtccgccacggcgacatggtgcagctcgtgcacgggatgaccacacggtcgttgaatacacatgatgtggcggctcccctctccccccacagccaggaggtctcctgttacatcgactataacatatccatgcccgcacagaacctgtggcgcctagaaattgtgaatcgaggatcagacacagatgtctggaaaacaattttgagcgaagtgcgctttgtgcacgttaatacttccgccgtgctaaagctgtccggagcacatcttcctgactggggctataggcaactcgaaattgtgggggaaaagcttagtagagggtatcacgggagtacagtctggaacgtggaggagcacaggtatggcgcatcccaggaacagcgcgagcgagagcgagaattgcattcaccagctcaggtagatgtgtcccgaaacctgagcttcatggcacggtttagcgagctgcaggctcaaatccacctcctgggcaatatcgtaatttgggtcagcggcagtctcgcactcgccatttatgcactccttagtctatggtatctgcttagacgacggagaaacgtgcatgacttgccacaagacgcatggctgcgatgggtgctggctggggctctgtgcgctggcggttgggctgtgaattacctgccattcttcctcatggagaaaacactcttcttgtaccactacctgcctgcattaacatttcagatcctgctgctgcccgtggtgcttcagcacatttcagatcatctctgtcgtagccagttgcagagaagcattttttccgcactcgtcgtcgcatggtatagctccgcctgccacgtgtcaaacacactgcgcccacttacttacggtgacaaaagcctgtccccacatgagctgaaggccctgcgctggaaggattcttgggacattcttatcagaaaacactag

SEQ ID NO: 237217 - DNA, 2253 bp, synthetic construct
  misc_feature 1..2253: note = Description of Artificial Sequence: Synthetic coding sequence
  source 1..2253: mol_type = other DNA
atgccaccggctacagggggaggcctcgccgagagcgagctgagacccagacggggaaggtgtggtccacaggcagctcgggctgccggaagggacgtcgccgctgaagctgtggccagaagcccaaagcgacctgcttggggctcacggagatttgaggctgtgggatggtgggccctgctggccctggtcactctcctgtctttcgctactaggtttcaccgcctcgacgaacccccacacatctgctgggacgaaactcactttggcaaaatgggcagctattatatcaatcgtacatttttcttcgatgtgcatcctcctctcggaaaaatgctgatcggactagccggttaccttagcggttacgatggcacatttctgttccagaagcccggagacaaatacgaacaccactcttacatggggatgaggggcttttgtgcattcctgggcagctggttggttccattcgcttacctgactgtgttggatctatcaaagtcactgtctgccgctcttcttacagccgctctcctgactttcgacactggttgtctgacactatctcagtacatactgctagaccccatcttgatgttcttcatcatggctgctatgctgagtatggtgaaatataactcttgcgccgaccgacccttctccgctccttggtggttttggctgagcctaactggcgtatctctggcgggagcactcggagtgaagtttgttgggctgtttataatccttcaagtggggttgaatacgattgccgatctctggtatctgtttggcgatttgtcattgtcactggtgacggttggaaagcacttaactgctcgggtactatgcctgatagtgttaccccttgcactgtatacagccacttttgccgtgcactttatggtgctgtctaagagcgggcctggcgacggtttcttttcctctgcttttcaggccaggctcagcggcaacaatctgcacaacgcctcaatcccagagcatctggcttatggctcggtcataactgtcaagaacctgcgcatggccatcggttacttgcacagtcaccgacatctgtatcctgaaggtattggagcccgacaacagcaggtgactacctacctacacaaagactataataatttatggatcataaaaaagcataatacaaactctgaccccctggacccgtcctttcctgtggaatttgtgaggcacggggacataattcggctcgagcacaaagaaactagtcgcaatctgcactctcactaccacgaagccccaatgacccgaaagcactaccaggtgacgggatacggcatcaacgggaccggcgactctaacgatttctggcgaattgaagtagtgaatcgaaaatttggtaataggatcaaggtcttacggtcaagaattcgtttcatacatctggttacgggttgcgtgttaggcagctccgggaaggtgttgccaaagtgggggtgggaacagctggaggtgacctgcacaccctatctcaaagagaccctgaacagcatctggaacgtcgaggaccacatcaatcccaaactgcccaacatctccctagatgtcctgcagcccagtttccccgagattctcctggaatcccatatggtaatgatccggggaaattctgggcttaaaccaaaggacaacgaatttaccagcaagccttggcattggcccattaactaccagggactccggttctctggagtcaacgacacagacttcagagtctacttgctcggcaaccccgtagtgtggtggttaaacctcctgtccatagccctgtatctgctctctggttcaataatagcggtcgctatgcagcgcggagcgcgtctaccagctgaggttgcaggactttcccaggtgctcctccgcggaggcggacaagtgctgctgggatggacacttcactacttcccctttttcctcatgggaagggttctgtacttccaccattatttccctgcaatgctcttttccagcatgcttacagggatactgtgggacacattgctgcgcctgtgcgcctgggggctggcctcgtggccgctcgccagagggatccatgtggccggtattctcagtttgctactgggaaccgcttattctttttacttattccaccccttagcgtacgggatggtcggcccactcgcacaagaccctcagtcaccgatggccggtttgagatggctagatagttgggacttttag

SEQ ID NO: 237218 - DNA, 669 bp, synthetic construct
  misc_feature 1..669: note = Description of Artificial Sequence: Synthetic coding sequence
  source 1..669: mol_type = other DNA
atgaagctgccccttctgctcgccctgctctttggagcagtgtcagccctgcacttaagatccgagaccagcacttttgagacacccttgggagctaagaccttgcctgaggatgaagagacgccagagcaggagatggaggagaccccatgcagagagctagaggaggaggaagaatggggttcaggatcagaagatgcgagtaaaaaggacggagcagtcgagtctatatcggttcctgacatggtggataagaacttaacatgccctgaagaagaagacaccgtgaaggtagtgggcattccaggatgtcagacgtgtcgctacctactcgtcagaagcttacagacgttctcacaggcctggttcacctgccggaggtgctaccgagggaacctcgtctcaatacacaatttcaatattaactacaggattcaatgctctgtcagcgctttgaatcaaggacaagtatggattgggggtaggattactggaagcgggcgttgcaggcgtttccaatgggtggacggatctcggtggaactttgcctattgggctgcccaccagccctggagtagaggagggcattgcgtggcactttgcactcgcggaggacattggcgacgtgcgcactgtctcaggaggctgcctttcatctgctcgtattag

SEQ ID NO: 237219 - DNA, 669 bp, synthetic construct
  misc_feature 1..669: note = Description of Artificial Sequence: Synthetic coding sequence
  source 1..669: mol_type = other DNA
atgaagctgccactgctgctcgccctgctctttggtgcagtttcagctctccacttgcgcagtgaaacgtccacattcgagacaccactcggggcaaaaaccctccccgaggacgaggagactccggagcaggagatggaggagaccccttgcagagagctagaagaggaagaagagtggggatcaggatccgaagacgccagtaagaaagatggtgctgttgaatccattagtgtccctgatatggtggacaagaacctgacctgccccgaggaggaggatacagttaaggtcgtgggcatccctgggtgccagacatgcaggtacctactggtgcggtctctgcaaaccttttctcaggcctggtttacatgtcgaagatgttacaggggtaaccttgtgagcatccacaattttaatatcaattaccgcattcagtgtagcgtttctgcactgaaccaaggccaggtttggatcgggggtcgcatcaccggaagcggtcggtgcagacgcttccagtgggtggacgggtctcgctggaatttcgcctactgggctgcccatcagccctggagcagagggggtcattgtgtggcgctatgtactagggggggacactggcggagagcacattgcctaaggcggctgcccttcatttgtagttattag

SEQ ID NO: 237220 - DNA, 636 bp, synthetic construct
  misc_feature 1..636: note = Description of Artificial Sequence: Synthetic coding sequence
  source 1..636: mol_type = other DNA
atgaagttacctttgctgctggcactgcttttcggagccgtttcagccctccatcttaggtccgagaccagtacctttgagacacccctgggagcaaagaccctgcctgaggatgaagagacacccgagcaggaaatggaagagaccccttgcagagagctcgaggaggaggaggaatgggggagcggttctgaagacgcatctaagaaggacggtgcagtggagagcatcagcgtgccagatatggtggacaaaaacctgacgtgcccagaggaggaagataccgtgaaggtggtgggcatcccaggttgccagacgtgccgatacctgctgtttacctgtcggagatgttacagaggtaaccttgtgagcattcacaatttcaacatcaactataggattcagtgttcagttagcgccctcaatcagggccaggtttggattggaggtaggataaccggttcaggtagatgccggaggttccaatgggttgatgggagtcgctggaattttgcatactgggccgcacatcagccttggtctcggggaggtcattgtgtggccttgtgtacccgagggggacattggcgaagagcccactgcttgcggaggttgccctttatttgctcatattag

SEQ ID NO: 237221 - DNA, 678 bp, synthetic construct
  misc_feature 1..678: note = Description of Artificial Sequence: Synthetic coding sequence
  source 1..678: mol_type = other DNA
atgcaatgtttgcttcttctaccttttttgctcttaggaacagtaagcgccctacacctggaaaatgacgcgcctcaccttgaatcacttgagacgcaggccgatctaggtcaagatctggatagtagcaaagagcaggaacgagaccttgctctcaccgaggaggtcattcaggccgaaggcgaggaagtgaaggcttcagcctgccaggacaatttcgaagatgaggaagcaatggagtctgatccggctgccctagacaaagattttcagtgccccagagaagaagatatcgtcgaggtccaaggttctccccgatgcaagatatgccggtacctcctggtgcggaccccgaagaccttcgctgaagctcagaatgtgtgcagccgttgttatgggggaaacttggtgtccatccacgactttaatttcaattaccgcatccaatgctgtacaagcaccgtgaaccaggcccaggtgtggattggagggaatctcagggggtggtttctgtggaaacggttttgctggaccgacggctcccactggaactttgcttattggtctcctggtcagcccggtaacggacagggtagttgtgtggccctctgtaccaaaggaggctactggaggagggcccagtgtgataagcagctcccctttgtttgctccttttag

SEQ ID NO: 237222 - DNA, 4092 bp, synthetic construct
  misc_feature 1..4092: note = Description of Artificial Sequence: Synthetic coding sequence
  source 1..4092: mol_type = other DNA
atggcctggaaaaccctccctatctatttgttgctgttactgagtgtctttgtgatccagcaagtgtcctcgcaggagctctcctgtaaaggtagatgcttcgagtcttttgagagggggagagagtgcgattgtgatgctcagtgtaagaaatatgacaaatgctgcccagactacgaaagtttctgtgcagaagttcataacccaacctcccctccttccagcaagaaggccccacctcctagtggcgcatcccagacgatcaagtctaccacgaaacgctcccccaagcctcccaataagaaaaagaccaagaaagtgatcgaatccgaagaaatcacagaagagcactcagtgagcgagaaccaggaatctagtagcagctcctcctcatccagctcatcctccaccattcgtaaaattaagtcttctaagaatagtgcggcaaatcgggagctgcagaaaaagctcaaagttaaggataacaagaagaaccggacaaaaaaaaaacctacgcctaagcctcctgtggtcgatgaagctggatccggcctggacaatggagatttcaaagtgactacccctgatacctccactactcagcacaacaaggttagtacgagcccaaagataaccactgccaagcctatcaacccacgcccaagccttccacccaattcagacacttctaaagagacttccctaacagtcaataaggagacaactgtggaaactaaagagacgacaacaacaaataaacagacaagtaccgacggcaaagaaaaaacaacatcagccaaggaaacccagtcgatagagaagacgagcgctaaagacttggcacccacctctaaagtgctggccaagcctacccccaaagccgaaactaccaccaaaggtcccgctctgactacaccaaaagaacccacacccaccactcccaaagaaccagcaagtacaaccccaaaggagcccacacctacaaccattaaatcggctccgactacccctaaagagcccgctccgaccacaacaaagagcgctcccaccacccccaaggagcccgctccaactaccaccaaggaaccagcccctacaacacctaaagaacccgcaccaactacaaccaaggaaccggctcccaccacgacaaagagcgcccctactacaccaaaggaacccgctccaacaacacccaagaaaccggcacccactactccgaaggaaccagcgccaactaccccgaaagaacccactcctacaaccccaaaggaaccagcacctaccacaaaagagccagctcccacaaccccgaaggagccagcgccaacagctccaaagaagcccgctcctactacacctaaggagccagcacctaccacccctaaagaaccagcccctactacgaccaaagaaccctctcccaccacgcctaaagaaccagcccctaccacaacgaagagcgccccaaccacaaccaaagaaccggctcccaccacgacaaaaagcgcaccaacgacaccaaaggagccttcccctaccactactaaagagcctgcgccaacgactcctaaagagcccgcacccaccaccccaaaaaaacctgctccaaccacccccaaagaacccgctcccaccacccccaaggaaccagcgccaaccaccactaaaaagcctgccccaaccaccccaaaagaacctgcccctactacccctaaggagacagctcctactacccctaaaaaacttacacctacgactccagaaaaattggctccaactactccggagaagcctgcgccaacgacccctgaggagctcgcacccaccactccagaggagccaacccctactacacccgaggagccagcgcctaccactccaaaggcagccgcaccaaacacaccaaaggagccagcgcctaccacgcccaaggaaccagcaccgaccactcccaaagagcccgcacctactactccgaaagaaaccgcccctacgacacccaagggtaccgccccaactaccctgaaggaacccgctccaacgacacctaaaaagcctgctccaaaggaattggcccctactacaacgaaagaacccacctccacaacctgcgataagcccgcacctaccactccaaaggggaccgcccctaccacccctaaagagcccgcacccactacacccaaagaaccagctccaacaacgcccaagggaactgcccctaccaccctcaaagaaccggcacccactaccccaaagaaaccagctcccaaagaactcgctccaactactacaaagggcccaaccagcaccacaagcgacaaacctgcacccaccacccccaaagaaacagcgccaacaaccccaaaagaacctgcacccaccaccccaaaaaaaccagctcccacaacaccagagacaccccctcccacaactagcgaggttagtactcctaccactaccaaggaaccaactactatccataaatcccccgacgaaagtactcctgagctgtccgccgagcccacacccaaagctttggaaaattctcctaaagagcccggtgttccaaccactaagactcctgccgcaacaaaaccagagatgaccaccacagcaaaagacaaaacaacagagcgcgacctgcgcacgacgccagaaaccaccactgccgcaccaaaaatgactaaggagaccgcgacgaccaccgaaaaaactacggagtccaagattaccgcgaccactacgcaggtaacctctacaaccacacaagataccacccccttcaaaatcactactctcaaaacaacaactctcgctcctaaggtgactactactaaaaagactatcacgacaaccgagatcatgaataaaccagaggagaccgcgaagcctaaagatagggctactaactcgaaggctacaaccccaaagccccaaaagccgacaaaagctccaaagaagcctacatcaactaagaaacccaagaccatgccaagggtgagaaagccaaagacaacaccaacacctcgcaaaatgacaagtacgatgccagagctcaacccaacatccaggatagccgaagccatgcttcaaacgaccacgcggccaaaccaaactccgaattcaaagctcgtggaggtgaaccctaagagtgaggatgcgggtggagccgagggtgaaacaccccacatgttactgcggccacatgtgttcatgcccgaggtcactcctgacatggactacctgccgagggtacctaaccaaggaatcattattaaccccatgctgagtgacgaaacgaacatctgcaacggcaagccagtagatggcctcaccaccttaaggaacggtacccttgttgccttccgcggtcactacttctggatgctgagccccttctctcctcctagtcctgcacggaggattacagaagtctggggaatcccgtcacccatcgataccgtgtttacaagatgtaattgcgaaggaaaaaccttttttttcaaggatagtcagtactggcggtttaccaacgatatcaaggacgcaggctatcccaagccaatttttaaggggtttggtggcctgacgggccaaatagttgctgcactctctactgccaaatataagaattggccggagtctgtgtacttctttaaaagaggaggttctattcaacagtatatttacaaacaggaaccggtgcagaagtgccctggacgaagacccgctctgaactaccctgtgtatggagagaccactcaagtgcgaagacggaggtttgagcgggcaattggcccaagccagacccacactattcgtattcaatattccccagctaggctggcctatcaggacaaaggcgttcttcacaatgaggtcaaggtgtccatcctgtggcgagggctcccaaacgttgttacctccgccatttcactcccaaacattcgaaagcccgatggttatgattattatgcattttcaaaagatcagtactacaatattgatgttccatcccggacagccagggccatcacaacccgctctggccagaccctgtccaaggtgtggtataactgcccctag

SEQ ID NO: 237223 - DNA, 2802 bp, synthetic construct
  misc_feature 1..2802: note = Description of Artificial Sequence: Synthetic coding sequence
  source 1..2802: mol_type = other DNA
atggcatggaaaacgctgccgatctacctcctgctcctgctgagcgtattcgtgattcagcaggtatctagccaggagctgagctgtaaaggacgttgtttcgaaagcttcgaacgagggagagagtgcgactgtgatgcacaatgcaagaaatacgacaagtgctgccctgactacgagtctttctgtgccgaagtgcacaaccctacctctcccccatcttctaaaaaagctccccctccctctggcgcatcacagaccatcaaaagtacgactaaacgctccccaaagcccccaaataagaaaaagaccaaaaaggtgatcgagagtgaggagattaccgaagagcactccgtaagtgagaatcaggagagctcctcctcaagtagttctagttcatcttcctccaccatccgcaaaattaagtcatccaagaattcggctgcaaaccgcgagctacagaaaaagctgaaggtgaaggacaataagaaaaatcgcacaaagaagaagcccacgcctaaaccccctgttgtggacgaagctggctctggtctggacaacggagacttcaaagtgacaactccggacacctcgaccacacagcataacaaggtgtctacttccccaaagattacaacagcaaagcccattaaccctaggccctcactcccaccaaacagcgacacctctaaagaaacatcacttacagttaacaaggagactaccgtcgagacaaaggagacgactaccacgaataaacagaccagcacggacgggaaagagaaaacaacgtcggcgaaggagacccagagcatcgagaagaccagtgcaaaagacctagcacccacttccaaggtgctagcaaagccaacccctaaggctgaaactacaactaagggcccagctctgaccacaccaaaggagccaacgccaacaaccccaaaagagcccgcttcaactacccctaaagagcccaccccaacaacgataaagtcggcacctacaaccccaaaggaacccgcacccaccacgacaaaatcagcaccaaccaccccaaaagagcctgcccctaccacaaccaaggagcctgctcctaccactccaaaaaagccagccccaaccacccccgaaacgcctccacctactacttcagaggtttcaaccccaacaacaaccaaagaacctacaacgatccataagtcgcccgatgaatctacacctgaactttctgccgagcctacacccaaagcacttgaaaacagcccaaaggagcccggtgtgcctaccacgaagacccctgcagccactaaacccgaaatgacaacgacagccaaggataagaccaccgaacgggacctccgtactacaccagagactacaaccgccgcacccaagatgacaaaagaaaccgctaccactactgaaaagacgacagaatcaaaaattactgctacaacaacccaagtcacttcaacaaccacccaagatactactccatttaagatcacaaccctgaagacaacaaccctggctccgaaagtgaccacaacaaaaaagacaattaccactaccgaaattatgaataaaccagaggagactgcaaagccaaaagatcgcgctaccaactcaaaagccactaccccaaagccccagaaacctacaaaggccccaaagaaacccacctctacaaaaaaacccaaaaccatgccccgtgtgaggaagcccaagaccaccccgacccccagaaagatgacctcaacaatgcctgagctgaatccaacttcccgcatcgctgaggccatgctgcagactaccacgcggcctaaccaaactcccaacagtaaactggtggaagttaaccctaagagcgaggatgctggtggagcagaaggcgagaccccccatatgctgttgaggccccatgtattcatgcctgaggtgacaccggatatggattacctaccccgagttccaaatcagggtattataatcaaccccatgctgtccgacgagactaatatatgcaacggtaagccagtggatgggttgacaactctgagaaacggcaccctggtggcctttcggggtcattacttctggatgctaagtccattttctcctccctccccagctcgaagaatcacagaagtttggggaataccatccccaattgataccgtcttcacccgctgtaattgcgaaggcaagacctttttctttaaagactcccaatattggcgtttcaccaatgatataaaagatgcaggttatccaaaaccaatattcaaggggttcggagggctcacagggcagatcgtggccgctctgtcgaccgcaaagtacaagaattggccagaatcagtttattttttcaagaggggtggctccatccagcaatatatttataagcaagagcccgtccagaaatgcccaggcaggcgtcctgccttgaactatcctgtttacggagagaccacacaggtcagaaggcgcaggtttgagcgcgcaatcgggccaagccagacgcacacgatccgcatccagtatagcccagcacggttggcgtaccaggacaaaggtgtcctgcataatgaggttaaggtcagcatattatggagaggactgcctaatgtcgttactagtgccatatcactgccaaacatccgcaaaccagacggctacgactactatgccttctctaaggaccagtactacaacatcgacgtccctagccgcaccgctcgtgctatcactacccgaagtggtcagacactcagtaaagtgtggtataactgtccatag

SEQ ID NO: 237224 - DNA, 3936 bp, synthetic construct
  misc_feature 1..3936: note = Description of Artificial Sequence: Synthetic coding sequence
  source 1..3936: mol_type = other DNA
atggcttggaaaacgctgcccatctacctgctcctgctgctgtccgtttttgtgattcaacaagtgagtagccaggatctctccagttgcgccggacgctgcggcgaaggctattcacgagacgcgacctgcaattgcgattacaactgtcagcactatatggaatgctgccctgacttcaaaagggtctgtacggccgagctatcctgcaagggtagatgttttgagtcatttgagagggggagagaatgcgactgtgatgcccagtgtaagaagtacgataagtgctgtccggattatgagtcattttgcgcggaagtaaaagacaataagaagaaccggaccaaaaagaagccaactccaaaaccccctgtggtggacgaggcaggatcagggcttgacaatggagattttaaggtgactaccccagatacaagcacaacccaacacaataaggtcagcacatcccctaagatcaccactgccaagcccattaacccacgccctagcctgcccccaaacagcgatacatcaaaagagacaagcttgaccgttaataaagagacaacagtggagacgaaggagaccaccaccactaacaagcagacctcgactgacggtaaggagaagaccacatcagccaaggagactcagtctatcgagaaaacttcagctaaggatcttgcccctacgtccaaagtcctggccaagccaacaccgaaggctgagactacaaccaaaggccctgctctgacaacccctaaagagcctacgcctacgactcctaaggagccagcttccactacaccaaaggaacctactcccactacaattaagtccgcccctacgacacccaaggagccggcaccgactacaactaagtccgctcccacgacccccaaggagccagcacccacaacaacgaaggaacccgcacctaccacaccaaaagaacccgctcccaccaccactaaggaacccgctccaacaactaccaagtctgccccaacaactcctaaagagccagcacctactaccccgaagaaacccgcacccaccacccctaaagaacccgctcctacaacgcctaaggagcccacgcctaccacacctaaagagccagctccaacgacaaaggagcctgccccaacaaccccaaaggaacctgccccaacggctcccaagaaaccagcaccaactaccccaaaagaacctgcccctactacccctaaagaaccggcacccacaacgactaaagagccttctccaaccactccaaaggagcctgctccaacaactactaagtctgcaccgactactacaaaggagcccgcacccaccactacaaagagcgcacctactactcccaaggagccctctcctaccactacgaaagaacctgccccaacgacccccaaggaacccgcaccaaccaccccgaagaagcccgctcctacaaccccgaaggaacccgctcctactacacccaaggagcccgcacctacaacgaccaagaaacctgcacctactacgccaaaagaacccgctccaactacccccaaggagaccgccccaaccaccccaaagaagttgactcccaccacaccagagaaactcgcacctacaaccccggaaaagcctgcaccgaccacacccgaggaactggccccaaccacaccagaggagccgaccccaaccaccccagaagagcctgccccaaccacccccaaggctgccgcacccaatacgccaaaagaacctgcccctaccacacccaaagaacccgctccgaccacccccaaagagcctgcacccacgacccctaaggaaacagctcctactaccccaaaggggacagccccaacgactctgaaggaaccggctcccacaacccccaagaaacccgcacccaaggagctcgccccaactactacaaaagaacctacgtctaccacctgcgataagcccgctcccaccacccctaaaggcacagcccctacaacccccaaggagcctgcacctactacaccgaaggagcccgcaccaacgacacctaaggggactgctcccaccacactcaaagagcccgcaccgaccacacctaagaaacccgctccgaaggagttggcacctacaaccaccaaggggccaacctctaccactagcgataaacctgctcctacaacgccaaaggagactgcccctactactccgaaagagcctgctcccactaccccaaagaagcctgctcccacaacaccagagacgcctccgccaacaaccagcgaagtatctaccccaaccacaacgaaagaaccaacgactattcacaaatctccagatgaaagcaccccagaactcagtgctgagcctacacccaaggctctcgagaactcaccaaaagaacctggagtgccaacgacgaagacccccgcagccacaaaacctgagatgacaacgacggccaaggataaaactacggagcgcgacttaaggactactccagagactacgactgccgctcccaaaatgaccaaagagaccgccactacaacagagaagactactgagagcaagattaccgccacaacgacccaggttacctctaccacaacccaggacaccactccttttaagatcaccactctgaagacaacgactttggcccctaaggtaaccactacgaagaaaacaataacaactactgagatcatgaataagcctgaagagacggccaagccaaaagaccgagctacgaattcaaaggcgactacacctaagccacagaagcctactaaagcacctaaaaaacccacgagcacaaaaaagcccaaaaccatgccccgagtccgcaaacccaagactacccctacaccgcgaaaaatgacctccactatgcctgaactgaatccaacaagtagaatcgcggaggccatgctgcaaacgaccacacgtcctaatcagacccctaattctaagttagtggaggtaaaccccaaaagcgaggacgccggaggcgcagagggcgaaaccccccacatgttgctgagaccccacgtctttatgcccgaggtaaccccagacatggattacctgcccagagtgcctaaccagggtataatcattaacccaatgttgtcggatgaaacgaatatttgcaatggtaaaccggttgacggactcacgactttaagaaacggaaccctggtggcattcagaggtcattatttctggatgctctcaccattttctcctccgtcccctgccagaagaataacagaggtgtggggcatcccatctcctatcgataccgtgttcactagatgcaattgcgagggtaagactttcttcttcaaggactctcagtactggagattcacaaatgacatcaaagacgcaggttaccccaagccaatcttcaagggctttggaggattgacgggacagatcgtcgccgctctgtcaactgcaaaatataagaattggcccgaatccgtctatttctttaagcgcggtgggagtattcaacaatatatttacaaacaggagcccgtccagaaatgtcctggccgacggcctgcattgaactatcctgtgtacggcgaaaccacgcaggtgagacggagacgttttgagagggcaatcggtcccagccagacacatactatcaggatccagtacagtcctgcaaggctcgcataccaagataaaggggtgttgcacaacgaagtgaaagtatccattctttggcggggactaccgaatgtggtgactagcgcaatatccctccctaacattcggaaaccagatggctacgattactatgctttctctaaagatcagtactacaacattgatgtgcctagtcgaaccgcacgggcaatcacaacaagatctggacagactctctcaaaagtgtggtataattgcccttag

SEQ ID NO: 237225 - DNA, 4086 bp, synthetic construct
  misc_feature 1..4086: note = Description of Artificial Sequence: Synthetic coding sequence
  source 1..4086: mol_type = other DNA
atggcgtggaaaacactgccgatatacctgctgctcctcctgtctgtgtttgtaatccagcaggtctcaagccaagatttgagcagctgtgccggacgatgtggcgagggctactccagggatgcgacatgcaattgcgactacaactgtcaacattacatggaatgttgcccggactttaagagggtgtgcactgccgagcttagctgcaaagggcgatgctttgagtcatttgaacggggtcgggagtgcgattgtgacgctcagtgcaagaaatacgacaagtgttgtccagattatgaatccttttgcgcggaggtgcacaatccaacaagtcccccttcctctaaaaaggctccgccacctagtggcgctagtcagactatcaagtccactacaaagcgatctcccaaaccccctaataagaagaagactaagaaagtgatcgaatctgaagagatcaccgaggtgaaagataataaaaaaaaccgcacaaaaaagaaaccaacaccaaagccacccgtggtcgatgaggccggttccggtctagacaatggcgattttaaggttaccacgccggatacatcgaccacgcagcataataaagtctccaccagcccgaaaattactactgccaaaccaataaacccacgtccttccttacccccaaactcagacacttccaaggaaacgagtctaactgtgaataaggagactacagttgaaacgaaagaaacgaccaccacgaataaacagacgtctaccgacggtaaagaaaaaacgacaagcgctaaggagacacagtctatcgagaaaaccagcgctaaggacctggctccaacgtccaaggtgctcgcaaaaccaactcctaaagctgagactactaccaagggccctgcattgaccacaccgaaagagcctaccccaaccaccccgaaggagccagcttccactactcctaaggagcccaccccaacaacaattaagtccgcccctactactccaaaggaacccgcacctacgacaaccaaatccgcacccactacacccaaggaacctgcgcctacaacgaccaaggagcctgcgccaacaacacctaaagaacccgcacctactactaccaaggagcccgcaccgactaccacaaaatctgcccctacgactccaaaagaacctgcccctacgacgcctaagaaaccagcccctactactcccaaggaaccagcccctaccaccccgaaagagccaacacctaccactcctaaggagccggcacccactaccaaggaaccagcacccactacccccaaggagcctgcacccactgcccctaagaaacctgccccaacaactcccaaagagcccgctccaaccacgcctaaggaacctgccccaacaacgaccaaagagccgtcccctactacacctaaagaaccggctcccactaccactaagtcagctccaactacgacgaaggaacccgcacccacaacgactaaatccgcacctaccacacctaaggagccttctcctaccacaactaaggagcccgctccaaccacacccaaggagccggctcctacgaccccaaagaaaccagcacctacgacccccaaggaacctgctccgactacaccaaaggaacctgctcctacaacgacgaaaaaacctgccccaacaaccccaaaagagcccgcaccaacgacacccaaagagacggcccctacaacaccaaagaagctaacaccaacaacaccggagaagctggcaccaactacgcccgaaaagccagcacctacgaccccggaggaactcgctcctaccacccctgaggagcctacccctacgactccagaggagcctgcaccaacgacacccaaagccgctgccccaaacactcctaaggagcctgcacctacgacccctaaagagccggcaccaaccactccaaaggagccagcacccacaactcccaaagaaacagcgccaactacccctaagggaacagcgcctacaaccctgaaagagcctgctccgactacccctaagaaaccagcacccaaagaactggctccaacaacaacaaaagaacccacctccacaacctgtgacaaaccagcccctaccaccccaaaaggtacggcccctaccacacctaaggaacccgcacccactactccgaaggaacctgctcctacaacacccaaggggacagcccctacaacgctaaaggaacctgctcccacaactcctaagaagcctgcgcctaaggagctggctccaaccacgaccaagggacctaccagcactacttccgacaagcccgcacctacgacgccaaaggagaccgctcccaccacgcccaaggagcccgcacccacgactcccaagaagccggcaccaacaactcccgaaaccccccctccaacaaccagtgaagtctcaacaccaaccactaccaaagaaccgacaaccattcataaaagtcccgatgagtccactcctgagctgagtgcagaaccaacgcccaaagcactggaaaattcgccaaaagagcccggtgttcccaccaccaaaaccccagccgcaactaagccagaaatgacaacaacagctaaggataaaacaaccgaacgcgacttgcggactacccctgaaaccacaacggccgctcccaaaatgaccaaggaaaccgccacaaccacggagaaaaccactgagtcgaagataaccgcaacaacgactcaggtgacctcaacgacaacccaggatacaactccgttcaagattactaccctcaagaccaccactctggccccaaaggtcacaactaccaaaaagacaattacgactacggaaattatgaataaacctgaagagaccgccaagccaaaagacagagcaaccaattcaaaggcgactacccctaaacctcaaaaaccaactaaggcccctaaaaaaccgaccagtaccaaaaaaccgaaaactatgccgagagtaagaaaaccaaagaccacaccaactcccaggaaaatgacaagtactatgcctgagctgaacccaacaagccggatagccgaggcaatgctccagaccactactcgcccaaaccagactccaaatagcaagcttgtggaggtcaatccaaaaagcgaggacgcagggggagctgaaggcgaaacaccccacatgctcctgcgccctcatgtctttatgccggaagtaaccccggacatggattaccttccgcgagtgccgaatcagggcataataattaaccctatgttaagcgacgagacgaacatctgtaatggtaagccagttgacggtcttacaactctccggaatgggaccctggtggcctttagaggccattatttctggatgctatcccctttctcgccaccatcccccgcaagacgaataacggaagtctgggggatcccttcacccatcgacacggtctttacgcgatgcaattgcgaaggtaagactttcttttttaaggatagccaatactggcgcttcacgaatgatattaaggatgcaggctaccctaaacccatctttaaaggatttggaggcctaacaggtcagattgtcgccgctttgtcaactgccaagtataagaattggcccgagtctgtatatttcttcaaacggggaggatcgatccagcagtacatttacaagcaggagccggttcagaagtgtcctgggcgtcgaccagccctgaactaccctgtgtatggagagaccacacaagtgcgcagaaggaggtttgaacgagctattgggccttcccagactcacaccatcagaatacagtacagcccagcacgtttagcttaccaggataagggagtgctccataatgaggtgaaagtgtcgattctctggaggggcctgcctaacgtggtgacaagcgcaattagcttacctaatatccggaaacctgatggctacgattactatgcgttctcaaaggatcagtattataatatcgacgtgcccagccggaccgccagggccataacaaccaggtctggccagaccctgagcaaagtctggtataattgcccctag

SEQ ID NO: 237226 - DNA, 4215 bp, synthetic construct
  misc_feature 1..4215: note = Description of Artificial Sequence: Synthetic coding sequence
  source 1..4215: mol_type = other DNA
atggcttggaaaacactcccaatatatctgttactgctgctctcagtgttcgtgattcagcaggtcagttcacaggacctgtcttcttgcgccggacggtgtggcgaaggttatagccgtgatgccacgtgcaattgcgattacaactgtcagcattacatggaatgttgcccagacttcaagagagtgtgtacagcagagctttcatgcaaagggagatgtttcgagtcattcgagcggggtcgggagtgtgattgtgatgcccaatgtaaaaagtatgacaagtgttgccccgactacgaatcattttgcgctgaggttcataaccctacatcccccccttcctctaagaaagccccaccccctagcggtgcctcacagacgatcaaaagtaccaccaaacggtctccaaagcctcccaataagaaaaagaccaagaaggtgatagaatccgaagagatcaccgaagaacacagcgtgtcggaaaatcaggagtcgtcttcaagtagcagtagtagcagcagtagctcaacgattagaaagatcaagtctagcaaaaattctgcggctaacagggaacttcagaaaaaattgaaggtcaaggacaacaagaaaaataggactaaaaagaagcctacacctaagccccctgttgtcgacgaggccggtagcggtcttgataatggcgacttcaaagtcaccacccctgacaccagcacaacccaacacaataaggtgtccactagtcctaaaatcacaaccgccaagcctatcaaccccaggccatcactaccgcctaacagcgacacatccaaggaaacttctttaactgtcaataaggaaaccaccgttgagaccaaagagaccactacaactaataaacaaaccagcacagacggcaaggagaagactacttccgccaaggagacacaatcaattgagaagactagcgccaaggatttggcccctacaagtaaagtcctggcgaaaccaactcctaaagcagagactaccacaaaagggccagccctcacaaccccaaaagaaccgacgcccactacccccaaggaacccgcttctacaaccccgaaagagcccaccccaacaacaatcaagtcagctcctacaacacctaaagagcctgctcctacaaccaccaagagcgcacccaccactcccaaggagcccgcacctactacaaccaaggagcctgcgccaacaactccgaaggaaccagcccctactaccacaaaggagcccgctccaaccaccactaagtctgccccaaccacaccaaaggagcctgccccaaccactcctaaaaagccagccccaacaaccccgaaagaaccagccccaaccacaccaaaagagcctacgcctacgacccccaaagaacccgctcctaccaccaaggagcctgctcccacgactcctaaagagcctgcccctaccgcccctaaaaagcccgcacccacaactcctaaagagcctgccccaacaactcctaaggaacccgcaccaacaacgacaaaagagccctcacccactactcctaaagaacccgctcccacaaccaccaagtctgccccaaccaccaccaaggaaccggcacccaccacaaccaagtccgcacctacgacacctaaagaacctagtcctactaccactaaagagcctgcgcctacaacgccaaaggaaccagcaccaacaaccccaaaaaagccagccccaacaaccccaaaggagcctgccccaacaacccctaaggaaccggctcccaccacaacgaagaaacccgcaccaaccacccctaaggagccagctcctacaaccccaaaggagacagcccctactacccccaagaagcttacccccacaacgccagaaaagctagccccaacaacgcccgagaagcccgctcccacaacacccgaggaactggcaccgacgactcctgaagaaccgacgccaacaactcctgaagagcccgctccgaccacaccaaaggccgcagcccctaacacccctaaggaacccgcaccaaccactcccaaggagcctgcgccaaccaccccaaaggagcctgcacccaccactccaaaagaaactgctccgaccactcctaaaggcacagcacccactacactgaaggagcccgctccaaccacccccaaaaagcctgcacccaaggaactcgcgcctaccaccactaaggagcccacctcaaccacttgtgacaagccagcccctactacccccaagggtacagctcccacaacacccaaggagcccgctcccacaactcccaaggagcccgcaccgaccaccccaaaaggaacagctcccaccactctcaaggagcccgcacccaccacccccaagaaacccgctccgaaggagttagcgccaacaacaaccaaggggccaaccagtaccaccagcgacaaacccgcacccaccacgcctaaggagaccgccccaacaacaccaaaagaacctgctccaacaactcctaaaaaaccggcacctaccacgccagagacgccacctccaacgacatccgaagtctccacccccaccaccacaaaggagccgaccaccattcataagagcccagacgagtccactcccgaactgtctgccgagccaaccccaaaggccctggagaatagcccaaaggaaccaggggtcccaaccaccaaaaccccggctgctacaaaacccgagatgacaacaaccgccaaggataagacaacagagagggacctgcgaaccacacccgagactaccactgccgcaccaaaaatgaccaaagaaacagccactactacagaaaagaccaccgaatccaaaattactgccacgacaacccaggtcacttcaactacgacccaggacacaaccccgttcaagatcaccaccctcaagacaacgacccttgcacccaaagtcacaacaaccaaaaaaactattaccaccacagagatcatgaacaaaccagaagagactgctaagccgaaggaccgcgctacaaactctaaggcaacaactccgaagcctcagaaaccgaccaaggctcctaaaaagccaacatccaccaagaagccaaaaactatgcccagggtcaggaagcctaagaccacccccactccacgcaaaatgacaagcacaatgccggagcttaaccccaccagtagaatcgccgaggccatgttacagaccaccacacgacccaaccagactccaaacagtaagctcgtcgaggtcaaccccaagagcgaagacgccggaggggcagagggagaaaccccgcacatgctgcttcggccacatgtgtttatgcctgaggtgactccagacatggattatttaccgagggtgcccaatcagggcattattattaacccaatgctgagcgacgaaacgaatatctgcaatggaaagcctgtcgacggccttaccactcttaggaacggcacactggtggccttccgtgggcattatttttggatgctgagtccattcagtcccccatccccagcgagaaggattaccgaagtttggggaattccttcccccattgacaccgtgttcaccagatgtaattgcgagggaaagacttttttctttaaggatagtcagtactggcggtttacgaacgacatcaaagacgcaggctaccccaagccaatattcaaagggtttggcggattgaccggtcagattgtcgctgctttgtcaacagctaaatacaaaaactggcctgaaagcgtgtacttctttaagcggggtggctctattcaacagtacatctataaacaggagccggtccagaagtgtccaggccgaaggccagccctgaactatcctgtctacggggagaccactcaggtgcggaggcgcaggttcgagagggcaatcggaccctcacagacccacacgatccggatacagtatagcccagccaggctggcctaccaggataaaggcgtgctgcacaatgaggttaaagtgagtatcctttggcgcggactacccaacgtcgtgactagcgctatcagcctacccaacattcgaaagcctgatggctatgactactacgccttttcgaaggaccagtattataatatcgacgtgccttctagaacagcgagggctatcacaacccggtctgggcagaccctttcaaaggtttggtataactgtccttag

SEQ ID NO: 237227 - DNA, 834 bp, synthetic construct
  misc_feature 1..834: note = Description of Artificial Sequence: Synthetic coding sequence
  source 1..834: mol_type = other DNA
atgggcctgctcgagtgctgtgctaggtgtctggtgggcgcaccatttgcttccctggtggcaacaggattgtgtttctttggtgtggctctgttttgcggctgtggacacgaggccctgacaggcacagagaagttaatcgagacatatttctcaaagaactatcaggactacgagtaccttattaacgtgatccatgctttccagtatgttatttacggcaccgcgagttttttcttcttgtacggcgcactgttgttagcagagggcttttacactactggcgcagtgaggcagatattcggggactacaagactacaatctgcgggaaaggactcagcgccacagtaactgggggtcaaaaaggcaggggctctagaggtcagcatcaagcccacagtctggagagagtgtgtcattgtctgggcaaatggttgggccacccagacaaattcgtcggaattacatatgcccttaccgtggtatggttgctggtgtttgcctgttccgccgtacctgtctacatctactttaacacctggacaacatgtcagtcgatcgcctttccatcaaagaccagcgcaagtattggttctctgtgcgccgatgcccgaatgtatggtgtgttgccttggaatgctttcccaggcaaagtgtgtggtagcaatctcctttccatttgcaaaacagccgagtttcagatgactttccacctctttattgcggcatttgtcggcgcagccgctaccctcgtcagtctgctgacttttatgatagccgctacatacaactttgccgttctcaaattaatggggaggggcacgaagttctag

SEQ ID NO: 237228 - DNA, 729 bp, synthetic construct
  misc_feature 1..729: note = Description of Artificial Sequence: Synthetic coding sequence
  source 1..729: mol_type = other DNA
atggggctgcttgagtgctgcgccagatgtctcgtgggcgcacctttcgcctctctcgtagctacaggtctgtgtttctttggggtggcgcttttttgtggttgtggccatgaggccctcactgggacagagaagcttatcgagacatatttcagcaaaaattaccaggattacgaatatttgattaacgtgattcatgcatttcaatatgtcatttatgggaccgctagtttcttcttcctgtacggagcgctcctgttggccgaggggttttacactacaggagccgtgcgccagatatttggagattacaaaacaacaatatgtggtaagggcctgtccgccaccttcgtgggcattacctacgcacttacagtcgtgtggctcctggtctttgcctgtagcgcggttccagtgtatatctacttcaacacgtggaccacttgtcagagcatcgcttttccatctaagacctctgcttcaatcgggtctttgtgcgcagacgcgaggatgtacggtgtgctgccctggaacgcctttccaggcaaagtatgcggctcaaacttactgtcgatctgcaaaactgcggaatttcagatgacgtttcacctgttcatcgctgcctttgtcggggctgctgcaactctcgtgtccctgctcaccttcatgatagccgcaacctataactttgcagtacttaaactcatggggagaggtactaaattttag

SEQ ID NO: 237229 - DNA, 834 bp, synthetic construct
  misc_feature 1..834: note = Description of Artificial Sequence: Synthetic coding sequence
  source 1..834: mol_type = other DNA
atgggcctcctggagtgctgcgccagatgtcttgtgggggctccattcgcaagcctggtggcaacaggcctttgtttttttggagtagccttgttttgcgggtgtggccacgaagctttaacagggacggagaaattgatagagacttatttctccaagaactaccaagattacgagtatctgataaacgtgatacatgctttccagtacgtcatttatggaacagcgagcttttttttcttatatggtgcactcctgttggccgagggtttctacacaaccggcgcagttcgacagatcttcggggactacaaaactaccatctgcggcaagggactcagcgctaccgtgactggcggacaaaagggaaggggtagtcgagggcaacaccaggcacatagcctggagcgtgtctgccattgcttgggcaaatggctgggccatcccgacaagtttgtgggaattacgtatgcattgacagttgtttggttgttggtgttcgcatgctctgccgtacccgtatatatttactttaacacgtggacgacttgccagagtattgcattcccctccaagacatcagcaagcattgggtccctctgtgccgatgctcgcatgtacggggtgctaccatggaacgcctttccaggaaaagtctgtggctccaatctgctgtcgatctgcaagaccgcggagttccaaatgactttccatcttttcatcgcggctttcgtgggcgcagccgctacactagtcagtctgcttaccttcatgatcgctgctacttacaatttcgcagtcttgaaactaatggggagagggactaagttctag

SEQ ID NO: 237230 - DNA, 384 bp, synthetic construct
  misc_feature 1..384: note = Description of Artificial Sequence: Synthetic coding sequence
  source 1..384: mol_type = other DNA
atgggcctgctcgaatgctgtgctagatgcctggttggtgcaccgttcgcttctcttgtggcaaccggcctgtgcttctttggcgttgccttgttctgcggatgcggtcatgaagcactgacaggcactgagaaactaatcgaaacgtatttctctaagaattaccaggactatgagtacctgattaacgttatacacgcctttcagtacgtaatctatgggacagctagctttttctttctgtatggtgccctgcttcttgctgagggattttatactactggagccgttaggcaaatctttggggactacaaaaccacgatttgtggcaagggcctgagcgccacggtgaccggcggacagaagggtagaggctctcgctag

SEQ ID NO: 237231 - DNA, 768 bp, synthetic construct
  misc_feature 1..768: note = Description of Artificial Sequence: Synthetic coding sequence
  source 1..768: mol_type = other DNA
atgggacttctggaatgctgtgcccgttgtcttgtcggcgctcccttcgcctcccttgtggccacgggtctgtgcttttttggtgttgccctgttctgcggctgtgggcacgaggctctgacaggtacggaaaagctgatcgagacatatttctcaaaaaactatcaagactatgagtacctaattaacgtcatccacgcgtttcagtatgtgatctatggaacggcatcattcttctttctgtatggagcattgctccttgctgagggcttttatacaacaggcgcagtacgccagaagggcaggggatccagaggtcagcaccaggcgcacagtctagaacgcgtctgccactgcttaggcaaatggttaggccacccggataagttcgtcggcataacgtatgccctgactgtggtttggctcctcgtcttcgcatgctctgccgtgccagtgtacatctatttcaacacctggaccacttgccaatcaattgcttttccaagtaagacttccgcttccatcggatccttatgtgcggatgcccgaatgtatggggttctgccctggaatgcatttccgggtaaagtctgcgggagcaacctgctgtctatttgcaagacggctgagtttcagatgacattccacctatttattgccgctttcgtgggcgcagccgcaaccctggtgtccctcttgacgtttatgattgccgctacctataatttcgctgtcctaaagctgatggggcgtggaacaaagttttag

SEQ ID NO: 237232 - DNA, 414 bp, synthetic construct
  misc_feature 1..414: note = Description of Artificial Sequence: Synthetic coding sequence
  source 1..414: mol_type = other DNA
atgggcttgctagaatgctgcgctcggtgtttggtgggcgcaccttttgcaagccttgttgccaccggactctgtttcttcggtgttgccttgttttgtgggtgcgggcatgaggccctgaccggcaccgagaagctgatcgagacctactttagcaagaattatcaggattacgagtatctaataaacgtgatccacgcctttcagtatgtcatttacgggaccgcatcattcttctttctgtacggagccttgctgctagctgagggattctacaccaccggcgcagtcaggcagatatttggtgactacaagacaacaatttgtggtaagggactgtctgctacagtgacagggggacagaaaggacgagggtccaggggacaacatcaggcgcactcattggagcggtag

SEQ ID NO: 237233 - DNA, 303 bp, synthetic construct
  misc_feature 1..303: note = Description of Artificial Sequence: Synthetic coding sequence
  source 1..303: mol_type = other DNA
atgggcttacttgagtgttgtgcccgatgcttggttggggctccctttgcctctctggtggcaacagggctgtgcttttttggggtagccctgttttgtgggtgcggccatgaggcccttacaggcacggagaagttgatcgagacttactttagtaagaattaccaagattacgagtacctgattaacgtaatacacgccttccagtatgtgatctacggaacagctagcttctttttcctgtacggcgctttactgctggccgaagggttctatactaccggcgctgtgcggcaaatttag

SEQ ID NO: 237234 - DNA, 372 bp, synthetic construct
  misc_feature 1..372: note = Description of Artificial Sequence: Synthetic coding sequence
  source 1..372: mol_type = other DNA
atgggtcttctggagtgctgtgcgagatgtctcgtaggggcaccgtttgcctctctggtagcaaccgggctgtgtttttttggggtggccctcttctgcggttgcggccatgaagccctcactggtacagagaagttaattgagacttacttttctaaaaactatcaggactatgaatacctcatcaatgtgatacacgcctttcaatacgtgatttatgggaccgcaagtttctttttcctctatggtgcactcctgctcgccgagggattttacacgaccggagccgtgcgccagatctttggggactataagaccaccatttgcggcaaagggttgagtgccacggtgaccgggggtcagaaaggatag

SEQ ID NO: 237235 - DNA, 339 bp, synthetic construct
  misc_feature 1..339: note = Description of Artificial Sequence: Synthetic coding sequence
  source 1..339: mol_type = other DNA
atgggtctcctggaatgctgtgcccgatgtctcgtgggcgcaccttttgccagcctggtggctaccgggctgtgttttttcggcgtggcgctgttctgcggttgtgggcacgaagcactgaccggtactgagaagttaatcgagacttacttctcaaagaattaccaagactatgagtacctgattaacgtgattcacgccttccaatacgttatttatggaacagcatcattctttttcttatacggagcgttactactggctgagggattttacactacaggagcagtgaggcaaattttcggagattacaagactacaatctgcggcaaggggtag

SEQ ID NO: 237236 - DNA, 411 bp, synthetic construct
  misc_feature 1..411: note = Description of Artificial Sequence: Synthetic coding sequence
  source 1..411: mol_type = other DNA
atgggtctcctggagtgttgtgccaggtgcctggtgggagccccatttgctagcttagtagccactggcttgtgttttttcggcgtggctctcttctgcgggtgcggccacgaggcactcacaggcaccgagaaacttattgagacctatttttccaagaattaccaggattacgagtacctgataaacgtcatccacgccttccaatatgtcatctatgggacggcatccttctttttcttgtacggagccctactgctcgcggagggcttctacactacgggggcagttcgtcagatttttggcgattataagacgaccatctgcgggaaaggactgtccgcaaccgtgactggcggacaaaagggaaggggctccagggggcagcaccaggcacacagcctggagtag

SEQ ID NO: 237237 - DNA, 438 bp, synthetic construct
  misc_feature 1..438: note = Description of Artificial Sequence: Synthetic coding sequence
  source 1..438: mol_type = other DNA
atggcagacagcgaacggctgagcgctcccggttgctgggccgcatgcacgaattttagtaggactcggaaggggatactcctgttcgcagaaatcatcttgtgtctggtgattctaatttgttttagtgccagcacccctggctattcttcgctatccgtcatcgaaatgattctcgccgctatcttttttgtcgtttacatgtgcgatctgcacacgaaaataccttttattaactggccctggtctgatttcttccgcacactgattgccgcaattctgtatctaatcacatcgatcgtcgtgctggtcgaacgcggaaatcacagtaagatagtggccggtgtgaaggccatgggggcagccctcaaacatagagccaagggactccgctcccaggggccattcctccctctgctgctggctgaaatcgtgtag

SEQ ID NO: 237238 - DNA, 459 bp, synthetic construct
  misc_feature 1..459: note = Description of Artificial Sequence: Synthetic coding sequence
  source 1..459: mol_type = other DNA
atggccgactccgagcgactgagcgcccctggctgctgggctgcatgcaccaatttttcccgcacacgtaagggcatccttctttttgctgaaatcatcctttgtctggtcatactcatctgtttcagtgccagtaccccaggctactcatctctgtcagtgatcgagatgatcctcgctgcaattttcttcgtcgtatacatgtgtgacctgcacaccaagatccctttcatcaattggccgtggtccgatttcttccgaacgctgattgctgctatcctctatctcatcacttctatcgtggtgcttgtggaacgtggcaaccatagtaagatcgtggccggagtcctcggtctgatagccacctgccttttcggttacgacgcctacgtcacctttccagtacgtcaacccagacatacagcagcaccgactgatcctgctgatggccctgtgtag

SEQ ID NO: 237239 - DNA, 336 bp, synthetic construct
  misc_feature 1..336: note = Description of Artificial Sequence: Synthetic coding sequence
  source 1..336: mol_type = other DNA
atgtccgatgccgctgtggataccagcagtgagatcaccaccaaagaccttaaggaaaagaaggaggtcgtggaggaagccgaaaacgggcgagacgctcccgcaaacggaaacgcggaaaacgaggagaacggagaacaggaggcggataacgaggtggacgaggaggaggaggaaggtggagaagaggaggaagaggaggaggagggtgacggcgaggaggaagatggggatgaggatgaagaggccgaaagtgctaccggcaagagggccgcagaggatgatgaggatgacgatgtcgatacaaagaagcaaaaaactgacgaggatgactag

SEQ ID NO: 237240 - DNA, 408 bp, synthetic construct
  misc_feature 1..408: note = Description of Artificial Sequence: Synthetic coding sequence
  source 1..408: mol_type = other DNA
atgcagacgttcggtccagccggagtggccgcagttgggagacgggtggagtccccagcagatagaagggccacacgtgcatgtcactgcaaattgtgtctcccagcaggaagtctccagggcctcaagggcgaagagggcagtgtcgaagaggcagaaaatgggagagatgccccagccaacggaaacgccaatgaggagaatggagaacaggaggcagataacgaggtcgatgaagaggaagaagaagggggagaggaggaagaggaagaagaagaaggtgacggcgaggaagaagacggggacgaagacgaagaggctgagagcgccactggcaaacgcgctgccgaggatgatgaggacgatgatgtagacacaaaaaagcagaaaacagatgaagacgactag

SEQ ID NO: 237241 - DNA, 333 bp, synthetic construct
  misc_feature 1..333: note = Description of Artificial Sequence: Synthetic coding sequence
  source 1..333: mol_type = other DNA
atgagcgatgccgcagtagacacatcctccgagattactaccaaggaccttaaggaaaagaaggaggtggtggaggaggccgagaacggacgcgacgcaccggcaaatggtaacgccaatgaagagaatggagaacaagaggccgacaacgaggtcgacgaggaggaggaggaggggggagaagaagaggaggaagaggaggagggggatggggaggaggaggatggtgacgaggacgaggaggccgaatccgccacaggtaagcgagcagctgaggacgacgaagatgacgatgtggacaccaagaaacagaagacagacgaggacgattag

SEQ ID NO: 237242 - DNA, 3714 bp, synthetic construct
  misc_feature 1..3714: note = Description of Artificial Sequence: Synthetic coding sequence
  source 1..3714: mol_type = other DNA
atggatagtggtgctggcggtcggagatgccctgaggccgctttattaattctcggcccacccaggatggagcatttaagacactcccccggtccaggaggacagaggttgctccttcctagcatgcttctggccttacttctgctcctagctccctcacctgggcatgcaacgagagtggtctataaagtccccgaggagcaacccccaaataccttgattgggagcttagcagcagattacggatttccagatgtcggtcacctgtataagttggaggtcggcgcaccatatctgcgcgtggacggtaagaccggtgatatattcaccacggaaacctcaattgacagggaagggctacgggaatgccagaaccagttgcccggagatccatgtatactggaattcgaagtgagcataactgatctggtgcagaacggaagccccaggctcctggagggacagatcgaggtgcaagatattaacgacaacaccccaaattttgcctcccccgtaattacactggctatcccggagaacacaaacatcggaagccttttcccaatcccattagcctctgatagagacgcagggcctaatggggttgcttcatacgagctccaggcgggtcctgaggcccaagagctgttcggactccaagtcgccgaggaccaggaagagaagcaaccacagctaatcgtgatgggaaatctggatcgtgaacgttgggacagctacgacctgacgatcaaggttcaagatggcggatcaccgccacgggcttcatccgctttgttacgagtgactgtgctggataccaatgacaatgctccgaagtttgagaggccttcatatgaggcagagctttccgagaattccccaataggccattccgttatccaggtaaaagccaatgactcggatcagggcgcaaatgctgaaatcgagtacaccttccatcaggctccagaggtggttcggaggctcctgaggctcgaccgcaatactggactgatcacggtccagggtccggttgatagggaggatctcagcacgctgcgctttagcgtgctcgccaaggaccggggaacaaaccccaaatctgccagagctcaggtggtggtgacagttaaggacatgaatgacaatgcacccacgatcgaaattagaggtattggacttgttactcaccaggatggcatggccaatatctctgaggatgtggccgaggaaacagcggtggccctggtccaagtaagtgacagggacgaaggcgagaacgcggcagtgacatgtgtggtcgctggcgacgttccatttcagctgagacaggcctccgagaccggttccgattccaagaagaagtattttctccagaccactacaccattggattatgagaaggttaaagactacacaatcgaaattgtggccgtggacagcgggaatcctccgctgtcctctacaaattctctgaaggtgcaggtggtggacgtgaacgacaatgctccggtttttacgcaaagcgttactgaggtcgcatttcccgagaataacaagcctggtgaggtcattgcagagatcaccgccagcgatgccgacagtggttctaacgccgagctagtctattccctcgaaccggaaccagcggctaaaggactgttcaccataagccctgaaacaggcgaaatacaagtgaagacctcactagacagagaacagagggaatcttacgaattgaaggtagtggctgccgatcgcggatctccatctcttcaagggacggcaaccgtcttggtcaatgttctggattgcaatgataacgatcccaagttcatgctctccggttacaatttctcagtgatggaaaacatgccagccctgagccccgtgggcatggtgacggttatcgacggcgacaagggcgaaaatgcacaggtgcagttatctgttgagcaggacaacggcgatttcgttatccagaacggcacgggtacgattctgagctccctgtcctttgatcgggagcagcaaagtacttacacattccagttgaaagctgtggatggcggagttcctccaaggagtgcttacgttggagtgacgataaatgtgttggacgaaaacgacaacgcaccatatatcacagcgccaagtaacaccagccacaagcttctgacgccacaaaccaggcttggtgagactgtgtcgcaggttgccgctgaagactttgacagcggcgttaacgctgagcttatctactccattgccggaggaaatccttatggtctcttccaaatcggctcccactcaggagccatcactcttgaaaaggagattgaacgtcggcatcatgggctccatagactcgtcgtcaaagtctctgacaggggcaagccacccaggtacggtaccgcactggttcatctttacgtgaacgaaaccttggctaacaggaccctattggagaccctgcttggacacagcttagataccccgctggacattgatatcgcaggcgaccccgagtatgaaagaagcaagcaaagggggaacatcctgttcggcgtggtggccggtgtcgtggcggtggcgcttctaattgcgttggcagtcctggttcggtactgcagacaacgcgaggccaaaagtgggtatcaggccggaaaaaaggagacaaaggacctatatgcccctaagccctcaggaaaggcttcaaaaggaaacaaaagtaaagggaagaagagcaagagcccgaagccagttaaacctgtagaggatgaggacgaggcaggattgcaaaagtctcttaagtttaatctaatgagtgacgctcccggagattccccacgaatccacctccccttgaactacccccctggcagcccagacctcgggagacattacagatccaatagccccttgccctcgattcaactgcagccccaaagcccctctgccagtaagaaacaccaggtggtgcaagacttaccgcctgcaaataccttcgtaggtactggcgacactacatccacaggctctgaacagtatagcgattacagctaccgaacaaaccctccgaagtacccatccaagcagctgccacacaggagagtgactttttctgcaaccagtcaggcccaggagctgcaggacccctcccagcattcttattatgactctgggttggaagaaagcgagaccccaagctccaagtcatcttctggtccacgactcggccctctcgcactcccagaggaccattacgagaggacaacacctgatggtagtataggcgaaatggaacacccagaaaatgatctacgccctttgcccgacgtggctatgactggaacctgcacacgggagtgttctgagtttggacactcagacacctgttggatgccaggccaatcttctccctctagaagaactaagagtagtgctctgaagctttctactttcgtgccatatcaggaccggggtggccaggagccagccggagccggaagccccagtccccctgaggaccggaataccaaaactgcccctgtacggctgctacccagttatagtgctttctctcactcaagtcacgactcctgcaaggattccgccactttagaggagatacctttaacgcagacatccgactttccaccggctgctactccagctagcgcccagactgcaaaaagggagatctacttgtag

SEQ ID NO: 237243 - DNA, 3183 bp, synthetic construct
  misc_feature 1..3183: note = Description of Artificial Sequence: Synthetic coding sequence
  source 1..3183: mol_type = other DNA
atggactcaggcgctggcggaagaagatgtccagaggccgctttgctgatcctggggcctcctcgaatggagcacctacgccactctcctgggccagggggtcaacgtctgttgctgccctcaatgcttcttgccctgctgttactgttggcaccatctcccggtcacgctacccgcgttgtgtacaaagttccggaagagcagcctcctaatacactgataggtagcctggccgcagattacgggtttccggacgtaggacacctctacaaattggaggtcggtgctccctatttacgagttgatgggaaaactggagacattttcaccactgagaccagtatcgaccgggaagggttacgagagtgtcaaaatcaactgccaggggacccctgcatacttgaattcgaggtgagcattacagacttggtccagaatgggagccctagactgctggaagggcaaatcgaggtgcaggacatcaatgacaacacccctaatttcgcctctcctgtgatcacactcgccatccccgagaacaccaatatcggtagccttttccccatacccctggccagcgatagggacgctgggcctaatggagtcgctagctacgagctccaggccggaccagaggctcaggagctcttcggactgcaagtggcagaggaccaggaagagaagcaacctcagctgatcgtcatgggaaacctcgatcgagaacgatgggactcttatgacttgacaatcaaggtgcaggatggcggatcacccccacgtgcgtcctccgcattgctgcgggtcacagtgctggatacaaacgataatgctccaaaattcgagaggccatcctacgaagccgagctgtccgagaattcccccatcgggcactccgtgatccaggtgaaggccaacgacagcgaccaaggtgcaaacgcagaaattgagtacacttttcaccaggcacccgaagtcgtgaggcggcttttgaggttagaccgcaacactggcttgattaccgttcaagggcctgtagatcgcgaagacctgagcactctgaggttttcagttcttgcaaaagatcgcggtactaaccctaaatccgcacgcgcacaggttgttgtcacggtgaaggacatgaatgataacgctccaacaattgaaattcggggaatcggattagtgacgcaccaggacggcatggcaaacatttccgaagatgttgcggaggaaacagctgtcgccctggtgcaggtttcggatagagatgaaggtgagaacgcagcagttacatgtgtagtcgcgggagacgtgccctttcagctgcgtcaagcttctgaaacaggcagtgattcaaaaaagaagtatttcctgcaaaccacgacccctcttgactatgagaaagtcaaggattacacaattgaaattgtcgccgttgacagcggcaatccacccctttcttcgacgaattccttgaaggtgcaggtcgttgatgtgaatgataatgccccagtctttacccagagcgtgacagaagtcgccttcccagagaacaacaagccaggagaggtcatagccgagatcactgcctcagacgctgatagcggatccaatgccgaactggtgtatagtttggaaccggagccggcagctaagggattatttaccatctcacccgagaccggggagattcaggttaaaacctcactggatcgagagcagcgggaaagttacgaattgaaagtggtcgccgcagaccggggttccccttctctccagggcacagctacagtccttgtcaatgtcctagactgtaacgacaacgatccaaagttcatgctatcgggttacaacttttccgtcatggaaaatatgcccgcactgagtcccgttggcatggtcaccgttattgatggagacaagggagaaaatgcccaggtacaactgagtgtagagcaggataatggagattttgttatccagaacggcactggaaccatcctgtcttcgttaagcttcgatcgggaacaacagagcacgtatactttccagttgaaagccgtagatggtggggtgccaccaaggtccgcttatgtgggggtcacgataaacgtcctggacgagaacgacaacgctccctacatcacggctccttcgaatactagtcataaactactgacaccacagactaggctcggggagactgtgagccaggtggcagccgaagacttcgattccggcgtgaatgctgagctcatatactctattgccggtgggaacccgtatggcctgttccagatcggaagccactcaggggcaattacacttgaaaaagagatcgagagaaggcaccacggcctgcaccggctggtggtcaaagtgtccgatcgaggtaagccgcctcgttacggtaccgcactggtacatctttacgtgaacgagaccctagccaatcggacccttctcgagactctgttggggcactctctcgatacccctttggacattgatatagcaggggatcccgaatatgagaggagtaagcagcgcggaaacatcctgttcggcgtggtagccggtgtagtggctgtggctctcctcatcgctttggcagtcttggttaggtactgccgtcagcgggaggctaaatcaggctaccaagctgggaagaaagagactaaagatctgtacgctcccaagccaagcggtaaggcaagcaagggaaacaaatctaaagggaaaaagtcgaaatccccgaagcccgtcaagccggtagaagatgaggatgaggccggactgcagaaatctctgaaattcaatctgatgtccgacgcgcctggcgactcccctcgcatccacctaccattgaactacccccctggctcccctgacctgggccgacactataggtctaactcacccttgccgtccatccagctgcaaccacagtcccctagcgctagtaagaaacaccaggtagtgcaagaccttccacctgcaaacaccttcgtcgggactggagacacaacctccacgggatcggagcagtacagtgactattcttaccgcactaatccaccaaagtacccttcaaagcaggtgggtcagccatttcagctcagtaccccacagcccttgcctcacccataccacggcgcaatctggactgaggtgtgggaatag

SEQ ID NO: 237244 - DNA, 3147 bp, synthetic construct
  misc_feature 1..3147: note = Description of Artificial Sequence: Synthetic coding sequence
  source 1..3147: mol_type = other DNA
atggacagcggggcaggcggaagacgatgtccagaggccgctctacttatactgggaccccctcggatggagcacctccgccacagtccgggaccaggcggacaaagacttcttctgccctccatgctgttagccctgctgctgcttttggccccaagcccagggcacgccacacgagtggtgtataaagtccccgaagagcagcctcctaacacactcatcgggtcactggccgctgattacggatttcccgacgtgggccatctctacaaacttgaagttggcgcaccttacctccgcgtcgacggtaagacgggggatatatttacgacagagacatcaattgatagggagggactgagagagtgccaaaaccagttgcctggcgacccctgtattctggaatttgaagtgagcattactgatcttgtgcaaaacggatcaccgcgtctcctggagggccagatcgaagtgcaggatattaatgataatacacctaatttcgcctctcccgtgattactctggccatcccagagaacactaatatcggtagcttatttccaattcctcttgcttctgatagggatgccggacccaacggtgtggcgtcctacgaactgcaggtcgctgaagatcaggaggaaaagcaaccgcagctgattgttatgggaaacttagaccgcgagaggtgggactcttatgacctgaccattaaggtccaggacggcggatcacctccccgagccagctcagcgcttctgcgagttaccgtcctggacaccaacgacaatgctccaaaatttgaaaggccatcatatgaggccgagctgtctgaaaatagccccatcgggcactctgttatccaagtgaaagctaacgattctgatcagggtgccaatgctgaaattgagtacacttttcaccaagcacccgaagtcgtgaggagacttctgagactggatcgcaatactgggctgattactgttcaggggccagtcgatcgggaggacctttctacactgcggttttcagtgttggccaaagacagggggactaatccaaagagcgccagggcacaagtggttgtcaccgtcaaagacatgaacgacaatgctcccactatcgagataagaggtatcgggcttgttactcaccaggacggaatggccaacatctccgaagacgtcgcagaagagacagccgtagcgttggtccaggtctctgatagggacgaaggagagaacgcagcggtaacctgcgtcgtcgccggtgacgttcctttccaacttcgccaggctagcgagaccggaagcgactcgaaaaagaaatactttttacaaaccaccactcccctggactacgaaaaggtgaaggactataccatcgagattgttgcggtggattccggaaacccacctctatcatcaacgaattccctgaaggtgcaggttgttgacgtgaatgacaatgctcctgttttcacccagtcggtgacagaggtcgccttccccgagaacaacaaaccaggagaggtgattgcagaaataaccgctagcgatgctgactcaggatcgaacgccgaactcgtatactctcttgaaccggagccggctgcgaaggggctcttcaccattagtccagagaccggcgagattcaggtcaaaacaagtctggaccgggaacagagggaaagctacgaactgaaggtggtggctgcagaccggggttctccttccttgcaggggaccgccaccgtcctcgtgaatgtgctggactgtaatgataatgaccccaagtttatgttgtccggatataacttctctgtcatggagaatatgcccgcacttagtccagttggtatggtcactgtaattgatggtgataaaggtgagaatgcccaggtacagctaagcgtcgaacaagacaatggtgatttcgtaatacagaacggcacgggaaccattttatcctcattgagtttcgatcgcgagcagcagtccacatataccttccagctgaaggctgtcgatggaggcgtgccgccacgaagcgcctatgtgggcgtcactattaacgttctggacgagaacgataacgccccttatattaccgcccctagcaacactagccataagcttctgaccccacagacaaggctaggagaaacagttagtcaggtggctgccgaagacttcgattccggggtgaacgctgagttgatctactcaatcgctgggggaaacccctacggcctgttccaaatcggatctcacagcggcgcaataacattggagaaagagattgagaggcgacaccacggccttcataggctggtcgtgaaagtgagcgaccggggtaagccaccgaggtacgggacagcccttgtgcacctgtacgtgaacgagactctggccaacaggacgctattagagaccctgctgggccactccttagacacaccgctcgacatcgacatagctggcgatccagaatacgagaggtcaaagcagaggggaaacatcttgttcggcgtggtggcaggggtggtggcagtggccctgttgatcgctctcgcggttctggtaagatactgccgacagcgcgaggcaaaatcaggctaccaagcaggcaagaaagaaactaaagatttgtacgcacctaaaccctctggaaaagcaagcaaggggaacaaatcaaagggaaaaaaatcaaagtcacccaagccagtcaaacccgtggaagacgaggacgaagcgggattacaaaaatccctgaagttcaacctgatgtctgacgcaccaggtgattcacccaggatccatctccctctcaactacccacctggatctccggatctaggtcgccactatcgatcaaacagtcctctgccatcaatccagctgcagcctcagagcccctccgccagcaagaagcaccaagtggttcaggacctaccgcctgctaatacttttgtgggcactggcgacactacttcgactgggagcgagcaatacagtgactatagctatcgcacaaatccacctaagtatccatctaagcaggtgggtcaacctttccaacttagcacccctcaaccactgccacacccttaccatggcgcaatctggacagaagtttgggagtag

SEQ ID NO: 237245 - DNA, 3117 bp, synthetic construct
  misc_feature 1..3117: note = Description of Artificial Sequence: Synthetic coding sequence
  source 1..3117: mol_type = other DNA
atggaacacttaaggcactccccgggtcccggaggtcagagactcctcctcccatccatgctcctggctctacttttactcctcgcaccatcccctggacatgccacacgggttgtgtacaaagtccccgaagagcaacctcccaataccctcatcggaagcctggcagctgactacggcttcccagatgtaggacatttgtataaactggaggtaggtgctccttacctacgggtggacggaaagacaggcgacatcttcacgacagaaaccagcatcgatcgggagggcctgcgggagtgccaaaatcagttaccaggggacccctgcatcctcgagttcgaggtgtctattaccgacctcgtccaaaacggatcccctcgtctgctggaaggtcagatagaggtccaagacatcaatgataatacacccaatttcgcctctcctgtgatcacactggccatccctgagaatactaacattgggagcctgttccccatccccctggcctctgatagagatgccggtccgaacggggtagcctcgtacgaactgcaggccggaccagaggctcaggagctctttggcctgcaggtggcagaggatcaggaggaaaaacagcctcaattaattgtcatggggaacctggaccgagaaaggtgggattcctatgatctcacaatcaaggtgcaggacggtggctcccctccaagagcttcatcggcccttctccgggtcactgtgctcgacaccaatgacaatgcgccaaaatttgagcgaccctcttacgaggccgagctgtctgaaaacagtcctattggacatagtgtcatccaagttaaggccaatgacagtgaccagggggctaatgctgaaattgaatatacattccatcaggcccctgaggtcgtacgaaggctcttgcggctggaccggaacaccgggttaatcacagttcagggcccagttgacagagaggacctgtccacactcaggttttctgtcctggccaaagaccggggaaccaatcctaagagcgctcgcgctcaggtggtcgtaactgttaaggacatgaacgacaacgcccctaccattgagatccgagggattggcctggtcacacaccaggacgggatggccaatatctccgaagacgtggcagaagagaccgcagtagcgctcgttcaagtcagcgacagagacgaaggggagaatgcagctgtcacgtgcgtggtcgccggagatgtccccttccagcttcgacaagctagtgaaactggctctgattccaaaaaaaagtattttctccagacaactacccccctggactacgagaaggtcaaggactatactatcgagatcgtggccgtcgactcaggcaaccctccactgagtagtacaaactctctaaaagtacaggtggtggatgtgaatgacaacgctcctgtatttacacagagtgtcactgaagtcgcctttcctgaaaataacaagcctggcgaagtgatcgcggaaataaccgcatctgatgcagatagtggcagcaacgccgagttggtgtattcccttgaacctgaacccgctgcgaaaggactttttactatctcccctgaaaccggagaaatccaagtgaagacatccctggatcgcgagcagcgagagagttatgagctcaaggtggtggccgcagatcgtgggtctcccagtctacagggtaccgccaccgtgttggttaatgttctggactgtaacgacaatgatcccaaattcatgctctctggttataacttttctgtgatggaaaatatgcccgctctcagtccagtcggaatggtaaccgtgatcgacggagacaagggggagaacgctcaggtgcagctgtctgtcgaacaggataatggtgactttgtgattcagaacggtaccggtacaatcctgtcctccctgagcttcgacagagagcagcagtctacatatactttccagttaaaggccgtcgatggaggggtgccacctagatctgcctatgtgggcgtgacgatcaacgtcctggacgagaatgataacgccccatacatcaccgctccttccaacacttctcacaagctcctgactcctcagactagactgggtgagaccgtgagtcaggttgctgccgaggattttgatagtggcgtcaacgccgaactcatttactctattgctggcggaaacccctacgggctgttccagattggaagccattccggggctatcacgctcgagaaggaaattgagcggagacaccacggcttgcaccgactggttgtgaaggtaagtgatcgcggaaagcctcctaggtatggcacagcactggtgcatctgtacgtgaatgaaaccctggccaaccgcaccctgctcgagacactcctcggacactctctggacactccgctcgatatagacatcgcaggagatcctgagtacgagcggagtaaacagcgaggaaacatactgtttggtgtggttgcaggggttgtggctgtggctctcttaatcgcacttgccgttttggtccggtattgcagacagagggaggccaagtccgggtaccaggcagggaagaaagagactaaggacctgtatgctcccaagcccagtggcaaagccagcaagggcaacaagagtaaaggtaaaaagagcaagtctcccaaacccgttaagccggtcgaagatgaagatgaggcaggactgcagaagtctctcaaatttaatctgatgagcgacgcccctggtgatagtccacggatccatctgcctttgaattatcctccagggagccccgatttgggcagacattacaggtctaactcaccacttcccagcatccagctgcagcctcagtccccttctgcttccaagaagcatcaggtggtgcaggacctcccaccggcaaatacttttgtgggcaccggcgatacaacatcaaccgggagcgagcaatacagcgactactcgtataggacaaacccacccaagtaccctagcaagcaagtggggcaaccgttccagttgtccaccccacagcccctgcctcacccttaccacggcgctatctggacagaggtgtgggagtag

SEQ ID NO: 237246 - DNA, 3123 bp, synthetic construct
  misc_feature 1..3123: note = Description of Artificial Sequence: Synthetic coding sequence
  source 1..3123: mol_type = other DNA
atgatcgtactgctactgtttgcgcttttatggatggtggagggagtgttttctcagctccattatacggtacaagaagagcaggaacatggcaccttcgtgggtaacatcgcggaggatctggggctggatatcactaagctctccgctagagggtttcagactgtacctaatagtagaactccctacctggatctcaatttggaaacaggtgtgctgtacgtgaacgagaagatcgatagagaacaaatttgcaaacagagccctagttgcgtcctgcatctggaggtttttctcgagaacccactcgagcttttccaggtggaaatcgaggtgctggatatcaatgacaatccacctagcttccccgaaccagacttgactgtagagatttccgaaagcgccacccctggcacgagattccccttagagtctgcattcgatccagatgtggggactaactcgcttcgtgattatgagattactccaaacagttacttctctctcgacgtgcagacccagggtgacggtaacagatttgcagagttggttctggagaagcctctggaccgcgaacagcaggccgtacaccgatacgtcctgaccgccgtcgacggagggggaggcggtggtgtgggcgagggcggtggaggaggcggaggagcaggacttcctccacagcaacaaagaaccggcacagctcttttgactattcgggttcttgatagcaacgataacgtcccagcttttgaccagcccgtctatacggtatcactgcccgaaaactccccaccgggtacgctggtgatccaactgaacgccaccgaccccgatgagggccagaacggcgaggtggtctactcgttttcatctcacatttcgccgagggcgagggagctctttggtctctcaccccgaaccggtagactcgaagtgtctggcgaactggattacgaggaaagcccggtctaccaggtgtacgtacaggctaaagacttaggtcccaatgccgttcctgcccactgtaaggtcttggtgcgcgttctggatgccaacgacaatgcaccagaaatcagcttcagcactgtgaaggaggctgtatctgaaggtgcggcacctgggacagtggttgccctgttttccgtgaccgatagagactcagaggagaacggccaagtgcagtgcgagcttctgggtgacgtccccttcaggctcaaaagttccttcaaaaactattacaccatcgtcaccgaagctccattggaccgggaagcgggtgattcctataccctgacggtggtggcacgtgatagaggcgaaccggcattgagcacatcaaaatccatccaggtgcaggtgagcgacgtaaacgataacgccccaagattttctcagcccgtatacgatgtctacgttacagagaacaacgtccctggggcttacatatacgctgtgtctgcaacggaccgtgatgagggcgcaaatgcccaacttgcttacagcatcctggaatgtcaaatccaggggatgtctgtgtttacatatgtcagcattaacagcgaaaatggttacctgtacgctctacgttcctttgattacgaacagcttaaggatttctccttccaggttgaagcaagagacgcgggttcaccgcaagccttggctggtaacgcaaccgtcaacatccttatcgttgatcaaaatgataatgctcctgccattgtagcaccacttccaggccgtaacggcactccggcaagagaggtgcttccaagaagtgccgagcccggatatctgcttacacgggtcgcggcagtggacgccgatgatggggaaaacgctcgcttgacgtattcaatcgtgaggggtaacgagatgaacctctttcgaatggactggcggacaggggaactgcgcactgctcggagggttcccgcaaagcgagacccccagaggccttatgagcttgttatcgaggtgcgggatcacggccagccccctctgagctcaactgccactcttgttgtgcagttggttgatggtgctgttgaaccacaaggaggaggcggttcaggcggaggcggatccggcgaacaccaacgacctagcaggtctgggggaggcgagaccagtctcgatctgacattgattctcatcattgccctgggctctgtaagtttcattttccttctggcgatgattgtattggccgtacggtgccaaaaggaaaagaaactgaatatatacacctgcctagcaagcgattgctgcctctgttgttgctgttgcggcggaggcggtagtacatgttgtggacggcaggccagagcccgtaagaagaagctcagtaagagtgatatcatgctggtgcaaagctctaacgtgcccagcaacccagcccaggttccaattgaggagtccggtggcttcggcagccaccatcacaatcaaaattactgctatcaagtgtgcctgacccctgagtccgctaaaacagatttaatgttcctgaaaccctgttcaccttccagatctacagacaccgagcataatccatgtggcgctattgtcactggatacactgatcagcaaccagacatcatttctaacggctccatactatccaacgagaccaagcatcagagagctgagctgtcatacttagtcgaccgcccacgcagagtaaatagcagtgcctttcaagaagcagatattgtgagttcaaaggactctggtcacggcgactcggagcagggcgactccgaccatgatgccacaaatagagcgcagtctgctggcatggatcttttttccaattgtactgaagaatgtaaggcgctgggacactccgacaggtgttggatgcctagtttcgtgccatctgatggccgtcaggccgctgactacagaagcaatcttcatgtgccgggtatggatagcgtgcccgatactgaagtatttgaaaccccagaggcacagccaggcgctgaacggtcctttagtacatttgggaaggagaaagcccttcatagcacgctggagcggaaagaactggacggtctcctaaccaacaccagggcgccttataagcccccttatctaactaggaaaaggatctgttag

SEQ ID NO: 237247 - DNA, 3123 bp, synthetic construct
  misc_feature 1..3123: note = Description of Artificial Sequence: Synthetic coding sequence
  source 1..3123: mol_type = other DNA
atgatcgttctgttactgtttgctctgctctggatggtcgaaggagtgttttcccagctgcattacacagtacaggaggaacaggaacatgggacattcgttggcaatattgctgaagatctgggtctggatataaccaagttgagcgcccgagggtttcagactgtacccaattctagaacaccctacctcgacctgaacttagaaacaggcgtcctttatgtgaatgagaaaatagaccgcgaacagatttgtaagcagagcccttcctgtgttctgcacctggaggtcttcctcgagaatcccctggagctgttccaggtcgaaatcgaagtgctggatatcaatgacaacccgccatcattccctgagcccgacttaaccgttgagatatctgagagtgctacaccaggtacacgctttccgcttgaatccgcattcgacccagacgtgggcacaaattccctgagagactatgaaatcacacctaattcctacttctcattagatgtccagacacagggcgatggaaatcgcttcgcagaactcgtattggaaaaaccactggaccgcgaacaacaggctgttcaccggtacgttctcacagctgtcgacggtgggggtggtggcggagtgggtgagggtggcggaggcggtggtggagccggattgccgcctcagcagcaacggactggcacagcattactgaccatcagggtgttagacagcaacgataatgttcctgccttcgatcagcctgtctacactgtgagcctccccgagaactccccccctgggacgctggttattcagttgaatgcaacagaccctgatgaaggccagaacggtgaagttgtttattcttttagctcgcacatctctccccgagcacgggagcttttcggactgtcaccgagaactgggcgtctggaagtatccggggagctcgactacgaagagtcacctgtatatcaggtttatgttcaagcaaaggatctcggtcccaacgcagtcccagcccattgtaaggtcctggtccgcgtgctcgatgccaacgacaacgctcccgagatctcattttctaccgtcaaagaggcagtatccgagggtgccgctccgggtaccgtcgtggccttgttcagtgttaccgaccgggacagtgaagagaatggccaagtacagtgtgaattgctgggcgatgtcccttttcgattgaaatcttcgtttaagaactattacactattgtcactgaggcgccactggaccgcgaggctggagattcctacactctgacagttgtcgcccgagaccgaggcgagccggcattaagcactagtaaaagtatccaggtgcaggtgagcgacgtgaatgataatgcacctcggttctctcagccagtgtacgatgtgtatgtgactgagaataatgtcccaggggcttacatttatgcagtgagcgcaaccgacagagacgagggggctaacgctcaactggcatattctattctggagtgtcaaatacaggggatgtcggtctttacttacgttagcatcaattctgagaacggctatttgtacgcacttcgcagtttcgattacgagcagctgaaagacttttctttccaggttgaagccagagacgctggaagcccacaagcattggcgggaaatgccaccgtgaatattctaatcgttgatcagaacgacaacgctcccgctatcgtggccccactgcccggacgcaatgggactcctgccagagaggtgctgcccaggagtgcggaaccaggctacctgctgactcgcgtagccgctgtggacgcagatgacggagagaacgcgagactgacgtactccattgtgagaggtaatgaaatgaacctctttcgtatggattggagaaccggagaactgcgtactgctaggcgggtgccagccaagagagaccctcagcgcccttatgaattggtgattgaagtgcgggaccacgggcaaccgcctctatctagtaccgctactctggtcgtgcagctcgtagacggtgccgttgagccccaaggtgggggaggttcagggggaggaggttcaggcgaacatcagcggccttcccgctctggtggaggtgagacatccttagatctcacccttatcctgattatcgcactgggatctgtgtcctttatctttctactggcaatgatcgtactggccgtcaggtgtcagaaagagaagaagctcaacatatatacctgcctggcctctgattgctgcctctgctgttgttgttgcggtggtggtggctctacgtgttgtgggaggcaagctcgcgctagaaaaaaaaagctgagtaaatccgatatcatgctggtccaaagcagtaacgttccctctaatccagcacaggtcccaattgaggaaagcgggggttttgggtcccaccaccataatcagaattattgctatcaagtctgcctgaccccagaatccgccaagacagaccttatgttcctgaagccttgttcgccttcaagatccaccgataccgagcacaacccttgcggcgctattgtaacggggtacacggaccagcaaccagatataatatccaatggttcgattctgtctaatgagactaaacatcagcgcgctgaattgtcttaccttgtggacagaccaaggcgagtcaattcttctgcttttcaggaagctgacattgttagtagcaaggattcgggacacggagattcagaacagggcgacagcgaccatgacgctaccaatcgcgcacagtccgcaggaatggaccttttttctaactgcaccgaggagtgcaaggctcttggccactctgatcgctgttggatgccttcatttgttccatccgacggtagacaagctgcagattatcgctcaaatctgcacgtgcctgggatggattccgttcctgacactgaagtgtttgagacccccgaggcccagcctggcgctgaacggtcatttagtacatttggaaaagaaaaggccttgcatagtactctcgaaagaaaggagctggacgggcttctgaccaatacaagagcgccttacaagcccccatacctgcgcaaaaagcagaggtgctag

SEQ ID NO: 237248 - DNA, 3933 bp, synthetic construct
  misc_feature 1..3933: note = Description of Artificial Sequence: Synthetic coding sequence
  source 1..3933: mol_type = other DNA
atggatctgctgtccggaacctatatcttcgcagtgctgctggcctgtgtggtgttccatagcggggcacaagagaagaattatacaataagggaggaaatgcccgagaatgttctgatcggagatctcctcaaggacctcaatttgagtctcataccaaataagagtctcaccacagccatgcagttcaagctggtgtacaagaccggagatgtgcctctgataaggatagaagaagacacaggcgagatcttcacaacaggggcaagaattgaccgcgagaaactgtgcgcagggataccaagagatgagcactgtttttacgaggttgaagtggcgatcttaccagatgaaatttttcgtctcgtgaagatccgtttcctcattgaagatattaacgataacgcaccactcttccctgcaacggttattaacatcagcatacccgagaatagtgccatcaattcaaagtacactttgcctgctgccgtggaccctgacgtaggcattaatggtgtgcagaactacgagctgatcaagagtcagaatatcttcggactggacgtgattgagactccagaaggagacaaaatgccccagctgattgtgcaaaaggaactggatcgcgaagagaaggatacttatgtaatgaaggtgaaggttgaggatggaggcttcccccagcgctcgagcactgccatcttgcaggtatcagtgacggatacgaacgataatcacccagtatttaaagaaactgaaatcgaggtctcaattccagaaaatgcaccagtgggtaccagcgtgacccagctgcatgctaccgatgccgacattggagagaatgcaaagattcacttctctttctctaatctggtgagcaatatcgccaggcggctattccacctcaacgctacaactggattgatcaccattaaggagccactggaccgcgaggaaacacccaaccacaaactgctggtcctggcatctgatggtggtctaatgccagcgagagctatggtacttgtaaatgttaccgacgtgaatgataatgtgccttcaatcgacataaggtatatcgtaaacccagtgaatgatactgtggtcctgtcggagaatatccccctcaatactaaaatcgcattgattactgtgaccgacaaggacgccgatcacaatggccgtgtgacctgtttcacagaccatgagatcccattccgcctccggccagtgttctcgaatcagtttctcctggagaccgctgcatatctggattacgagagtacgaaggagtatgctataaagctactagcggctgacgctggcaaacctcctctgaatcagagtgccatgttatttattaaggtgaaagacgaaaacgataatgcccctgtgttcacacagtccttcgttaccgtgtccatcccggagaacaattctcctggcatacaactgaccaaggtgagcgctatggatgccgattcaggccctaatgccaaaatcaactacctgctgggtccggacgcaccgccagaattctccctggattgccgaaccggtatgctgacagtcgtgaaaaaactggatagagaaaaggaggataaatatttatttacaatactagccaaggataatggagtccctcctctcaccagtaacgttacggtttttgtcagcataatcgaccagaacgataatagccccgtttttactcataatgagtacaacttctacgtgcccgagaacctgccgcgacatgggaccgtgggtctgatcacagtgactgacccagactatggcgataactccgcggttactctgagcatactcgacgagaacgacgacttcaccatcgacagccagactggtgtgattaggcccaatatttcttttgaccgcgaaaagcaagaatcttacacattctacgtgaaggccgaggatggcggtagagtgtcacgaagctcctccgctaaggtgacgatcaacgtagttgatgtgaatgataataaacccgtttttattgtgcctccaagcaactgttcctacgagctggtactgcccagtaccaaccctggtaccgtggtttttcaggtgatcgccgtggacaacgacactggcatgaacgcagaagtgcggtatagcatcgtgggcggaaatacccgggatctctttgccatcgatcaggagaccggtaacatcacactcatggaaaagtgtgatgtcactgacttaggcttacatagggttctcgttaaggccaacgatctcggtcagcccgacagcttgtttagcgtggttatcgtgaatctctttgtgaatgaaagcgtgacaaatgcgacccttattaacgagctcgttcggaaaagcactgaagcacccgtgacgccaaacacagagatagctgacgtgtcttccccgacctcggactatgtaaagatcctggtggccgcagtggccggaaccataactgtggtggtagttattttcataacggcagtagtgcggtgcagacaggcaccgcatctgaaagcggcacagaagaataaacaaaattccgagtgggcaacccccaaccctgaaaaccggcagatgatcatgatgaagaaaaaaaagaagaaaaagaagcatagcccgaagaaccttctgcttaactttgtgacaattgaggagacaaaagcagatgacgtcgactctgacgggaacagagtgacgctggatcttcccatagatctagaggagcaaaccatgggaaaatataattgggtgacaactccgacaaccttcaagccagacagcccagatctggcacgccactataaaagcgcatcacctcagccagcattccagatccagcctgaaacacccttgaactctaaacatcatatcatacaggagctgcctctcgataacactttcgtggcttgtgattctataagtaagtgtagcagttcttcatcagacccctattcagtcagtgattgcggatatccggtcacaacattcgaggttccggtgtccgtacacactcggccatcgcagcgtcgggtgacatttcacctccctgaaggtagccaggagtcctccagtgatgggggactgggcgaccacgatgccggatcattaacttctacctctcatggccttccactggggtacccacaagaggagtatttcgatcgagctaccccgtccaataggacagagggagatggcaactctgatcccgagagcactttcatacctaggagcccaacggccgctgaaatcaccgtgcagccgaccgtcgaggaagccagcgacaactgtacccaagaatgtctgatttatgggcatagtgatgcctgttggatgcccgcatctttggatcatagcagtagttctcaagcccaggcttctgcactgtgtcactcacctccactgtcccaggcatcgactcagcaccacagccccagagtaactcaaacaattgccctatgccattctcctccggtgacccaaacaatcgcactgtgtcactccccacccccaattcaggtgtctgcgcttcaccatagcccgcctctcgttcaagctaccgcactgcaccactctccaccctccgcccaggcctcagcactgtgctactcccccccactagcccaggccgctgcaatcagccacagttctccgctacctcaagtgatcgcactgcatcgaagccaggctcagtctagcgtctctctccagcagggctgggtccagggtgcagacgggctttgttctgtggatcaaggagtgcagggcagcgctacatcgcagttttacaccatgtcagagcgactgcaccctagcgacgatagtataaaggtgatccccttgacaacattcacccctcgccagcaggctcggccttcaaggggggatagccccattatggaagagcatccactgtag

SEQ ID NO: 237249 - DNA, 4044 bp, synthetic construct
  misc_feature 1..4044: note = Description of Artificial Sequence: Synthetic coding sequence
  source 1..4044: mol_type = other DNA
atggatctgctgtcaggtacctatatctttgctgtgctcctcgcatgcgtggtgttccattcaggcgcacaggagaagaattacacaattagggaagaaatgcccgagaatgtcttgatcggcgatctcctaaaagatctcaatcttagcttaatccccaacaagagcctgaccaccgctatgcagttcaaattggtgtataagactggcgacgtcccactcatcagaatcgaggaagataccggagagatctttacaacaggtgcccgtattgatagggaaaagctgtgcgcaggtatcccgagagacgaacattgcttttacgaggtggaggtggctatcctgcccgatgagatctttcgattagtgaagattcgctttctgattgaggatatcaatgacaatgcccctctgttccccgctactgtgatcaatatctctattcctgagaacagcgcaataaacagcaaatatacactcccggctgctgtggatccggacgtgggcatcaatggggtgcagaactacgaattgattaagagtcagaacatcttcggccttgatgttatcgaaacaccagagggtgacaagatgccacagttgatcgtgcagaaggagttagatagagaggagaaagacacgtacgtgatgaaagtaaaggtggaggatggcggtttccctcagcggtcgagcaccgcaattctgcaggtctctgtaactgatactaacgacaaccacccagtgttcaaagaaaccgagatagaagtctcgatcccagaaaacgctccagtcggtaccagtgtaacccaacttcatgctacggatgccgatattggagagaacgcgaaaattcacttcagcttctcaaacctggtatctaatatcgctagaagactgttccatttgaacgccacgaccggactgattaccattaaagagccgctggacagagaggagactcctaaccataaactcctggtgcttgccagcgacgggggacttatgcccgcaagggcaatggtcctcgtaaatgtgacagacgtgaatgacaatgtgccaagtatcgatattcgctacattgtgaatcccgtaaatgataccgtggtacttagcgaaaatatccccctgaacacgaagattgctttgattaccgtcaccgacaaagacgcagatcataacgggagagtcacttgcttcaccgaccatgaaattccgttccgactccgcccagtattctctaaccagtttctgctggaaaccgctgcctatctggactatgagtccactaaagaatacgctatcaagcttctggccgcagatgcgggaaagcccccactaaatcagtcagccatgcttttcattaaagtgaaagacgaaaacgacaatgccccagttttcactcaatcatttgtcacagttagcatacccgaaaacaactcccccggaatccagctcactaaagtatccgcgatggatgcagattccggtcccaatgctaagatcaattacctccttggacccgacgcccctccagagtttagtctggattgccggaccggcatgttgactgtagtgaagaaactggatagagagaaggaggataagtatctgtttaccatcctggccaaagacaatggggttcccccactgacttccaatgtgactgtgtttgtgtctattattgaccagaacgataattcaccagtgttcacccataatgagtataacttctacgtccctgaaaatcttccgagacatggaacagtggggttgatcaccgtgaccgaccccgactacggcgacaattcagcagtcactctgtcaatcctcgacgaaaatgacgactttactatcgattcccagaccggggtcatcagacccaatattagctttgacagagaaaaacaagagagctacactttttatgtaaaggcggaagacggaggtcgtgtgagccgatcatcgtcagctaaagttaccattaacgttgttgacgtgaatgataataaacctgtctttattgtccccccatcgaattgttcttacgaactcgtgctcccttcaacgaatcccggtaccgtagtgttccaggttatcgccgttgacaatgacaccggtatgaacgctgaggtgcggtatagtatcgtgggaggaaacacccgagacctgtttgctatcgatcaggaaacgggcaacatcactctcatggagaagtgtgatgtcactgatctcggacttcaccgagttctcgtaaaagcaaatgatttaggccagcctgattccctgttctccgtagtaattgtcaatctattcgttaacgagtcagttacgaatgcaaccttgattaacgaattggtgcgaaagagcacggaggcccctgtgaccccaaacaccgagatcgctgacgtgtccagtccaacatccgattacgtgaagatactggtagccgctgtggctggcaccattaccgtagtggtggtcatatttatcacagccgtggtgcggtgccggcaagctccacacctgaaagccgcacagaaaaataaacagaactcagaatgggctacaccgaaccctgaaaacaggcagatgatcatgatgaaaaagaagaaaaagaagaaaaaacattcacctaaaaatctcttactgaacttcgtaaccatagaggaaaccaaagccgacgatgttgactccgacggaaaccgcgtgacccttgacctgcccatcgaccttgaagagcagactatgggtaagtataattgggtcacgactcccaccacctttaagcccgatagccccgacctggcccgacattacaagtccgcttcccctcaaccggcatttcagattcagccagagacccctttgaactccaaacaccatataatccaggagctgcctctggacaacaccttcgtggcctgtgactctattagtaaatgtagctcatctagctcggatccctatagcgtgtccgattgtggttaccctgtgactacattcgaagtcccagtgtcggtgcacacacgacctccaatgaaggaggtggttaggtcttgtactcctatgaaggagtctacgacaatggagatctggatccaccctcaaccccagcggaagtccgaggggaaggtcgcaggcaagagtcagcgacgggtgacatttcaccttcccgaggggtctcaagagtcttcatctgacggcggtctgggagaccacgacgccggttctctgactagtacgtcccacggactccctctcgggtacccacaggaggaatattttgaccgcgcaacacctagcaaccgcacagagggtgatgggaactccgaccctgaatcaaccttcattcctagatcccccaccgccgctgaaataactgttcagcccacagtcgaagaggcgagcgacaactgtacccaggagtgcctgatttacggccatagcgacgcatgctggatgcccgcaagtctcgaccactctagtagcagccaggcccaggcctctgccttgtgccattcacccccactgtctcaggcctctacccaacatcacagccctagagtgacacaaacgatagcactgtgtcacagcccacctgtgactcagactattgccctatgccactcccccccacctattcaggtaagcgcgcttcaccattccccgcctctggtacaggcaactgcccttcaccattcccctccctcggcccaagcaagcgcgctgtgctactcccccccactagcacaggccgcagccatttcccactcttcccccctgccacaggtgatcgcactgcacaggtcgcaggctcagtcaagcgtgagtctgcaacaggggtgggtgcagggtgcggatggactttgctcagtggaccagggggtgcaaggaagcgccacttctcagttctacacaatgagcgagcgcctgcacccgtcagatgacagcattaaagtgattcctctgacaacctttacacctagacagcaagctcgtcctagccggggagacagtcctattatggaggagcaccctctgtag

SEQ ID NO: 237250 - DNA, 3990 bp, synthetic construct
  misc_feature 1..3990: note = Description of Artificial Sequence: Synthetic coding sequence
  source 1..3990: mol_type = other DNA
atggacctactgtctggcacctacatcttcgcagttttgctcgcctgtgtggtgttccacagcggcgctcaagaaaagaattacacaatacgagaggagatgccggaaaacgttttgataggggacctacttaaggatttgaatctgagcctcatccctaataaatccctgacaactgcaatgcagttcaagctcgtctacaagactggggatgtcccgctgatcaggatcgaagaggatacaggtgaaatctttactacaggtgctaggattgatcgcgaaaaattgtgtgcgggtatccccagggatgagcactgcttctatgaagtggaggtggctatcttaccagacgagatctttcggctggtgaagatccgctttctcatcgaggatataaatgataatgcacccctgttccccgctacagtgatcaacatatcaatccctgaaaactcggctattaactccaaatacacactcccagccgctgtggaccctgacgtgggaataaacggcgtacagaactatgagctgatcaaaagccagaacattttcggactggacgttatagaaacgcctgaaggtgacaagatgccccagttgatcgtgcagaaagaactcgatcgggaggagaaagatacttatgtaatgaaagtaaaggtcgaggatgggggatttcctcagcgttcttccacggccattctgcaagtctctgtgacagacacaaacgataatcaccccgtatttaaggagaccgagatcgaggtttccatacccgagaacgcaccagttgggacctctgttacacaactgcatgcgacggacgctgacataggagaaaatgccaagattcacttttcgttttctaatctagtgagcaatattgccagacgactgttccacctcaacgccacaacaggtcttattactattaaggaaccactcgatcgtgaggaaacccccaaccataagctgctcgtcctagcctctgacggaggattgatgccagcacgcgctatggttctggtgaatgtaactgacgtgaatgacaacgtcccttccatagacatccggtatatcgtgaaccccgtaaatgacacggtggttctgagcgagaacattcctcttaataccaaaattgccctgattaccgtgaccgacaaagatgccgatcacaacggccgagtgacttgtttcactgaccacgagatcccttttaggctcagacccgtcttctctaaccagtttctgcttgagaccgccgcatacctggattatgaatctaccaaggaatatgctatcaaattgctcgcggcagatgcgggaaagccgccactgaaccagagtgctatgctgtttatcaaagtcaaagatgaaaatgataacgcccctgtattcactcagtctttcgttaccgtctcgatcccagagaacaactcacccggtattcagctgaccaaggtctcagccatggacgctgattcaggacccaacgccaagattaactacctgctgggacccgatgcacccccagagttcagcttggactgccgaactgggatgctaacagtggttaagaagctcgacagggagaaagaagataagtacctgtttactatattggctaaagataacggcgttccccctttgacaagtaacgttaccgttttcgtgtctatcattgaccagaatgacaacagtcccgtgttcacccacaatgaatataacttctatgtacccgagaatctgcccaggcatgggacggttggtctgatcactgtcacagacccagactacggcgataactcagccgtgaccctgagcatcctggatgagaatgatgatttcaccattgactcgcagaccggggtcatcaggcccaacatcagctttgatcgggaaaagcaggagtcatataccttctacgtgaaggccgaagatggagggcgagtctcacgctcctcgtctgctaaggtgaccatcaatgttgtggacgttaacgacaataaaccggttttcatcgtcccaccttctaattgttcatatgagctggtgctgccaagtaccaatcccggtacagttgtgttccaagtgatcgctgtggacaatgataccggtatgaatgccgaggtgcgttattcaatcgtgggaggcaacaccagagacctattcgccatcgaccaggagaccgggaacattaccctgatggaaaaatgcgatgtgacagacttaggcctgcaccgggtgctcgttaaagcgaatgacttggggcagcccgactccctcttctcagtagtgattgttaacctattcgtcaacgagtcggtgactaatgccaccctaatcaatgagctggttagaaaatctaccgaagccccagtcacccccaacacagaaatcgcggacgtaagcagccccacctctgactatgtgaaaattcttgtcgccgcagtggctggcacgataactgtggtcgtggtcatctttattacagcagtcgttagatgccgacaagcacctcaccttaaggcggcacaaaaaaataagcagaacagtgaatgggccacccccaacccggaaaacagacagatgatcatgatgaagaagaaaaagaagaagaagaaacatagcccgaagaatcttctgcttaacttcgtgactatagaggaaaccaaggcagatgacgtcgattccgatgggaacagggtgacactcgaccttcctattgatctggaagagcagaccatggggaaatacaactgggtaactacaccaacaactttcaagccagactctccagatctggccagacactacaaatctgcttcaccacagcctgctttccagatccagcccgagacgccgctaaattctaaacaccacatcatccaggagctgcctctcgataatacctttgttgcctgtgacagcatctcaaagtgcagctcctcctcctcagacccatattccgtgtccgactgcggctatccagttacaaccttcgaggtgccagtcagcgtccatacgcgaccgcctatgaaggaagtggtgcgctcatgcactcccatgaaggagtcaacaaccatggaaatttggattcaccctcagccgcaaagccaacgaagggttactttccatctccctgaaggatctcaggagtcaagttctgacgggggactcggtgatcacgatgcgggatccctgacgagcacttctcacggcctcccgctcggctaccctcaagaggagtacttcgatagggccacaccttctaatagaaccgagggggacgggaacagcgaccctgaatccaccgctgagataacagtccagccaacagtagaggaggcatccgataattgtacccaagagtgccttatatatgggcactccgacgcctgttggatgccagcatcactggatcattcgagcagttcgcaggcccaggcaagcgcgctgtgtcattccccccctctgtcacaggctagcacccagcatcacagcccccgagtaacccagactattgctctgtgccactccccacctgtaactcagaccatcgctctctgccacagcccacccccaatacaggtctctgctctgcaccatagcccacccctggtgcaagctacggcactgcaccattcaccgccttcagcgcaggcatccgctctgtgttatagtccaccacttgcccaagccgctgccatatcccattcatcacctctgccgcaggtgatagcgctgcaccggtcacaagcgcaatctagcgtaagtttgcagcaggggtgggttcagggagcagacggactgtgtagcgtcgatcagggagttcaggggagcgctacatctcagttctacactatgagtgagcggctccacccctcagacgattccataaaagtgatccccctcaccaccttcacgccgagacagcaggctaggccctcccgtggcgattctcctataatggaagagcatcctctgtag

SEQ ID NO: 237251 - DNA, 3066 bp, synthetic construct
  misc_feature 1..3066: note = Description of Artificial Sequence: Synthetic coding sequence
  source 1..3066: mol_type = other DNA
atggatctgctatccggcacttacatttttgcggtgttgttggcctgtgtcgtcttccacagcggagcccaagagaagaattacactatcagggaggagatgcccgaaaacgtcctgataggagatctcctgaaggatttgaacttgtcacttatccccaataaatcactaaccacagcgatgcagtttaagcttgtttacaagacgggggatgtgcccctcattcggattgaggaagatactggtgagatctttaccaccggcgctcgcattgatcgtgagaaactgtgcgcgggaattcccagagatgaacactgtttctacgaggttgaagtcgctatccttcctgacgaaatttttcgtttggtgaagatccgcttcctgatagaggacatcaacgacaacgcccctctctttcctgccacggttatcaacatatccatccccgagaacagcgccataaacagcaagtacacccttccagcagctgtagatcctgacgtcggcatcaatggagtacagaattatgaactgataaaaagtcagaatatcttcggcttggacgtgatagagacccccgagggcgacaaaatgccccaactgatcgttcagaaggaactggaccgggaggagaaagatacttacgttatgaaagtgaaagtggaggatggagggttccctcagaggagtagcaccgccattctgcaggttagtgtaaccgacacaaatgataatcaccccgtatttaaagagacagagatcgaggtgtctatcccggaaaatgccccagttggcactagcgttacgcagttacatgctaccgacgccgacattggagagaatgctaagattcacttttcatttagcaatctcgtctcaaacatcgcccgtagactctttcaccttaacgcaaccaccggacttatcaccatcaaggagccgctggatagagaggaaactcccaaccacaaactgctggtgctggcatcagacggcggactcatgcctgccagggcaatggtgctggtgaacgtaacggacgtcaatgacaacgtgcctagcattgacatcagatatattgtaaatcccgtgaacgacacagtcgtgctctccgagaacatccccctcaacactaagattgccttaatcaccgtcaccgacaaagacgccgaccataatgggagagttacctgctttactgatcacgagatcccttttcggctgcggcctgttttctctaatcaatttctgcttgagacagctgcttacttggattacgaatcaactaaagaatacgctatcaagctgttagccgctgacgccggtaagccccctttgaatcaatcagctatgctgtttattaaagtgaaggacgaaaacgacaacgcaccagtgtttacccaaagcttcgtcaccgtgagcatccccgaaaacaattcccctggcatacagctgaccaaagtgtctgcgatggatgccgactctgggcctaacgcaaaaattaactacttactgggccctgatgctccccctgagtttagcctggattgcaggaccggcatgttaactgtagtgaagaagctggatcgggagaaggaggacaagtatttgtttactattttagccaaggacaacggagtccccccactaaccagcaacgtcaccgtgttcgttagtatcattgaccagaacgacaactctcctgtattcacccataacgagtacaatttttatgtacctgaaaatctcccacgtcacggcactgtgggtctaattacagtgacggatcccgactatggagataatagcgcggttacacttagtatccttgatgagaatgatgattttaccatcgactctcagactggggtgataagacctaatatcagcttcgaccgagagaagcaggaaagctacactttttatgtgaaggccgaggacggaggcagagtctctcggtccagttctgcgaaggtgaccattaatgtggtggacgtcaatgataacaaacctgtctttatagttcctccaagcaactgctcctacgaattagtactcccaagtacgaatccagggacagttgtcttccaggtaattgctgtggacaacgatactggtatgaatgcagaggtgagatatagtatagtggggggaaacacgcgcgacttgtttgccatcgaccaagaaactgggaatataaccctgatggaaaagtgtgatgtaactgacctgggtcttcacagggtgctggtgaaggcaaatgacctaggacagcctgatagtctcttctcggtggtgatcgttaatttgtttgtgaatgaatctgtgacaaacgcaactttgattaatgagctggtcaggaagagtaccgaggctcctgtgacacccaacactgagatcgctgatgtgtcatctccaacctccgactacgttaaaatcctcgtagcggcagtcgcaggtactatcacggtggtggtggtcatctttatcactgccgtcgttaggtgtcgacaggctccccacctgaaggctgcgcagaagaacaagcaaaacagcgaatgggctactcctaatccggaaaacaggcagatgatcatgatgaagaaaaagaagaagaagaaaaaacattcaccgaagaaccttttgttgaactttgtgacaatcgaagaaacaaaggccgacgacgtggattcggatgggaacagagtgactttggatctgcccattgatctggaagagcagactatgggcaaatataactgggtcaccactcccaccactttcaagcccgacagccctgatctggcccgtcactacaagtctgcctccccgcagcctgctttccaaatccagcctgagaccccactcaactccaagcaccacatcatacaggagctgccactggacaacacttttgttgcgtgtgatagcatcagcaagtgcagtagctcgtcatcagatccctactccgtgtccgactgtggttaccctgttactacattcgaggtccccgtctccgtacatacaagacccgtcggtatccaggtgtcaaacacaaccttttag

SEQ ID NO: 237252 - DNA, 3933 bp, synthetic construct
  misc_feature 1..3933: note = Description of Artificial Sequence: Synthetic coding sequence
  source 1..3933: mol_type = other DNA
atggacttattgtctggcacctacatttttgccgtacttttggcatgcgttgtgttccactccggtgctcaagagaagaactacactatccgtgaggaaatgccagagaatgtcctcatcggggacttgctgaaagacctgaacctgtccttaattcccaacaagagtttgacaactgccatgcagtttaagctggtctacaagacaggcgatgtcccgctcatccggatagaagaagacacaggcgaaattttcacaaccggcgctcgcatagaccgcgaaaagctgtgcgccggtataccaagagacgagcactgcttttacgaggtggaggtggccattctgccggacgaaattttcagattggtgaagattcgctttctgatcgaagatatcaatgacaacgcaccactgttcccggctaccgtcatcaatatcagcatccctgaaaacagtgcgatcaacagtaagtacaccctccctgcggctgtcgatcctgacgtaggaattaatggcgtccagaactatgaactgattaaatctcagaacatattcgggctggatgttatcgaaactcccgagggagacaagatgccccagctcatcgtgcaaaaagagctggaccgggaggagaaggatacatatgtgatgaaagtgaaagtggaggacgggggattcccacaaaggagctccacagccattcttcaggtgtcagttaccgacactaacgacaaccaccctgtattcaaagagactgaaattgaggtttccattcccgagaacgcccctgtggggactagcgtcacccagttgcatgctactgacgcggacatcggggaaaatgcgaagattcactttagcttctctaacctggttagcaatatcgcacgtcgactgttccatctcaatgcaactactggcctgatcactataaaggagccactggaccgcgaggaaacaccaaatcataagctgctggttcttgccagtgatggaggcctgatgcctgcaagagcaatggttctggttaacgtgacagacgtaaatgacaatgtgcctagtatagacattagatacattgtgaacccggtcaatgatacagtggttttaagtgagaacatccctcttaatacaaaaatcgccctgattaccgtcacggacaaagatgcagaccacaacggaagagtaacctgcttcactgatcatgaaatccccttcagactgagacctgtgtttagcaatcagttcttgctggaaacggccgcatatctagattatgagtcaaccaaggagtacgcaatcaaactcctggcggcagatgccggaaaacctcccctgaatcagtctgccatgctgttcattaaggttaaggacgagaatgataacgcccctgtgttcacccaatcctttgtgacggtttccatccctgagaataatagccctggcatccagctgactaaagtgtccgccatggacgccgactcaggcccaaacgccaagatcaactacctactcggtccagacgctcctcctgagttcagtctggactgccgcaccggtatgctcaccgtagtgaagaagttagacagagaaaaggaggacaagtatttgtttacaattctcgccaaagacaatggagtgccaccactgacctctaacgtcaccgtttttgttagcataatcgatcagaatgataacagccctgtattcacacacaatgagtacaatttctacgtccctgagaacctgccacgccacggaacagttgggcttatcaccgtgactgatcctgactacggcgataactcagctgtcactctgtcaattctggacgagaatgacgacttcaccatcgatagccagaccggagtaattcgaccaaatataagtttcgatcgcgaaaagcaggaatcctacactttctatgttaaagcagaggacggtggtagggttagtcgcagctcaagcgctaaagtaaccattaatgtcgtggatgtaaatgacaacaaaccagtgttcattgtcccaccatcgaactgtagctatgagttggtgctgccgagtacgaaccctggaaccgtggtctttcaggtgatcgcagtggacaatgacaccggaatgaatgcggaagtgcgatacagcattgtagggggaaatacaagagatctctttgctatcgaccaagaaactggcaacattactctaatggaaaagtgtgacgtgaccgatcttgggctgcaccgcgtgttggttaaagctaatgacctagggcaacccgatagcctttttagcgtggtgatagttaacctttttgtgaatgagtccgttaccaacgccaccttgatcaacgaattggtgcgaaagtcaacggaggcgcctgtgacccctaacacggagattgcagacgttagtagcccaacgtctgactacgtgaaaatcttagtcgccgctgtggccggaactatcaccgttgtggtggtgatttttattacagccgttgttaggtgcaggcaagcaccacacctgaaagctgcccagaagaacaagcagaactctgaatgggctactcctaatcctgaaaatcgccagatgatcatgatgaagaagaaaaagaaaaagaaaaaacactcccctaaaaatttgttactgaatttcgtgaccatcgaagaaaccaaagccgatgacgttgattctgacggaaacagggtgacactggacctgcccatcgaccttgaagaacaaactatggggaagtataactgggtcactacccctacgacgttcaaaccagatagccctgatctggccagacactataaaagtgcctctccccagccggctttccaaattcaacccgaaacccccctgaatagcaagcaccacatcatccaggagctgcctctggacaacacattcgttgcctgtgactcgatcagcaaatgttcctcctcctccagcgacccttacagcgtgtcagactgcggttatcccgttaccaccttcgaggtaccagtgtcagtgcacacccgcccttcccagagacgcgttacctttcacttacctgaaggctctcaagaatccagctctgacggaggacttggggatcacgacgccggatctctgacatccacaagtcatgggctgcccttaggctaccctcaggaggagtactttgatcgggcaaccccaagcaatcggaccgagggcgacggcaactctgatccagaatctaccttcattcctggcttaaagaaggccgctgagataacggtgcagcccacagtcgaggaagcttctgacaactgcacccaggaatgtctgatctatggtcattctgatgcctgttggatgcccgcatcactggatcactcatcctcgagccaggctcaagctagcgccctatgccattccccccctctgagccaagctagtacacagcaccactcacctagggtgacacagacgatcgcactgtgtcactcccctcccgttacccagaccatagcattgtgtcactcacccccaccaatccaggtgtccgctctgcatcactccccgcctttagtgcaggctaccgccctgcatcatagtccaccctccgcacaggccagcgcattgtgctactctcctccactggcacaggcagctgcaatcagccactcctcgccactaccacaagtcatcgccttacaccggagccaagctcaatccagcgtgtccctgcagcagggatgggtgcagggcgcagacggcctgtgttccgtggaccagggcgttcagggctccgctacctcccagttttataccatgagtgagagattacacccaagcgacgactccattaaggtcattccactcactactttcaccccacgtcagcaggccagaccctcccggggagacagccctatcatggaggagcaccccctgtag

SEQ ID NO: 237253 - DNA, 4044 bp, synthetic construct
  misc_feature 1..4044: note = Description of Artificial Sequence: Synthetic coding sequence
  source 1..4044: mol_type = other DNA
atggatctactgtccggtacatacatattcgccgttctattggcctgcgtggtgttccattctggcgctcaggagaaaaattatacgatacgagaagaaatgccagaaaatgtacttataggggacctcttaaaagatctgaacctcagtcttattccaaacaagtcattgacgacagccatgcaattcaagttggtttacaagactggtgatgttccgctgatacgaatcgaggaggatacaggggagatattcaccacaggagcaagaatcgaccgagagaaattgtgcgccggtattccaagggatgagcactgtttttatgaggttgaagtcgctatactgcccgacgagatctttcgactcgtgaagatccggttcctcatcgaagacatcaatgacaatgcccctctgtttccggcaactgttattaatatctcaatccccgagaatagcgccataaactccaagtataccctacctgccgctgtcgatccagatgtgggcattaatggggtgcaaaactatgagctgatcaagagccagaatatctttggacttgacgttattgagacccccgagggcgataaaatgccccaactgatcgtgcaaaaggagctcgatagagaggaaaaagatacctacgtaatgaaagttaaggttgaagacggaggattcccccaacgctcatcgactgccattttgcaggtgagtgtgacggacacgaacgataaccaccccgtgttcaaggaaactgaaattgaggtgagcatcccagaaaatgcacccgtgggcacatctgtgactcagttgcacgccaccgacgctgacataggagaaaacgcaaagattcatttctcgttttctaacctggtgtcaaatatcgctagaagacttttccatctcaacgccactacaggcctaatcacaataaaagagccacttgaccgggaggagacaccaaatcataagctactagtgcttgccagtgatggcggactaatgcctgcacgtgccatggtgttggttaatgtgacagacgttaacgataatgtcccttccatcgatattcgatacattgttaacccagtcaacgacaccgtggtgctctccgagaacatcccccttaatacaaagatcgcactaattacggtgacagacaaggacgcagaccataatggaagagtaacgtgctttactgaccacgagattcccttccgtttacggcctgttttcagcaatcaattcctcttagagaccgctgcctaccttgactacgagagtacaaaggagtacgccataaagctcctcgccgctgatgctgggaagcctcctctgaatcaatccgctatgctgttcatcaaagtgaaggacgaaaatgataatgccccagtttttacccaaagcttcgtcacagttagtattccggagaacaactctccaggcattcaattgactaaggtgtcagccatggacgctgatagtggcccaaacgccaaaatcaactatctgctgggacctgatgcgccaccagagttttccctagattgcagaactggcatgttaacagttgtaaaaaagctagacagagagaaagaggacaagtacttattcactattctggctaaagacaatggagtcccccctttgacgagcaacgtgactgtatttgtgagcatcattgatcaaaatgacaattcgcccgtgttcactcataatgaatacaatttctatgtgcccgagaaccttcctcgccatggtaccgtgggactcatcactgtgaccgatcccgattacggggataattccgctgtgacattaagtatactggatgagaacgatgacttcacgattgactcccagaccggagtcattagaccaaacatatcctttgaccgagaaaaacaggagagctacacattttatgtgaaggcggaagatgggggaagagtttcaagatccagctctgccaaagtcacaattaacgtcgtcgatgtgaacgataataagccggtctttatagtaccacctagcaattgttcctacgagcttgtgttacccagcacaaacccagggacagttgtttttcaggtgatcgctgtggataatgacacaggaatgaatgcagaggtccgttattcaatagttggcggaaatacgcgggacctctttgcaatagatcaggagacaggcaatatcacgctgatggagaaatgcgacgtgactgatcttggactccatagggtcctcgtgaaggccaatgatttgggacagccagactcgctcttctctgttgtcattgtgaacctgtttgtgaacgagtccgtcaccaatgcgaccctcattaacgaactggtacggaagtccacagaggccccagttacaccgaatactgagatcgctgatgtgtctagtcccacctcggactacgtgaaaatcttggttgccgcagtggctgggaccataactgtagtggtggtcatcttcattacagccgttgtccggtgtcgccaggcaccccacctcaaagccgcacaaaagaacaaacagaactcagagtgggccaccccaaatccagagaaccgtcaaatgatcatgatgaaaaagaaaaagaagaaaaaaaagcactcccctaaaaatttattgctcaatttcgtcacaatagaagagactaaggcggatgacgttgactcagacggtaaccgtgttaccttggatctcccaattgatctggaagagcagactatgggcaagtacaattgggtcactaccccaacaacatttaagccagattccccagaccttgccagacactacaagtcagcctccccccaaccggctttccagatacagcccgaaacgcctctgaattccaagcaccatatcattcaggaactccctctggacaacacctttgtggcctgcgactccatttcaaagtgttcctcatccagctccgatccatacagtgttagcgactgcggatatcctgtgaccacattcgaagtgcctgtgtccgtgcacacacggccaccgatgaaggaggtggtgaggtcgtgtactccaatgaaggagtccactactatggaaatttggatccatcctcagccacagcgcaagtccgaggggaaggtggcagggaaatcccagcggagggtgacgttccacctgcccgaagggtcgcaagaaagttccagcgacggaggcctgggtgaccacgacgctggtagcctcacgtcaacctcccatggtctgccactcggttacccacaggaggaatactttgacagggctacgcccagcaatagaaccgaaggggatggcaactcagaccctgaatcaacattcatccccggactgaaaaaggctgccgagatcacggtgcagcccaccgtagaggaagcgagcgacaactgtactcaggagtgtctcatttacggacacagcgacgcttgctggatgccggcttcccttgatcactcaagttcaagccaggcccaggcatctgcgctgtgccactcccctcccctgagtcaggcctcgacacagcatcactcccccagggtgacacaaacaatagccctatgtcactctcccccagtaacccagaccatagcgctctgtcatagccccccaccgattcaggtatctgcgcttcaccactccccaccactagtccaggctactgccttgcaccattcccccccttcagcccaggcatcagcactgtgctactctccaccactcgcacaggcagccgctatatcacattctagccctctgccccaggtaatagccctacaccgaagccaggcacaaagtagcgtgagcctgcagcaggggtgggtgcagggagcggatggcctctgctctgtcgatcaaggagtgcaggggtcagcaacctcccagttctataccatgtctgagcgcttacacccctccgatgattctataaaggtgatcccattaaccactttcacaccgcgtcagcaagcacgaccctcacggggtgacagcccgattatggaggaacatcccctatag

SEQ ID NO: 237254 - DNA, 4014 bp, synthetic construct
  misc_feature 1..4014: note = Description of Artificial Sequence: Synthetic coding sequence
  source 1..4014: mol_type = other DNA
atggatctgctgtccggtacctatatttttgccgttctcctggcttgcgtggtcttccactcgggggctcaggaaaaaaattatacaatcagagaagaaatgccagaaaacgtactgattggtgacctgctcaaagaccttaatctctcactgatccccaataaatcattgaccactgccatgcagtttaagctcgtgtacaagacaggcgacgtcccacttattagaatcgaggaagacaccggagagatcttcactacgggtgccaggatcgatcgcgaaaaactgtgcgcaggtattccacgtgatgagcactgcttctatgaagttgaggtggcaatcttgccggatgagattttcaggctggtcaaaatccgattcctgatagaggacataaacgataacgccccactgtttcctgctaccgtaatcaacatcagtatcccggaaaattccgcgattaattcaaagtatacacttccagccgcagtggaccctgatgttggaatcaacggagtccagaactatgagctgatcaagtcccagaacatcttcggtcttgacgtgattgagacccctgagggggataagatgccgcagctcatcgtccagaaggaactggaccgggaagaaaaagatacatatgtaatgaaagtcaaagtggaggatggcggatttccacagcggagcagcaccgcgatattgcaggtgtccgtcacggacaccaacgacaatcacccggtgtttaaggagacagaaatcgaagtctccatacccgaaaacgcacccgtcgggacctccgttacccagttgcacgcgaccgatgcggacatcggggaaaatgcgaaaatccacttctcattcagtaatctggtgtctaatattgccaggagactatttcacctgaacgccactacaggcctgatcactatcaaggagcccctcgaccgcgaagagacgccaaatcataaattgctggtcctggctagcgatggcggtttgatgcctgctcgggctatggtcttggtgaatgtgacagatgtaaatgataacgtcccatcgatcgacattcgctacatcgtcaaccccgtgaacgataccgtggtcctatcggaaaacataccactgaacacaaagatagctctgataaccgtgaccgataaggatgccgatcacaacgggagggttacttgttttactgatcacgaaatacccttcaggctgagacctgtgttctcaaatcaattccttttagaaaccgccgcatacctcgactacgaatctaccaaggaatatgctataaaattactggccgctgacgcaggaaagccgcctttgaaccagtcagccatgctctttatcaaggtgaaggacgaaaatgacaacgccccagtgtttacacagagctttgtcactgtatcaatacccgagaataatagcccagggatccagttgaccaaagtcagcgcaatggacgcggattctggtcccaacgccaagatcaattaccttttaggacctgacgcccctcctgagtttagcctagactgcagaaccgggatgcttactgtggtcaagaaactagaccgggagaaagaagacaagtatctgtttacaatattagccaaggataatggcgtgccaccacttaccagtaacgtaactgtgttcgtaagcatcatcgatcaaaacgacaatagcccagtgtttacacacaatgaatacaatttttacgtgcccgagaacctgcctcggcacggaaccgtgggactgatcaccgtgactgaccccgactatggggacaatagtgcagtgacactctctatcctggacgagaacgacgatttcaccatagattctcagacaggagtgatcagaccgaacatcagcttcgaccgcgaaaagcaggagagctatactttttacgtgaaagcagaggatggtggccgtgtttctcggagctcatccgcaaaagtgaccattaacgttgtggatgttaacgacaataaacctgtttttatcgttcctccatctaattgtagttatgagctcgtgctgccaagtaccaatccaggcaccgtagttttccaggtgatcgccgtggataacgacacaggaatgaatgctgaggtcagatacagtatcgtcgggggaaatactcgcgatctcttcgctatcgatcaagaaacgggtaacattacactcatggaaaagtgtgatgtgaccgatctgggacttcaccgggttctggtcaaggcgaacgacctgggacaacctgatagcttgttcagtgtcgtgattgttaacctgttcgtgaacgagtccgtcacaaatgccacattgataaacgagcttgtgagaaagtctactgaagccccagttacccccaacacggaaattgcagacgtgtcctcacctacttcagactatgtgaagatcctggtggcagcagtcgctggtaccattaccgttgttgtcgtgatcttcataaccgctgtcgtgaggtgtagacaagcgccacacctcaaagctgcccagaagaataaacagaactcagaatgggccactcccaatccagaaaaccggcagatgattatgatgaagaagaaaaaaaagaagaagaagcactcccctaaaaaccttctgctgaactttgtgactatcgaggaaacgaaggccgatgatgttgatagcgatggcaatagagtgactctagacttacccatcgacttggaggagcagactatggggaagtacaattgggtaacaactccaaccacttttaaacccgactcacccgacttagctcggcactacaaatccgcctctccccagcccgcttttcagatccagcccgagacacctctgaatagcaagcatcacatcattcaggagttacccctcgacaacaccttcgtcgcatgtgactcgatctcaaaatgttccagttcgtcatccgatccctactcagtaagtgattgcggttatcctgttaccacgtttgaggtgcccgtgtccgtccacacacgacctccgatgaaggaagttgtccgctcgtgcaccccgatgaaggagtctacaactatggaaatatggattcatccccaaccccagagtcagcgaagggtgaccttccacttacctgaaggttcacaggaatcttcgagcgacgggggactaggggatcatgatgccggtagcttaacatcaacatcccacggactacccctgggctatccacaggaagaatattttgatcgggcaacgccgtctaacagaaccgaaggagacggtaatagcgaccctgagagcacatttatacctggtctgaagaaggccgctgaaataaccgtgcaaccgactgtcgaggaggctagcgataattgcacacaggaatgcctgatctacggccacagcgacgcttgttggatgccagccagcctggatcactcatcctcttcacaagcacaggcatcagcactctgtcattctccgcctctgagccaagcatcaacccagcatcactccccacgagtgacccagactatcgccttatgccactcaccgccagtgactcaaacaattgcactgtgccactctccaccccctatacaagtgagtgcactgcaccacagccctccccttgtgcaggccaccgctctgcaccactcccctccttcagctcaggcgtcagcactgtgttattcccctcccctcgcccaggccgctgcgatctcacattctagccccctgcctcaggtgattgcgctccatcgctcacaggcccagtcctcagtgagcttgcaacaggggtgggtgcaaggggcagatgggctatgttcagtggatcagggcgtgcaaggttccgccacatcacagttttacaccatgagcgagcgactgcatccaagtgatgactcgattaaagttattccactgacaaccttcacccccagacagcaggcacgtccaagcagaggggattcgcccatcatggaggagcacccactgtag

SEQ ID NO: 237255 - DNA, 3078 bp, synthetic construct
  misc_feature 1..3078: note = Description of Artificial Sequence: Synthetic coding sequence
  source 1..3078: mol_type = other DNA
atggatctcctctctggaacatatatctttgcagtccttttggcctgcgtggtttttcattctggagctcaggagaagaattacaccatccgcgaagaaatgcctgagaatgtactgattggagacctgcttaaggacctcaacctttccctaattccaaacaagtcactgaccacggccatgcagttcaaacttgtatataaaaccggagacgtcccgcttatcagaatcgaggaagatacaggggagattttcaccactggagcacgcatcgacagagagaagctgtgtgctgggatcccgagagatgagcactgtttctatgaggtcgaagttgccattcttcctgacgagatattcagactggtgaagatccggttccttatcgaagacataaatgataatgccccactctttcccgctacagtgatcaacatctcaatccccgagaactctgccattaactccaagtacacattgccagcagcagtggatccggatgtgggcataaacggagttcaaaattatgagcttattaaatctcagaatatcttcggtctcgacgtgatcgagactcctgagggcgataaaatgccacagctgatcgtccagaaagaactggatcgagaggagaaagatacttatgtaatgaaggttaaggtggaagacgggggattcccgcagcgctcgtctaccgccattctccaggtaagtgtaaccgatactaacgataatcatccagtgttcaaggagacggagattgaggtaagtatccccgagaacgccccagtgggaactagtgtcacccagctgcacgccactgacgccgatattggggaaaatgctaaaatccacttctcttttagtaacctggtgagtaatatcgcccgacgactcttccacctaaacgccactaccgggctgattacaattaaggaaccactggacagggaggagacaccgaaccacaaattgctggtgctggcatcggatgggggactgatgcccgctagagcaatggtcctggtcaacgtgaccgacgtcaatgacaatgtccccagtatcgacatcagatatattgtgaatccagttaacgataccgtagtgctcagcgaaaacatccctttaaacacaaagatcgctcttatcacagtaaccgataaggatgcggatcacaatggcagagtgacatgcttcaccgaccacgaaattcctttcagactgcggccagtgttctcaaaccaattccttttggagacagcagcgtatctggattacgaatcaaccaaagaatacgcaatcaagctgctcgctgccgatgccggaaaaccacccttgaatcagtcagccatgctctttataaaggtgaaagatgaaaacgataacgccccagtcttcacccagagcttcgttacggtatccatcccagagaataattcgcccggaattcagctcactaaagtaagtgctatggacgcagactcaggccctaatgccaaaattaattacttgctcggtccagacgctccaccagagttcagcctggattgtcggaccggcatgctgacggttgtgaaaaaattggatcgcgaaaaggaggacaaataccttttcactattctcgccaaagacaatggagtccccccactgacaagcaatgttactgtgtttgtcagtatcatcgatcagaatgataattcacccgttttcacacataacgaatacaatttctatgtgcccgagaacctgccccgacacgggacagtgggtcttatcaccgtgacggatcctgactacggtgacaattccgccgttaccctgagtatcctagacgaaaacgacgacttcacaatcgactctcaaacaggtgtaatccggcctaatattagctttgacagggagaagcaggagtcctacacattttacgttaaggcagaggacgggggtcgagtgagcaggtcctcgagcgccaaagtcactatcaatgtggtggacgttaatgacaacaaacccgtgttcatagtaccaccatctaactgctcctacgaactggtcctacctagcaccaatcccggaacagtcgtattccaggtgattgctgtcgacaatgataccggaatgaacgctgaggtcaggtactcaattgtgggcggtaacacaagggatctgtttgccattgatcaagaaactggcaatatcactctcatggagaagtgtgatgtcactgacctgggccttcaccgcgtactcgtcaaggcgaatgaccttggacaaccagacagtctcttttcagtggttatcgtgaatctgtttgtcaacgagtccgtcaccaacgccacgctcattaatgagctcgtcaggaaatcgacagaggcccctgtgacccccaacaccgaaattgccgacgtgtcctcccctacctcagactatgtcaagatcctggtagcagctgtggccggtaccattaccgtggtggtcgtcattttcatcaccgctgtggtgcgctgtcggcaggcccctcatttgaaagcagcccaaaaaaacaagcagaattctgaatgggccactcccaatcccgaaaatagacagatgatcatgatgaaaaagaagaaaaaaaagaaaaaacactctccaaagaatttgctcctgaattttgttactatagaggaaactaaggcagatgatgttgacagtgacgggaacagggtcaccttagacctacctatagatttagaggaacagactatgggcaaatataactgggtgaccactccaactacgtttaagcccgactctcccgatttggctcgccattataaaagtgcttctccacagcctgctttccagatccagcctgaaacacccctcaattctaagcaccatataatccaagagctaccactggacaacacctttgtggcatgtgactcaatctcaaagtgttcatctagttcctccgatccctactccgtgagtgactgtggctatcccgtgaccacgttcgaagtcccagtctctgtgcacactagacccacggatagccgcacaagcaccatcgagatctgctcagaaatctag

SEQ ID NO: 237256 - DNA, 4020 bp, synthetic construct
  misc_feature 1..4020: note = Description of Artificial Sequence: Synthetic coding sequence
  source 1..4020: mol_type = other DNA
atggacctgctcagcggcacttatatatttgccgtcctactcgcctgcgtggtattccacagcggggcacaagagaagaactacactatccgagaggaaatgccagaaaacgtcctcataggtgacttactcaaggatctgaacctgtcactgatccctaacaaaagtttgacaactgctatgcaattcaagttagtctataagacaggcgacgtaccattgattagaattgaagaggacacaggggagatttttaccactggagcacgcattgacagagagaaactttgcgccggtatccccagagatgagcactgtttttacgaagtggaagtcgcaattctgccagatgagatctttcgattagtcaagatccgctttctgattgaggatatcaatgataacgctcctctgtttcctgccacagtaatcaacatcagcatcccagaaaactccgctattaatagcaagtacaccctccccgctgctgtggaccctgacgttggtatcaatggtgttcaaaactatgagttgatcaaatcccaaaatatattcggtctagacgtgatagagacccccgagggcgacaagatgccacaactgattgttcaaaaggagttggacagggaggaaaaggacacgtacgtgatgaaggtcaaggtcgaggacggcggtttcccccaacgctcttccaccgccattctgcaggtcagcgtaaccgacaccaacgataatcacccagtttttaaggagactgagatcgaagtgtccatacctgagaacgcacctgttggtacaagtgtgacacaattgcatgcgacggacgccgacatcggcgagaatgcgaaaatacatttttccttctcaaatctcgtgtctaatatcgcccgtcgactctttcatcttaatgctacaacgggtctaatcacaataaaagaacccctggatagggaagaaacgcctaaccacaagctgttggtgctggccagcgacggtggcctgatgcccgctagagccatggttctcgtcaacgtgactgacgttaacgacaatgttccgagcattgacatacgctacattgttaatcccgtgaacgacacggttgtccttagtgagaacatcccgttgaataccaaaatagcattgattaccgtgaccgacaaagatgctgaccacaacggtcgagtgacatgcttcaccgatcatgaaatcccttttcgcctccgccctgtgttctcgaaccagtttctgcttgagaccgcagcttacctggattacgagagcactaaagaatacgctataaaattgctcgccgcagatgccggaaagccccctctcaaccaatctgctatgctcttcatcaaggtcaaggatgaaaatgataatgctcctgtgtttacccagtcgttcgttacggtgtccattcccgagaacaactcacccggaatacagctgacaaaagtgtccgcaatggatgctgattccggaccgaatgctaaaattaactaccttttggggcctgacgctccacccgaattttcattagactgtcgcacaggcatgctgaccgtggttaagaaactagaccgtgaaaaagaagataagtatctctttaccatactggctaaagataacggtgtcccccctctgacttcaaacgtgactgtttttgtgtccatcatcgatcagaatgataattctcctgtcttcacacacaatgagtataacttttacgttccagagaacttgcctcgccacggaacggtcggcctgatcacagttacagaccctgattacggcgataattctgcggtgactctgtccatactggatgagaacgacgactttacaatagacagtcaaactggggtgattcgcccaaacattagcttcgaccgggaaaagcaggaaagctacacgttctatgtgaaggcagaggacggagggcgtgtgtccagaagcagcagcgcgaaggttactatcaacgtggtggatgtcaacgacaataaaccggttttcatagtgcctccttctaactgcagctatgagctggttctgccctctaccaacccaggaactgtggtctttcaagtcatcgcagtggataatgacaccggtatgaacgctgaagtcaggtatagcattgtgggaggaaatacccgagatctgttcgcaattgatcaagaaacaggcaacataaccctgatggagaaatgcgatgtgaccgacctcggactgcacagagttctggttaaggctaatgatctgggacagccagattctttattttccgtcgtgattgtcaacctctttgtgaacgaatccgtgactaacgcaactctgatcaatgaactcgtcaggaagtctacagaagcgccagttacccctaatactgaaatagccgacgtttcctcccctacctccgattacgtcaagatactagtggccgcagtcgcgggaaccataaccgtcgtcgtggtgatctttatcaccgccgtcgtcaggtgtcgccaggctccacatctcaaggccgctcagaaaaacaagcagaatagtgagtgggctacgcccaatccggagaatcgccaaatgattatgatgaagaagaaaaaaaaaaagaagaagcactcaccaaagaaccttctactgaatttcgtcaccattgaagagactaaggccgacgacgtcgactctgacggcaacagagtcaccttggatctcccaatcgacctcgaggaacaaacgatgggaaaatataactgggttacaacccctactacttttaagccagattccccagatcttgccagacactataagtcagctagtccacagccagctttccagattcagcccgagacacctctgaactcaaaacaccacattattcaagagctgcccttggataacacgtttgtagcctgtgattcaatatctaaatgcagcagttccagcagcgatccctatagcgtgagcgactgcggctatccagtcaccacatttgaagtccctgtctctgtgcataccagaccgcctatgaaggaagtggtacggagctgcactcctatgaaagaaagcaccacaatggagatttggatccacccacagccacaacgtaagtcagagggcaaggtcgccggaaagtctcagcgcagagtgactttccatctgcccgagggctcacaagagagcagtagcgacggtggtctgggagaccacgacgccggtagcctgacctcaacctcccacggcctgcctctcggctatcctcaggaagaatacttcgatcgcgcaacaccatcaaataggactgagggcgacggaaattcagatcccgagtctaccgctgaaattacagtgcagccgactgtggaggaggcttccgataactgcacccaagagtgcctgatatacggccacagcgatgcttgctggatgcccgctagcttggaccatagctcttcatcacaggcgcaggcctcagctctttgtcactctcctccattatcccaggcctcaactcagcatcactctcccagagtgactcagactatcgcgctctgtcacagcccacccgttacccagaccatagcactgtgccattcgccaccgcctatacaggtgagtgctctacatcactcgccccctctagtgcaggctacagccctgcatcactctccgccatccgctcaggccagtgccctttgctactctcccccattggcacaagctgcagcaatctcccactcatcgcctctccctcaggtaatcgcgttgcaccgttctcaagcacagtcaagtgtgtcattgcagcaggggtgggtccagggcgctgacggactgtgctctgtggaccagggtgtgcagggtagcgccaccagtcagttttatactatgtctgaaaggctgcacccttcagacgactccatcaaagtgatccccttaaccacatttacgccccgtcagcaggcccgtccgtcccgtggcgacagtccaatcatggaggagcacccgttgtag

SEQ ID NO: 237257 - DNA, 3198 bp, synthetic construct
  misc_feature 1..3198: note = Description of Artificial Sequence: Synthetic coding sequence
  source 1..3198: mol_type = other DNA
atggacctcctttctggaacgtatatttttgccgttctcctggcctgcgtcgtctttcactcaggggctcaggaaaagaactacaccatccgcgaggaaatgccggagaatgtgttaattggagatctgctgaaagacctcaacttgtcactgattccaaataagagcctgacaacagctatgcaattcaagttagtgtataagacaggggacgtgccactgatccggattgaggaggacacaggggaaatcttcaccacaggggcaaggatcgacagggagaaactatgtgctgggatcccccgtgatgagcactgcttctacgaagttgaggtggctattttgccagacgaaatctttagattggtcaagatcaggtttcttatcgaagacatcaacgataacgctcccttgttccccgcaacagttatcaatatttccattcccgagaactctgccattaacagtaagtacaccttaccagctgccgtcgaccctgacgtcgggatcaatggtgtgcagaactacgaactcatcaagagccagaacatctttgggctggacgtcatcgaaacgccagaaggcgataaaatgccccagttgatagtgcagaaggaactcgacagagaggagaaagacacctacgtaatgaaagtgaaggttgaagacgggggattcccgcaaaggtcatctacagcaattctacaagtgtccgtcacagacacaaatgataaccatccggtcttcaaagaaacagagatcgaagtgtcaattccagagaatgctccagtggggacaagcgtcacccagctgcacgccaccgacgccgatataggggagaacgccaaaatccacttttcattttctaaccttgtgtctaacatcgccaggcgcttgtttcatcttaatgccaccacagggctgataactatcaaggagccgctggatcgcgaagaaacgcccaaccacaagctgctcgtgctggccagcgacgggggactgatgcccgctcgtgcaatggtgttggtgaatgtgacagacgtgaacgataacgtaccatctatcgatattcgctacatagtcaatccagtcaacgacacggtcgtcttaagtgagaacatccctctgaataccaagatcgctctcattactgttaccgataaagatgctgatcataatggtcgggtcacttgctttaccgatcacgagatccctttccgcctgcgtccggtgttctctaaccagtttctgctggagacagccgcatacctggactacgagtccacaaaagaatacgccatcaaactgcttgccgcagacgctgggaagccacccctgaaccaatccgctatgctgttcattaaggttaaggatgagaatgacaacgcacccgtgtttacacagtcgtttgtgaccgtctcaatccccgagaacaattcccccggaattcagctcaccaaggtttccgccatggatgccgactctgggcctaacgctaagatcaactatctgctgggccctgatgctcccccagaattcagcctggattgccggacgggaatgctaacagtggtcaagaaactggacagggaaaaggaagataaatacctcttcacgatactcgcaaaggataatggcgttcctcctctgacctcaaacgtcacagtatttgtgagtattattgaccagaatgacaacagcccggttttcacccacaatgagtacaacttctatgtaccggagaatctgcccagacacggcacagtcggactaattacagtgaccgatccagattacggagacaactccgctgtgacacttagcatcctggacgaaaatgacgactttaccatcgacagccagacgggagtcatcagaccaaacatctcatttgatcgggagaaacaagagtcctataccttctatgtgaaagccgaagacggaggcagagtttctaggtcctcctcagcaaaggttacaatcaatgtggtggatgtaaacgacaataagcctgtcttcatcgtacctccaagtaattgctcctacgagcttgttctgccctccacaaaccccggaacggtggtattccaagtaattgccgtagataacgatacgggcatgaacgctgaggtgagatattccattgtgggtggcaatactagagacctgttcgccattgaccaggaaacaggaaatattaccctgatggagaaatgcgacgtgactgatctgggcttacaccgtgtgttggtgaaagcaaacgatctcggacagcctgattcccttttttcagtagtgatagttaatctgttcgtaaacgagagcgtcaccaatgctacgttgataaacgaactggttagaaagagcacagaggccccagtgacaccaaacacggaaatcgctgatgtgtcatcccccacgtctgattacgtgaaaatacttgtcgccgctgttgctggtaccattactgtggtcgtcgtgatcttcatcacagcagtggtgaggtgcaggcaggcaccgcacttgaaggccgctcaaaagaataaacaaaattccgaatgggcaaccccgaaccctgaaaacaggcagatgataatgatgaagaaaaagaagaagaaaaagaagcattcccctaaaaatttacttttaaactttgtcacaatcgaggaaacaaaggctgacgatgtggactccgacggcaatcgagtgaccctcgacttgccaatagacctggaagaacagactatgggcaagtataattgggtgacgacaccgactacattcaaacctgactctcccgatttggctcgtcactacaaatccgcttctccccagccggcatttcagatccagcctgaaacgcccctgaactccaaacatcacattatccaagaactgccccttgataacaccttcgtggcgtgcgactccatttccaaatgctcctcatcatcatccgacccttactccgtgtctgattgcgggtaccctgtgacaacgtttgaggtgccagtgtcggtgcacacaagacctcccatgaaagaggtagtacgaagttgtaccccaatgaaggagtcgacaaccatggaaatctggatccacccccagccgcaacgcaagtccgagggcaaagtcgccggtaagaccgtgcttacttcgtccagtccttccgccatgaccctctcttacttggactag

SEQ ID NO: 237258 - DNA, 1344 bp, synthetic construct
  misc_feature 1..1344: note = Description of Artificial Sequence: Synthetic coding sequence
  source 1..1344: mol_type = other DNA
atggcaaccgccgctaccacaaccacgactaccacggctacagtggcactgaccactagttgggataatgccacggggaggcctacagcggaacctgatcccatcctggacaattatgttcttctggtggtggttatgtcactgtttgtgggcggaacccttgttgttctctcaggggtgctgcttttgtgcaaaaggtgttgggatgtccaccagcgtctgaatcgtgcaatggaggaggctgaaaaaaccactaccacctacctggataatggcacacacccagcccaggatcctgacttccggggagaagaccccgaatgccaggatgcggagactgaacgctttctaagtacttcatccacagggaggagagtatcctttaatgaagctgctctgttcgaacaatcccgcaagactcaagataagggccgacgctacaccctcactgaaggtgactttcatcacctcaaaaatgctagattgacacacctgcatctgccaccactgaaaattgtgacaatccacgagtgcgacagtggcgaggcctcttccgcgacaactccacacccagctacttcccccaaggccaccctggccattttccagccacccggtaaagccctgacgggcaggagcgtgggcccatcgtccgctctccccggagacccctataattccgccgctggcgcaaccgatttcgctgaaatcagcccctccgcctcaagcgactccggtgagggcacctctctggatgctgggactcggtccaccaaagcgggaggtcccggagccgcagcgggaccgggagaggcaggacctggaagcggagccggaaccgtgttgcagttcttgactaggctgcgaagacatgcttcactggacggcgcttcaccctattttaaagttaagaagtggaaactggagccctcccaacgcgctgccagcctggacacccggggtagcccgaagcggcaccatttccaacgccaaagagccgcttccgaatctactgaacaggaggagggggacgcaccgcaagaagattttatccagtatattgctcgggcaggagatgcggtggcgttccctcatccaaggccatttctggcctccccgccaccggcactcgggcgatatttctctgtagacgggggtgccagaggtggacctgtgggcccttgccctccctccccccctccacgaaggcccagagagaggtcgccaggaccagtggatactagaagcccagccagttccggtaaggctcccccacgtggaggccttactggcgctaccagcccagcctggactagagggggaaagcaaggagagacgggttag

SEQ ID NO: 237259 - DNA, 3114 bp, synthetic construct
  misc_feature 1..3114: note = Description of Artificial Sequence: Synthetic coding sequence
  source 1..3114: mol_type = other DNA
atgactgtgggcttcaatagtgacatcagcagcgttgtccgggttaatacgaccaattgccacaagtgcctcctgtcaggcacatacattttcgccgtgctcctggtttgcgttgtttttcactccggtgcccaggagaaaaattacactatccgcgaggagatccctgagaacgtactcattggcaatctccttaaggatctgaacttatcgctgattcctaacaagagcctcactacaactatgcagttcaagttggtttacaagacaggcgacgttcctctgattaggatcgaagaagacacaggcgaaatcttcacaacaggggctagaatagatcgtgagaagttatgcgctgggatcccgagggacgagcactgcttctatgaagtggaggttgccattctccccgacgagattttccggctagtgaaaatcagatttttaatagaagacatcaatgacaatgcgcctctcttcccagccacagtcattaacatttcgatccctgaaaactcagcaattaacagcaaatacaccctacctgcggcagtggatcctgacgtgggcattaacggagttcagaactacgaacttatcaagtctcagaacatttttgggttggatgtcatcgagacaccggaaggtgacaagatgccccagttgattgtacaaaaggaactggatcgtgaagagaaagacacttatgtcatgaaggtgaaggtcgaggacgggggttttccccagcggtcctcaacagccatcctgcaagtgtctgtgacggacacaaacgacaaccaccctgtgttcaaggagaccgagatcgaggtgtcgatccccgaaaatgctccagtgggaacctctgtcacccagctgcatgctaccgacgctgatattggggaaaacgctaaaattcacttcagcttctctaacttggtgtccaacatagctcgtagacttttccatctaaatgcgacaaccggtttgatcactataaaagagcccctggatcgggaggaaaccccaaaccacaaactacttgtgctggcgtctgacggcggactgatgcccgctcgggctatggtcctggtgaatgtgaccgacgtgaacgataacgttccctcaatcgacatcaggtacatagtcaaccctgtaaatgacaccgttgtgctgagtgagaacatcccactgaacaccaaaatcgcgctcattactgtcaccgacaaggacgccgatcataacggacgagttacctgttttaccgaccatgagatcccttttagactccggcctgtgttcagcaaccagttcctgcttgaaaatgcagcttatctcgactacgaatctaccaaagagtacgcgattaaactgcttgcggctgacgcaggtaaaccacctctaaaccagtcggccatgcttttcattaaggtaaaggatgaaaatgataacgcgcctgtgttcacacagtcctttgtgacagtatcaatccctgaaaacaacagccctgggatccagctcatgaaagtaagcgcaacagatgccgacagcggtcccaatgcagagattaattaccttctaggccctgatgctccccctgaattttccttggacagaagaacaggcatgcttactgtggtaaaaaaactggacagggaaaaggaagataaatacctgttcaccatcctcgccaaagataatggagtgccccctttgaccagcaatgtgacggtgttcgtctccattatcgaccagaatgacaattcaccagtattcacccacaacgagtacaaattttatgtcccggagaacctgcctaggcatggcacagtgggacttattacagtaactgaccccgattacggagacaatagcgctgtaacactctccatcctggacgaaaatgatgactttaccatcgattcgcaaaccggagtaatccgaccaaatatttccttcgaccgcgaaaagcaggagagttacactttttatgtaaaggcagaggatgggggaagggtgtccagatcttccagcgccaaagtaaccataaacgtagttgatgttaatgataacaaacccgtgtttattgttccgccatacaattacagctatgaattggttctgcccagcaccaatcccggaacagtggtattccaagtaattgccgtggataatgacacaggcatgaatgcagaggtccggtactctatagtggggggtaatacacgggatctattcgcaatcgatcaggaaactggaaacattaccctgatggagaagtgtgacgtgacagatcttggccttcaccgagtgttagtcaaggccaacgacctgggtcaacctgactcgctcttttccgtggtgatagtcaatttattcgtaaacgagtcggttacaaacgctacactgattaatgagctggtccggaagtctatagaggcccctgttacacctaacacagaaattgcagatgtttcttcccccactagtgactatgtaaaaattctggtggcagcagttgctggcactattacagtcgttgtggtgatttttataacagctgtggttcggtgtagacaggctcctcatctgaaagcggcacagaaaaacatgcagaacagcgagtgggcaacacccaaccctgagaatcgccaaatgatcatgatgaaaaaaaagaagaaaaagaaaaaacacagtcctaaaaacttattgctcaacgtggtgaccatcgaagaaacgaaagccgacgatgttgactccgatggcaatagggtgaccctagatttgccaatagaccttgaggagcagactatgggcaagtacaactgggtaactacccccacaacgtttaaacctgacagtcctgatctggctcgtcactataagtccgcttcaccacagccggctttccagattcagcctgaaacgccccttaatctgaagcaccacatcattcaagaactgccactggataacaccttcgtggcctgtgacagcatttctaactgtagttccagctcttctgacccctacagtgtgtctgactgtggctatccagtcactacattcgaggtgcctgtgtcggtgcatactcggccaacagatagccgaacctag

SEQ ID NO: 237260 - DNA, 3147 bp, synthetic construct
  misc_feature 1..3147: note = Description of Artificial Sequence: Synthetic coding sequence
  source 1..3147: mol_type = other DNA
atgttccgcgtgggatttttgattatatcttcctcctccagcctgagccctctacttctggtttctgtggtgcgcgttaacacaacaaattgtcacaaatgcctcctctccggaacatatatctttgccgtcctcctggtatgtgtggtgttccactcaggtgctcaggagaaaaattacacaatccgcgaggaaattcctgagaacgttctaatcggtaacttactaaaggatctaaacttgagcctaatccctaataaaagccttactacaaccatgcagttcaagctggtgtacaagactggcgacgtccccctgattcgaatcgaagaggatactggcgaaatcttcactacaggagcacgaattgacagagagaagctttgcgcgggaattcccagagatgagcactgcttttatgaagtcgaagtggccatcctgcccgacgagattttccgcctcgttaagatcagatttctaatcgaagacatcaacgataatgctccactcttcccagcgactgtcatcaacatcagcattccggaaaactcggcgatcaactcgaaatacactctcccagctgccgtggacccagacgtcggaatcaacggtgttcagaactatgagctgatcaagtcacagaatatctttggcctggacgtaattgagactcccgagggcgataagatgccacagctgattgtacagaaagagttggaccgcgaagagaaagatacctacgtgatgaaagtgaaagttgaagatggcggattccctcagagaagttccaccgcaatcctgcaggtaagcgtgactgataccaacgacaatcacccagtctttaaggaaacggagatcgaagtaagcatacccgaaaacgcccctgtgggaactagtgtgacccagcttcacgcgacagacgcagacatcggcgagaatgcaaaaatccatttctccttctccaatctggtctctaatatcgccaggcgcctatttcatcttaacgcgaccaccggactgattaccattaaggagcccctcgacagagaagaaactcctaatcacaagcttctggttctggcttcagatggtggtttgatgcctgctcgggctatggtccttgtgaatgtcacagacgtgaatgacaatgtgcccagcattgacatcagatacattgtgaacccagtgaatgatacagttgtgctttccgagaatattcccctgaatacaaagattgccctcatcaccgtgactgataaagacgctgaccataacggtagagttacttgttttacagaccacgaaatcccttttaggctccgccctgttttcagcaatcagttcctgctagagaatgctgcctacttggattacgaaagtactaaagagtacgcgatcaaactcctcgctgctgacgcaggcaagccccctttgaatcagagcgctatgctgtttattaaagtcaaggatgaaaacgataatgcgcctgtctttacccagtccttcgtcaccgtctctatcccggagaacaactcacccggtatacagctgatgaaggtgtccgccacagatgctgattccggcccaaacgcagagatcaactacttgttggggccagatgccccacctgagttctccctagatagaagaacaggtatgttaaccgttgtgaaaaaacttgaccgcgagaaagaggacaagtatctgtttacaattcttgctaaggacaatggggttcctcctctcaccagtaacgtgacggtgtttgtgtcgatcatcgaccagaacgacaattcccctgttttcacacacaacgagtacaagttctatgtgccggagaacttaccccgacatgggactgtgggacttatcacggttaccgacccagattatggcgataacagtgccgtaaccctaagtatacttgacgaaaacgacgactttactatcgattcccagactggcgttattagaccgaacatcagcttcgaccgggaaaaacaggaatcctacactttctatgtcaaggccgaagacggcggacgtgtctcaaggtcttcttctgcaaaagttaccatcaatgtcgtcgacgtgaatgataataagccggtgtttattgtgcccccatataactactcttacgagctggtactgccctcgacaaaccctggaaccgtggtttttcaggtgattgccgtagataacgacaccggcatgaacgctgaggtgcgttatagcattgtcggcggtaacacaagagatctgtttgccattgaccaggaaacgggcaatattacgctgatggaaaagtgcgatgtgacagatttgggcttgcaccgcgtgctggtgaaagcgaacgacctgggccagcccgactctctgtttagcgtggttatagtcaacctgttcgtaaacgagagtgttactaacgccactctgattaacgaactcgtgagaaaatctatcgaggccccagtaacaccaaacactgagatcgctgatgtgtcctctccgacttctgactatgtgaagatcctagttgccgcagtggcaggaactattaccgttgttgtggtcattttcatcactgctgtggtgcgctgtcgtcaggccccacacttaaaagctgctcagaagaacatgcagaattcagagtgggccacccccaaccctgagaatcgccagatgatcatgatgaagaagaagaagaagaagaagaagcactcaccgaagaatctgctcttgaatgtggttaccatagaagagacaaaagcagacgatgtggatagcgacgggaaccgggtaacacttgatttacctatagatctggaggaacagacgatgggcaaatacaactgggtaacaaccccaaccaccttcaaaccggatagtcccgatcttgcacgtcactacaagtcagcgtcacctcagccagccttccagattcaacccgagacccccctgaatcttaagcaccacataatacaggagttacctctcgataacacgttcgtcgcgtgtgacagtattagcaattgttcatccagcagctctgacccatacagtgtttctgactgcggctatccagtcactacttttgaggtaccggtttccgtgcatacccgccctactgacagtcgaacatag

SEQ ID NO: 237261 - DNA, 3960 bp, synthetic construct
  misc_feature 1..3960: note = Description of Artificial Sequence: Synthetic coding sequence
  source 1..3960: mol_type = other DNA
taggttgtgagagtcaataccaccaactgtcacaagtgcttgttgtctggcacctacatcttcgccgtgctgcttgtttgcgttgtgtttcattctggcgcacaggagaagaactacacaatcagggaggagattcccgaaaacgtcctgatagggaacctgctcaaagacctcaatctcagtctgattccgaacaagtccctgacaaccaccatgcaattcaaacttgtgtacaaaacgggagacgtaccgctcatccgcatcgaagaggacactggcgagatctttactaccggagctcgcatcgatagggagaagctatgcgccggaatacccagagatgagcactgcttttatgaggtggaagttgccatccttcccgatgagattttcaggcttgttaaaattcggtttctcattgaggacataaacgataacgcaccactgttcccagctactgtcattaatatctcaatccctgagaatagcgccatcaatagcaaatacaccctgccggcagccgtggaccccgacgtcgggatcaacggtgtccagaactatgaactgattaagagccagaatatcttcggcctggacgttatagaaactcccgagggtgacaaaatgccgcagctgatcgtacagaaagagctggatagggaggagaaggatacatatgtaatgaaggtgaaggtggaggacggtggattcccgcagagatcttccacagcaattttgcaggtctccgtgacggatacaaatgacaatcatcctgtgtttaaggagacagagatcgaagtgtccatccccgagaatgccccagtagggacctcagtcacgcagctgcacgcaacggacgccgacatcggggaaaatgccaagattcacttttcattttccaacctggtctccaacattgcacgcaggctgttccacctcaatgccactaccgggcttatcaccattaaagagcccctggatcgggaagaaaccccgaaccacaagctgcttgttctggcctcagacggtggcctcatgcctgcacgggcaatggttctcgtcaatgtgacagacgtgaatgataatgttcctagtattgacatccgatatatagtgaatccagtgaatgataccgttgtgctgtcagagaacattcctctcaacactaagatcgctctgataacagtcacagacaaggatgcggaccacaacgggagagtaacctgctttaccgaccacgagatcccgtttcggcttcgtcctgtcttctccaatcagttcctcctggagaatgccgcatacctagactatgagagcaccaaggagtacgcaataaagttgctcgccgcagacgctggcaagccccctctcaatcaatccgccatgctctttatcaaggttaaggacgaaaatgataacgcacccgtgtttactcagagctttgtgaccgtctccatccctgaaaataacagccccggaatacagctcatgaaggtctccgcaacagatgccgattctgggccaaatgcagagattaattatttactgggacctgacgcccctcccgagttctcactagacaggcggactgggatgctcactgtggtaaagaagctggaccgcgaaaaggaagataagtatctgtttacaattctcgctaaagacaacggagtgccacctctgacatctaatgtgaccgtgttcgtctctataatcgaccagaacgacaattcacctgtattcacacataatgagtataagttttacgttccagagaaccttccacggcacgggacagtgggactgattaccgtcaccgacccagactacggcgataacagcgccgtcaccctgtcaattctcgatgaaaacgacgattttaccattgacagtcagacaggggtgatcagaccaaatatctccttcgaccgcgagaagcaagaaagttacaccttttacgtcaaagccgaggatgggggacgagtgtccagatcttcgagtgctaaggtgaccatcaacgtggtcgatgttaacgacaacaagccagtgtttattgtgcctccttacaattattcatacgagctggtactcccatcgaccaacccaggcaccgtcgtctttcaggtgattgcagtggacaatgataccggcatgaatgcagaggtgaggtactctattgtggggggaaacactcgtgatctgtttgctattgaccaggaaacgggcaatatcacactcatggagaagtgtgatgtgactgacttgggcttacatagggtgcttgtaaaggcgaatgatctggggcagcccgacagcctgtttagcgtggttattgtcaacctctttgtcaatgaaagcgtcactaacgctactttaatcaacgaactggtgcgtaaatctatcgaagcaccggtcacgcctaacactgagatagctgatgtgagctccccaacatccgactacgtgaagattctggtggccgctgtggccggaacaatcacagtggtggtggtgatatttatcactgcggtggtgaggtgtagacaggcccctcatttaaaggcggctcagaagaacatgcagaattccgagtgggctactcccaaccctgagaatcgccagatgatcatgatgaaaaaaaagaagaagaagaaaaaacattcacccaagaacttacttttaaatgtagtgacaatagaggagaccaaggcagatgacgttgattcagatggcaatagggtcaccttggacctgcccatcgacctagaagaacaaaccatgggcaagtacaattgggtaactacgccaactacctttaaaccagacagccccgacctggcaagacactataaatctgcttcacctcaacctgcgttccaaattcagcctgaaacccctctgaaccttaagcaccatatcatccaggagttacccttagacaatacattcgtggcctgcgacagtatttccaactgcagctcctcctcctctgatccctacagcgtgtcagattgcgggtacccagttactaccttcgaagtgcctgtgtccgtgcacaccagaccaagccagcggagggtcacttttcatctgcctgagggttctcaagaatcatcctcagacggaggcctgggggaccatgatgcaggaagcctgacatcaacctcccacggtcttcctttgggctacccccaggaagaatatttcgatcgtgcaaccccctcaaacaggaccgagggggacggtaatagtgaccctgagtccacattcattccgggattaaaaaaagagataaccgtacagcctaccgtcgaggaggcctcggataattgtacacaggagtgcctaatctatggacactccgacgcctgctggatgcccgcttccctggatcacagttcttccagtcaagctcaggcctctgcactttgccactccccacccctctctcaggcctccacacagcaccattcccccccagtcacccagacgatcgtgttatgccattctccgcctgtaactcagactatagctctttgtcacagcccacctcctattcaggtgtccgcacttcaccattcacctccgctggtgcagggaactgctctccatcactccccgccaagcgctcaggcaagcgctctgtgctactcccctccactcgcccaggctgcggcaatatcacactcctcctctctaccccaagtgatagcgttgcatcggagtcaggcacagtcctcagtgtccttacagcaggggtgggtacaaggagccaacgggttgtgctccgtagaccaaggtgtccaggggtctgccacatcccagttttacacaatgtctgagaggcttcatccaagcgacgattccattaaggttatccccttaacaaccttcgcccctaggcagcaagcccgacccagcagaggtgatagccctatcatggaaacgcacccactctag

SEQ ID NO: 237262 - DNA, 1080 bp, synthetic construct
  misc_feature 1..1080: note = Description of Artificial Sequence: Synthetic coding sequence
  source 1..1080: mol_type = other DNA
atgagatcaataaggaaaagatggacaatttgcaccatatcactcctacttatcttctacaaaaccaaagaaatcgccaggaccgaggagcaccaggaaactcagctgattggcgatggggagctctctctgtccagatccttagtcaacagctctgataagatcatccgaaaagccggatcgagtatattccaacacaatgtggaaggctggaaaatcaactcctccctagtattggaaatccgaaaaaatatcttgcgatttcttgatgcagaaagggatgtgagcgtagtgaagtcatcctttaagcctggggacgtaatacactacgttctggaccggaggcggactttaaacatctcgcatgatctgcacagccttctccccgaggtgagccctatgaaaaaccgaagatttaagacatgtgcagtcgtgggcaattcgggcatcttactcgattctgagtgtgggaaggagatcgattctcacaactttgtaattcgatgcaatctcgccccagtggttgaattcgctgccgacgtcgggacgaagtctgatttcattactatgaatccctcggtggtgcagagggccttcggaggattccgaaatgaaagtgatcgagagaagttcgtgcacaggttatccatgctgaacgattccgtactgtggatccctgccttcatggtcaaaggcggagaaaagcacgtggaatgggttaacgccctaatcctgaaaaacaagctgaaggtcaggaccgcttatccctcccttagactgatccacgccgttaggggctactggcttaccaacaaagtccctataaaaaggccttcgactggccttttaatgtatactctcgcgacacggttttgcgacgagatccatttgtacgggttttggccttttcccaaagatctgaatggcaaggctgtcaagtatcactactacgatgatctaaagtatagatacttcagcaacgctagccctcatcggatgccgctggagtttaaaactctaaatgtcctgcacaacagaggcgcactcaagctgaccactggcaagtgtgttaaacagtag

SEQ ID NO: 237263 - DNA, 72 bp, synthetic construct
  misc_feature 1..72: note = Description of Artificial Sequence: Synthetic coding sequence
  source 1..72: mol_type = other DNA
atgatgcagctcctgcagcttttgctaggtctcctaggacccggtggctatttgttcctactgggtgattag

SEQ ID NO: 237264 - DNA, 3480 bp, synthetic construct
  misc_feature 1..3480: note = Description of Artificial Sequence: Synthetic coding sequence
  source 1..3480: mol_type = other DNA
atgtatctttcgatttgttgctgcttcttactgtgggcccctgccttgacactcaagaacttgaattacagcgtccctgaggagcaaggggctgggacagtcatcggtaatattgggagggacgcacgcctccagcccggtctgcctcctgctgagcgcggaggaggaggcagatctaagtctggaagctaccgcgttctggagaattctgcccctcatctgcttgatgtcgatgcagacagtggcctgctatataccaagcagagaatcgaccgagaatctctttgtaggcacaatgcaaagtgtcagttatctctggaggtgtttgcaaacgataaggaaatctgtatgattaaagtagaaatccaggatattaacgacaatgccccttctttcagctccgatcagatcgagatggacatcagcgagaacgcggctccaggcaccaggttcccactcacaagcgcccatgacccggacgctggggaaaacggtttaaggacgtatcttctgactagggacgaccacggcctgtttggccttgatgtgaaaagcagaggagatgggactaaatttcccgaattggtcatacagaaagctttggaccgcgaacagcaaaatcaccatacgctggtccttaccgccctagacgggggagaaccaccgagatccgccaccgtgcagatcaacgtcaaagtcatcgactctaacgataacagtcccgtttttgaggccccaagctacttggtggagctccctgagaacgcccctttgggcaccgttgtcatcgaccttaacgccacagacgccgacgaggggcctaatggagaggttctgtattcattctccagctacgtgcctgacagagtgagggaactgttttcaatagatcctaaaactgggctcatcagggtgaagggaaacctggattacgaggagaacggcatgcttgagatagatgtgcaggctcgtgacctgggcccaaacccaatcccagctcactgtaaagtcaccgttaagctcattgaccgaaacgataacgcgccttctattggtttcgtgagtgtacgacagggagccctctccgaagccgcaccacctggcaccgtcatcgctctggtccgggtgactgaccgcgattcaggcaagaacggacagctgcagtgcagggtactgggtggcggaggcactgggggtggcggaggcctggggggacccggaggaagcgtgcctttcaagttagaagaaaactatgacaacttttacaccgtggttacagataggccgctggatcgggagacacaggacgaatacaacgttactatcgtagcacgagacggcggtagccctcccctaaacagtactaagtcttttgccatcaaaatcctcgatgagaacgacaaccctcccagattcaccaagggactgtatgtgctccaggtgcacgagaataacattcccggagagtacctggggagtgtgctggcgcaggatcctgacctgggtcaaaacggtaccgtcagttattcgatcctaccgagccacattggggacgtttccatctatacgtacgtgagcgtgaacccaaccaacggagccatttacgcccttcggagcttcaacttcgaacagactaaagctttcgaattcaaagtcttggctaaagactctggtgcacccgcacacctagaatccaacgccaccgtcagggttacagtcttggacgtgaatgataatgctccagtcatagtgctccccacattacagaatgacacagccgaactgcaggtacccaggaatgctggtttggggtacctggtgtcaaccgtgcgagccctggatagcgacttcggggaatcggggcgtctgacctacgagatcgtggacggcaacgacgaccacctgttcgagattgacccatccagcggagagatacggactttacatcccttctgggaggacgtgacccccgtggtcgagctcgtcgtcaaagtcaccgaccatgggaaacctacattgagcgcggtggctaagctaatcatccgcagcgtaagcggctctctgcctgagggagtgcccagagtcaacggggaacagcatcattgggatatgagcctccctcttattgtgacattgtcaactatttccattattctgctggccgctatgataactattgccgtgaagtgtaagagagagaacaaggaaatacgcacttacaattgtagaatcgcagaatattctcacccgcagttgggcggagggaaggggaagaagaaaaaaatcaacaagaacgacattatgctggtccagtctgaggtggaggaaagaaatgctatgaatgtgatgaatgtagtgtccagtcctagcctcgccaccagcccaatgtacttcgactaccaaacgcggttgccactgagcagtcctcgcagtgaagtgatgtaccttaaacccgctagtaataacctgaccgtgccacagggacatgctggctgccatacctcatttaccggacaaggcactaatgcgagcgaaacgcccgctacaagaatgtccatcattcagacagacaacttccctgccgagcccaattatatgggatctcgacaacagttcgtacagagttcctctacatttaaagacccagagagagcatctctgcgcgattctggacacggggactcggatcaggctgactctgatcaggatactaataaggggagttgctgcgacatgtcagttcgggaagccctgaaaatgaagacaacctctacaaagtctcagcctctggagcaggaacctgaggaatgtgttaactgcacagatgaatgtagagtgcttggccattccgatcgctgttggatgccacaattcccggcagcaaaccaggccgagaacgcggattaccggactaatctttttgtacccacagtggaagcaaacgtggaaactgaaacctatgagaccgtcaaccctaccgggaaaaagaccttctgcactttcggcaaagacaaacgggagcatacaatcctgattgcgaacgtgaagccatatcttaaagccaagagagccttgtctcccctgttgcaggaggtcccctccgcctcctcctcacccactaaagcttgcatagaaccgtgtactagtacaaagggaagcctggacgggtgtgaggccaaacctggcgctctagcggaagcaagcagtcaatatctgcccacagactcccagtatctgagtcccagcaagcagccccgagatccacctttcatggcttctgaccaaatggccagggtgtttgctgatgtgcactctcgcgcttccagggatagcagtgaaatgggcgctgtgcttgaacagctcgaccacccaaacagagacctaggcagggaaagcgtagatgctgaagaagtggtgagggaaatcgacaaactgcttcaggattgccgtgggaatgacccagtggccgtgcggaaatag

SEQ ID NO: 237265 - DNA, 3408 bp, synthetic construct
  misc_feature 1..3408: note = Description of Artificial Sequence: Synthetic coding sequence
  source 1..3408: mol_type = other DNA
atgcatcagatgaatgctaaaatgcactttcgcttcgttttcgcactcctgatagtgagttttaatcacgatgtgctgggaaagaatctgaagtatcgcatctacgaagaacagcgcgtaggctcagtcatcgctcgcttatccgaggacgtcgctgacgtgctactgaagctgccaaatccaagcaccgttaggtttagggccatgcagcgtgggaatagtcctctgttagtagtaaacgaggacaacggggaaatatcaatcggggcaacaattgacagggaacaactgtgccagaaaaatctgaattgtagcatcgaatttgacgtaattaccttgccaaccgaacacttacagctgttccatatcgaagtggaagtcttagacatcaatgacaatagcccgcaattcagcaggtcacttatccccatcgagattagtgaatctgccgctgtgggtacgagaatccccttggacagcgcattcgaccctgacgtcggtgagaactctcttcacacctattccctgtccgcaaatgatttcttcaatattgaggtccgaacacgaacagatggcgcaaaatatgctgagctcatcgtagtcagagagctggatcgggaacttaagtcatcttatgagctgcagctcactgcgtcagatatgggggtgcctcaaagatctggcagtagcatccttaaaatttcaatttctgattccaatgacaattctccggcatttgaacagcagagctacattatccagcttctcgaaaatagcccggtgggcactctgttgttggatctgaatgcgactgaccctgacgagggcgcaaacggtaagattgtgtattcctttagtagtcatgtctcacccaagattatggagacttttaaaatagatagtgagaggggccacctaaccctcttcaaacaggtggactacgaaatcaccaagagctacgaaattgatgtccaagctcaggacctcgggccaaattcgatccccgcacactgtaagattatcataaaagtagttgacgtcaatgataacaagccggagataaatatcaaccttatgagtcccggtaaagaagaaataagttatatcttcgaaggggaccctattgatacatttgtagctttggtgcgagtgcaagataaagattcagggctaaatggcgagattgtgtgtaagctgcatgggcacggacatttcaaactgcagaagacatatgagaataactatctgatacttaccaatgctaccttggacagagaaaagaggtccgaatattcactcacagtaattgccgaagaccggggaacgccttctctgtccactgtgaaacactttaccgtacagattaacgatatcaacgataacccacctcatttccagaggtcccgttacgagtttgtaatatctgagaacaactcccccggtgcatacattacgacagtcactgcaacagacccagatttaggggaaaacggacaggtgacttataccattcttgaatcctttatcctgggatctagcatcaccacctacgtcacgatcgaccctagcaacggcgctatctatgccctgcgtattttcgaccacgaggaggtctctcagattacatttgtggtggaggccagagatggtggtagtccaaagcagcttgtgagtaacaccaccgttgtgctcactattattgacgaaaatgataacgtccccgttgtgatcgggcctgcgctgcggaataacaccgccgagatcactattccaaaaggcgcagagtcaggctttcatgtgactaggattcgagccattgatcgggattctggagtgaacgcggagttgtcttgcgcaattgtagctggcaatgaggagaatatcttcatcattgacccccgtagctgcgacattcatactaacgtgagtatggactccgttccctacacggaatgggaactctcagtaataatacaggacaaggggaatccccaactccacacaaaggtgcttctcaagtgtatgatattcgagtacgctgaatccgtgacctctacagctatgacctcggtgtcacaagcatcgttagatgtttcgatgatcattattatcagtcttggcgcaatttgtgccgtacttctcgtcatcatggtgctattcgctaccagatgtaatcgcgagaagaaggacaccagaagctacaattgcagggtcgcggaatctacatatcagcatcatccaaaaaggccctcccgacagatccacaagggggatataacactggtccccactatcaatggtacactcccgatacgctcccaccaccgatcatctccctcatcatccccaacattggagcgtggccagatgggctctagacagagccacaactcccatcagagtcttaacagccttgtgactatctccagtaatcatgtgcctgagaatttctcccttgagctcacccacgcaacaccagcggtcgaacaggtttcccaattgttatctatgctccatcaaggccagtatcagccgcgtccttcttttcggggaaacaaatatagccggtcctacaggtacgctttgcaggacatggataaattttctttaaaggattccggcagaggggacagtgaagccggtgacagcgattacgacctcggaagagattctcccattgaccggctattaggagagggcttctccgacctgtttctgactgatggcaggatccccgcagccatgcgcctgtgcaccgaagaatgcagggtactcggacacagcgatcagtgttggatgcccccattgccctctccctcgtctgattataggagcaacatgttcattcccggtgaggagttcccaacccaaccacagcagcagcacccgcatcagagcctcgaagacgacgctcagccggcagattcgggcgagaagaaaaaatcattttccacctttggaaaggacagtccaaatgacgaggatactggcgatacctcgacatcctcactgctaagcgagatgagctccgtctttcagaggttgttacctccatcactggatacctacagtgagtgcagcgaagtagatcggtccaacagtcttgagaggcgcaagggccctctcccagccaaaacggttgggtatccacaaggcgtagccgcatgggcagcttcgacgcactttcagaatccaaccactaattgcggaccgccactcggtacccacagcagcgtgcagcccagtagtaagtggctgccagccatggaagaaattccagaaaactatgaggaagacgacttcgataacgtgctgaaccatctgaacgatggcaaacacgaattaatggatgcgagcgagctggtagctgaaatcaataaactgttacaggatgtccgacagagctag

SEQ ID NO: 237266 - DNA, 3405 bp, synthetic construct
  misc_feature 1..3405: note = Description of Artificial Sequence: Synthetic coding sequence
  source 1..3405: mol_type = other DNA
atgcatcaaatgaatgcgaaaatgcacttcagattcgtctttgcattgctgatcgtgtcctttaaccacgacgttctaggcaagaacctgaaataccgaatttacgaagagcagcgtgtggggtccgtgatcgcacgcctgagcgaggacgttgcggacgttctgttgaagttacccaatccttccaccgtaagattcagggcaatgcagagaggtaattcgcctctgttggtggtgaacgaagataacggcgagatttccattggggctaccatcgatcgggagcaactctgccagaagaatctcaactgctccatcgaatttgatgtgattacccttcccaccgagcatctgcaattgtttcacatagaagttgaagtattagacattaatgataacagtccacagttttcacggtctttaattcccatcgaaattagcgagtctgccgcagtggggaccagaatcccccttgactcagcttttgatccagatgtgggagagaattcactacatacctactcactgtccgctaacgactttttcaacattgaggtgagaacacggaccgacggagccaagtacgcagaactgatcgttgtcagggagctggaccgggagcttaaaagctcctacgaactccagcttaccgcatccgatatgggcgtgccacagcgcagtggtagctccatcctgaagattagtatcagtgactctaatgataatagtcctgcctttgaacagcagagttacattattcagctgctggagaactcacccgtcggtaccctgctgcttgatctgaacgcaacagaccccgatgagggcgctaacggaaaaatcgtttactctttttcatcccatgtgagcccaaaaattatggagactttcaagattgatagtgagagaggccatcttaccctgttcaagcaggtcgattacgagatcacaaaatcttatgaaatcgacgtgcaagctcaggatcttgggccaaactcgataccagcccactgcaagataattatcaaggtcgtggacgttaacgacaataagcccgagataaatatcaacctcatgtctccgggaaaagaggagatcagctatatattcgagggcgatccaatcgacaccttcgtggcactggttagggtgcaggacaaggactctgggttgaacggcgaaatagtttgtaaactgcacggccacgggcacttcaagctccaaaaaacatacgagaataactatctgattctaacaaacgctacgctcgaccgcgaaaaaaggagtgagtactctctcaccgtgatcgcagaggacaggggcactccctctctctcaacagtcaagcacttcaccgtgcagattaacgacatcaatgataacccccctcactttcaaagatctcggtatgaattcgtcataagtgagaataatagcccaggcgcatacatcaccaccgtgaccgctaccgatcctgatcttggcgaaaatggccaggtcacatacacaattctggagagctttatcctcggctcctcaataaccacctacgttactatcgaccctagcaacggagccatatacgccctcagaatcttcgatcacgaagaggtgagtcaaattaccttcgtcgtggaggccagagacggcggttctcccaagcagctggtgagcaacaccactgtggttttaaccataattgacgagaatgataatgtgcccgtggtcatcggccctgcactcagaaataacacagctgagataactattcctaagggggctgaatcaggcttccatgtcactagaataagggccattgacagagacagtggcgtcaatgcagagctctcttgtgctattgtggccggaaacgaggaaaatattttcataatagatccacggtcctgcgatattcatactaacgtcagtatggactccgtcccttacacagaatgggaactgagtgtgattatccaggataaaggaaacccccaactgcatacaaaggtgctgttaaagtgcatgatctttgagtacgccgagagcgtgaccagcacggccatgacatcagtcagtcaggcgtccctggatgtgagtatgattatcatcatctcacttggcgctatctgcgctgttctcctagtcatcatggtccttttcgccaccaggtgcaatcgggagaagaaagacacgaggagttataattgtcgagtcgccgagagtacgtaccagcaccatcctaagaggccaagtcggcagatccataaaggtgacatcaccctggtgcccacaatcaacggcaccctgcctattagaagtcaccacaggtcttcgccaagctcttcacccaccctggaacggggtcagatgggctcacgccagagccataactcccaccaatctcttaactccttggtcacaatttctagtaaccatgttccggaaaatttcagtttggaattaacccacgccacccctgcggtcgaagtgtctcagttgctgagtatgctacatcaagggcaataccaaccgaggccttcctttcgaggcaataaatacagcagatcatataggtacgcactgcaggacatggacaaattctcacttaaagatagcggaaggggggactcagaagccggagatagcgattatgatcttggccgagacagccccattgatagactcctcggcgagggcttttccgacctgttcctcactgatggccgtatccctgccgcaatgaggttatgcacagaagagtgtcgagttctgggacactcagaccagtgttggatgccgcctttgccctcaccatcctctgattaccgaagcaacatgttcattcccggagaagagtttcccacccagccccaacagcagcacccccaccagagtctcgaggatgacgcccagccggcagattctggggaaaagaagaagagtttttctaccttcggaaaagactcacctaacgacgaagacactggtgacacctccacatccagcctactgtctgagatgtcatctgtcttccagcggctgctccctccaagcctcgatacatacagcgaatgctctgaagtggaccggtctaacagcttggaaaggaggaaaggaccactgccagctaagacagtcgggtaccctcagggagtggccgcatgggctgccagtacccactttcagaatccaacaacgaattgtggccctcctttgggcacccactcttccgtccagccgtctagtaaatggctgcctgccatggaggagattcctgagaactacgaagaagacgatttcgacaatgtgttgaatcacctgaacgacggcaagcatgagttgatggatgcgtcggaattggtggcggagattaataagctgttgcaggacgtgcgccagtcctag

SEQ ID NO: 237267 - DNA, 3306 bp, synthetic construct
  misc_feature 1..3306: note = Description of Artificial Sequence: Synthetic coding sequence
  source 1..3306: mol_type = other DNA
atggaaagccttctgctgccagtccttcttttgcttgccattctttggacacaggctgctgccctcataaatctgaagtactccgtcgaagaagagcaaagagccggtacagtgatcgctaacgttgcaaaagatgccagagaagccggtttcgctttggatcccagacaagcctctgccttccgcgtcgtgagcaatagcgcaccacatctagttgacattaaccctagcagcggcttgctcgttacaaagcagaaaatcgatagggatctcctgtgtaggcagtcacccaaatgcataatcagccttgaggtgatgtcctcttcgatggaaatctgcgtcattaaagtcgagatcaaggacttgaacgacaatgcaccctcgttcccagccgcacaaatagaactggagatatccgaggctgcctctccaggaacacgtatcccgcttgatagcgcgtacgatcctgactcgggctcatttggagtgcaaacctatgagctgactcctaacgagcttttcggcctcgaaataaaaactcggggagacggatctaggtttgctgagctcgtcgtggagaagagtctagacagagagacccaaagtcactattcgtttagaattacagccctggacggcggagaccctcctaggttgggcactgttggcttatccatcaaagtgactgacagtaatgataacaatcccgttttcagcgagagcacctacgctgtgagtgtgcccgaaaactctccgccaaacactcccgtgattcgactgaacgcttctgatcccgacgagggcaccaacggacaggtggtttactctttctatggctatgttaatgacaggacaagggaattgtttcagatcgatccacatagcggtctggtgactgtgacaggggcattggactatgaggaggggcatgtttatgagctggacgtacaggcaaaggacctgggcccaaattctatacccgctcattgtaaggtgacggtgtctgtgttggatacaaatgacaaccctcctgtgatcaacctgttgagtgtcaacagtgagcttgtcgaggtctccgagagcgcgccacctggctacgtaatcgccctggttagagtgtcggatagagactcaggtctgaacggacgggtccagtgcagactcctcggcaacgtcccattccgcttacaggagtacgagtctttttcaacgattctggttgatgggcgactcgacagggagcagcacgaccaatataatctcacaatccaagcaagggatggcggtgtacctatgctccagtctgccaagagctttacagtgcttattactgacgagaacgacaatcaccctcacttctccaagccatattatcaggtgattgtgcaggagaataatacccccggagcctatctgctgagtgtctcagcgagggaccccgatcttggtctgaacggatcagtatcctaccagattgttccttcacaggtgagagacatgcccgtttttacctacgtttcaattaaccctaactccggagacatttatgcgctgagaagctttaatcatgaacagaccaaggccttcgaattcaaggtgctcgccaaggacggaggcctgcccagcctgcaatctaacgctactgtccgggtcataattttggacgttaatgacaacacacctgtaatcactgctccaccactgattaacggaaccgccgaagtgtacatccctcgcaattctggtatcggctacctggtcactgtcgtcaaggctgaagactacgatgagggcgagaatgggagagtgacctacgatatgacagagggagaccgtggcttttttgaaatcgatcaagtgaatggcgaggttcggaccaccaggaccttcggggaaagctccaagtcctcatacgagctaattgtagtggctcatgaccacggcaagactagcttgagtgctagtgctctggtgctcatctatctgtccccggctctggatgcacaggaatcgatgggatctgtaaatcttagcttgattttcatcattgcgctcggctcgatcgcgggaatccttttcgtcaccatgatcttcgtggcgatcaaatgcaagcgggacaataaggagattagaacatacaactgtcgaatcgccgaatactcatacggccaccagaagaaaagctccaagaagaagaaaatttctaagaatgacatccggctcgtgcccagggatgtcgaggagacagacaaaatgaatgtcgtgtcctgttccagcctcacgtcctcgctgaattacttcgactaccaccagcagactctccctttgggctgcaggcgtagcgagtcaacattcttgaacgtggagaatcagaatacgcggaacacaagtgcaaaccatatctatcatcattcctttaactctcagggaccacagcagccagatctcataataaacggtgtgcctctgccagagacagagaactacagcttcgattccaactatgttaatagccgcgctcaccttatcaaatccagctccaccttcaaggaccttgaaggcaacagtctaaaagactccgggcacgaggagtcagaccaaactgatagtgagcatgacgtccagcggtcactctactgtgacaccgctgtaaacgatgttctgaacacatccgttacctcaatggggagccagatgccggaccacgatcagaatgagggcttccactgccgcgaggagtgcagaattctgggccactccgatcggtgttggatgccacggaaccccatgcccatccgctccaagagcccagagcacgttcgcaacataatcgcattgagtatagaggcaactgctgccgatgttgaggcatacgacgactgcgggcctaccaagagaacgtttgccacgttcggaaaagatgtgtcagatcatccagccgaggagagacctacgctgaaaggaaaaagaacggtggatgttaccatttgtagcccaaaggtgaattcggtgatccgcgaggccggaaacggctgtgaagcgatatctcctgtaacatctccgttgcacctcaagtcttcactgcctacgaagccttctgtctcctatactatagccttggccccaccagccagggatctagagcagtatgtcaataatgttaacaatggcccaactcgtccgtccgaagcggagcctcggggagcggacagcgagaaagttatgcatgaagtttctcccatattgaaagaggggaggaataaggaatcacccggagtgaagcggctcaaggacatcgtgctctag

SEQ ID NO: 237268 - DNA, 3447 bp, synthetic construct
  misc_feature 1..3447: note = Description of Artificial Sequence: Synthetic coding sequence
  source 1..3447: mol_type = other DNA
atggagtccctgctgttgcctgtgttgttgttgttggccatcctatggacacaggctgctgccttaattaacctgaaatactcagttgaggaggaacaaagggcaggcacagtgattgccaacgtggcaaaagacgccagggaagccggattcgcattggatcctcggcaggcaagcgcctttagggtagtgagtaactcagctccccacctggtggacattaatccaagttcgggactcctggttaccaaacagaagatcgatcgtgaccttctgtgccgccagtctcccaagtgcatcattagcctggaggtgatgagcagctcaatggagatttgcgtgatcaaagtggagatcaaagatctcaacgacaatgccccttccttccctgctgcccagatcgaacttgagatttctgaggctgcctcccctgggactcgaatcccactggattctgcttatgacccagactcgggatcattcggcgtccagacatacgaattaactccaaatgaattattcgggctcgaaattaagaccaggggggacgggtcgcggttcgctgagttagtcgttgagaaatcgttagaccgagaaacccagtctcactactcgttcagaattacagccctggacgggggtgatccacctagacttggcaccgtgggcttaagcatcaaagtgacagactccaacgacaataaccccgtgttttcagaatccacttacgccgtcagtgtgccagagaatagccccccaaacacgcccgtcatcagattgaatgcatctgaccccgacgagggaaccaacgggcaggtggtgtattcgttctacggatacgtgaatgaccgcactagggaattattccagatagacccccacagtgggctcgttactgtgactggtgcgcttgactacgaggagggccatgtctacgagcttgacgtccaggcaaaggatctgggcccaaactcgatccccgcacactgtaaggtgaccgtgagcgtcctggatacaaacgacaatccccctgtgattaaccttttgagcgttaattctgagttggttgaggtgtcagaaagtgcaccaccgggatacgtgattgcactggtgcgagtgagcgatagggattcgggcttgaatggccgagtgcagtgccgactattgggaaacgtcccctttcgtctgcaggaatacgaatcgttctccacaatactagttgatggcagactcgacagggaacagcacgaccagtataaccttactatccaggcacgcgacggaggcgtgccaatgctgcagtcggcgaagagttttactgttctcatcactgatgagaatgacaaccacccacacttctcaaaaccatactatcaggttattgtccaggagaacaatacgccgggagcttatctgctgagcgtatcagcgagggacccagacctgggcttgaatggatccgtgagttatcagatcgtgccctcccaagtgagggacatgcccgtcttcacatacgtatctattaatcccaattcgggggatatatacgcattgcgaagttttaatcacgaacaaactaaggcctttgagtttaaggtgctggccaaagatggcggactgccttctttgcaatctaacgcgaccgtaagagtcattattttagacgtaaatgacaatacccccgttattactgcacccccacttattaacgggaccgctgaagtgtacatccctcgaaacagcggtataggatatttggttactgtagtcaaagcagaggactacgacgagggggaaaacggcagggtgacttatgacatgaccgagggcgacaggggtttttttgagattgaccaggtgaacggtgaagtgagaaccacccgtaccttcggcgagtccagtaaaagcagctatgagctgatcgtggtagcccatgatcatggtaagacttcactttccgcaagcgccctcgtgttgatctacctgagtcctgctctggacgcacaggagtccatgggttccgtgaacctcagcttaatctttatcattgccttgggatctatcgctgggattctgtttgtgaccatgatttttgtagccatcaaatgcaagcgtgataataaggaaatccggacctacaactgttctaactgtctaacaattacatgcttattgggttgttttatcaaaggccagaattctaaatgtctccactgtatctctgtgtcccctatatccgaagaacaggataagaaaaccgaagaaaaagtgtctttgcggggaaagcgaattgctgagtatagctacggacaccagaagaagtcttctaagaagaagaagatatctaagaatgacattcggctggtgcctcgagatgtcgaggagactgataaaatgaacgtggtttcctgtagctctctgacctcctctctaaactattttgactaccaccagcagacattgcctctgggatgtcggaggtccgaatctacgttcttgaatgttgagaaccagaacacacgcaacacctccgccaatcatatctatcaccactctttcaacagccaggggcctcagcagcccgacctgataataaatggtgtgccactgcccgagacagaaaattatagttttgactccaattatgtgaatagtcgcgcacatctgatcaaatcatcctccacctttaaggatttagaaggcaatagcctgaaggattctggccacgaagagagtgatcagacggatagcgagcatgacgtacaacgttcgctttattgtgataccgcagttaatgacgttcttaacacatcggtaacctctatgggatcccagatgcctgatcacgatcagaacgagggcttccactgccgggaagagtgccgcatcttagggcacagcgacagatgttggatgcccagaaaccccatgccgattcgcagtaagagcccagaacacgtgaggaacatcatcgccctgtcaatagaagctaccgctgctgatgtcgaagcatatgatgactgtggccctacgaaaaggactttcgcgacatttggtaaagatgtgtctgatcaccccgctgaagagcgtccaaccctgaaagggaagagaaccgtggacgtgacgatttgtagcccaaaagtgaattcagtgatcagggaggcaggcaacggttgtgaggccatctcccccgtaacctctccgctgcacctgaagtccagcttgccaaccaagcctagcgtgtcatacacgatcgcccttgctccccctgctcgagatttagaacagtatgtgaataacgtgaacaacggcccaacacgcccttcggaagctgagcctcgcggtgcggacagtgagaaggtcatgcatgaagtgagtcccatcctgaaggagggtcgaaacaaagagagcccgggtgtgaaacggctgaaggacatagtcctgtag

SEQ ID NO: 237269 - DNA, 3303 bp, synthetic construct
  misc_feature 1..3303: note = Description of Artificial Sequence: Synthetic coding sequence
  source 1..3303: mol_type = other DNA
atggaatcccttctgctccctgtgcttttactcctggcaattctctggacccaggctgccgctcttatcaatctgaaatatagtgttgaggaggagcagcgtgcaggcacagtgatcgcgaatgtcgccaaggacgcccgtgaggctggcttcgctttggacccaaggcaggccagtgccttccgcgtggtttccaattcagcaccccaccttgtggacattaatccttcctcggggctgttagtaactaagcagaagatcgatagggacctgttatgcaggcagtcaccaaaatgtattatctcccttgaagtcatgtcttcatccatggagatctgcgtcattaaggtggagattaaagatcttaatgataatgcaccgtcatttcctgctgcgcagattgagctggaaatatccgaagctgccagccccggaacacggatccctctcgatagcgcgtatgatcctgattccggttccttcggcgttcagacctacgagctcacccccaacgaattgtttggccttgagatcaaaactcgtggagatggtagtagattcgccgagctggttgtggaaaaaagtctggacagggaaacgcaaagccattattcattccgcattaccgccctggacgggggagatccacccaggttaggaaccgtaggactgtccatcaaggtgacggacagcaatgataacaatccagtctttagcgaaagtacctacgcagtctccgtccccgagaatagccctcccaatacacctgtgattaggctgaacgcctcggaccccgatgagggcactaacgggcaggtggtctattcgttctatggatacgtaaatgatcgaaccagagagctgtttcaaatcgacccccacagcggcctcgtgaccgttacaggcgcactggattacgaggaaggacacgtttacgaactcgatgtgcaggctaaggacttaggccctaatagcatccccgctcattgtaaggtgaccgtgtctgtgttagatacgaacgacaacccacccgtgatcaatctgctgtctgtcaattccgagctggttgaagtctcggaatcggccccaccgggttacgtcatcgcactggtgcgcgtcagcgatcgcgactccgggctaaacggcagggtacagtgtcgacttctgggaaatgtgccttttaggttgcaggaatatgagagcttcagtacaattctcgtggatggtcgactggatcgggaacaacacgaccagtacaacctaaccatccaggctcgtgacggcggagttccgatgttgcagtcagcaaagtcattcactgtgctgattacagatgagaacgacaaccatccccactttagcaaaccgtactatcaggtaattgtccaagagaataatacacccggagcctatttattgtcagtctccgcgcgagacccagatcttggtctgaacgggtcagtgagctaccagattgtgcctagccaagtcagagacatgcccgtcttcacctacgtttccattaatccgaactcaggagacatctacgctttacgctcttttaaccacgagcagacgaaagcctttgagttcaaggtcctggctaaagatggaggtctgcctagtctgcaaagcaacgccacagtgcgcgtcatcattctggacgttaacgataatacaccagtcataactgcccctccattgattaatggaaccgccgaagtgtatatccctcgcaattccggaatcggatatctagttacagtcgttaaggctgaagactacgatgagggggaaaatggtcgagtcacttacgacatgactgagggcgataggggattctttgagattgaccaggtcaatggggaggtgcggacaacccggacattcggggaatctagcaaaagcagctatgagctcatcgtagttgcgcacgaccacgggaagacaagcctaagcgctagcgcccttgtccttatttatctttctcccgctctggacgcccaggagtccatggggtccgtgaacctgtcccttatcttcatcatcgccctcggcagcatcgccggaatcttatttgtgaccatgatattcgtggctataaaatgcaagagagataacaaagagatcagaacatacaactgtcgaattgccgagtactcttacggacatcagaagaaatcaagcaaaaagaagaagattagtaagaacgatatccggctggttcccagagatgttgaagaaaccgataagatgaatgtggtcagctgcagctcactgacgagtagcctgaattacttcgattatcaccaacagactctgccactgggttgccggaggagcgagtccacattcttgaacgttgagaatcagaataccagaaacacttccgcaaatcatatttaccatcacagttttaacagtcagggcccacagcagccagatttaatcattaacggggtgcccctgccggaaacagagaactacagcttcgactctaactacgtgaactcccgcgctcatctgattaaatcaagcacctttaaagatcttgagggaaacagcctgaaggactccggacatgaggaaagcgaccaaactgatagcgaacacgatgtccaaagaagcctgtattgcgacacagccgttaacgacgtgctcaatacgagcgttacctccatgggtagccagatgcctgatcacgaccaaaatgaaggctttcactgtcgggaggagtgccgaatcctgggacatagtgatcggtgttggatgccgcgaaatcctatgcccatacggtctaaaagccctgagcacgtacgcaacataatcgctctcagcattgaggcaaccgcggcagacgtggaagcctatgatgactgtggtcccaccaagaggacctttgcaacgtttggaaaggatgtttcagaccaccccgctgaagaaagaccgaccttaaaggggaaaagaactgtggatgtgaccatctgcagtccaaaggtaaacagcgtcataagggaggcaggaaacggatgtgaagcaatctctcccgtgacctcgcctttgcacctcaaaagttcactccccaccaagccttccgtcagctatactatcgcgctcgcgccaccagccagggatctggaacagtatgttaataatgtgaataacggtccaaccagacccagtgaggctgagccacgcggagcagattccgagaaagttatgcatgaggtgtcaccaattctgaaagaggggaggaacaaggagtccccaggcgtgaagcgcctcaaggatatagtgctgtag

SEQ ID NO: 237270 - DNA, 2094 bp, synthetic construct
  misc_feature 1..2094: note = Description of Artificial Sequence: Synthetic coding sequence
  source 1..2094: mol_type = other DNA
atgttcaccctcgacgtggaggagaacgaaaacggggaaaggactccttacctgatagtgatgggggctctcgatcgtgaaacacaagatcaatacgtgtctataatcatagccgaggatgggggtagccctcctctgcttggtagcgcaaccttgactatcggcatttccgacatcaatgataactgccccctgttcacagatagtcagattaatgttacagtctatggtaacgccaccgtgggaactcccattgccgcagtgcaggctgtcgacaaggatctgggcaccaacgcccagattacatactcatactcccagaaggttcctcaggcaagtaaggatctgttccacctggatgaaaataccggcgtgatcaaactgttcagcaaaattggcggatccgtgcttgagagccataaactgaccatcttggccaatggacctggctgcattcccgctgtcatcaccgccctcgtcagtatcatcaaggtgattttcagacctcccgagatcgttcctcgctacattgctaatgaaatagacggtgtcgtttacttgaaggagctggagcccgttaatacccctattgcattctttacaattcgagaccccgaaggcaaatacaaagtgaactgttacctcgatggagaaggaccgttccgactgtctccctacaagccgtacaataatgagtacctgctggagacgactaagccaatggactacgaattgcaacaattctacgaggtggctgtagtggcctggaactcagagggttttcacgttaagagggtgataaaagttcaactattggacgacaacgataatgctcccatctttctgcagcctctgatagagctcaccattgaagagaacaattctccaaacgcctttctgacaaaactgtacgctactgacgcagattcagaggaaagaggacaggtgagttatttcttgggccctgacgctcctagctacttctccctagattcagtgacaggtattcttacagtgagcactcagttggaccgtgaggagaaggaaaagtacagatacaccgtccgcgcagttgactgcggcaagcctccccgagaaagtgtggcaaccgtcgccttgaccgtacttgacaagaatgataactccccccgtttcattaataaagacttttcattctttgtgcccgaaaacttccctggctatggagagattggagtgatcagcgtgacagatgctgacgcaggacgaaatgggtgggtggccctttctgtcgtgaatcagtctgacatcttcgttattgacaccggaaagggcatgcttcgggcaaaggtgagtcttgacagagagcaacagagctcgtacaccctgtgggtagaggctgtggatggcggtgaaccagccctgtcttctacagctaagatcacgatcctgctgctcgatataaacgacaacccccctctcgtcttatttccacagagcaacatgtcctaccttctcgtattaccctcaacactgcctggatcacctgtgactgaggtgtatgccgtggataaggacaccggtatgaatgcagtaattgcctactctattatagggaggcggggacctcggccagaatccttcagaatagaccccaagactggaaatattacattagaagaagcattgcttcagaccgactacggccttcatagactgctagtaaaagtttccgatcacggctacccggaaccactccatagcaccgtgatggtgaatctcttcgtgaacgacacagtctccaacgagtcatacatcgagagtctcctgagaaaggagcccgaaattaacatcgaggagaaagagccgcaaatctctatcgagcccactcacaggaaggttgagagcgtatcgtgcatgcctaccctggtcgcactttccgtgatctctctgggcagtatcaccctcgtgactggtatgggcatttacatttgcctgcggaaaggtgaaaaacacccgcgagaggacgagaaccttgaagtgcaaattccattaaagggtaaaatcgatctgcacatgcgtgagagaaagccaatggatatcagcaacatctag

SEQ ID NO: 237271 - DNA, 2856 bp, synthetic construct
  misc_feature 1..2856: note = Description of Artificial Sequence: Synthetic coding sequence
  source 1..2856: mol_type = other DNA
atgcgtggcaggggaaatgcgaggtctagccaggcattgggcgtctcatggtgccctgccacctggcacccacgcctcgacatgggaaggcttcaccggccaaggtcttccacttcgtacagaaacctgccacacttattcctgtttttcctgtttgtgggaccgttttcctgtttggggtcctactctcgagccactgagctactctacagcttgaatgaaggattaccagccggtgttctcatcggtagtctggctgaagatttgagactcctcccacgatctgccggtcgccctgaccctcagtcgcagctccctgagcgaaccggtgccgaatggaacccacccctttccttctccctggcaagcagaggtttgtctggtcagtacgtgacactcgacaatcgatcgggagagttgcatactagtgcacaggagattgatagggaggcactctgtgtggaaggaggaggcggaactgcctggtctgggtcggtttctattagcagttcgccgtctgacagctgtctactgcttctcgacgtgctcgtgctcccgcaggaatattttcggttcgttaaggtgaagattgccatcagagacattaacgacaatgcccctcagtttcccgtgtctcagattagcgtgtgggttcctgagaatgccccagtgaatacaaggctcgcaatagaacatcctgccgttgatcctgacgtgggcatcaacggagtgcagacctatcgcctacttgactaccatgggatgttcacactggatgtggaagagaatgaaaatggcgagcgaacgccatatctgattgttatgggtgcgctggatagagagactcaggatcagtatgtgtcaataatcatcgctgaggacggcggaagcccgcctctcttaggatccgccactctgactattggcatatcggatatcaacgataactgcccattgttcactgactcccagattaacgtcaccgtctacggaaatgcaacggtcggaaccccgatcgccgcagtccaagccgtcgataaagaccttgggacaaacgcacagattacctattcctacagccagaaggttccccaggcctcaaaagacttgttccaccttgacgagaacacaggagtcattaaactgttttctaagattgggggatccgttctggagtcccataagctcaccatattggccaatggcccaggttgtattcccgctgtgatcactgcgctggtctcaatcattaaagtgatttttcgcccacccgagatcgtgccgagatatatcgcgaacgaaatagacggtgtggtgtacctaaaggaactggaacccgttaacacgcccatcgcgtttttcacaatccgcgaccctgagggaaagtacaaggtgaattgctatctcgatggcgagggcccttttcgcctgtccccttacaagccttacaataatgagtatctgctggaaactaccaaaccaatggactacgagctacagcaattctatgaggtcgctgttgtggcatggaattccgagggcttccacgtgaagcgcgtgataaaagtccaactgctcgatgataacgataacgcccctatttttctgcaaccactgattgagctcacgattgaggaaaacaactcacccaatgcattcctgacgaaactgtacgctacagacgcagactcagaggagagagggcaggtatcatacttcctcggaccagacgctcctagctatttttctctcgatagcgtgacaggaatcctcacagtgagcactcagctcgatcgagaggagaaagagaaatacaggtataccgtgagggctgtggactgcggaaagccgccaagagaatctgtggctacagttgctctgaccgtgctggataagaacgacaattcacccagatttataaataaggatttcagtttcttcgtgcctgagaactttcctggctacggcgaaattggtgtgattagcgtgacggatgccgatgcaggacggaacggatgggtggcgttgagtgtggtgaatcagtccgatatctttgtgattgatacgggcaaaggcatgttgcgggctaaggtctctctcgaccgggaacagcagagcagctatacactgtgggtagaggctgtcgacggaggggaaccagctctgtcttccaccgctaagattacaatattgctgctcgatataaacgacaatcctccactagttctctttccccagagcaacatgagttacctgctggttctcccctctactctgcctgggtctccagtgaccgaagtgtacgccgtggacaaggacacaggaatgaacgccgtaatcgcatatagcattatcgggagacgtggcccaaggcctgaaagttttcgtattgatcccaaaaccggaaatattactctcgaagaagcattattgcagacagattacggcctgcacaggcttctcgtgaaggtgagcgatcacggatatcctgagcccttacattctactgtgatggtaaatctgtttgtcaacgatacagttagcaacgagtcatatatcgagtccctgctgcgcaaagaaccagagataaacatcgaagaaaaggagcctcaaatatctatcgagccgacgcataggaaagttgagtccgtctcatgtatgccaacactggtggcccttagcgtgatctcgttaggttcaatcacattggtcacgggtatgggtatctatatctgtctcagaaagggggagaagcatccaagggaggacgaaaaccttgaagtacagatcccgctcaagggcaaaatagatctgcacatgcgtgaacggaaacctatggatatttccaatatttag

SEQ ID NO: 237272 - DNA, 2856 bp, synthetic construct
  misc_feature 1..2856: note = Description of Artificial Sequence: Synthetic coding sequence
  source 1..2856: mol_type = other DNA
atgagaggcagaggcaacgctaggtccagccaggccctcggagtcagctggtgcccagcgacctggcaccccagacttgatatgggaaggcttcaccggcctagatcctctacatcctatagaaatctaccacatttatttctgttctttttgttcgtgggtccattcagctgcttgggctcatattcgcgggcaactgaactgctatactctctaaatgaagggctccctgccggagtactcattggctccttggcagaggatcttagacttctcccacggtccgccggaaggccagatcctcagagccaactgcccgaacggacaggagccgagtggaatcctcccctcagtttctctctggcatctcggggactcagtggacagtacgtgactctggacaatcggtccggtgagctgcacactagtgcccaggaaatcgatagggaggccctgtgtgtcgaaggcggtggtggaacagcctggtctggctctgtgtccattagtagttcccccagcgatagttgcctcttactcctagacgtgctcgttcttccccaagaatacttcaggtttgttaaagtaaagattgctatcagagacatcaacgataacgccccacaattccctgtcagccagatctctgtctgggtgccagagaatgcacccgtgaacacgcgactcgccatcgaacatcctgcagtagacccagatgtaggtatcaacggtgtgcaaacttatcgactactggactatcacggaatgttcaccttagacgtcgaggaaaatgagaacggtgagcggacaccctatttgatcgtcatgggcgcactggacagggagacacaagaccagtacgtgtctattatcatcgcagaagatgggggaagccctcctctgctggggagcgctacgctgaccatcggcatcagtgatattaacgacaattgcccgcttttcaccgactcccagatcaacgtgaccgtgtacggtaacgctacagtaggaacccctattgccgctgtgcaggccgtcgataaggatttgggaacgaacgcgcaaattacttatagttactcgcagaaagtgccccaggcctccaaagacctcttccacctggacgaaaatacaggcgtcatcaagctcttctccaaaatcggcggatccgtcctggagtctcacaaactcaccatcctcgcaaacgggccaggttgtatccctgccgtcatcactgccctggttagtattattaaggtgattttcaggcccccagagatcgtgcccaggtacattgcaaacgaaattgatggggtcgtgtaccttaaagagctagagcccgtaaacacccccatcgccttcttcaccataagggatcccgagggaaaatacaaggtgaattgctacttggatggggagggtccctttcgtctttcgccctataagccatataataacgaatacctgctggaaacaactaaaccaatggactacgaactgcagcaattttacgaggtagctgtggtggcttggaactcagagggttttcacgtcaaaagagtgattaaagttcagctgctggatgataatgataacgcaccaatatttctccagccattaatagagctgaccatagaagagaacaatagtcccaatgcatttctgactaagctctacgctacagacgcagactctgaagagcgtggccaagtgtcgtatttcctggggcctgacgcacctagctatttctctctagattctgtgaccggtattctcaccgtaagcactcagctggatagggaagagaaagagaaataccgttataccgtgagagcagtagattgcgggaaacctccccgtgagtctgtcgccaccgtagccttgacggtgttggacaagaatgacaactcgcctaggtttatcaataaggattttagcttctttgtcccagagaacttccctggttacggcgaaattggggtaatttccgtgacagacgcagatgccggtcgaaacggttgggtagccctgtccgtggtgaatcagagtgacatcttcgtgatcgatacgggaaagggcatgttaagggccaaggtgtctctagacagagaacagcagagttcttacaccttgtgggttgaagcagtggatggcggtgagccagccctgagctcgacagccaaaattaccatcctgcttttggacattaatgacaatccgccattagtactgtttccccaatctaacatgtcatatttactggtattaccatctacactcccaggcagccccgtgacagaagtctacgcagtagacaaggacacaggaatgaacgctgtcattgcatatagcattatcggtagaagggggcctcgacctgagagtttcagaatagatcccaaaaccggaaacatcactctggaagaggcactcctgcagaccgattacggactacatcggttattggtgaaagtgtctgatcacggctacccagaacctctgcatagtactgtgatggttaatctgttcgtgaacgataccgtgtctaacgagagttacattgagtcattgctgcgtaaggagcccgagatcaacattgaggagaaagagcctcagattagcatcgagccaacacaccggaaagtagaatccgtatcctgcatgccaaccctggttgctctgtccgtcatctcactggggtctattaccctggtgaccggaatggggatttatatctgtttgagaaaaggtgagaaacatcctagagaagatgaaaacttggaggtgcagatcccactgaagggcaaaattgacctgcatatgagagagcggaaacccatggacatttccaacatatag

SEQ ID NO: 237273 - DNA, 3603 bp, synthetic construct
  misc_feature 1..3603: note = Description of Artificial Sequence: Synthetic coding sequence
  source 1..3603: mol_type = other DNA
atgcttcggatgagaacagcagggtgggctagggggtggtgcctcgggtgttgccttcttttaccactgagtttatctctcgctgccgctaaacaattgctccgctatcgcctcgctgaggaaggtccggctgatgtgcgcatcggtaatgtggccagcgatctcgggatagtgaccgggtccggtgaggtcacattcagtttggagagtgggagcgagtacctcaaaatcgacaacttgaccggagaactttcaacatcagagcggagaattgaccgggaaaaactgcctcagtgccagatgatcttcgacgaaaatgaatgcttcctggattttgaagtttcagtcatcggccctagtcagtcatgggtggacctgtttgagggccaggtgatcgtcctggatattaatgataacacacccaccttcccctcgccggttctaaccctgacagtggaggagaatagacctgtggggacattatatctgctgccgaccgcaactgatcgggacttcggtcgtaatggcattgagcgttacgaactcttgcaagagccaggcggaggtgggtctggtggagaaagcagacgggctggtgccgctgactcggcgccataccctggcggaggtggaaacggggcaagcggaggaggctctggaggaagcaaaagacgacttgacgcatcagaggggggtggaggcacaaatccagggggtagaagttcagtctttgaactgcaggtggcagatactcccgatggcgagaaacaaccgcagctgattgtcaagggcgtctacgaagctgatctggctgaaaatagcgccccaggcacacccatcctgcagcttcgtgccgctgatctagatgtgggcgtcaacggacagatagaatacgtttttggagcggcaactgaatccgtgaggcgactgcttcgcctcgatgagacctctgggtggctgtctgtgctacacagaatagaccgagaagaggtgaatcaattgaggtttaccgttatggcgagggacaggggacaacccccaaaaacggataaggctacggtggtgctgaatatcaaagatgagaacgacaatgtgccatctatcgagattaggaaaatcggaagaatccccttaaaagatggcgtggccaacgtagcagaggacgtgctcgtggacacacccatcgcccttgtccaagtaagcgatcgggaccagggtgagaatggggtcgttacctgcacagtagttggagacgtgccttttcaattaaagccggctagcgacacggaaggcgatcagaacaagaagaagtacttcttgcatacaagcacaccgttggactacgaagctacaagagagtttaatgtcgtgatagtggctgtcgattcgggaagcccttcattatcctccaacaacagtttgattgtgaaggttggcgacactaacgataacccacccatgttcggacaatctgtcgttgaagtttactttccggagaacaacatccccggtgagcgggttgctactgtgctggctactgacgccgactcgggaaagaacgcggaaattgcgtactccctggactcgagcgtgatgggcatctttgccatcgacccagattccggcgacatcctggttaacactgtgctggatcgggagcagaccgaccgatacgaatttaaggttaacgcaaaggataaggggataccagtactccagggaagcactactgttattgtgcaggtcgccgacaaaaacgacaatgacccaaaatttatgcaggatgtctttacattctatgtcaaggagaacctgcagcctaacagccctgtcggcatggtcaccgtgatggatgccgataaaggcaggaatgcggagatgagtctgtacatcgaggaaaataataatatcttcagcattgaaaatgacaccgggacgatttactcaacaatgtcatttgatcgggagcatcaaacaacctatacatttcgcgtcaaagccgttgacggaggagacccgcctcggtcagccacggccaccgtatctctctttgtgatggacgaaaacgataacgccccaacggtcactctgccgaagaacatcagctataccctgctgccaccctcatctaatgtcagaaccgtggtggcgaccgtactggccactgatagtgacgacggcatcaacgcggacctaaactatagtatcgtaggaggcaacccattcaagctgttcgagatcgaccccacatcaggggtagtgagcctcgtgggaaaactgacccagaagcattatggtctgcatagactggtggtgcaggtgaatgactctggccagccaagtcagtccacaacaaccctggtgcatgtgttcgtgaatgaatctgtgtcaaacgccacagcaatcgactcacaaatagctcggtcattgcacataccactaactcaggatattgctggggaccccagttatgagatttcaaaacaacgcctctcgatagtgatcggcgtagtagcgggtatcatgacagtgatcctcattatattgatcgtggtgatggcaagatactgcagatccaagaacaaaaacgggtatgaggctggtaagaaggaccacgaggacttcttcactccccagcagcacgacaagtccaaaaagccaaaaaaggacaaaaagaataaaaagtccaaacagccactatactcatccattgtaacagtggaggctagcaaacctaatggccagcggtacgatagtgttaatgaaaaactgagcgacagcccaagcatgggtaggtaccgctccgtaaacggcggtcctggttcaccagacctagctagacattacaagtcctccagcccactaccaaccgtacagctccacccgcaaagcccaactgctggaaagaaacatcaggccgtccaggacctgccacccgcaaatacgttcgttggcgctggggataacatttcaataggatctgaccattgcagtgaatattcttgtcagacaaataataagtacagtaaacagccatttcgtagggtgaccttctcggttgtttcacagcctcaggacccacatcaagggtccttgcagtcctgctacgattctgggctcgaggagtctgaaaccccctcttctaaatcctccagtggcccacgactgggggctttgccactcccagaggacaattacgaacgaaccacccccgatggaagcgtcgactcacgcccactcccagacgtcgcccttaccgggaagtgtacacgggagtgtgatgaatatggacatagcgactcctgctggatgcctgtgcgaacgtcacctgagcgaaagaagtcacagcctaaactgagtacattcatgccagtcgacgaacgaggctctcaggaaaagctggctaatggcgaggccgcaattatgggagatagaaacaggaatctccttaacaaaaagctgacaagttcctacgaaacttttagcgcagcatcgttcagcaaaaatgaggaggcgaacccggaggatatcccactgacaaagaccggggagtacaaaccatctcccgtcaataccttaacaaggagggaggtgtacctgtag

SEQ ID NO: 237274 - DNA, 3210 bp, synthetic construct
  misc_feature 1..3210: note = Description of Artificial Sequence: Synthetic coding sequence
  source 1..3210: mol_type = other DNA
atgcttagaatgaggaccgccggttgggccaggggctggtgcttggggtgttgtcttctgctccctctgagtctgagcctcgcagctgcaaagcaactgctgagataccgccttgctgaagaagggcctgcggatgtgaggataggtaacgtggcctctgatctgggaatcgtgacagggtcaggggaagttacattctccctggagagtgggtcagaatacctgaagatcgacaatctgactggtgagttgtccacatctgagcgtagaattgaccgtgagaagctcccgcagtgccagatgatctttgatgagaatgagtgcttcctagatttcgaggtctcagtcatcggtccaagccagtcctgggtggacctgttcgaaggacaagttattgtgctggatatcaatgacaacacacccacctttccttcacccgtgctgacactgaccgtggaagagaatcgcccagttggcacattgtacctcttaccgacagccaccgaccgggactttggacggaacggtatcgaaaggtacgagcttctgcaggagccaggaggcggaggcagtggaggtgagtcaagacgtgctggggcagcagattctgccccatatcccggaggcggtggaaatggggcatcaggaggagggtctggaggcagcaaacggcgtctggatgccagcgagggaggtggcggtacaaaccccggaggacggagcagcgtctttgaattacaggtggcggacactcctgacggggagaaacaaccgcagctcatcgtcaagggcgctcttgatcgggaacagagggacagttacgaactgacattgcgcgttagggacggcggagatcccccaagatcctcacaggctatcttacgcgtcctaatcactgatgtgaatgataattctcccagattcgaaaagtctgtttacgaggccgacctggcggagaattcggcaccgggaacacccattctgcagctgcgggcagctgacctggatgtgggggtgaacggccagattgaatacgtgtttggtgctgctacagaatctgtccgacgtctcctaagactcgacgagactagcggatggctctcagtgctgcatagaattgaccgggaagaggttaaccaactcagattcacggtgatggccagggaccggggtcagccgcctaaaactgacaaagcgactgtagtgttaaatatcaaggacgaaaatgataatgttcccagtattgagattcgcaagattggtaggattccactcaaagatggcgtcgcaaacgtggcagaagacgttctggtagacaccccaattgcattagttcaggtcagcgatcgcgatcagggggaaaacggcgtagtgacttgcacagttgtcggagacgttccatttcagttgaagcctgcttccgataccgagggcgatcagaacaagaaaaagtattttctgcacacttctactccactcgactatgaggcaactcgtgagtttaacgtcgtcattgtggccgtagactcaggctcccctagcctttcatctaataattctctgatagtgaaagtcggcgataccaatgataacccacctatgttcggtcagtccgttgtcgaggtttatttcccagaaaataacatcccaggtgaacgggtggctaccgtgttggcaaccgatgccgactctggtaagaacgccgagatcgcctacagtctggatagctccgtgatggggatcttcgctattgatccggactcaggggacattctcgtaaacactgtattggacagagaacagaccgaccgctacgagtttaaggtgaatgctaaagacaaggggattcccgtgctgcagggcagtactacagtaatagttcaggtcgcggacaagaacgacaacgatcctaagttcatgcaagacgtgtttaccttttatgtcaaggagaacctgcaacctaatagcccagtgggcatggtgacagtaatggatgcagacaagggacgcaatgctgaaatgagcctttatatagaggagaacaacaatatattcagcattgagaatgacacaggtacgatctactccactatgtctttcgatagggagcaccaaactacatacactttccgggtcaaggcagttgatggaggtgacccgcctcgttccgcgacggccactgtgagcttatttgtgatggatgaaaatgacaatgccccaactgtgactcttccaaagaatatctcctatacattgctgcctcctagctctaatgttcgcacggtggtagctaccgtgttggcgaccgatagtgatgacgggattaatgcagacctcaattactctatagtcgggggaaatccatttaaactcttcgaaatagaccctactagtggcgttgttagccttgtgggcaagctcacacagaagcattatgggcttcaccggttggtcgtgcaggtgaacgactcaggccagcctagccagagtactaccaccttagtccatgtcttcgtgaacgaatcagtgagcaatgcaaccgctatcgactcccagatcgcccgttctctgcatatccccctcacgcaggatatcgccggagatccctcctatgagattagcaagcaacgcttgtccatcgtcatcggcgtagtggctgggataatgacggtgattttaatcatactcattgttgtgatggctcggtactgcaggtcaaagaacaaaaatgggtatgaagcagggaagaaggaccacgaggacttcttcaccccccaacaacacgacaaaagtaaaaaaccaaaaaaagataagaagaataaaaagagcaagcagcccctctactcatcaattgtaactgtggaagcttctaaacccaatgggcagcggtacgactccgttaatgaaaagttgtcagactccccctcaatgggaaggtatagatctgtgaacggcggtcccggaagccccgatctggccagacattacaagagcagctccccattgcccactgtgcagctccatccgcaatccccgactgccggtaagaagcaccaagccgtgcaagacttgccgccagctaacacttttgtgggtgcaggcgacaatattagtattggtagtgaccactgctctgagtactcatgccagaccaataacaagtattccaagcaaatgcgtctccacccttacatcacagtgtttggctag

SEQ ID NO: 237275 - DNA, 3768 bp, synthetic construct
  misc_feature 1..3768: note = Description of Artificial Sequence: Synthetic coding sequence
  source 1..3768: mol_type = other DNA
atgcttaggatgcggacagctggttgggcacgtggctggtgcctaggctgttgccttctgcttcctttatcactttccctggctgccgctaagcagctattgaggtatcgtctcgccgaagagggacccgctgacgttcggatcggcaatgtcgcatcggatctgggaattgtcaccggcagcggagaggttacctttagtctagagtccgggtcggaatacttaaagatcgataatcttacaggggaactatctactagcgaaagacggattgacagagagaaactgccccagtgccagatgatcttcgacgaaaatgagtgcttccttgacttcgaggtaagcgttatagggcctagccaatcctgggtagacttgttcgagggtcaggtgatagtgttggacatcaatgataacacccctacgttcccaagccctgtgcttaccctgactgtggaggagaatcggcctgtggggacactataccttttgccaacagcgaccgaccgtgattttggcaggaatggtatagaaagatatgagctcctgcaggaacccggaggtggcggaagcgggggagagtcgcgcagggctggcgcagccgatagcgccccatatcccggaggaggcggaaacggcgcttccgggggagggagcgggggatcgaagcgcagactggacgcatcagaaggaggcggaggtacgaacccagggggaagatcttctgtgtttgagctgcaggtggctgacacccctgacggcgaaaaacaacctcagcttatagttaagggagctttggatcgagagcaacgtgactcctacgaactcacgttgagagtgcgcgacggcggagaccccccaaggtcctcgcaggcgatcttgcgagtcttaattacggacgtcaacgacaactccccacggttcgagaaaagcgtctacgaggcagacctggctgagaatagtgccccagggacacctatcctgcaactgcgggctgcagatctggatgtcggcgtcaacggtcagattgagtacgtctttggagccgctaccgagagtgttagacggcttcttagactcgatgaaacatcaggctggctctctgtgttgcatcggatcgaccgagaggaggtcaatcagctgcgattcacggttatggcacgggatcgaggccagccgccaaagaccgacaaggccaccgtagttctcaatatcaaggatgagaacgataacgtgccaagcattgaaatccgaaagattggacggattcctttaaaggacggggttgcgaacgttgctgaggatgtgttggtggacacccctatcgcgttagtccaagttagtgaccgagaccagggagagaatggcgttgttacctgcaccgtggtgggagatgtgccttttcagctgaagccagctagcgacactgagggagaccagaataagaaaaaatactttctgcacacgagcaccccgctggactacgaagccacacgtgagtttaacgtcgttatagtagcagtcgacagtggctccccgtccctgtcgtctaacaattccctgatcgtgaaagtcggcgacacaaatgacaacccgcctatgttcggacagagcgtggtcgaggtgtactttcctgagaataatatccctggtgaacgagttgcaaccgtgctggccacagacgccgactcaggaaaaaatgctgaaatcgcttactctctggactcgtctgtcatgggaatttttgctattgatcccgacagtggagatattttggtcaatacagtgctggatagggaacagaccgatcgctacgaatttaaagtcaacgccaaggataaaggaatacctgtccttcaggggtccactacagtaatcgttcaggttgcagacaaaaatgacaacgatccaaaatttatgcaggacgtgtttaccttttatgtaaaagagaacctgcaaccaaatagcccagtggggatggtgaccgtgatggacgcagacaaaggcagaaacgctgagatgagcctttatatcgaggagaataacaatattttttccatcgagaatgataccgggaccatctattcaactatgagcttcgacagggaacaccagacgacttacacctttagagttaaagcagtggatggcggagatcccccacgctccgccaccgccaccgtctcactctttgttatggacgagaacgacaacgccccaaccgtaacgttgcccaaaaacatttcctacactttgctgcctccctcatcaaatgtccgcactgtggtcgcgacggtccttgctacagacagcgacgatggcattaatgctgacctcaattacagtatcgtggggggtaatcctttcaaactgtttgaaatcgatcctactagcggtgtggttagtctggttggcaagctaacccaaaaacactatggtctccatcgtctagtcgtgcaggtcaatgattctgggcagccaagccagagtacgactactctcgtgcatgtttttgtgaatgagtctgtaagcaatgcaactgctatcgatagccagattgccaggtctctacatattccgttgacacaggatattgcaggtgacccttcatacgagataagcaaacagcggctgagcatagttatcggcgtggtagctggaattatgaccgtgatcctgatcatcctaatagtggtcatggcgagatattgcaggagtaagaacaaaaacggttacgaagctggtaagaaggaccacgaggatttctttactccacaacagcacgacaagtccaagaagcccaaaaaggacaaaaaaaataagaaatccaagcagcctttgtacagctccatcgtgaccgtggaggcatccaagccaaatggccagagatacgattcagtgaatgagaagttaagcgactcaccctccatgggccgatataggagcgtaaacggcggtcccggttcccctgacctcgcacgccattataagagctcatctcctctaccgacagtgcaattgcacccacaaagccctaccgccggaaaaaaacatcaggctgtgcaggacctaccccctgcaaatacctttgtgggcgctggcgacaacatctccatcgggagcgatcattgcagcgaatactcatgtcagacgaacaataagtattctaagcagccgtttcgacgggtgactttctcggtggtcagccagccccaggacccccaccagggctccctccagtcctgttacgattccggcctggaggagtctgaaacgccttcctccaaatcgtccagcggcccacggctgggtgccctgcctcttcctgaggataattacgaacgcactaccccggatggatctgttggagaagccgagcatatggagaatgatagccgcccactgcccgatgtagcactaactggaaaatgtacccgggagtgcgacgaatacggtcactcagactcgtgctggatgccagtgcggacatcccccgagcgcaagaagtctcagcccaaactttccacttttatgccggttgatgagagaggtagccaggagaagctggcaaacggcgaggccgctattatgggagataggaatagaaatctcttgaacaaaaaactcaccagtagttatgagacgttcagtgctgcctcctttagcaagaacgaggaggcaaacccggaggacattcctctgaccaagaccggggagtataagccgtcaccagtcaatacgcttacccgccgtgaagtttatctgtag

SEQ ID NO: 237276 - DNA, 2922 bp, synthetic construct
  misc_feature 1..2922: note = Description of Artificial Sequence: Synthetic coding sequence
  source 1..2922: mol_type = other DNA
atgtctccggtccggcgatggggatccccgtgcctgtttccattgcagttgttctccctctgctgggttctctcagtcgctcagagcaagactgtgcggtactctacttttgaggaggatgcacctggaactgttatcggaacactggccgaggatctgcacatgaaagtctcgggggatacctccttcagactcatgaaacagttcaattcatctctgcttcgggttagagagggagatggccagttaactgtgggggatgccggactcgaccgtgagcggctgtgcggtcaagcaccacagtgtgttcttgcttttgacgtagtgtccttttcgcaggagcagtttaggctggtacatgtcgaggtggaagttcgcgatgtgaatgatcacgcaccacgcttccccagggcccaaatcccggtggaggtctctgagggagccgctgtaggtactagaatccccctggaagtacccgtggacgaggatgtcggggctaacggattgcagaccgtccggctagcagaacctcattcccctttcagagtggaactgcagacccgggcagatggggcacagtgtgctgacctggttctgcttcaagagctggacagagaaagtcaggccgcttacagcctggagctggtagcccaagatgggggacgcccacctagatctgctacagcagcccttagtgtccgggtgctggatgccaacgatcatagtcctgcctttcctcagggggcagtagcagaggtggaattagccgaggatgccccagtggggagcttactgctcgacctcgacgccgctgatcccgacgagggacccaatggcgatgttgtatttgcattcggagccagaacaccccctgaagccagacgtctctttcgcctggatcctaggtcaggacgcctgactctggcgggtccagtggactacgagaggcaggatacatacgagctggacgttagggcgcaggaccggggacccggtcctcgcgcagccacctgtaaagtcattgtgagaattcgggacgttaacgacaatgctcctgatatcgcgatcactccgctggctgccccaggggctccagcgacctcacccttcgccgctgcagccgcagctgcggcattaggaggagctgacgctagctctccagcaggagcgggaacacctgaagccggagcaacctctctggtcccggaaggagcagccagggaatccctcgttgccctggtgagtacatctgatcgtgattctggggcaaacggccaggtcaggtgtgctctgtatggacacgagcattttcgactgcagcctgcctacgccggaagttatctggtggtgaccgccgctagcctggatcgggagcgcatcgcagaatacaacctaactctggtagccgaggacaggggggcaccccctctgcggaccgtgcggccatacactgtacgggtgggagacgagaatgataatgcgccactgttcacgcgaccggtatacgaagtaagtgtgcgcgagaacaacccgccaggagcttatcttgccacagtagcggctagagatcgagaccttggaagaaacgggcaggtaacctatagactcctggaggccgaggtcgggagagcaggtggggctgtgagtacgtacgtgtccgtcgacccggctacaggtgctatttacgctctaagatccttcgactacgagacacttaggcaactggacgtacggatacaggccagtgacggcggaagtccccagctctcaagcagcgcactagtccaggtccgggttctcgaccagaacgaccacgcccctgtccttgtccaccccgcacccgctaacggttccctggaggtcgcagtgcccggtagaacggccaaagatactgtggtggcgagggttcaggcccgagacgccgacgaaggagccaacggggagctcgccttcgaactccagcagcaagaaccacgggaggcttttgctataggccgtaggaccggagagatcttgttgacgggcgatctgtctcaagagccgcctggcagagtttttagggcactgctggtgattagcgatggtggcagaccccctctgaccacaactgctacggtgtctttcgttgtcactgcgggaggcggtcgtggaccagctgctccggcatcagctggatctcctgaacggtcacgtccccctggctccagattaggagtttcgggctctgtactgcaatgggatactcctctgattgttattatcgttctggccggttcctgtactctgcttctggcagccatcatagcgatcgcaacaacttgcaaccggcgtaagaaagagccctacggggctagcccaggcttcggtaaggagccggctccccctgtggctgtctggaagggtcattctttcaacacaatctctgggagggaggccgagaagtttagtggaaaggatagcggcaagggggactccgactttaacgatagtgacagcgacattagcggtgatgcactaaagaaagatctgattaatcacatgcagtctgggttgtgggcctgtacagctgagtgtaaaatcctgggccacagtgaccggtgttggagcccctcatgctctggccctaacgcacacccaagcccccacccacccgctcagatgtccaccttttgcaaatccaccagcctgcctcgggatccgctgcgacgggacaattattaccaggctcagctgccaaagactgtgggcctacagagcgtttatgagaaggttcttcaccgggactacgacagaaccgtaactcttctgtctccaccgagacccggacgccttcctgaccttcaggagatcggagtcccactgtaccagagccccccaggcaggtacctgtctccaaagaaaggagcaaatgagaacgtgtag

SEQ ID NO: 237277 - DNA, 3213 bp, synthetic construct
  misc_feature 1..3213: note = Description of Artificial Sequence: Synthetic coding sequence
  source 1..3213: mol_type = other DNA
atgagtccggtgaggcggtggggctcaccctgcctgtttccattacagttatttagtctttgctgggtgcttagcgtcgcacagtccaaaaccgtgcgctacagcacttttgaggaagacgcacccggaacagtgatcggcacgctggcggaagatctgcatatgaaggttagtggagacacctcattcaggctcatgaaacagtttaatagttccctcctccgggtgcgcgagggagatgggcagttgactgtaggagatgctggtcttgatagagaacggctgtgcgggcaggcaccacaatgtgtgcttgcctttgatgttgtgtcattttctcaagaacagtttcgattggtccatgtcgaagtggaagtcagggatgtaaacgatcatgcccctaggtttccgcgtgcacagataccagtggaggtaagtgagggagctgccgttggcacgagaattccactcgaagtccccgtcgatgaggatgtcggcgctaatggtctgcagacagtccggttggcagaaccgcactctccattccgcgtggaactccagacacgggcagacggggcacagtgcgccgatctagtgcttctccaggagctcgatagggagtcccaggcagcctattcactcgaactggtggcccaggacggcggaaggcccccacgctcagctactgccgctctctctgtacgtgtgttggatgcgaacgaccactcacctgctttccctcagggcgctgtggccgaggtagagctagcagaagacgcacctgtgggatccctgctgctggatctagatgccgctgaccctgacgaaggccctaacggcgatgtggtatttgcatttggcgctcggacccctcccgaggccagacgcctgtttcggctggacccgagatcaggcagacttacactggccggacctgtcgactatgaacgccaggacacctacgagctcgacgtgcgggctcaggatcggggtcccggacctcgcgctgcaacttgcaaagtcatcgtgcggatccgtgatgtgaatgataacgccccagacatagctatcactcctttggccgctccaggagcaccggcaaccagccccttcgccgcagctgcagccgcagccgcactgggcggagcggatgcatcctcacccgcaggagccggaacaccagaggccggtgctacgagtttagtgcctgaaggtgctgcccgagagtctctggtggcgctggtttccacatcggaccgcgattctggggctaacggccaggtgcggtgcgccctctacggacacgagcacttccggttgcaacctgcctacgctggcagctatctggtggtcaccgcagctagcctagacagggagaggatcgccgagtacaatctcaccctagtagcggaggaccggggtgccccaccactgagaaccgtgaggccgtatacggtcagggttggcgatgaaaacgataacgctcctttgtttactcgtccggtctatgaggtgtcagtacgcgaaaacaatcccccaggagcttatctggctacagttgcagctcgtgaccgggacctgggaagaaatgggcaggtgacataccgtttgctagaggctgaggtcggcagagctggtggcgctgtctccacctacgtgagtgtggaccccgctaccggtgccatctatgctctgcgctcattcgactatgagactttacgccagttggacgtcagaatccaagccagcgacgggggaagcccacaactcagctcatccgccctggttcaggtcagagtccttgaccagaatgatcacgcacccgtcctcgtgcacccagcacccgctaacggatctttggaggtggccgtgccaggtaggactgctaaagatacagtggtggcaagagtacaagcacgggatgcagacgaaggtgcaaacggtgaactggccttcgagctccagcagcaagagccaagggaggcttttgccattggaagacgtactggcgaaatactgcttacaggggacctgtcccaggaaccacctgggcgagtgttccgtgccctgctggtgatctcagacgggggacggccaccacttacaaccacggcaaccgtatctttcgtcgttactgctgggggaggacgcggacccgctgcacccgctagcgctgggtctcctgaacgctctcgccctcccggttctcgcctgggggtgtccggaagtgtgttgcagtgggacacccccttgatcgtgatcattgtcctcgctggctcttgcacgctgctgctggcagccattatcgctatcgctactacttgcaatagacgcaaaaaagaggtaaggaagggtggagctctgcgggaagagaggcctggggctgcgggtggtggagcatccgccccagggtctccggaagaggccgctcggggagcaggacctaggccgaatatgtttgacgttctgacattccccggtactgggaaggctccttttggatcccctgccgcagacgcgcctccgcctgctgttgccgctgccgaagtgccaggcagcgaagggggttctgccaccggggagtctgcctgtcacttcgaaggtcagcagaggttacgaggcgctcatgccgaaccatatggagcaagccccggattcgggaaggaacctgcaccaccagtagctgtgtggaaagggcatagtttcaacaccatcagcggtcgggaggccgagaaattctctgggaaggattcgggtaagggcgactcagattttaacgattctgatagcgacatttctggagacgctctgaagaaggacctgataaatcacatgcagagtgggctgtgggcttgtacagcagagtgcaagatcttagggcactctgacagatgctggagcccctcatgtagcggcccaaacgcacatcctagtccacaccccccagcgcagatgagtactttttgcaagtccacctctcttcctcgcgaccccctgaggcgagataattattatcaggcacaactgcctaaaactgtgggactacaatctgtatatgagaaggtgctgcatagagactatgaccggaccgtgactctgctgagccctcccagacctggcaggctcccggacctccaggagatcggcgtcccgctgtatcagagtcctccagggcgttacctcagccctaagaagggtgccaatgagaacgtgtag

SEQ ID NO: 237278 - DNA, 1791 bp, synthetic construct
  misc_feature 1..1791: note = Description of Artificial Sequence: Synthetic coding sequence
  source 1..1791: mol_type = other DNA
atgtctccggtgaggaggtggggttcaccctgcctgttcccactccagctcttttcgctctgctgggtgctgagcgtggctcagtccaaaaccgtgagatacagtacgtttgaagaggatgcaccaggcacagtgatcggcactctggctgaggacttacacatgaaggtatctggcgatactagcttccggctgatgaaacagtttaacagctctctgctgagagtgcgcgagggagatggccaacttactgtcggcgacgctggccttgatagggagcgcctgtgtggccaagcaccccaatgtgtgcttgcctttgatgtcgtcagcttctctcaggagcagttccggcttgtgcatgtcgaggttgaagtcagggatgtcaacgatcacgctccagtgctggtccatcccgctccagcaaatgggtcacttgaggtggccgtgccagggcgaactgcaaaggataccgtcgtggcgcgagtgcaggctagagatgccgacgaaggagctaacggcgaactagcgttcgaacttcagcagcaggaaccacgggaggcatttgctattggacggcgaaccggcgaaattcttctcacaggcgatttgtcccaggagccaccagggcgagtgttcagggctctgctggtcatctccgatggcggacgcccaccactcacaaccacagccaccgtgtcctttgtggtcactgccggtggaggaagaggacccgcagccccagccagcgccggttcacccgaacgctccagaccgccaggttcaaggcttggagtcagcggctccgtgctacagtgggacaccccgcttattgttatcattgtattggctggatcttgcactctgttactggccgctatcattgctattgccaccacctgcaaccgcaggaagaaggaagttaggaaagggggtgccctgcgtgaggaacgaccgggagcagcgggtggcggagccagtgccccaggctcacccgaagaagctgcacggggtgccggacctagaccaaatatgttcgatgtgctgacattccctgggaccggtaaagccccatttgggtctccagcagccgacgctccacctcctgcggtcgccgctgccgaggtgccgggttccgaagggggatcagccactggcgaaagcgcgtgtcactttgagggtcagcaacggctgagaggcgcacacgccgagccctatggcgcttcacccggattcggtaaagagccagcaccccctgtggcagtgtggaaaggacatagcttcaacactataagtgggagagaggctgagaaattttctggaaaggattctggtaaaggagattctgattttaatgattcagactccgatataagtggtgatgctctgaagaaagatctgataaatcacatgcagagcggactttgggcatgtactgctgagtgtaaaattctgggtcattcagacaggtgttggagcccctcatgttccggacctaacgctcacccttccccacacccaccggctcaaatgagcaccttttgtaagtccacaagtctgcctagagaccctctccgacgtgataattattaccaagcccagctcccaaagacggttggcctgcagagcgtgtacgagaaagtgctgcaccgcgactatgataggaccgtaaccttgctgagcccccctcgaccaggccgactgccagacctccaggagatcggcgtgcctctctatcagtcaccgcctggaagatatctttccccaaagaaaggagctaacgagaatgtgtag

SEQ ID NO: 237279 - DNA, 2742 bp, synthetic construct
  misc_feature 1..2742: note = Description of Artificial Sequence: Synthetic coding sequence
  source 1..2742: mol_type = other DNA
atgagcccagtacggaggtggggttcaccttgcctgtttcccttgcagctgttctcattatgttgggtactctcagttgctcaatctaagaccgtacggtattctacattcgaggaagacgctccaggcacagtcataggtaccctggccgaggatctgcatatgaaggtaagcggcgacacatcctttagactgatgaagcaattcaatagctctctgctgagggtgcgagaaggggacggacagttgaccgtgggggacgcaggccttgatagagagcgcttgtgcggacaggccccacagtgtgtgcttgccttcgatgtggtgtccttttctcaggaacaatttaggctggtgcatgttgaggtggaagtgcgtgacgtaaatgaccatgcccctaggtttccaagggcacaaatcccagtggaggtatctgagggagctgctgtggggaccaggattcccttggaggttccagtcgatgaagacgtgggggctaatggcctccagaccgttaggttagccgaaccgcactccccttttcgagtggagctgcaaactagggccgatggggctcaatgcgctgacctggtgttgctgcaggagttggaccgtgagtcacaggccgcatactcactcgagctcgtggctcaagacggagggagacctcccagatccgctactgcagccctgtcagtcagggtgttggacgctaacgaccactcccctgcattcccacagggtgcggtggccgaagtggaactggccgaggacgcacccgtaggcagcctcctgctggacctggacgctgctgacccagacgaaggtcccaatggcgacgttgtctttgcctttggcgctcggactcctcccgaagcccgacgacttttccggttagaccctcggtcaggtaggctcactctagccggtccagtggattatgagaggcaggatacctacgagctggacgttcgggctcaagatcggggaccgggaccacgcgctgctacctgtaaggtgattgtgaggattagggatgtaaatgacaacgccccagatattgccattactcccctcgccgctcctggcgctggtaaccttaccctgagacggaatggacaggttacttaccggctcctcgaggcagaagtagggcgtgctggtggggctgtgtctacatatgtgtcagtagatccggctaccggcgcaatttacgccctgaggtcctttgactatgaaacgctgagacaattggacgtacgcatccaagctagcgacgggggaagcccacagctttcctcatctgctctggtccaggttcgggtgttggatcagaatgaccacgcgcctgttcttgtgcatccagccccagctaatgggagtttggaggtagccgtgcctggaagaaccgccaaagacaccgtggttgcccgtgtccaagcgagagacgctgacgaaggcgcaaatggcgagcttgctttcgaactgcagcagcaagaacccagagaagcattcgctatcggccgacgtaccggcgagatcctgctcactggcgacctcagtcaggagcctcccggtagggtatttagagcgctgctagtgatttcggatggcggtcggcctccactcaccacgaccgcaacagtgtcttttgtagtaaccgcagggggagggagaggccctgcggcacctgcaagcgctggatcccctgaaagatcaaggccacccggatcacggttaggtgtctctggctccgtgctgcagtgggatacgcctttgatcgtgataattgtgctggcaggtagctgcacactcctgcttgccgctatcatagccatagctacaacctgcaacaggagaaagaaagaggtaaggaagggaggagctctgcgcgaagagcggcctggtgccgctggagggggagcaagcgcccctggaagtccagaggaagccgctcgtggggcaggtcccaggccaaatatgtttgatgtgcttacctttccaggcacagggaaagccccatttggatcccctgcagcagatgcccctcccccagctgtggccgctgcagaagtccccggatccgaaggcggtagtgccacaggagagtcagcatgtcatttcgaaggacagcagaggctaaggggagctcatgccgagccatatggtgcctcacctggcttcggtaaggagccggctccgccagtggccgtgtggaaagggcactcctttaacaccatctctggcagggaagctgagaaatttagcggaaaagactcaggtaaaggcgattccgactttaatgacagtgattccgatatctctggagacgccttaaagaaagatttgatcaaccatatgcaatcgggtctctgggcttgcactgccgaatgtaagatcctcggacattccgacaggtgttggtccccatcttgctctgggcctaatgcgcacccaagcccacacccccctgcgcagatgtcgaccttctgcaaaagcaccagcctgcctcgggaccccttaaggagggacaactactatcaggcccagcttcctaagaccgtaggtctgcaatcagtttacgaaaaagtcttgcatcgtgattatgacagaaccgtgacactcctgtcccctcctagacccggacggctgcctgacctccaagagattggagtccctctctaccagagtcccccaggaagatatctctctccaaagaagggcgctaacgaaaacgtgtag

SEQ ID NO: 237280 - DNA, 3612 bp, synthetic construct
  misc_feature 1..3612: note = Description of Artificial Sequence: Synthetic coding sequence
  source 1..3612: mol_type = other DNA
atggacctcagggacttttacctgctggctgctctgatcgcctgtttgaggcttgacagcgcaatcgcccaagaacttatctacaccattagggaggaattgccagagaatgtgcccatcggcaatatccccaaggatcttaatattagccacatcaacgccgctacggggacaagtgcctccctggtgtaccgtctggtgtccaaagcaggggatgcacctctagtgaaagtgtcgagctcaaccggcgagatcttcaccactagcaataggattgacagagaaaaactttgtgcaggcgcaagctatgccgaagaaaatgagtgtttctttgaactggaagtcgtcattttgcccaacgattttttccgcctcataaagatcaagattatcgtgaaagacactaatgacaacgcccctatgtttccttccccagtgatcaatatttccattcctgagaacacattgatcaattctcgcttccctattccttctgccacagaccccgataccgggttcaacggagtacagcactacgagctattaaatggacaatctgtcttcggcttggatatagtcgaaaccccagagggagagaagtggcctcaactgatcgtgcaacaaaatttggatcgcgaacagaaagacacatacgtcatgaaaatcaaagtggaagacggcggtacaccccagaagagtagtacagctatcctgcaggttaccgtctccgatgtcaatgataaccggcctgtctttaaggaaggccaggttgaagtgcacatccctgagaacgctcccgtcggtactagcgtcatacaattacatgccacagatgccgacattgggtcgaatgctgaaatccgctacatctttggagcccaggtggcccctgcaacaaagcggctgttcgctttgaacaacaccacaggtctaatcaccgtgcagaggagcttggacagggaagagacagcaattcacaaagtgacagttctggcctccgatggatccagcactccggctagagctacagtgacaattaacgttactgacgttaatgacaacccacctaacatagatctccgttacattatctcccctataaacggcactgtgtacctcagcgaaaaagaccccgttaacaccaaaatagcgctgattacagtctcggataaggatactgatgtgaacggaaaagtgatttgtttcattgagcgggaggtcccctttcacctcaaagcagtgtacgacaatcagtatcttcttgaaacaagtagtctgttggactatgaggggactaaagagttctccttcaaaatcgtagcctcagactccggaaagccctcattgaatcagaccgccctcgtgcgcgtgaagctcgaagacgaaaacgacaatcccccaatctttaaccagcccgtgatcgaactgagtgtctccgagaacaacaggcgaggcctctatctcaccacaatttctgctaccgatgaagatagtggtaagaacgccgacattgtgtatcagctcgggccaaacgcctcctttttcgacctggatcggaaaaccggcgtcctcactgccagccgcgtgttcgaccgggaggagcaagagaggtttatcttcacagtcaccgcaagggataacggcacaccaccgctgcagtctcaagcagccgtgatcgttacggtcctcgacgaaaacgataattcgcccaagttcacccacaaccatttccagttctttgtgtcagaaaatctgccaaaatattccaccgtgggcgtgattactgtgacggacgccgatgctggtgagaacaaggctgtaacactgtccatcctgaacgacaacgataactttgttctggacccctactcgggagtcatcaagtctaacgtttcatttgatcgcgagcagcagagctcatatactttcgacgtcaaggcaaccgacgggggacagcccccaagaagttccaccgccaaggtgacaatcaacgtgatggacgtcaatgataactctccagtcgtcatctcccccccaagcaacacgagctttaagttggttcctctgagcgctatacccggatctgtcgtggccgaagtgttcgctgtcgacgtcgacactggaatgaacgcggagctgaagtatactatcgtgagcggaaacaacaaaggactcttcaggatagaccccgtgaccggcaatattactcttgaagaaaaacccgcaccaaccgacgtgggcctgcacaggctagtggtgaacatctccgacctgggatatccaaagagccttcacacactagtcctggtgtttctctatgtgaatgatacagctggcaatgcctcctacatctatgatttgatccgccgtacgatggaaacacccctagataggaacatcggtgattcatctcagccctatcagaacgaagattacttgacaataatgatagcgatcattgccggagcaatggtggtcatcgtggtgatctttgtgacggtgttagtgcggtgcagacacgctagccgattcaaggccgcacaaaggagcaagcaaggggctgagtggatgagcccaaatcaggagaataagcagaataagaaaaagaagcgcaaaaaaagaaagtcccccaagtcatccttgctaaattttgttaccattgaggagtctaaaccagacgacgctgtccatgagccgattaacgggaccattagcctgcccgctgaattggaggaacaatctatcggcagatttgactggggacctgcgcctccaaccaccttcaagcccaattcacccgacctggcgaagcattacaagagcgcatctccccaacctgcatttcacctgaagcctgatacaccagtgagcgtgaagaaacaccatgtcattcaggagctgccgctcgacaacacttttgtgggcggttgtgatacactgagcaagcgttcctccactagctcagatcatttctccgcctctgagtgttcctcacagggcggttttaagacaaaaggtccactacacactcgccaatcacagcgaagggtgacctttcatctacccgacgggagccaggaatcctgtagcgatagcggcctgggggaccacgaacccgtcggatcaggaaccctcatctcccacccactgccccttgtgcaaccccaggacgagttttatgaccaggcgagccccgacaaacggactgaggccgatggtaacagcgaccccaacagtgacggacctctcgggccaagaggcttagcggaagcaactgaaatgtgcacacaggagtgcctagtgctgggacattcagataactgttggatgccgccagggttggggccttatcagcaccctaagagccccctatcaactttcgccccacagaaagagtgggtgaaaaaggacaagctggtcaatggacacaccctgactagagcgtggaaggaagattccaatcgcaaccagtttaacgatagaaaacagtatggttccaatgagggacactttaacaacggctcccacatgacagacattccgctggctaatcttaaatcatataaacaggccggaggagcaaccgaatctccaaaagagcaccagctatag

SEQ ID NO: 237281 - DNA, 3099 bp, synthetic construct
  misc_feature 1..3099: note = Description of Artificial Sequence: Synthetic coding sequence
  source 1..3099: mol_type = other DNA
atggatctgagagatttttatctgctggcagccctgatcgcctgtctacgcctggatagtgctatcgcccaggaactcatctacacaatccgtgaagaactacccgagaacgtacccataggaaacattccaaaggatctgaacatatcccatatcaatgctgccaccggcacttctgcaagcttagtgtatcgattggtgtcaaaggctggcgacgcgccattggttaaggtctcgagttccaccggagagatttttacaacgtccaacaggattgatcgggaaaaactgtgtgctggggcttcatacgctgaggaaaacgaatgtttctttgaattggaagtggttatcctcccaaatgattttttccgcttgatcaagattaagatcatcgtgaaagatactaatgataatgctcctatgttccccagtccagtgatcaacatctccattccagagaatacgctgataaacagccgcttccccatcccttctgccactgatcccgatactggattcaacggcgtccaacattatgagctcttaaacggccagtccgtttttggcctcgacatcgtagagactccagagggagagaagtggcctcaattgatcgtccagcaaaatttagacagagagcagaaggatacttacgtgatgaagatcaaggtggaggacggtggcacccctcagaagagcagtactgccattctgcaggtgaccgtcagcgacgttaatgacaataggccagtgttcaaggagggccaggtggaagtccatatcccagagaatgcacctgttgggacctccgtgatccagctccatgctaccgatgccgacatcggcagcaatgccgaaatccgctatatctttggggcacaagtggcgccagctactaagcggctctttgctttaaataacaccacggggctcatcacagtccaaaggtccctcgacagggaagagacagccatccataaggttacagtccttgcgtctgacggttcctccactccagcccgagctacggtgacaattaatgtgacagacgtgaatgataaccccccaaacatcgatttgagatatattatctctcccatcaacggcacagtttacctgtcagaaaaggatccggtaaacacaaaaattgccctgatcaccgtgtctgacaaagataccgatgttaatggcaaggtcatatgcttcatagagcgcgaggtgccattccacctgaaagccgtgtatgacaatcagtatttgctagaaacatcaagcctgctggactatgaaggaacgaaggagttctctttcaagatcgtcgctagtgatagtggtaaaccttctttgaatcagaccgccctcgtaagggtgaagcttgaagacgaaaatgataatcccccaatctttaaccagccggtgatcgagctatccgtttccgagaacaacagacgcggactctaccttacaaccatctccgctactgatgaggatagtggaaaaaatgccgatatcgtctatcagctgggccctaacgcaagcttctttgaccttgaccgcaagaccggagtgctgactgcatcccgcgtgtttgatagagaggaacaggagcggttcatcttcacagtcacagcgagagacaatggtacccccccactccagagtcaggcagcggtaatcgtgaccgtgcttgacgagaacgacaattctccaaagtttacccacaatcattttcaattttttgttagtgagaacctccccaagtattccacagtgggagtcataactgtgacggatgctgacgccggagagaataaagctgtgacgctctctatcctgaatgacaatgataatttcgtgttagatccctattccggcgtgattaagtctaacgtctcttttgaccgggagcagcagtcttcctatacattcgacgttaaagctacagatgggggtcaaccgccacggtcttcgactgctaaggtgacaatcaatgtgatggatgtcaacgacaacagcccagtcgtgatcagcccacctagtaatacatctttcaagctggtgccgttgtctgctatccctggctcagtcgtggccgaggtcttcgccgttgatgtggacactgggatgaatgctgaactcaagtatacaatcgtatccgggaacaataaggggctattcaggatcgatcccgtgactgggaacatcacactggaggagaagcccgctccgacggacgtcggcctgcacagactggtcgtgaatatcagtgatctgggataccccaagagcttacatactttggtattggtctttctctacgtgaacgataccgccggaaacgccagctatatttacgatttgattcggagaactatggaaaccccgctcgatcgcaacattggtgatagctcgcagccataccagaacgaggattaccttaccataatgatagccatcatcgcaggagctatggtggtgattgtggtgatatttgtgaccgtactcgttagatgtaggcatgcatcccggtttaaggcagctcaacgcagcaagcagggggctgaatggatgtcccccaatcaagagaacaaacagaataagaaaaaaaaaaggaaaaaacgaaagagtcccaaaagctccctgttaaattttgtaacaatcgaagagtctaaaccggatgacgctgtgcatgaaccaataaacggcactattagcctgcccgcagagttggaagagcagtccatcgggagatttgattggggccctgctcctcccacaaccttcaagccaaactctccggacctcgctaaacactataagtccgcttctccccagcccgctttccacctaaagcccgacacccctgtctccgttaaaaagcaccacgttattcaggaactgcccttggataacacttttgtgggcggatgcgataccctgagtaaacgatcttccacgtcctcggaccactttagcgcttccgaatgcagtagccagggcggtttcaaaacaaaaggacctctgcatacaaggcaggtaaacgagcacttttattggagcatttccactgcctataagtgccccgtgaaccagtattag

SEQ ID NO: 237282 - DNA, 3714 bp, synthetic construct
  misc_feature 1..3714: note = Description of Artificial Sequence: Synthetic coding sequence
  source 1..3714: mol_type = other DNA
atggacctaagagacttctatctgctagcagccctgatagcttgcttgagactggactccgccatcgcacaggagctcatttatacgatcagagaagagctgcctgagaatgtgcctattgggaacattcctaaagatctgaatatcagtcacatcaacgccgcaacaggtacctcagcgagtctcgtgtaccgcctcgtgtccaaagccggtgacgctccccttgtcaaggtgtcctccagcaccggggagattttcactaccagcaaccgaattgatcgagagaaactttgcgccggtgccagctacgcagaggagaacgaatgcttcttcgagctggaggtggtgatcttacctaatgactttttcagactcatcaagatcaaaatcatagtcaaagacacgaatgacaatgcccctatgttcccgtctcctgtgattaacatttcaatccctgaaaatactttgatcaattctcgcttccctatcccctctgcaaccgaccccgatactgggtttaacggcgtgcagcactatgagttgttaaacgggcagagtgtgttcggccttgacatcgtagagacccccgagggggagaagtggccccagctgatagtccaacaaaaccttgaccgcgaacagaaggacacttacgtgatgaaaatcaaagttgaggatggtgggacacctcagaagagttcgacagcgatactgcaggtgacagtttcagatgtgaatgataacaggccagtgttcaaggaggggcaggtagaagtacatatcccagagaacgcacccgtgggcacatcggttattcagttgcacgcgaccgacgccgacattgggagcaacgcagagatacgctatatattcggggcacaggtggctccagccaccaagaggctgtttgctttaaacaatacaaccggtctcattactgtgcagcgctctttggatcgcgaagaaaccgccatccataaagtgacagtgctagcttcagacggaagtagtactcctgcccgagcaaccgttaccatcaacgtcaccgacgtgaacgataaccctcccaacatcgaccttaggtacatcattagtccaatcaacggcaccgtttatctttccgagaaagaccccgtgaacaccaagatagctcttataaccgtgagtgacaaggatacagatgtgaacggaaaagttatctgctttatagaaagggaggtacccttccacctgaaggcagtgtatgacaaccagtatttgctcgaaacttcgtccttgctcgactatgaagggactaaagagtttagctttaaaattgtggctagcgattctggcaagccatcccttaaccagaccgccctggttcgggtaaaactggaggacgagaatgacaacccacccattttcaaccagccagtcatcgaactctccgtgtccgagaacaataggcgcggtttgtacctgactacaatttctgctaccgacgaagacagtggcaagaacgcagacatagtgtatcaactgggcccaaatgcttccttttttgatttagacaggaaaaccggggtacttactgcctctcgcgtctttgatcgagaagagcaggagcggttcatcttcaccgtcacggccagggacaatggcaccccgccattgcagagccaggctgctgtcatcgtcaccgttctggacgaaaacgataactcccccaagtttacccacaatcacttccaattttttgtgtcagagaacctccccaaatactctacagtcggggtgataaccgtcacggatgctgatgctggagaaaataaggctgtcacacttagtattctcaatgacaatgataacttcgtcctggacccatactccggtgtgatcaaaagcaatgtaagcttcgaccgggaacagcagagttcttacacctttgatgtaaaagcgacggacggcggtcagccacccagatccagcaccgctaaggtcacaatcaacgtgatggacgtgaatgacaattctccggtggtgatttcaccaccttctaacacctccttcaagctggtaccactaagcgcaatcccaggctcagtggtggccgaagtatttgctgtggacgtggatacgggtatgaacgcagagctcaagtacaccatagtgtctggcaataataaaggactgtttagaatcgaccctgtgacagggaatatcaccctggaggagaagcccgctcctaccgacgttggacttcaccgactggtggtgaatatttcagacttgggctaccctaaatcactgcataccctggtactggtgttcctgtacgttaacgatacagccggaaacgcctcatacatttacgacctgattagaagaactatggaaacacctttggaccgaaatatcggggactcctcacaaccttaccagaacgaagattatctgactatcatgatagcaatcatcgccggtgccatggtggtgatcgtcgtgatattcgtaacagtcctggtcagatgtcggcatgcaagccgtttcaaggcggctcagagaagtaagcagggagccgagtggatgagccccaatcaggaaaataagcagaacaaaaagaaaaagagaaaaaagcgcaaatctccgaaaagttctctgctgaatttcgtgactatcgaggagtccaagccagatgacgctgtgcatgagcccatcaatggcactattagcctgccagcagagttagaggagcagtctatagggcgtttcgattggggtcctgcaccaccaacaaccttcaaacctaacagccccgacttagccaaacactataagtcagccagcccccagccagcttttcacctcaagccggatacacccgtctctgtcaaaaaacatcacgtcattcaagaactgccactcgacaataccttcgtgggcggatgtgacactcttagcaagcgctcctctacttcaagcgatcacttctctgcgagcgaatgttcctcccaaggcggtttcaagacaaaaggccctctgcacacccggcaatgtaactcccattctaaatcggacaatattcccgttactcctcaaaagtgtccatcatctaccgggtttcacatccaagaaaatgaggagagtcactatgaatcgcagagaagagtaacttttcacctgccagacggctcccaggagagttgttcagatagcggtctgggcgatcacgagcctgttggctctggcacactgatatcccatcctctcccactggtccagccacaggatgagttttacgatcaggcttctcctgataaacgcaccgaggcagacggaaattccgaccccaactcagacggtccgctagggcctcgcggactggccgaggccaccgagatgtgtacacaagaatgtctcgtgctgggccactccgacaattgttggatgcctcctggactgggcccttaccagcaccctaaaagtccactctccaccttcgctcctcaaaaggagtgggtaaagaaggataaactagtcaatggccacactctcactcgagcctggaaggaagatagcaatagaaaccagtttaatgaccggaaacagtatggatctaacgaaggccatttcaacaacggaagccacatgactgatattcccttagccaacctcaaatcttacaagcaagcaggtggcgctactgagtcaccaaaagagcaccagctttag

SEQ ID NO: 237283 - DNA, 3612 bp, synthetic construct
  misc_feature 1..3612: note = Description of Artificial Sequence: Synthetic coding sequence
  source 1..3612: mol_type = other DNA
atggatctccgtgatttctatcttctggctgctctaatagcatgtctgaggctggactcagcaatcgcgcaggagctgatctataccattagggaagagctgccagaaaatgtgccaatagggaatattcccaaagatctaaacatctcccatatcaatgccgcaactggcacaagtgcctccctggtataccggctggtgtcaaaggctggggatgccccactggtgaaggtgagctcctccaccggggaaattttcaccaccagcaatcgtatcgatcgggagaaactctgcgctggcgcaagctatgccgaggaaaatgagtgtttttttgagctagaggtcgtgatcctgccaaatgactttttcaggttgattaagattaagatcatcgtaaaagatacaaacgataatgcccctatgttccccagtccagtcattaacatatcaattcccgagaacaccttaatcaattcccgcttccctattccctcagccacagatcctgacaccgggttcaacggtgtccagcactacgagctgcttaatggacaatctgtgtttggactcgatattgtggagacccccgagggagagaagtggccccagttaatcgtccaacaaaacctcgaccgtgagcagaaagatacctacgttatgaaaattaaagttgaggacgggggtacaccgcaaaagtccagtacagccatcctgcaggtgactgttagcgacgtgaacgataaccgccctgtgttcaaggaagggcaggttgaagtgcacattccagaaaatgccccagtgggcacaagcgtcatccaactccacgcaaccgatgccgacatcggctctaacgcagagatccgttacatcttcggcgcacaggtggcgcctgccactaagcgcctctttgccctcaataatacgaccgggctcattaccgtgcagaggagccttgacagggaggaaactgctattcacaaggttacagtcctggcaagcgacgggagttctacccccgctcgcgctaccgtaacaatcaatgttactgatgttaacgacaacccccctaatatcgatctgagatacattatcagtccaattaatggcactgtttacctgagcgaaaaggatcccgtcaataccaagatcgcgctgatcacggtgtccgataaagataccgacgtcaatggaaaggttatttgctttatcgaacgcgaagtccccttccacttgaaagcagtgtacgacaatcagtatctgctcgagactagcagcttgctggactatgaagggaccaaagagttttccttcaagatcgtcgcgagcgattctgggaaaccctcgctgaaccagacggcactggtacgtgtgaagttggaagatgagaacgataatccaccgatctttaatcagcccgtgatcgagctttctgtgtctgaaaacaaccgccgtggcctatatctaactacaatttcggccacggatgaagatagcgggaaaaacgctgacatagtctatcaacttggacccaatgcatcattctttgatctggaccgaaagaccggtgttctcacagcctcacgggtcttcgatagagaggagcaagagcgtttcatttttacagtaactgctcgcgacaacggaacgccacccctacagagtcaggcagcggtgattgtaacagtgctggacgaaaacgacaattctccaaaattcactcacaaccactttcaattcttcgtcagcgagaatctgcccaaatattcaacagtcggggttattaccgttacagacgccgatgcaggtgaaaacaaagctgtgactttatctatactgaacgacaatgataattttgtgttggacccttactcaggagtgatcaaatccaacgtttcctttgatagggagcagcagagttcctatacatttgatgtcaaagcaacggacgggggacagccacccaggtccagcacagcaaaagtcaccatcaacgtgatggatgtgaatgacaatagcccagttgtcatatcacctccaagcaacacctcctttaaactggttcccctgagtgcaatccctgggtctgtggttgcagaagtgttcgcagtggatgttgacacgggcatgaatgccgagctgaaatataccatagtgagtggaaacaataagggactctttcggattgacccggtgactggcaatataaccctggaggagaaacctgctcccaccgacgttggcctgcatcgcctggtggtgaacatctctgacctggggtatccaaaatccctccatacgcttgtgctcgtttttctgtacgttaacgataccgcaggcaacgctagctacatatatgacttaatccgccgaacaatggagactccactcgatagaaatattggcgactcctctcagccataccaaaacgaggactatctaaccatcatgattgctatcattgcgggtgccatggttgtgattgtggtcatattcgtcaccgtcctagtgagatgccggcacgcgtcaaggtttaaagctgctcagcggtccaagcagggcgcagagtggatgtcccccaaccaggagaataagcagaataaaaagaagaagcggaaaaagcggaagtcacccaaaagcagcctgttaaattttgtgacgatcgaagaatcaaagccggatgacgcagtgcatgagcccatcaacgggactatctccctgccggcagaactcgaagaacagtcaatcggccgtttcgattgggggcctgctcctcccacgaccttcaagccaaactctcctgacctcgccaagcactacaaatcagcctccccacaaccagcttttcatctaaaaccagacactcctgtctctgtgaagaagcatcatgtgatccaagaattgccactcgataacacttttgtcggaggctgtgatactctctcgaaacggagttcaacaagtagcgaccacttctcagccagtgagtgttcaagccaggggggatttaaaaccaagggtccgctccacactcggcagagccagcgcagagtcactttccatctccctgatggcagccaggaaagctgctcggacagcggtttaggagaccacgaacctgttggaagtgggacgctgatttctcaccccctgcccttggtccaaccccaagatgagttctacgaccaagcttctcccgataagcgtactgaggcagatggaaactcagacccaaattctgatgggccattgggacctcgtgggctggccgaggccacagaaatgtgtacacaggagtgcctggtgttgggacactccgataattgttggatgccgccaggcctcgggccttatcagcaccccaagagcccattgtcaacatttgcaccacagaaagagtgggtcaagaaagataaactcgtgaacggacacacactaactcgggcttggaaagaggactccaacagaaaccagtttaacgacaggaagcaatatggctcgaatgaaggtcatttcaacaatgggagtcatatgaccgatattccactggcaaacctgaaaagctacaaacaggcaggcggagccaccgaatctccaaaggagcaccagctttag

SEQ ID NO: 237284 - DNA, 3714 bp, synthetic construct
  misc_feature 1..3714: note = Description of Artificial Sequence: Synthetic coding sequence
  source 1..3714: mol_type = other DNA
atggaccttcgggatttctacctgttagccgcactaatagcctgtctgcgactggacagtgctattgcacaggagctcatctataccattcgggaggaactgccggagaacgttccaataggcaacattcctaaggatttaaacatctctcacatcaatgcagctacgggtaccagcgcttctcttgtgtaccgcctggtgtccaaggctggcgacgcacctctggtaaaggtgagctcttccaccggagagatctttaccacgtcgaaccgcattgatagagagaagctgtgtgctggcgcttcctatgctgaagagaacgaatgtttctttgagctcgaggtcgttattttgccgaacgatttcttcaggttaatcaaaattaagattattgtgaaagacactaatgacaatgcaccaatgtttcccagcccagtgatcaatatcagcattcctgagaataccctcatcaattctagattcccaatccccagcgcaactgacccagacactggcttcaatggggtgcagcactatgagcttcttaacgggcagagcgtgttcggcttggatattgtggaaacgccggagggagaaaaatggccccagctcatcgtgcaacaaaacttggaccgggaacaaaaggacacttatgtaatgaaaattaaggtggaggacgggggaactcctcagaaaagctcgaccgccatattgcaggtgacagtgtcagatgttaatgataatcggccagtgttcaaagaagggcaggtggaggtccacatccctgaaaatgcgccagtgggtacaagcgtcatccagctccacgccacagacgcagacatcggatcaaacgcagaaatcaggtacatattcggagctcaggtcgccccagcaacaaagaggctgtttgccttaaacaacacgaccggtttgattaccgtccaacgcagtctcgaccgcgaagaaactgccatacataaggtgacggtgctggccagcgacgggtcatccactccagccagggccactgttactatcaacgttaccgacgtcaacgataaccctcccaatatcgacctgaggtatattatcagcccaatcaacggaaccgtgtatctttccgagaaagatcctgtgaacaccaaaatcgctcttatcaccgtgtcggacaaggatacagatgtcaacggtaaggtgatttgcttcattgagagggaggtaccatttcaccttaaggcggtgtatgataaccagtatctgttggaaacgtctagcctgctggattatgagggcacaaaggaattcagcttcaaaatcgtggcatctgactcaggcaaaccttccctgaaccagaccgcgctagtacgggtgaagctggaggatgagaacgataaccctcccatttttaaccagccggtaattgaactgagcgtgtctgaaaacaatcgcaggggcctgtatctcacgacgatctccgctaccgacgaagacagcgggaagaatgcagatatcgtataccagctcggcccaaatgcatccttcttcgacctggatcggaagaccggggtgctcaccgcttcacgggtctttgaccgtgaggaacaggaaaggtttatcttcactgtgaccgcccgagacaacggtacccccccactgcagagccaagcagccgtgattgttactgtcctggacgagaacgacaactcacccaagtttacccacaaccacttccagttctttgtgtctgaaaacctgcctaagtactcaaccgtgggggttattacagttaccgatgcagacgccggagagaacaaggcagtaacgctcagcatcctgaacgataacgacaattttgtgctggacccgtatagcggggtcataaaaagcaacgtgtcatttgaccgagagcagcagagttcgtatacgttcgacgtcaaggcgactgatggcggacaacctccgaggtcttccacagccaaagtgacaattaatgtcatggatgttaacgacaacagccctgtggtgatcagtcccccaagtaatacctcatttaagttggtgcccttgtcagccattcctgggagcgtcgtcgcagaagtttttgcagtggatgtggacacggggatgaacgccgagctgaaatacacaatagtttcaggaaataataaaggcctgttcaggattgacccagtgacaggaaatattacgctcgaagagaaaccagcaccaacagacgtgggtttacacaggctcgtggttaacattagcgacctcggataccccaagtctcttcacacgctggttttggtttttctatacgtgaacgacacagctggcaatgccagttacatttacgacctgatcagaaggactatggaaacacctcttgaccggaacattggagactcttcccagccttatcagaatgaggactatctgactattatgattgccattatcgccggtgcgatggtggtgatcgtcgtgattttcgtgaccgtattggttaggtgcaggcacgcttcccggttcaaggctgcgcagaggtccaaacagggtgctgagtggatgagtcccaatcaggagaacaagcagaacaagaaaaagaaaagaaagaaacggaaaagccctaagagctcacttctgaacttcgttactatcgaagagagcaaacccgatgatgcggttcacgaacctatcaacggaaccatttctctgccagccgaactcgaggagcagtctatcggacgtttcgactggggacctgcacccccaaccacatttaaacctaacagccccgacctcgctaagcattataaatcagcctcacctcagccggctttccatctgaaaccggacacccccgtttcagtcaaaaaacaccacgtgattcaggaactccctctagataacacctttgtcgggggttgtgatactttatcgaaacggtcatccacctcatccgaccactttagtgcttcagaatgctcttcacagggagggtttaaaacaaagggcccactacatacacgccaatgtaactcacatagcaaaagcgacaacatccctgtgaccccacagaaatgcccatccagcacgggatttcatatccaagagaacgaggaatcccattacgagtcccagcgaagggtgacctttcacctgccagatggctcccaggagagttgcagtgactcaggcctcggtgaccatgagccagtgggaagcggtactttgatctcacacccacttccgttagtacagccacaggacgaattctacgaccaggcgagcccagacaaacgcacagaggcggacggtaactctgacccaaactctgatggacctctgggacctcgaggactagcagaagctactgagatgtgcacccaggaatgcttagtgctggggcactctgataactgttggatgccccctgggctgggcccttatcagcaccccaaaagtcctctatctacatttgcgccacaaaaggagtgggtcaagaaggacaagctcgtaaacgggcatacactcaccagggcttggaaggaagattccaatagaaaccagttcaacgaccgtaagcaatacgggtcaaacgagggacacttcaacaacgggtcacacatgacggacatccccctggctaacctgaagtcttacaagcaggccggaggcgcaacggagagccctaaagaacatcagttatag

SEQ ID NO: 237285 - DNA, 2424 bp, synthetic construct
  misc_feature 1..2424: note = Description of Artificial Sequence: Synthetic coding sequence
  source 1..2424: mol_type = other DNA
atggtgttttcccgaaggggaggactgggagcacgggacctgctactttggctgctcctcctcgcagcttgggaggtcgggtctgggcaactccactactcgatccccgaagaggccaaacatgggacattcgtgggtagggtcgcacaggacctgggcctcgagctggccgaattagtcccacggttgttccgtgtcgcctctaagacccaccgcgacctcctagaagtgaaccttcagaatggcatcctgtttgtgaattcccgaatcgacagggaggagctgtgccagtggtccgccgagtgcagtatccacctggagcttatcgcagacaggcccctccaggtgtttcacgtggaagtgaaggtgaaggacatcaacgacaacccaccagtcttcagggggcgagagcagatcattttcatccctgagtcccgacttcttaactccagattccccatcgaaggagccgctgacgctgacatcggcgcaaatgcattgctgacctataccctgtccccgagcgattacttttcactggacgtcgaggcgtcagacgagctgtcgaagtcgctctggctcgagcttaggaagtacctagaccgcgaggaaacccccgaactgcacctccttctcacagctacagatggaggcaaacccgaactgcagggcaccgtggaactcctcattaccgtcttggacgtgaatgacaacgcaccactattcgatcaggcggtatacagagttcatctactagagactacagccaacggcaccctggtgacaactctgaacgccagcgacgcggacgagggtgtcaacggcgaggtcgtgtttagcttcgactccggcatttctcgagacatccaagaaaagttcaaggtcgacagctcatctggagagatcaggctgatcgataaactcgattatgaagaaacaaagtcttacgaaattcaggtgaaggctgtggacaagggatcgccaccaatgtctaatcactgtaaggtcctggtgaaagtgctggacgtgaatgacaatgcccctgaactcgcggtgaccagcctgtatctgccgatccgagaggatgcaccactttccaccgtgattgcgctgattacagtctcggatagggattccggggcaaacggccaagtcacgtgcagcttgatgccccacgtccctttcaagctggtgtccactttcaagaattactattccctggtgcttgactccgcactagatagagaaagtttatccgtatacgagctcgtggtgacggccagagacggtggctcaccgtccctgtgggcaactgcaagggtctcagtagaggtggccgatgtgaacgataacgctccagcctttgctcaaccagaatatacagtttttgtgaaggagaataacccccctgggtgccacatcttcacagtgagtgctcgggatgcagacgctcaggagaatgccctggtttcttattccttggttgagcggcgagtgggagaacgggctctgagcaattacgtgagtgtgcacgccgaatccggaaaggtgtatgctctgcaaccgttggaccatgaagagctagagctactgcagtttcaggtctctgccagagacgccggagttccccctctggggagtaatgtaacactacaagtgtttgtattggacgagaacgataatgcaccagcactgttagctcccagggtcggtggcactattggagccgtgtctgaactggtgccaaggctggtgggagcaggccacgtggttgccaaagttagagcagttgatgccgattcaggctacaatgcctggctttcctacgagctgcagccagccgctggaggcgctcggatcccgtttagggtcggactgtacaccggggagatttccacaactagggttttggatgaggctgatctgagccgctatagactcttggttctggtaaaggaccacggcgagcccgctctcacggccactgccactgttcttgtctcgctggtggagtctggccaagcacctaaggcctcctcgagggcctcagtgggtgtagctggcccagaagctgcccttgtggatgtgaatgtctacctaataattgctatatgcgcagtatcttccctgctcgtattaactcttttgctctatacggccttgcgctgctctgtaccacccacagaaggcgcatacgtgcccggaaaaccaacactcgtctgtagctctgcactcggctcctggtccaactcgcagcaacgcaggcagcgagtctgcagctccgagggaccccctaagacagatctcatggctttcagcccgggactatctccgtccttgaacaccagcgaaagaaatgagcagcccgaggccaatctcgacctgtctggtaatgtgtcaccaacgttcgaattctggttgtag

SEQ ID NO: 237286 - DNA, 2061 bp, synthetic construct
  misc_feature 1..2061: note = Description of Artificial Sequence: Synthetic coding sequence
  source 1..2061: mol_type = other DNA
atggtcttcagccgcagaggcggtctgggcgcacgcgatctgttactatggctcctcctgttggccgcttgggaggttggctctggtcagcttcattattcaattcctgaggaggccaaacacggaacctttgtgggacgagtcgcccaggaccttggactcgaactggcagagttagtccctcgactgtttcgtgtggcttctaagacacacagagatcttttagaggtgaacctgcagaatggcattctgttcgtgaactcacgcatagatcgcgaagaactctgtcagtggtccgccgaatgctccatacatctggaacttatagctgaccggccactgcaggtgttccacgtggaggttaaggtgaaagatattaacgataatcccccagtcttccgaggcagggagcaaattatcttcatcccggaaagccggttattaaacagtcgcttcccgattgaaggggcagccgatgcagatatcggggctaatgccctgttgacctacaccctgtctccaagcgactacttctcattggacgtggaggcaagtgatgagctatctaagtcgctgtggctcgaactgaggaagtatctggaccgcgaagaaacaccagaactccatctgcttctgactgccacagacggcggaaagcccgagctgcaaggcacggtggagctcctgatcaccgtcctggatgtcaatgataatgcccctttgttcgaccaggccgtctatcgagtgcacctcctagagacaaccgcaaatgggacactggtgaccaccctgaacgcttccgatgctgatgaaggggtgaatggcgaagtggttttcagcttcgattccggaatctcccgggacatacaggaaaagttcaaggtggatagcagctctggcgaaatccgcctgatcgataaactggattacgaagagaccaagtcttacgaaattcaagtcaaagctgtcgataagggttctcctccaatgtcaaaccattgcaaggtgctggtgaaggtgctggacgtcaatgataatgcccctgagttggccgtgacttcgctatatctgcccatccgggaggatgctcccctctccacagtgattgccctgatcactgtatccgatcgggactccggtgccaacggtcaggtaacctgtagcttaatgccacatgtgcctttcaagctcgtgagcacatttaaaaattactattcactggtgctggacagtgctcttgaccgagagagcttgtccgtatacgagctagttgtaaccgccagggatgggggtagccctagcctttgggctacagctcgcgtgagtgtcgaagtagcagacgtcaatgataatgccccagcctttgcacaacccgagtacacagtgttcgtgaaggaaaataatcccccaggctgccacatctttacggtgtctgccagagacgcagacgcccaggagaacgccttggtgtcatacagtcttgtcgagcgtcgcgtcggcgaaagggctctgagcaattatgtgtccgtgcatgctgagtcagggaaagtctacgcactgcaacctctggatcatgaagaacttgagttactgcagttccagcccagacagccaaaccctgactggcgctacagcgcatccctgcgggctggcatgcatagctcagttcacttggaggaagctgggatacttcgggctggaccaggaggccctgatcagcaatggcctaccgttagctctgccacaccagaacctgaagcaggcgaggtgagtccacctgtgggggcaggcgtcaattccaatagctggaccttcaagtatggccctggcaaccccaaacagtctggccctggcgagctaccagacaagttcataatccctgggagtccagcgattattagcattcgacaagaacctaccaactcccagattgacaaatccgactttatcacattcgggaagaaggaagaaaccaagaagaaaaaaaaaaaaaagaagggaaacaagacacaggaaaagaaggaaaaaggaaattctactacagacaattcagaccagtag

SEQ ID NO: 237287 - DNA, 2853 bp, synthetic construct
  misc_feature 1..2853: note = Description of Artificial Sequence: Synthetic coding sequence
  source 1..2853: mol_type = other DNA
atggtgttttcgagacgaggtggtctgggggcacgcgacctgctgctgtggctcttgctactggccgcatgggaagtcggctcgggtcaactgcattatagcataccggaagaagcgaaacacgggactttcgtggggagggtcgcacaagatcttggtctcgagctagcagagctggtgccaagactgttccgcgtggcgagtaaaacccaccgcgaccttttggaggtgaacttgcagaacggtattctgttcgtcaattccaggatcgatagagaggaactctgtcagtggtctgctgagtgctccattcaccttgaacttattgcagacaggcccctgcaagtttttcatgtagaggtcaaagtgaaagacatcaatgacaatcctccagtctttcggggtagagagcaaatcatctttatacctgagtccagattgctgaactccaggttccccattgagggcgcagctgatgctgatattggagccaatgcactactaacgtacacgttaagccccagtgactacttctccctcgacgtagaggcgtcagacgagcttagcaagtctctttggctggagctgcgtaaatatctagaccgagaagaaacccctgaactgcacttacttctgaccgctactgacggaggcaaacctgagctgcaagggaccgttgagctgctcatcactgtccttgacgtgaatgacaacgctccattattcgaccaggccgtttacagggtgcatttgctggagaccaccgccaatggcaccctggtgaccacgctgaatgcttctgacgccgacgaaggggtgaatggcgaggtcgtgttctctttcgatagcggtatttcgcgcgatattcaggaaaagtttaaggtggattcaagttctggggaaattagactgatagacaagctcgattacgaggaaacaaaatcctatgagattcaggtaaaggcagtggataaggggtctcctccaatgtccaatcactgcaaagtgttagtgaaagtgctggacgtcaatgacaacgcccctgagctagcagtaacatccttatatttaccaatcagagaggacgccccactcagcacggtcatcgctttaatcaccgtttcggacagagacagtggcgctaacggacaagttacctgctccctgatgcctcatgtgccgtttaaactggtctcaaccttcaaaaattattactccttagttttggactcagccttggacagggaaagtctgtccgtgtacgaattggtcgttacggccagggatggcggatcaccatcactgtgggctacggcccgagtgagcgtggaggtggccgatgttaacgataatgcccctgcctttgctcagcccgagtacacggtgtttgtgaaagaaaacaaccctccgggatgtcatatctttacagtgagcgctagagatgccgatgcccaggaaaacgctctggtgagttattccctggtcgaaaggagagtgggggaacgcgctctgtccaattatgtgtccgtgcacgcagaatctggcaaggtgtacgccctccagcccttggaccatgaagagctggaactgcttcagtttcaagtgtctgcgagagatgctggcgtccctcctttagggtctaatgttacacttcaagtgtttgttttggatgagaacgataatgcacccgcactactggctcctagggtgggcggaaccatcggggcagttagcgagctggtgcccaggctcgtgggggcaggacacgtcgtcgcaaaggtccgtgccgtggacgccgatagcggctacaatgcttggctgtcttacgagctgcaaccagcagcgggtggcgctaggatccccttcagagtagggctgtacaccggcgaaatttcgaccactcgtgtgctggacgaagctgatctcagccgttatcgtttgcttgttcttgtgaaagatcatggagaaccagctctcacagctaccgcaaccgtgctggtgagtctggtggagagtggccaggccccaaaggcgtcatcaagggctagcgtaggagttgccggtccagaagccgcactcgtcgacgttaacgtctacctgatcattgccatatgtgcagtctctagcctgctcgtgctgacgctgctgttgtacacagcattacgctgctcagttcctccgactgaaggggcatacgtgccaggaaagcctaccctggtatgttcctccgccttgggttcgtggtctaatagccagcagcgtagacagcgggtatgcagctcagagggccctcctaagacggacttgatggccttctctccagggctctcaccctccctgaacacttccgagagaaatgaacagcctgaggccaacctggacttgagcggaaaccccaggcaaccaaacccggactggaggtacagcgcatctctcagagcaggtatgcattcttccgtgcacctggaagaggcaggcatactgagagccggaccgggaggccctgatcagcaatggccaactgtatctagcgccactcctgaacccgaagccggagaggtgtcccccccagtgggggctggtgttaatagcaacagctggacgttcaagtacggccctgggaacccaaagcagtccggcccaggagagctgccggataagttcataatcccaggttcacctgccatcataagcattcgtcaggaaccaactaattctcagatcgacaaatctgattttatcacatttggaaagaaagaagaaaccaaaaaaaaaaaaaaaaaaaaaaaaggtaacaagacccaagaaaagaaggaaaaaggcaatagcacgaccgataacagcgaccagtag

SEQ ID NO: 237288 - DNA, 2847 bp, synthetic construct
  misc_feature 1..2847: note = Description of Artificial Sequence: Synthetic coding sequence
  source 1..2847: mol_type = other DNA
atggtgtcccggtgtagctgtctgggggttcagtgtctcctgttgtccttgttactcctggctgcctgggaggtcgggtctggccagctgcattattccgtgtatgaggaagccaggcacggcacctttgtgggcaggattgctcaggacttgggcttggaactggccgaactggtgcagagactgtttcgcgttgcatcaaagcgccatggtgatctgctcgaagtgaacctgcagaacggcattctgttcgttaactctcgtattgatagagaagaactttgcggcagaagcgtggagtgttccattcatctggaagtgattgtggatcggcctcttcaggtgttccacgtggatgtggaggttaaagacattaatgacaacccaccccgtttctccgtgacagagcagaaactgtcgatccctgaatcccgccttttagacagtcgtttccctctcgaaggtgcttcagacgccgacgtcggtgagaacgccttgttgacctacaagctgtcacccaatgagtactttgtgttggatatcatcaacaagaaagataaggacaagtttccagtgctggttttgcgcaaactcttagaccgggaagagaacccccagttaaagctgctgctgactgcgactgatggcggtaagccagagtttactgggtccgtgtctctcttgattctagtcttagatgctaatgacaacgccccaatttttgataggcccgtgtacgaggtgaaaatgtacgagaatcaagtaaatcagactctagtgattagactgaatgcttccgatagcgatgagggcatcaataaggagatgatgtattccttctctagcttagtccctcccaccatccgacgcaagttttggataaatgaacgcacgggagagattaaggtgaatgacgcgatcgattttgaggattcaaatacatatgagatccatgtcgacgtgaccgataaaggcaaccctccaatggtgggacactgcacagtgctggtcgagctcctggacgaaaatgataattcgcctgaagtcatcgtgacaagtctttctctgcccgtgaaggaagacgcccaagttggcacagtgattgccctcatttctgtgagcgaccatgatagtggggcaaacggccaggtgacctgcagcctgaccccacacgtgccattcaaactggtgtccacttataagaactattactcacttgtcctcgattccgcactcgatcgtgagcgggtctccgcctatgagctggtggtgacagctagggacgggggtagccccccactgtgggccactgcttctgtctctgtcgaagtggccgatgttaatgataatgcacctgccttcgcgcagagtgagtacactgtgttcgtgaaggaaaacaacccccctggctgccatatttttaccgtttctgcttgggacgctgacgcgcaagaaaatgcattggtgagctacagcctggtggagaggaggctcggggagcgctctctaagttcctatgtatctgtccatgccgaaagcggtaaggtctatgccctgcagccgctcgatcatgaggaattagaattactgcagttccaggtctccgctagagacggcggtgtgcctcctcttggaagtaatctaacgttacaggtgttcgtcttggacgaaaacgacaatgctcccgcactgttggccagccccgcaggttctgcgggtggggctgtcagcgaactggtgctacggtctgtggtggctggtcacgtggtggctaaagtgagggctgttgacgctgacagtggctataatgcgtggctcagttacgagctgcaatctgccgctgtcggtgctaggataccatttcgcgtaggcctgtataccggcgaaatatctactacccgcgctctggacgaaacagatagcccgagacagaggttactggtccttgtgaaagatcatggcgagccttctctcacagcaaccgctactgtgctggtcagtctggtggaaggatcacaagccccaaaggcctcctcgcgggcatctgtaggcgttgctcccgaagtggccttagtcgatgtgaatgtgtatctgattatcgctatctgcgccgtaagctccctccttgttttaacgctactgctctatacagcactgaggtgcagcgccgcaccaacggagggcgcttgtggcccagtcaaacccactctggtttgcagtagcgctgtggggtcatggtcctatagtcaacagaggagacagagggtgtgtagtggggaaggtttaccgaaggccgacctaatggcattctccccatcgctccctccatgtccgatggttgatgtagacggggaggaccagtcaataggaggggatcattcacggaagccaaggcagcctaatcccgattggcggtattcggccagtctgagagcaggcatgcactcatccgtccacttggaggaagccggaatcctgcgggcaggccctggcggtccagaccaacagtggcctactgtgtcttctgctacaccggaacccgaggcgggtgaggtgtctcctcctgtgggcgcaggggtgaattccaactcctggaccttcaagtacggacctggtaaccccaagcagagcgggccaggagaactgcccgataaatttattattcccggatctcctgccataattagtattcgccaagaacccacaaatagccagattgacaaatctgatttcatcacattcggaaaaaaagaagaaacgaagaaaaagaagaagaagaagaaaggaaacaaaacacaagaaaaaaaggagaaggggaactcaacgacggacaactctgaccagtag

SEQ ID NO: 237289 - DNA, 2058 bp, synthetic construct
  misc_feature 1..2058: note = Description of Artificial Sequence: Synthetic coding sequence
  source 1..2058: mol_type = other DNA
atggtgtctcgttgctcatgtctaggtgtgcagtgcctgctgctgtccttgctcttgctggcagcttgggaggtaggcagtggacagttacactactctgtgtatgaggaggccaggcatgggacctttgtgggcaggatcgcccaggatcttgggttagagcttgccgagcttgttcagagactctttagagtggcatccaaacggcacggtgatctcctggaagtcaatctgcagaacggaatcctgttcgtgaatagcagaattgaccgcgaagaactttgtggcaggagcgtagagtgctctatccaccttgaggttattgtggatagacctctccaggtgtttcacgttgatgtggaagtaaaagatattaatgataacccacctaggttttcagtgaccgaacagaagcttagtataccggaaagcaggctgcttgacagccgcttcccactggaaggcgctagcgatgccgacgttggtgagaatgccctattgacttataagctgtcacccaatgagtactttgtcctggatatcatcaacaagaaggataaggacaaatttccagtactggtgcttcgcaagctgctggacagagaagagaatccacaactaaaactgctattgaccgcaactgacggtggtaagcccgagttcaccgggtctgtgagcctcctcatactggtgctggacgcaaacgataacgcccctattttcgatagaccagtgtacgaagtcaagatgtatgagaatcaggtgaatcagaccctcgtcatcaggcttaatgcctctgactccgacgaaggtataaacaaagaaatgatgtattctttttcaagtttagttcctccaactatcaggaggaaattctggatcaacgagcggaccggggagataaaggtaaatgacgctatcgactttgaggacagcaacacctatgaaatccacgtcgacgtgaccgacaagggcaatcccccaatggtgggccactgtacggtgctcgtagagttgctggacgagaatgacaattcccctgaggttatcgtcacatccctgtcccttccagtaaaggaggacgcacaggtgggaaccgtcatcgccttgatctccgtgtctgaccacgactctggagcgaatggtcaagtcacttgctccctcacccctcacgtgccttttaagctcgtcagtacttacaagaactattattcccttgtcctagatagtgctctggatagagaacgtgtctctgcctatgagctagtggtgaccgcaagggacggtggctctccccctctgtgggccacggcaagcgtgagtgtggaggtggccgacgtgaacgacaatgcgccagccttcgcacaatctgaatataccgtatttgtgaaggagaacaatccacccggttgccatattttcacagtgagcgcgtgggatgccgatgcacaggaaaatgcgctagtgtcatattctctcgtggaacgaaggttgggggagagatcgctgagttcttatgtctccgtgcacgccgagtcaggaaaggtgtacgccctgcagcccctggatcacgaagagcttgagctgttgcagttccagcctagacaaccaaatcctgactggaggtactctgccagcctccgggcaggaatgcacagttcagtccatctcgaagaggcgggaatcctcagggctgggcctgggggtccggatcagcagtggcctacggtgagtagcgcaaccccagagccagaggcaggagaggtgtcacccccagtcggagcgggagtgaactctaacagctggacttttaaatacggccctgggaaccccaaacaaagtgggccaggagagctccctgacaagtttataattccaggcagtccagcgatcataagcattcggcaagagcccacaaattcacagatcgataagagcgacttcatcacctttgggaagaaagaggagacaaagaagaaaaagaagaaaaaaaaggggaacaagacacaagaaaagaaggaaaaaggtaacagcaccacagacaacagcgaccaatag

SEQ ID NO: 237290 - DNA, 2850 bp, synthetic construct
  misc_feature 1..2850: note = Description of Artificial Sequence: Synthetic coding sequence
  source 1..2850: mol_type = other DNA
atgtttggcttccagcgtcgcggattgggcacacctaggcttcagctctggctgctgctcttggagttttgggaagtgggaagtggacagctgcattatagcgtaagcgaggaagccaaacacggcactttcgtcggcagaatcgcccaagaccttgggctggagctggccgagctggtccaacgtctcttccgagtggcttccaaaacacacggcgatttgctggaggtgaacttgcagaatgggatactgttcgtgaactcacggattgacagggaagagttatgtggccagagcgccgagtgttccattcacctggaggtaatcgtggaccgtccattacaggtgtttcacgttaatgtggaagtgaaagatattaatgataacccaccggtgttctccctccgggagcagaagctgctcatagcggagagtaagcaatcggattctcgcttccccctagagggcgcatcagacgccgacatagaggaaaatgctctactgacatacaggctgtccaagaatgagtatttctccctggacagtccaactaacgggaagcaaatcaaacgattgtccctaatcctgaaaaagtctctggatagagaaaagaccccggagctgaatctgttactcacggcgacagacggtggaaagcccgaactgacgggtaccgttcgactcctggttcaggtcctggacgttaatgacaacgatcctgagtttgataagagcgagtacaaagtgtctctcatggagaacgctgccaaggaaacactcgtacttaagctcaatgccactgaccgggacgagggagtcaatggagaggtgacatacagtctcatgtctatcaaacctaacggccgtcacttgttcaccctggatcaaaataacggcgaggttagggtcaacgggactttagattacgaggagaataagttttataaaattgaggtgcaggccaccgacaaaggaactccccctatggcgggtcactgtacggtttgggtggagattcttgacaccaatgacaacagccccgaagtggcggtcacctctttaagccttcccgtgagggaggacgctcaaccctccaccgtgatagctctgatcagtgtctcagatcgggattctggcgtgaacggtcaggtgacctgtagtctaaccccgcacgtcccctttaagttagtgagtaccttcaaaaattactattcgctcgtgctagatagcgcgcttgacagggagaacgtttgggcatatgagttagttgtcactgctcgggatgggggaagcccttccttgtgggcaacagccagggtctctgtcgaggtggcagatgtgaatgacaacgctcctgctttcgcccagcccgaatatactgtctttgtgaaagagaataatccaccgggttgccacatcttcactgtctccgctagggacgcagacgcacaggagaatgcgctggtgtcttattcactagtcgagcgcagattgggtgatagagccctttcttcctacgtgtcagtgcatgcagagagcggaaaagtatacgcccttcaacctctggatcacgaagaattggagctcctccagtttcaggtatccgcccgtgacgccggtgtgcctccattgtcttcgaacgtgacactccaggtgttcgtgctggacgaaaatgataacgccccagctctgctcgccactcaggctggcagcgccggtggtgctgtaaacaaactggtgcccagatccgttggtgccggacatgtagtcgccaaagtgagagccgtggacgcggatagcgggtataatgcctggctctcttatgaactccagcccgcagccggaggttctaggataccatttcgagtgggactctacacaggtgagattagcaccacaagggctctcgatgaagccgactcgccacgccatcgacttttggttctagtcaaggatcacggggaacctgccctgaccgctaccgccacggtcttagtatccttggtggaatctggacaagcacctaaggcctctagtcgcaccctagctggcgcagcttcccctgaagccgcactagttgatgtcaatgtataccttatcatcgcaatctgcgttgtctctagcttgctggttctgacactacttctttacaccgctctctggtggtccgcaaccccaaccgagggcgcatgcgcacctggtaagccaacactcgtgtgttccagagcggtgggttcatggtcatactcccaacagcggaggcagcgggtctgttcagaagaggggccaccaaaaactgatctgatggccttttccccatccttgcccctcgggctgaacaaggaggaagaaggcgaacgtcaggaaccaggctctaaccaccctggtcagccaagacaacccaaccctgactggcgttactcagctagcctgcgagccggaatgcacagctccgtccaccttgaggaagcaggaattctccgtgccggaccaggtggtccagatcaacagtggcccaccgtttcttcggcaactcctgaaccagaggcaggagaggtgtcaccgcctgtgggcgcaggagtgaactctaactcctggacctttaaatatggcccagggaatccaaagcagtctgggcctggcgaactacctgataagttcattattcccggatcccccgctatcatatcaattcgccaagaacccacaaattctcagattgacaaatctgattttattactttcggcaagaaagaagaaacaaaaaagaaaaagaagaaaaagaaggggaataaaacacaggaaaagaaggagaagggcaacagcactactgataactcagatcagtag

SEQ ID NO: 237291 - DNA, 2826 bp, synthetic construct
  misc_feature 1..2826: note = Description of Artificial Sequence: Synthetic coding sequence
  source 1..2826: mol_type = other DNA
atggttatcatcggccctagagggccaggctcgcagcgtcttttgctttccctcctgttactggcagcatgggaagttggctctggtcagttgcactactcagtgtacgaagaggccaaacatggaacgtttgtagggaggattgcgcaagatctcggtcttgagttagctgaactggtgcccagactgtttcgggtcgcctcgaagcgacatggcgatctgcttgaggttaatcttcagaatggaattttgttcgtgaattctaggatcgaccgagagaaactgtgcggcagaagtgcagagtgttctattcatctcgaggttatagtcgaccggccactgcaggtgtttcacgttgacgtggaagtgaaagacattaatgataatcctcccgtttttagagagcgagagcagaaggttcctgtttcggaatcggcccctctggacagccattttccccttgagggcgcttccgacgccgatatcggcgttaatagcctgctcacatacgccctaagcctcaacgagaacttcgagctgaaaatcaaaactaaaaaagacaaaagcatcctgcccgagctcgtgttgcggaagctgctggaccgcgagcaaacaccaaaactcaatcttctcttgatggtgattgacggaggcaaacccgagctcaccggctctgtacagatccaaattacggtattggatgttaatgataacggccctgccttcgacaaaccttcctataaggtggtactgtctgagaatgtgcagaatgatacaagagtcattcagcttaatgcctctgaccccgacgaggggctgaatggggagatcagctacggcattaaaatgatcttacccgtgtcagagaaatgcatgttttctattaaccccgataccggagaaatccgtatttacggcgaacttgacttcgaggagaacaatgcctacgaaattcaggtcaacgctatcgataaagggataccctccatggctggtcactccatggtgctcgtcgaagtgctcgatgtgaacgataatgtgcctgaagttatggttacatctctgagccttcctgtgcaggaggatgcccaggtgggtacagtgatcgctcttatctcggttagtgaccgagatagcggagcaaacggacaggtaatctgcagcctgacgcctcacgttccatttaagctcgtgtccacttataaaaactattactcactggttctcgatagcgctttagacagagaatcggtaagcgcctacgaactggttgttacggcacgcgacggaggatccccatcgttgtgggccactgccagggtttccgtagaggtggcagacgtgaatgataatgcaccggctttcgctcagccggagtacaccgtgtttgtcaaagaaaataatccccctgggtgccatattttcaccgtatcagcctgggatgcagatgcccaaaaaaacgctctggtttcctatagccttgtggagagaagggtgggcgagcatgccctgtctagctacgtgtcagtgcatgctgagagcggtaaagtatacgctttacagcccctggatcacgaagagctggagttgctgcagttccaggttagtgctcgtgacgccggtgtgccccctctgggctctaacgtaaccctgcaagtgtttgtgctggacgaaaatgataacgcaccagccctcctggccacccccgcaggcagtgccggtggtgctgtgtccgaactggtgcccaggtcagtcggtgccggacatgttgtcgccaaagtgcgggctgtggacgccgactcaggatacaatgcttggctgagctacgagttacagcctgctgctgttggtgctcacattcctttccacgtgggactttacacaggagagatatctacgacacggatcctggatgaggcggatgcgccacgacataggctgctggtacttgtgaaagaccatggtgagccagcgctaactagcacagcaacggtgctggtttctttggttgagaatggccaggcacccaagacatcctcccgcgcatcagtaggcgctgttgatcctgaagcagcgctggtcgacatcaacgtgtatctgatcatcgctatttgtgctgtcagttcccttctggtgcttaccctgctcctgtacactgctttgcgctgcagcgctccacccactgtttctcggtgcgctccgggaaagcccacgctggtgtgcagctccgcagtggggtcctggagctacagtcaacaacggcgtcagagagtttgcagcgctgaatcacctcctaagacagacttaatggcattctccccgtccctgcagctaagcagggaggactgcctcaatcccccaagcgagcccaggcagcccaaccctgattggcggtactccgcatccctaagagccggaatgcactctagcgtacatctagaggaagctggtatcctgcgtgcagggccaggagggccagaccagcagtggcccactgtgagtagcgcaacacccgaacctgaggctggtgaggtgagtcctcctgttggcgcaggtgtcaactcgaactcatggacctttaagtacgggcctggcaaccctaagcaatccggcccaggggaactcccggataagtttattatacctggttcccccgcaattatttccattcggcaggaacccacaaattcccagattgataaatcagacttcatcacctttggcaagaaagaggaaaccaagaagaaaaagaaaaagaaaaaaggaaataagacccaagaaaagaaggagaaaggaaattccaccaccgataattccgatcagtag

SEQ ID NO: 237292 - DNA, 2853 bp, synthetic construct
  misc_feature 1..2853: note = Description of Artificial Sequence: Synthetic coding sequence
  source 1..2853: mol_type = other DNA
atgctgtcaagttggcaggggggacccagaccacggcagctgttgttgtggctgctgattttagccgcatgggaaacagggagcggccagctccactacagcgtgcctgaggaggctaagcatgggacattcgtgggcagaatcgcacaggatctgggactcgaactcgccgagttggtgcccagactcttcagagtggcctccaagaggcacggtgatctgcttgaggtgaacctgcaaaacggaatactcttcgtcaattccaggattgacagggaggagctctgcgggcgatctgcggagtgtagtatccatcttgaggtgattgtcgatcgaccactgcaggtttttcacgtggaagtcaaagtccgtgatatcaatgacaacccccctatcttcccagaatctaagaagcgcattattatcgctgagagtcgaccaccagagacgagatttcccttggacggagctagtgatgccgatattggagtgaacagtgcactgacataccggctggaccctaatgactattttacactggacgctcagaattcattggagcagatgtcaagtcttagtcttgtcttgcgaaagaccctggatagggaagagattcaggagcacagcctgcttctgaccgcaagcgacgggggaaagcccgagctgaccggaacagttcagttactgatcaccatccttgacgtaaacgacaacgcccctgagttctatcagagtgtgtataaggtcaccgtgctcgagaacgccttcaacggcacactggtcatcaagctcaatgccaccgatcccgatgacggtactaacggggacattgtttatagtttccggagaccagtgtggccagctgtagtctatgcttttaccatcaacccaaataacggggagattcgcacgaaggggaaacttgatttcgaggaaaagaaactatacgaaatttccgtcgaagcagtagataaaggtaatatcccaatggccggacattgtaccctgttagtggaagtgcttgacgtcaacgacaacgcccctgaggtgactattacttccctttccctgcctatcagagaggacactcagcccagcgcaattattgccctaatttcagtgagtgatcgggactctggaagcaacggtcaggtcacttgcacgctcaccccacatgtcccatttaaattagtatcaacatacaagaattattactcccttgttctagatagcgctctggaccgggaatctgtgtccgcgtacgaactggttgtgactgctcgggatggtggctccccgtccctctgggctaccgcaagcgtgagtgttggcgtggcggatgttaatgacaacgcccctgcctttgcccaaccagaatatactgtctttgtgaaagagaacaacccgcctggctgccatattttcaccgtgtcggctcaggacgcggacgcccaggagaacgccctcgtgagctatagcttggtcgaacgtagggttggagagcgagcgctcagttcctacgtgtcagtacatgccgaaagtggtaaagtctatgccttacagcccctggatcacgaagagcttgagctattgcagtttcaggtgtcggcacgagactcaggagtgccccctctgggcagcaatgtgacattgcaggtgttcgtcctggatgagaacgacaatgcacccgctttacttacacctggggcaggctctgccggtggcacagtttctgagctgatgcctcgatcagtaggtgccggacacgtagtcgcaaaagtaagagctgtggatgccgacagtggctataatgcttggctctcatacgaattgcaactcgccgctgtgggcgctagaatcccttttcgtgtgggcctgtacactggtgagatctctaccactcggccactggatgaagtcgacgcccctcatcacaggctgctcgttttagtgaaggatcacggcgaaccagcactgaccgcaacggccactgtcctgctttcattggtggaaagcggacaggccccacaggcatcaagcagagcaagtgctggagccgtgggtcctgaagccgctttagttgatgtaaatgtgtatcttatcatagccatttgcgcagtttcaagcctgctggtgcttactctgctgctgtatacagctctgcggtgttccgcaccaccgacagagggggcatgcgcccctggcaagcccaccttggtatgctcttccgcggctgggagttggagttattcccagcaaagacgccctcgcgtgtgttccggggaaggtcctcataaaaccgatcttatggcctttagcccctcccttcccccttgcctgggctctgccgaaggtaccggacaaagagaggaggattccgagtgcctgaaagagccccgacaacctaatccagactggcgctactcagccagccttagggccggtatgcatagcagcgtgcacctcgaagaagccggtatcctccgtgctggccctggaggaccagaccaacagtggccaactgtcagttccgcgacccctgagcccgaggctggcgaggtgtccccacctgtgggagcaggagtaaatagcaattcctggaccttcaagtatgggccaggaaaccccaaacagtctggccctggcgaacttcctgataaattcatcattcccggatctccagctattatatccattcgccaggagccaaccaatagccagattgacaagagcgatttcatcacattcgggaaaaaagaggagaccaaaaagaagaaaaaaaagaagaaaggaaataagacacaggagaaaaaagagaagggtaacagtacaacagataacagcgaccagtag

SEQ ID NO: 237293 - DNA, 2715 bp, synthetic construct
  misc_feature 1..2715: note = Description of Artificial Sequence: Synthetic coding sequence
  source 1..2715: mol_type = other DNA
atgcttagcagctggcagggtgggccacggcctaggcagttgctgctctggctgcttatcctggcggcttgggagaccggctctggtcaactgcattatagcgtgcccgaggaggccaaacatggcaccttcgtgggcaggattgctcaggacttgggtctggagctcgctgaactggttcctcgtctgtttagggtggccagtaagcggcacggggacctgctcgaggttaatctacagaacggtatcctgttcgtgaacagtcgcatcgaccgcgaagagttgtgtggcaggtcagccgagtgcagtatacatcttgaggtgatcgtggaccgccctttgcaagtgttccatgttgaggttaaagttagggacatcaatgataaccctcccattttcccagagtcaaaaaagcggatcattattgccgagagccggcctccagagacccgtttccctctcgatggggctagcgacgccgatatcggggtgaacagcgcactgacgtatcggctggaccccaacgattattttacattggacgcgcagaactccttggaacagatgagttcactgagcctggtcttacgaaaaactttggatcgagaggagattcaagaacactccttgctgctgaccgcctcagatggaggcaaacccgaactcactgggactgtgcagctgctcattacaatcctggacgtgaatgacaatgcacctgagttctaccagtctgtttataaggtgactgtgttagaaaatgcctttaacggtaccttggtgatcaaattaaatgccactgatcctgacgacggaactaacggagatatagtttattctttccgcaggccagtctggccagccgtagtttacgcctttactatcaatcccaataacggtgaaatccgcacgaaaggaaagctggattttgaggaaaagaagctatacgaaattagcgtggaggcagtagacaagggaaacataccaatggcagggcactgcaccctccttgtggaggttctcgacgtcaacgacaatgccccagaggtcactattaccagcttatcgctccccatcagagaggatacccagccctctgcaattatagctctgatctccgtcagcgatagggacagtggaagcaatgggcaagtgacctgcaccctgacccctcacgtgcctttcaagctcgtgtcaacatataaaaattattatagtctcgtgttggactctgccctggatagggagtcggtgtctgcgtatgagctggtggtgacagcgagggacggcggtagtcccagtttgtgggccacggcaagtgtgtctgttggagtggcagatgtgaatgataacgctcccgcatttgcacagccggaatatactgtgtttgtgaaggagaacaatccacccggttgtcatatcttcaccgtgtccgctcaagatgctgatgcacaggagaatgctctcgtgtcctacagcttggtcgagagaagagttggagaaagggccctcagcagctatgtgtctgtccatgctgagtcaggaaaagtttatgcattacagcccctcgaccacgaggaattggagttgctccaatttcaggtgtcggcacgggattctggtgttccccctctcgggtcgaacgtaactctgcaggtgttcgttcttgacgaaaacgacaatgcacctgccctcctgactcctggggcagggtcggcaggcggaacggtctctgagctcatgccacgttccgtgggcgcaggtcatgtagtcgcaaaggtgagggctgtggatgcagatagcggctacaacgcgtggttatcctacgagctgcagctcgccgcagtcggcgctcgaataccttttcgggtcgggctttatactggtgagatctcaaccacccgacctctggacgaagtcgacgccccacaccaccgcctgctcgttcttgtcaaagatcatggcgagcccgctcttaccgccacagccactgttcttctatcactggtcgaatccgggcaggccccacaggcttcctctcgcgcatcagccggagccgtgggcccagaggctgcattagttgacgtcaacgtgtatctcataattgctatatgcgctgtgtccagtctgcttgtgctaaccctactgctttatactgcgttgaggtgctccgctccccctaccgaaggtgcatgcgctccagggaagccaacactagtttgcagttcggccgctggctcatggtcatactcccagcagcgaagaccgagggtctgcagcggagaaggtcctcataagaccgacctgatggccttcagtccatcgcttcctccctgcttgggctccgctgagggaactgggcagcgggaagaagacagtgagtgcttgaaagagcccagacagccgaatcctgattggagatacagtgcaagcctgcgggcagggatgcacagcagcgtgcacctagaggaggcgggaatcctgcgagccggaccgggtggtcccgaccagcagtggcccaccgtatcttctgctaccccagaaccggaggccggagaagtgagccctccagttggcgctggggtcaacagtaacagttggactttcaaatatggtcctggaaaccctaagcagtccggacccgagcctaaaaaacaaactcaggtcagcttcctactgcgaagaaagggcgaagcaagtcagcctaggcaatag

SEQ ID NO: 237294 - DNA, 2475 bp, synthetic construct
  misc_feature 1..2475: note = Description of Artificial Sequence: Synthetic coding sequence
  source 1..2475: mol_type = other DNA
atggcatctagtatcaggcgtggcagaggtgcctggacaaggctgctgtccctcctcctgctcgctgcctgggaagttgggtcaggccagctgagatactcggttcccgaggaagcaaagcatggcaccttcgtcgggaggatcgcccaagacctgggcctggaactggaagaactagtgccgcgtctgttcagagtggctagcaaacgccacggggaccttctggaggtgaatctgcagaacggaatactgttcgtgaactccaggatagatcgggaggaattgtgcggaagaagtgccgagtgctcgatacatgtggaagtcattgtcgatcgtccgttacaggttttccatgtggaagtggaggtgaaggacatcaatgacaacccccctatcttccccatgactgttaaaacaatccgattccccgagagcagactcctggattcacgattcccactagagggcgcttccgatgccgacattggagtgaatgctcttctctcctataaactgagctcttccgagttcttctttttagacatccaggcgaatgacgagctttcagaatctttgtcactcgtattgggaaagtcactagatcgggaagaaactgccgaagttaatctgctgttggttgccacagatggcggtaaacccgagctcactggcacagtgcagatcttaatcaaggtgctagatgtgaacgataacgagcccactttcgctcaaagtgtgtataaggtgaagttacttgagaacacagccaacggaaccctggttgttaagctaaacgcatcagatgctgacgaaggcccaaactccgagattgtttactctctgggctccgacgtgtcaagcacaatccaaaccaaatttaccatcgatcctatttcaggggaaatacgtacgaaagggaagttagactacgaggaggccaaaagctatgagatccaagtaaccgctactgacaaaggcacaccatctatgtcagggcattgcaagatttcacttaagttggtggacatcaatgataataccccagaagtctcgataaccagtctgagcctaccaataagcgagaacgcctctctgggtaccgtgattgctctcatcaccgtcagcgaccgcgactccggaacaaatggacatgtgacctgttcactgactccccacgtgccatttaagctggtgtccacgttcaaaaactattactctttggttcttgacagcgctttagaccgcgaaagtgtatccgcatacgagctggtagtgactgccagggacggcggatccccatcactgtgggcgactacatcagtgtccattgaagtggcggacgtcaatgacaacgcacccgcattcgctcaacccgaatatacagtgtttgttaaggagaataaccctcctgggtgtcacattttcactgtctctgcctgggatgcagatgcgcaggaaaatgcgctcgttagctactcactggttgagcgtcgtgtaggagagagggcgctgagttcttatgtctcagtccatgccgaaagcggcaaagtctacgcactgcagccccttgatcatgaggaggtggaattgctgcagttccaggtgagcgccagagacgccggagtgccgccactcggctccaatgtcacactacaggttttcgtacttgacgagaacgataatgcaccagccctcctggcccctcgcgcaggcacagccgctggcgctgtctcggagctcgtgccgtggagcgtgggtgctggtcacgtagtggcaaaggtcagggccgtggacgccgactcagggtataatgcctggctgtcttatgaactgcagcttgggacgggctcggcacggattcccttcagagtcggactttatactggcgagatttccactacccgggctctcgatgaggcagacagccctaggcatcggctcctggtactggtgaaagatcatggtgaaccagctctgacagcaactgcgaccgtcctggttagcttggtcgagagcggtcaggctcctaaggcctcttcacgagcttgggtcggagccgctggcagtgaggccaccctggtcgacgtgaacgtatatctgattattgcaatatgtgccgtgtctagtctgttagtgctgacagtcctgttatacacagctcttcgatgctcggtgccaccaactgaaggcgctcgtgcaccaggaaaaccaaccctggtgtgctctagcgcagttggaagctggagctacagtcagcaacgtcgacagagggtgtgctctggtgaggatccacccaaaactgatctcatggcctttagtcccagtttgtcccaaggcccagactccgctgaggaaaagcagttaagtgaatctgagtacgtcggcaaagtgtcgcttctattattcctggcaaattccaagattgtgcttttcaagaagttctatatgatttccacatcctatcttgattcctag

SEQ ID NO: 237295 - DNA, 2847 bp, synthetic construct
  misc_feature 1..2847: note = Description of Artificial Sequence: Synthetic coding sequence
  source 1..2847: mol_type = other DNA
atggcgtcatcgatacgaagaggcaggggtgcctggactagactgctgagtctgctcttactcgccgcttgggaggtgggcagcggacagttacgctacagcgttcctgaagaagccaaacatgggacctttgtgggccgtatagcacaggaccttggcctcgagctcgaggagttggtgccacgtttattccgggtggcgtcgaaaaggcacggagatctgttggaggtgaatctgcaaaatggaatcctgttcgttaatagccggatcgaccgggaggagctgtgcggaagatcggccgaatgctccatccatgttgaagtgatagttgaccgccctctgcaagtctttcacgtcgaagtagaagtgaaagacatcaatgacaatccacccattttcccgatgaccgtcaaaaccatcaggttccctgagtcccgtctcttggattcgagattccccctggagggcgcaagtgatgccgatatcggggtgaacgctttactgagttacaaactgagcagcagcgaattcttctttctcgacatccaggccaatgacgagctgtccgagagcctgagcctggtgctgggaaagtctctcgatagggaagagacggctgaggtgaacctactcctagtggcaactgacggcggtaagccagagctgactggaaccgtgcagatcctcatcaaagttctggatgtcaacgataacgagcccacatttgctcagagtgtgtacaaagtgaaactgctagagaacacagccaatggaacccttgtcgttaagctgaatgcttcggacgctgacgaaggaccaaattcggaaatcgtgtacagcctgggttccgacgtatcatcaactatacagacaaagtttacaatcgatcctatctcgggcgaaatcagaacaaaggggaaactggattatgaagaggcaaagagctacgagattcaagtgaccgcaaccgacaagggcactccaagtatgtctggacactgcaagattagcctgaaactggtggacattaacgataacacacccgaagtcagcattacttcactgtcactccctattagcgaaaacgcctcccttggcaccgtgatcgcgttgataacggtatccgatcgcgatagcggcaccaatggacacgtgacatgttcgttgaccccccatgtgccgttcaaacttgtgtccactttcaagaactactactctcttgtgcttgattcagctctggatagagagtccgtgagcgcctatgaattagtggtgacagctcgtgatggtgggagccccagcctctgggctactacttccgtgagtatcgaggtagctgatgttaatgacaatgctcccgcatttgctcagcctgaatacactgtattcgtaaaagagaacaacccccctggttgccatattttcaccgtgtcagcttgggatgccgatgcccaggaaaacgccttggtatcctatagtttggtggagagacgggttggggaaagagcgcttagcagctatgtgtcggtgcatgccgagagtgggaaggtgtacgcactgcagcccttggaccacgaagaggtggaattacttcagtttcaggtttccgccagggacgcgggagtcccccctctcggttctaacgtaaccctgcaggtgttcgtgctcgacgagaacgacaacgctccagccctgcttgcaccacgggctggcaccgccgctggagctgtaagcgaactggttccctggagtgtgggggctggccatgtcgttgctaaggtgcgcgctgtggatgctgacagcggctacaacgcttggctgagctacgagctgcagttaggcacaggctccgccagaattccctttcgagttgggctgtatacgggagagatttccaccacaagggccctcgatgaagccgactccccaaggcacaggctgttggtcctggtgaaagatcacggcgagcccgctctcacggcaactgctacagtcctcgtctcgttggtggagagcggccaagctccgaaagctagttctcgggcttgggtcggagccgcaggttctgaagccaccctggtggacgtgaatgtctatcttattatcgccatctgcgcagttagctctctgctggtcctgactgttcttctctacaccgcgttgagatgctcagtcccacctaccgagggagctagggcccctggtaagcctaccctggtctgcagcagcgccgtaggttcttggagttatagtcagcagcggcgtcagcgggtctgttcaggtgaggacccgcctaagactgacctgatggccttttcaccttcattatcccaaggtccggactcagctgaggaaaagcagctgagcgaatccgagtacgtaggaaagcccaggcagccaaatcccgattggcgctattccgcaagtttgcgtgcaggcatgcatagctcggtgcacttggaggaagccggaatcttgagagccggaccagggggaccggaccagcaatggcccactgtgtcctctgctacccctgaacccgaggccggagaggtctctcccccagttggggctggcgtgaattccaatagctggacatttaaatacggccctgggaatccaaagcagagcggcccaggggaactgccagataagtttataatccccggatcacccgctattattagcattagacaggaacccacgaattctcaaattgacaaatcagactttattacatttggaaagaaggaggaaaccaagaaaaaaaagaagaagaagaagggaaacaaaactcaggagaagaaagagaagggcaactctaccaccgataactccgatcagtag

SEQ ID NO: 237296 - DNA, 2853 bp, synthetic construct
  misc_feature 1..2853: note = Description of Artificial Sequence: Synthetic coding sequence
  source 1..2853: mol_type = other DNA
atgctcttttcttggcgagaggaccctggcgctcaatgcctgctgctctcccttctcttgttagctgcgtctgaagtgggcagcggccagctgcattatagcgtctctgaggaggcgaagcatggaaccttcgtaggacgtattgcccaagacttgggattggaattggctgaactggtgccacgcttattccgggtggcaagcaagcgccatggcgatcttctcgaggtgaacctgcagaatggcatactgttcgtgaactcccggatcgacagagaggaactttgcggacgatccgccgaatgctcgatccacctggaggttattgtggataggccgctgcaggtgtttcacgtagaagtggaagtgaaagacattaatgataatgctcccgtgtttccaatggccgtgaaaaacctcttcatctccgagtcccggcagcctgggagtcgctttagccttgagggcgcaagtgacgccgacatcggcacaaacagtctgcttacttattcccttgactcaaccgaatatttcaccttagatgtcaagcgcaacgacgaggaaataaaatccttgggcttagtcctcaagaagaatctgaacagagaggataccccaaaacattatctccttattaccgcgattgatggagggaagccggaactgaccggaacaactcaactaaagattacagtgctggacgttaacgacaatgcgcctgccttcgagaggaccatttacaaggtacgacttttggagaatgctccaaacggaactctggtggtcacagtgaatgcaaccgacttggatgaaggggttaacaaggatattgcctacagcttcaataccgatatgagtgctgacatcctcagcaaattccatttggatccagtgaacggacagatctcggtgaaaggaaacatcgattttgaagaaagcaagagttatgagattcaggtcgaggctactgacaagggtaacccacctatgtccgatcactgcaccgtcctgctcgaaatcgtggatatcaacgacaatgtgcctgagctggtaatccagtccttatctctgccggtcctggaggattcacccctatcaacagtgattgccttgatcagcgtcagcgacagggatagtggcgtcaatgggcaagtaacatgctcattaacaccacatgtacctttcaaacttgttagcacctttaagaactactatagcttagtactggacagccctctcgatagggaatccgtcagtgcctacgaattggttgtgaccgctagggacgggggtagcccatctctgtgggccactgcctctgtgagtgtggaggtagcggacgtaaacgacaacgccccagccttctctcagtcggaatacacagtcttcgtgaaagagaataacccgcctggctgtcacatttttacagtttccgcccgagacgcagatgcccaagagaacgcccttgttagttacagcctagtcgaaaggcgcgtaggggagcgggctttatcatcctatgttagcgtgcacgctgagtctggcaaagtctacgctttgcagcctttagatcacgaggagttagagctgctgcagtttcaggtaagcgccagggatgccggtgtccctcctctcggctctaacgtgacattgcaagtatttgtgctcgacgagaacgacaatgcaccagctctgctcatgcccagagtgggaggtatcggcggtgctgttagcgagttggtgcctcgttctgtgggtgcagggcacgtcgtcgcaaaagtgagggccgtcgacgcagactcaggttacaacgcttggctttcttacgaactccagccagggaccggtggcgcaagaattcctttcagagtcggactgtacactggggagatcagtacgactcgggctcttgatgaggttgacgcccctaggcatagattgctcgtgctggtgaaagatcacggagaaccatcactcacggctacagccaccgtactcgtgtctctggtggagagtggacaggcgccaaaggcatcatctcaggcctccgctggcgctaccggcccagaagcagctcttgttgacgtgaatgtctatcttatcgtagccatatgcgccgttagttccctgttggtactaacactattactatataccgcattaaggtgtagcgcccctccaactgaaggggactgtgggcctggaaaacccaccttggtgtgttctagcgcagtagggtcctggagttatagtcagcagaggcagcagagagtctgcagcggcgaggggttgcctaagactgacctgatggctttcagtccttctttgccgccttgcccaatatcgcgcgaccgcgaggagaaacaggacgtcgatgtggacctttctgctaagccccgtcagccgaaccccgactggcggtactccgcttcgttacgggcaggcatgcacagttctgtgcatctcgaggaagccggtatcttgcgtgcaggcccagggggaccagaccagcaatggcccactgtgagcagtgccactcccgaacccgaggctggtgaagtgtcgccccctgtaggggcaggtgtgaattccaattcttggacatttaagtatgggcctggcaatccgaaacaaagtgggcctggcgagctgcccgataagttcataattccaggtagccctgcgattatttctatacgccaggaacctaccaatagccaaattgacaaatcagatttcatcacatttggaaaaaaagaggagacaaaaaagaaaaagaaaaagaaaaaggggaacaaaacccaggaaaagaaagagaagggaaattccaccaccgacaattctgaccaatag

SEQ ID NO: 237297 - DNA, 2475 bp, synthetic construct
  misc_feature 1..2475: note = Description of Artificial Sequence: Synthetic coding sequence
  source 1..2475: mol_type = other DNA
atgctgtttagctggcgcgaagaccccggagcccagtgcctactgctgagcctgctgttgttggccgctagtgaggtcggctcaggccagctgcattactcggtgtccgaggaggccaaacatggcacctttgtgggcagaatagcccaggatttgggcctggaactggctgaattggtgccaagattatttcgagtggcaagcaagagacatggcgatctgctggaggtaaaccttcagaacggaatcctgttcgtaaattctaggatcgatcgagaagaactgtgcggaaggagcgccgaatgctctattcatcttgaagtaatcgtcgacaggcccctacaagtgtttcatgtagaggtggaggtgaaagatattaacgacaacgcacccgtctttccaatggccgtgaaaaatctgtttattagcgaaagtagacagcctggatctcgcttcagcctcgaaggagcatccgatgctgacataggcactaactcacttcttacctattcgttggattccacagagtactttactctggatgtcaagcggaacgacgaggaaataaaaagcctcggactggtgctgaagaaaaacctgaacagggaggatacacccaaacactatctgttaattactgctatcgacgggggtaaacctgaactcactggaacgactcagttgaagattaccgtcctcgacgtgaacgacaatgcacctgccttcgagcgcacaatttataaagtccgcttgttggagaatgcacctaatggcacattagtggtgaccgtcaacgcgaccgacctcgatgagggcgtgaacaaggatattgcttactcctttaacaccgacatgagtgcagatatcctgagtaagtttcacctcgacccagtaaatgggcaaatcagcgtcaagggaaatatcgacttcgaggagagcaaatcatacgagattcaggtcgaagccaccgacaaggggaacccccctatgagtgaccactgcacagttctacttgagatcgtggatatcaacgacaacgtgcccgagctcgtgatacagtcactatcgctcccggtgctggaggattctcctctctcgaccgtgatcgctctgatctctgtgagtgacagagactccggtgttaacggacaggttacgtgctcgttgacccctcacgtgcctttcaagctggtgagtacatttaaaaattattattctctggttttggattcaccacttgaccgcgaaagtgtgtcggcttacgaactcgtggttactgccagggatggaggcagcccctctctctgggctactgcgtctgtctctgtcgaagtggcggacgtgaatgataacgctcccgcattttctcaaagcgagtacaccgtgtttgtgaaggaaaacaatccacccggatgccacattttcacagtgtccgcaagagatgccgatgcccaagaaaacgcgcttgtttcgtactctctggttgaacggcgagtcggcgagcgcgctctgtcctcatacgtttccgtgcatgccgagagcggcaaagtctatgccctgcaacctctggaccacgaggagctggaacttttacagtttcaggtctcagcccgagatgcaggggtgccaccattgggctccaacgtgacattacaggtctttgttctcgatgagaatgacaatgctcccgcacttttaatgcctcgtgtggggggaatcgggggtgcagtttccgaactggtcccaagatctgttggagcaggccacgtggtagcaaaagtcagagctgttgacgctgactcgggatacaacgcatggttgtcctatgaacttcagcccggaaccggcggtgcacggattcccttcagagttggactgtatactggcgagattagcacaactcgcgctcttgatgaagtcgatgccccaagacatagactgctcgtgctggtgaaagaccatggcgaacccagccttaccgccaccgctactgtcttagtgagccttgtcgaaagcggccaagctcctaaagcaagcagtcaggctagtgccggtgccacaggccctgaggccgctctggtcgacgtgaacgtatacctgattgtcgccatctgtgctgttagttccctgcttgtgctgactctgcttttgtatacagccctgaggtgctccgctccccctacagagggagactgtggtcctggcaagcccacactcgtatgcagttctgccgtgggctcttggtcatactcacagcagcgacagcagcgcgtctgcagcggcgaaggcctgcccaagactgacctgatggcattttccccatcgctgcctccctgccctatctcccgcgaccgtgaagagaagcaagatgttgatgtcgatctttccgctaaagtgtcaaacttttacctcttctttcccaagtgcctgtgcttttcattccttaatgtgtctactcctcttgaaatccattag

SEQ ID NO: 237298 - DNA, 2451 bp, synthetic construct
  misc_feature 1..2451: note = Description of Artificial Sequence: Synthetic coding sequence
  source 1..2451: mol_type = other DNA
atggtgtacagtcggagaggatctctcggaagccgtctgctccttctttggctgctcctggcctattggaaggcgggaagcggtcagctacactattccattcccgaggaagccaaacacggaacttttgtagggcgaatcgctcaggacctcggccttgaactggcggagcttgttcctcggctgttcagagtcgcatctaagggaaggggggacctcctagaggtgaatctacagaatggcattctctttgtgaatagccgcatcgaccgagaagaactatgtcgcagacgcgctgaatgtagcatacacctcgaggtaatcgttgatcggccactacaggtgttccacgtcgaagtcgctgtgaaggatattaatgacaatcctcctagatttagtcggcaggaacagcgcctgttcatattggagagtagaatgcccgattcccgctttccccttgagggggcatctgacctcgacatcggggcaaatgcacagctgaggtacagactgaaccccaatgagtatttcgacctggatgtcaaaaccaacgaggaagagacaaattttctcgagctggtactcaggaagagcctggacagagaagaaacccaggagcaccgccttctcgttatcgcaaccgacgggggaaagcctgagttaaccggcactgtccaactcctaataaacgtgctggatgcaaacgataatgccccagagttcgataaaagtatttataatgtcagattgcttgaaaacgcaccaagcggtacgctggtgatcaagttaaatgccagcgacgccgacgaaggcattaacaaagagattgtttattttttcagcaatctcgttttggatgatgtgaagtcaaaattcatcataaatagcaacacaggagaaatcaaagtaaacggtgagctggactatgaagactataactcttacgaaatcaacatcgacgccatggataaatcgacctttccgttgagcgggcattgcaaggtcgtggtaaagcttcttgatgtcaacgacaacacaccagaaatggccatcactaccttgtttttaccagttaaggaagatgcacctctgagcaccgtgattgccttgatcagcgtgagtgacagagacagcggtgccaatggccaggtgacatgttcactgatgccccacgtgcctttcaaactggtgagcacttttaagaactattattctctggtcctcgattctgctttagatagggagtcagtgagcgtctatgagctggtggtgacagcccgtgatggaggcagcccctcgttatgggcaaccgcctctgtgtcagtggaagtcgcggacgtgaacgataatgcgccagcatttgcgcagccacagtataccgtttttgtgaaggaaaacaaccccccagggtgtcacatcttcacagttagcgcgcgagacgcggatgcacaggagaatgctctggtttcttattctctggtcgagaggcgcgtgggcgagagacctttgtcttcctatgtatcagtgcatgcagagagcggcaaagtctacgctctgcagccgctggatcatgaggaggtggaactgttgcaatttcaggtctccgctcgtgatgccggtgtgccaccccttggaagcaatgtaacactccaggtcttcgtcctggatgagaacgacaacgctccagccctgctggtgccacgggttggcggaactggcggtgccgtcagtgaactggtgcccaggagcgtgggcgctggacatgttgtggctaaagtcagggccgtcgatcctgactctggatataacgcctggctaagttacgaactgcaacccgcaccgggaagcgcaaggattcccttcagagtcgggctgtatacaggcgaaatctcgacaacccgctcccttgacgaaactgaggcaccaagacacaggctgctcgtactcgtgaaggaccatggggaacctccactgaccgccacggcaacagtgctggtgagcctggtggaaagcgggcaggcccctaaagcctcatctcgggcaagcgctggagccgtgggtccagaggcggcactcgtagatgttaacgtttaccttataatagctatctgcgccgttagcagcctgcttgtcctgaccttgcttctgtatacggccttgcgctgcagtgcccagcccacggaagccgtttgcacgcgcggaaaacccaccctgctgtgttctagcgccgtgggatcatggtcttacagtcagcagaggagacagagggtgtgttccggagaagcaccacccaaaacagatttaatggccttcagcccctccttgccccagggccctacgagtaccgacaatgtctccttccttattcttacctctatatttccttcccagttctcaaacatcaaatgtcatatccaccccctgttcctctatctgaagattatgtcttag

SEQ ID NO: 237299 - DNA, 2673 bp, synthetic construct
  misc_feature 1..2673: note = Description of Artificial Sequence: Synthetic coding sequence
  source 1..2673: mol_type = other DNA
atggtgtatagcaggcgagggtccttgggtagcagactactgctcctttggctcctgctcgcatattggaaggctgggagtggccagttgcactacagcatcccggaagaggctaaacatgggactttcgtgggcaggatcgcccaggatctggggcttgaactagccgagctcgttccaaggttgtttagagtagcatctaagggacgtggtgacctgttggaagtgaacttacaaaacggtatcttgttcgttaattcccgtatagacagggaggaactgtgcagacgccgagctgagtgctcaattcacttagaggttatagtcgataggcccctccaggtatttcacgtggaagtcgcagtcaaggacataaacgataacccgcctaggttcagtaggcaggaacagcgcctttttattcttgaaagtagaatgccagatagccgcttcccacttgagggagcttccgacctggatataggggctaacgcacagctgcgatatcggctcaatcccaacgaatacttcgacctggacgtcaagactaacgaggaagagaccaactttctggaacttgtcttgaggaaatctttggacagggaagaaacgcaggagcatcgactgctcgtgattgcaacagatgggggaaagcccgaattgaccggcacggtgcagctgttgatcaatgtgctcgatgcaaacgacaacgcccctgagtttgacaagtccatttacaatgtgcggctgctggaaaacgcacctagcgggaccttagttattaagctgaacgcatccgatgcggatgaagggatcaataaggagatagtgtatttcttctctaacctggtgctggacgacgtgaaatctaagtttatcatcaactccaacacaggagagatcaaagtcaacggggagctggactacgaggattacaactcttatgaaatcaacattgacgctatggacaagagtacattcccactctccggtcactgtaaagttgtcgtgaaactacttgacgtgaacgacaacacccctgagatggccattacaaccctgttcctccccgtcaaggaagacgctcccctaagtacagtgatcgctctgatttccgttagtgatagggacagcggggcaaacgggcaagttacctgctctttaatgccacacgtgccatttaagctggtcagcacattcaaaaactactattcactcgtactggactcagctcttgaccgagagtccgtctcagtttacgaattggttgttaccgccagagacggcggttccccttccttgtgggccacggccagtgtgtcagtcgaagtagccgatgttaatgataatgccccagcgtttgcacagccacagtacacagtatttgtgaaagaaaataacccgcctggatgtcacattttcactgttagtgccagagatgccgacgctcaggagaacgcactggtttcatattcattagtcgagcgtagggtaggggagcgccctctgtcaagctacgtgtcagtgcatgccgaaagcggaaaagtctatgcgctccaacctctggaccatgaggaggtagagctgttacagttccaggtgtcagctagggatgccggtgtcccacccctaggtagcaatgtgactctgcaagtgtttgtcctagatgagaacgacaacgcccctgccttacttgtgccccgagtgggaggaaccgggggagctgtgagcgaactggtgcctaggtcagtcggggctgggcatgtggtggctaaagtgcgagccgttgaccccgatagtggatacaacgcctggctatcgtatgaattacagccggctccaggcagcgctcgtatccccttccgcgtgggactctatactggtgaaatctctacaacccgaagcttggatgaaacagaagccccacggcacagattgctagtcctcgtgaaagaccacggagagcccccattaaccgcaacggctaccgtcttagtctccctggtagaaagtggccaggccccaaaagcatcttcacgcgcttcagccggtgctgtcgggccagaggccgctttggtggatgtgaacgtctatctgatcattgccatatgtgccgtctcttcattgctggtgctgaccctcctgctgtacaccgctttgcggtgcagcgctcagccgactgaagctgtttgcactcgtggtaaacccacattattgtgttctagcgccgtcggttcgtggtcctatagtcagcagcgccgacagcgtgtatgctctggtgaggctcccccaaaaaccgacctgatggcatttagcccttctctgcctcaggggcctacctcaactgacaatcctaggcagcctaaccccgattggagatacagtgcatcgctaagggccggaatgcattcctcggtgcacctggaggaagcaggtatactgcgcgcagggccagggggacccgaccaacagtggcctactgtgtcaagtgctactcccgaacccgaagcaggtgaagtgtcgcctcctgtgggggctggtgtcaacagtaactcatggacatttaagtatggacctggaaaccctaaacaatccggacctgaacccaagaaacagacccaggtgtccttccttctacggagaaagggagaggccagccaaccccgtcagtag

SEQ ID NO: 237300 - DNA, 2811 bp, synthetic construct
  misc_feature 1..2811: note = Description of Artificial Sequence: Synthetic coding sequence
  source 1..2811: mol_type = other DNA
atggtgtactcgcgaagaggaagcctcgggtctagacttctcctcctctggctgctgctagcgtactggaaggccggatcaggtcaactccactatagtatcccggaagaagccaagcacggcacgtttgttggccgaatcgcccaggatttaggtctggaactcgcggaactggtacctcgtctctttagggtcgcctccaaagggcgtggagaccttttagaggtgaatttgcagaacggcatcctctttgtgaacagccgaattgatagagaagaactatgtcgccgaagggctgagtgctcaattcacctggaggttatcgtcgaccggccactgcaggtcttccacgtggaggttgccgtcaaagatatcaatgacaatccaccacgcttttcccggcaagagcagcgactgtttatcctggagagccgtatgccggatagccgatttcccttagagggagcctccgacctggatattggagccaacgcccagcttcggtatagactgaaccccaatgagtattttgatctagacgtcaagacgaatgaggaagagacaaactttttggaactcgtgctccgcaaatccctggatagagaagaaacccaggagcatagactgctggtcatcgccacagacgggggaaagccagaattaaccggcaccgtccagctcttgatcaacgtgctggacgcgaacgacaatgctcctgagttcgacaagtccatctacaatgtgcggctcctagaaaacgcgccatcgggaacgctggtcattaagctgaatgctagtgacgctgacgaaggtatcaataaggaaatcgtctatttcttcagcaacctggtcctggacgatgttaagagtaaatttattattaactcaaatactggggagataaaggttaacggagagctggattatgaggattataattcctatgagatcaatatcgacgccatggacaagtctacctttcccctcagtggtcattgcaaggtggtagtgaagctgcttgatgtcaatgacaatacaccggaaatggccataactaccctcttcctgccagtcaaggaagacgcccctttgagtaccgttatcgccctcatcagtgtttccgacagagactcaggtgcgaacggacaggtaacatgctcgctaatgcctcatgtcccatttaagctcgtcagtacattcaaaaactattacagcctagtgctggatagcgcgttagatcgggaaagcgtttcagtgtacgagttagtagtgacggcgcgagacggcggatctccgagcctttgggccacggcgagcgtcagcgtcgaagtggctgatgtgaatgataatgcacccgcatttgctcaaccacagtacaccgtgttcgttaaagaaaacaatcccccaggttgtcatattttcacagtctctgcgcgtgacgctgatgcccaggaaaatgcgctcgtttcctattccctagtggagcgacgggtgggcgaacggcctttgtcatcatacgtgagcgttcatgcagagagtggcaaagtctatgctctccagcctctggaccacgaggaggtcgagctgctccagttccaagtcagcgctcgcgacgcaggggtgcctccgttaggatctaacgttaccctccaagtgttcgtgttagacgagaacgacaatgctccagcgttactggtaccacgcgtggggggaacaggtggggctgtcagcgaacttgtgcccaggtccgttggagccggacacgtagtggctaaagtcagggccgtagaccctgatagcggatataatgcttggctgtcctacgaactgcagcctgctcctggctcagcgaggatcccttttagggtgggtttgtacacaggagaaatcagcacgaccagaagccttgatgagacagaggccccaagacaccgactcctggtactggttaaggatcacggcgaaccccctctgaccgccactgccaccgtgttggtgtccttggtggaatcaggtcaggctcccaaggcgtcttccagggcttcagctggagctgtggggccagaggcggcactggtggacgtgaacgtgtacctcataatcgccatctgcgccgtgtcatcactgctggtgcttacactgctcctttacacagctctgaggtgcagtgctcagcctaccgaggccgtctgcactagagggaagcccacattgctgtgtagcagcgccgtaggctcttggtcgtattcacagcagcgccgtcagagggtgtgctctggggaagcgcctcccaagacagacctgatggcattctcacccagcttgcctcaaggtcccacatctactgacaaccctcggcagcccaaccctgactggcgatattccgcttccctgagggctggtatgcatagttcggtccatctggaggaagcagggatcttgagggccggtcccggtggacctgaccagcaatggcctacggtgagcagtgcaacaccagagcctgaggccggagaagtgagccccccagtcggcgcaggggtaaattccaacagttggacctttaaatatgggccaggcaacccaaagcagagcggacctggcgagctccctgataagtttatcattcctggctcccctgccataatttcgatcaggcaggagccaaccaactctcaaattgacaagtctgacttcatcacatttggcaaaaaagaagaaacgaagaagaaaaagaaaaagaagaaaggcaacaagactcaggagaagaaagagaaaggtaactctaccaccgataatagcgatcagtag

SEQ ID NO: 237301 - DNA, 2061 bp, synthetic construct
  misc_feature 1..2061: note = Description of Artificial Sequence: Synthetic coding sequence
  source 1..2061: mol_type = other DNA
atggtttttacccctgaggaccgtttgggaaaacagtgtctgcttctgcccctgctcctgttggctgcctggaaagtcggaagtggccaactccactactcggtgccggaagaagcaaagcacggcacatttgttgggcgtatcgcgcaggatctaggccttgagttggctgagctcgttcctcggctgtttagaatggcatccaaggaccgcgaggacctgctggaggtgaaccttcaaaacgggatactgttcgtgaattcacgcatcgacagggaggaactgtgtggaagaagcgctgagtgctcaatccatctggaggtgatcgtggaccggcctctccaggtatttcacgtggacgtcgaggtgagggatattaatgacaaccccccactctttcctgtggaggagcagcgggtgttaatttacgagagtcgtttgccggactccgtcttcccactggagggagcgagcgacgctgatgtcggcagcaattcaattctgacatataagttatctagctcggaatattttgggctggacgttaagattaactccgacgataataagcagattggcctcctcctcaaaaaaagcctggatagagaggaagctcctgctcacaacctctttctgacagcgacagacgggggaaagccagagcttaccgggactgtgcagctgctcgtcactgtccttgacgtgaacgataatgctcctaccttcgagcagtcagaatacgaggtgaggattttcgagaatgcagataacggcaccaccgtgattcggctgaacgcctccgatcgggacgaaggggctaacggagctatctcttatagctttaactctcttgtggccgcaatggttattgaccacttcagcatcgatcgaaataccggtgagatcgtcatccgcggaaacctggacttcgaacaggaaaacttatacaaaatccttattgacgcaacagacaaagggcaccctcccatggctgggcattgcactgtcctggtgcgcatcttggacaaaaatgacaacgttccagaaattgccctgaccagtctgagccttcctgtgcgtgaggacgcccagtttgggaccgtgatcgcccttatctccgtcaacgacctggattctggagcaaatggccaggttaattgcagcttgacgccccacgtgccctttaaactcgtgtccactttcaagaactactactctctggtgctggattccgctcttgatagagagagcgtgagtgcttacgagctggtggtgacagccagagacgggggtagcccgagtctgtgggccaccgcctctctttccgttgaagtggccgacatgaatgacaatgcccctgcctttgcacagcctgagtacaccgtctttgttaaggagaataacccccctggctgccatattttcactgtttctgcgcgagacgcagatgcacaggaaaatgcccttgtctcatattctttggttgaaagaagagtcggtgagcgcgcactctcgtcctacatctccgtgcacgccgagtctggtaaagtatatgccctccagccacttgatcacgaggagctggagctcctgcaattccaaccccgacagcctaacccggattggagatactctgcaagtctgagggctgggatgcactcctctgtacaccttgaggaggcgggaattctgcgcgctggtcccggagggcctgaccagcagtggccaaccgtctctagtgcaacaccagagcctgaagcaggtgaagtgtctccacccgtcggcgctggagttaattccaacagttggacatttaagtatggcccagggaaccccaagcagtcaggccctggagagctgccggataagtttatcattcctgggagccctgcgatcatttcgattcgccaggagccaaccaattcacaaatcgataagtccgattttatcacttttgggaagaaagaagagactaaaaaaaagaaaaaaaaaaagaaagggaacaagactcaagaaaaaaaagagaaaggaaattcaacaacagataactctgatcaatag

SEQ ID NO: 237302 - DNA, 2853 bp, synthetic construct
  misc_feature 1..2853: note = Description of Artificial Sequence: Synthetic coding sequence
  source 1..2853: mol_type = other DNA
atggtgttcacgcccgaggatagactggggaaacagtgcctgctcctgccgttgctactactcgccgcttggaaggtgggctcaggccagctacactattctgtgcctgaggaggccaaacatgggactttcgtgggcaggattgctcaggaccttggactggaactggcggagctcgtccctaggctttttagaatggccagtaaggacagagaggacctccttgaggtgaacctccagaatggtattctctttgttaacagtagaatcgatcgagaagaactgtgtgggagatctgcagagtgttctatccatttggaggtcattgtagataggccactgcaggttttccacgtagatgtcgaggtgcgcgatatcaacgacaacccacctctgttccccgtggaagaacagcgggtgctgatctatgagtcccgattgcctgacagtgtctttcctctggagggcgcttccgatgccgacgtggggtcgaacagcattctgacttataaactaagtagtagcgagtatttcgggctcgatgtgaagattaactccgatgataacaagcagattggtttgctattgaagaagtccttggatcgcgaggaagccccagctcacaacctcttcctgactgctacggacggaggcaagccggagttgactgggactgtccaactgttggtcactgtgctggatgtaaatgacaacgcccctacctttgagcagtctgaatacgaagtgaggatatttgaaaacgccgacaacgggactaccgtaataaggctgaatgctagcgacagggacgaaggggcaaacggtgcaattagttatagttttaatagcttggttgccgctatggttattgatcacttctctattgaccggaacactggtgagatagtgataagagggaatctagattttgaacaggaaaatctgtataagattctgatcgatgctacagataaaggtcacccacccatggccggacactgcactgttctggtgcggatactggacaagaatgataacgtgcctgagatagctttgactagtctgtccttacccgtgagggaggatgcacagtttggcacagttatcgctctgatttcagtgaatgatctggacagcggagccaatggtcaagtgaactgcagtctgaccccgcatgtaccgttcaaactcgtttccaccttcaaaaattactactctctggtgcttgatagcgccctcgaccgcgaaagcgtgtcagcctacgagctggttgtgaccgccagagacggagggtcacccagtctgtgggccacagccagtcttagcgtggaggttgcggacatgaacgataacgctccagcattcgcccaaccggagtatacagtgtttgtaaaagagaataatccaccgggttgccatatctttacagtgtccgccagggacgccgatgcgcaggagaacgccctggtgagttatagccttgtggagagaagagtcggtgaacgggcactgtccagttacatttctgttcacgccgaatccgggaaggtctacgccctgcaaccactggatcacgaggagttggaactgcttcagttccaggtgagcgccagagacgctggggtgcctcctctggggtcaaatgtgaccctccaggtatttgtgctggatgagaatgataacgcaccagcgctgctcgcacccagggtggggggaaccgggggtgccgtgagcgaactcgtgccgaggtccctgggagcaggccaggttgtggctaaagtgcgcgcagttgacgcagatagcgggtacaacgcctggctgtcctacgaacttcaaccccctgctagtagcgctcggtttccattcagggtgggcttgtataccggggagatttctacaactcgcgtcctcgatgaggctgacagccctaggcaccgcttgctggtgcttgtgaaagaccacggcgagccagcattaactgcaaccgcgaccgtgctggtgtctttggtggaatctgggcaggcccctaaggcctcgtctagggcctctgtaggggctgcaggtccagaagctgctctggtcgatgtgaacgtctatctaataattgcaatctgtgccgtttcctctttactggtgctgacccttctgctgtataccgccttaaggtgttccgcgccaccgacggaaggtgcgtgcactgccgataaacccacactggtctgttcttctgctgtggggtcctggtcatattcacaacagaggcggcagcgggtgtgcagcggtgaagggccaccaaagatggacctcatggccttctcaccctcgctaagcccctgcccaatcatgatgggtaaggctgagaatcaggaccttaatgaagatcacgatgcaaagcccaggcaacccaatcctgattggaggtattccgcctccttacgcgctgggatgcactcctccgtccacttggaggaagcagggatcctaagagcagggcctggagggcctgaccaacagtggcccaccgtctccagcgccacacccgagccagaagcgggagaagtgagcccaccagtgggagctggcgttaatagcaattcatggacattcaagtatggtcccggaaatccaaagcaaagcgggcctggtgaactccctgacaagtttataatcccaggatcgccagccatcattagcattagacaggagcctactaacagtcagattgacaagagcgattttatcacatttggcaaaaaagaagagacaaagaagaagaaaaaaaaaaagaagggtaacaaaacacaggagaaaaaagaaaaaggaaacagtactactgacaatagcgatcagtag

SEQ ID NO: 237303 - DNA, 2370 bp, synthetic construct
  misc_feature 1..2370: note = Description of Artificial Sequence: Synthetic coding sequence
  source 1..2370: mol_type = other DNA
atggtgtgccccaatggctacgatccgggaggtcgccatctccttctgttcattatcattttggctgcctgggaggccggaaggggacagcttcactattcggtgcctgaagaggcaaaacacggaaacttcgtaggcaggattgcacaagatctgggattggaactggccgaacttgttcccaggttgtttagggctgtgtgtaagtttagaggggatctgttagaagtgaacctgcaaaacggcatcctgttcgtgaactcccgcatcgaccgggaagagctttgcgggaggagcgcagaatgcagcattcacttggaagttatcgtcgagcgccctttgcaagtattccacgttgatgtcgaggtgaaagatattaacgacaaccccccagtgtttcctgccacccagaggaacctctttatcgccgagtcgagacccctcgattctcgctttcctctagaaggcgcatccgatgctgacattggtgagaatgccttactgacttaccgccttagcccgaacgagtacttctttctggacgtgcctactagcaatcagcaggtgaaacccttagggctggtattgcggaaactgttggatcgggaggagacacccgaactccacctactcctgactgctactgacggtggcaagcccgagctgaccgggactgtgcagctgctcatcacagttctggataataacgacaatgcgccagttttcgatagaaccctgtacacggtcaaacttcctgaaaacgtctccattggcaccctggttatacacccaaatgcttcggatctagatgaggggcttaacggtgacattatctactctttctcatctgacgtgagtccagatatcaaaagcaaattccacatggatcccctgtccggggcaattactgtgataggacatatggattttgaggagtctagagcacataagatccccgtagaggccgtagacaagggcttccctccactggcgggacactgtactgtgctggtcgaagtggtggacgtaaacgataatgctcctcaactcacactaaccagcctgtcccttcctattccagaggacgctcagccgggaactgttatcacacttatctccgtctttgaccgcgattttggtgttaatggccaggtgacatgttctctcacccctcgggtgcctttcaaattggtatccacatttaagaattattacagccttgtactagattccgcactggatcgcgaaagcgtgtcagcatacgaactcgtggttacagcccgagacggagggagcccgtcgctttgggcaacagcttctgtgtctgtggaggtggcggacgtgaatgataacgctcctgccttcgcccaaccggaatacactgtgttcgtgaaagaaaacaatcccccaggctgtcacatttttacagtcagcgctggtgacgctgacgcccagaagaacgctttagtgtcttactctcttgttgagctacgggtcggtgaaagggcactatcctcttatgtctcagtccatgccgagtccgggaaagtctacgcactccagcccttggaccacgaagaactggagctgctgcagttccaggtgtccgcgagagatgctggggtgccaccactgggaagtaacgttacactccaagtgttcgttttagatgagaatgataacgccccagcacttcttgcccctagagtgggaggaactggaggcgcagttcgggagttagtgcccaggagcgtgggggctggtcacgtggtcgcaaaagtgcgggctgttgatgctgattccgggtataacgcctggctctcctacgagctgcagccagtcgctgctggcgcttctattccttttagagtggggctttacacaggagagatcagcacgactcgagccctggacgagacagacgccccaagacataggctactggtgctggtgaaagaccatggggaaccctctctgaccgccaccgcaaccgtcctggttagcttagttgagagtggtcaagcaccaaaagcctcgtctagagcctcattaggtattgctggcccagaaacagaattggtggacgttaacgtgtatctaatcatcgccatctgcgctgtctcaagtcttttggtgcttaccctgttgctctacacggccctgaggtgctcggcaccttcttccgagggggcttgttcacttgtgaaacctactctggtgtgcagcagcgccgtggggagctggtcattttcacaacagaggagacagagggtctgttccggagaaggacctcccaagacggacctgatggccttctctccgtcactgcctcaggggccatcatcaacagataatgtgtcacacaagtag

SEQ ID NO: 237304 - DNA, 2814 bp, synthetic construct
  misc_feature 1..2814: note = Description of Artificial Sequence: Synthetic coding sequence
  source 1..2814: mol_type = other DNA
atggtctgtcccaatggatatgacccaggaggcagacacctgctgctgtttattatcatcttggccgcatgggaggcgggacgcggacagcttcactactccgtacccgaggaggctaaacacggaaacttcgtagggcgtatcgcccaggaccttgggctggagctggccgagctggtgccccgtctgttccgtgcagtctgcaagttcaggggggacctcctggaagtgaacctacagaacggtattctgtttgtaaactcccggatcgacagagaggagctatgtggacgctcggcagagtgcagtattcacttggaggtaattgttgaacgccctctgcaggtatttcatgttgatgtcgaggtaaaggacataaacgacaatccacctgtgtttcccgctacacagcggaacctgttcatcgcagagtctcggccactggacagtcggttccctctggaaggcgctagcgatgctgatatcggcgaaaatgctctgctgacttatagactgagccccaatgaatacttctttcttgatgtgcctacctctaaccaacaggtgaagcctctgggcctggtacttaggaaacttcttgaccgcgaagagacccccgaacttcacctgttgctaaccgccaccgacggcggtaagcctgaactcaccggtactgtgcagctactgattactgtccttgataacaatgacaatgctcccgtgtttgaccgcaccctctacacagtgaaactcccggaaaatgtttccattggaacgttggtcatacacccgaatgcctccgatcttgatgagggacttaatggcgacatcatatattccttcagttccgacgtcagcccagatattaagtcgaagttccatatggatcctctgtccggcgcaatcaccgtaattggacatatggatttcgaggaatcccgggctcacaaaattccagtcgaagccgttgataagggctttcctcctttggcaggccattgcaccgtgctggtcgaggtggttgacgtgaacgacaatgctccccagctgacacttacaagtctaagcctgcctattcccgaggatgctcaaccagggacggtgattacactgatctcagtgtttgatagagactttggcgtcaatggacaggtgacctgctcactcacccccagggtcccttttaagctggtttcgactttcaagaactattactcattggtcctggacagtgcattggatcgcgagtctgtcagcgcctatgaattggtggtgaccgcccgtgatgggggatccccctccttgtgggccaccgcctctgtaagtgttgaggtggccgatgtgaatgataatgccccagcattcgcccaacccgagtacacagttttcgttaaggagaataacccccctggctgccatatttttaccgtgagcgccggtgatgctgacgctcagaagaacgccctagtgagttacagcctagttgagctccgggtgggcgagagggccttatcttcttacgtgtctgtgcatgctgaatcaggcaaggtgtatgctcttcagcccctggatcacgaggaactggagctgctccagtttcaagtttcagctagggacgccggtgtccctcctctgggatctaacgtcaccctgcaggtatttgttctggacgagaatgataatgctcctgctctgctggcacctagggtgggaggcacagggggtgccgtccgggaactagtgcctagaagcgttggagccggacacgtggtggctaaagtgagggcagtggatgccgacagtggatacaacgcatggctgtcctatgagctgcagccagtggctgctggcgcaagcatcccttttcgcgtggggctgtacaccggcgagatttccactacacgggcactggatgagacggacgccccacggcatagactcctggtactggtcaaagaccatggcgagccctccttaactgccacagctacagtcctcgtctctctcgtcgagtctggtcaagcacccaaggcctcatccagggcaagtctcggaattgcaggtcctgagaccgagctggttgacgttaacgtgtacctcatcattgctatctgtgcagtaagctcgcttctggtgctcacgctgctgttatacaccgcccttcgctgttcggcacccagttctgagggcgcatgttccttagtaaaaccaacgctcgtgtgctccagtgcggttggatcctggtctttcagccaacagcgccgacagagagtgtgctccggtgaggggccacccaaaacagacctgatggcgttcagcccttcgctgcctcagggaccgagcagcacagataatccacggcaacccaaccctgactggcgatattctgcctccctgagagctgggatgcatagttctgtgcaccttgaggaggcgggtatcctgcgggctggtcccggaggtcctgatcagcaatggcctacggtctcttcggcaacgccagagcctgaagcgggtgaagtttccccaccagtaggcgctggcgtcaattctaacagctggactttcaaatacggtccaggtaaccctaagcagtccgggcctggtgaattgcccgataagttcatcattccaggttctccagccatcatttcaatccgccaggagccgaccaactcacagatagacaaatcagattttattacttttgggaagaaggaggaaaccaaaaagaagaagaagaagaaaaagggtaataaaactcaggagaagaaggagaaaggcaactctacgaccgacaattcggaccaatag

SEQ ID NO: 237305 - DNA, 2445 bp, synthetic construct
  misc_feature 1..2445: note = Description of Artificial Sequence: Synthetic coding sequence
  source 1..2445: mol_type = other DNA
atggattatcattggcggggagaactcgggtcctggcgtcttttactcctactgctgttactagccgcttggaaggttggctccggccagcttcactactccgttcccgaggaggccaagcatggcacattcgtcgggcgaattgctcaggacctgggactggaattagcggagctggtgccaagactgtttcgggtggcatcaaagcgccatagggacctgctcgaagtgtcccttcagaacgggatactgttcgtaaatagtcgcatcgacagagaagagctgtgtggccgaagcgccgaatgtagtatacatttggaggtcattgtagacagacctctgcaggtgtttcacgtggacgtggaggtgaaggatgtgaatgataatcctccggtgttccgcgtgaaggatcagaaactttttgtgtccgagagtagaatgcccgacagccgatttcctctggagggtgcctcggatgcggacgtgggggctaattccgtgctgacttataggctcagctcccacgattactttatgctcgacgtgaattcaaaaaatgatgagaacaagctcgttgagcttgttttgaggaagtcactggatagggaggatgcgcctgctcatcatctgtttctgaccgctaccgatgggggaaagcctgagctgacgggaacagtgcaattactggtgacagtcttggacgtcaatgacaacgctcctacgtttgagcagtccgagtatgaggtgcgcattttcgagaatgccgataacggaacaaccgttatcaagcttaatgcctctgatcctgacgaaggggcaaatggcgctatttcttacagcttcaacagcctcgtggaaacaatggtgatcgatcatttttccattgatagaaacactggcgaaattgtgattcgcggtaatctggacttcgaacaggagaatctctataagatcctgatcgatgcaaccgacaaaggccacccccctatggctggacactgcaccgtcttggtgcgcattctcgataaaaacgataatgtccccgaaatcgccttgacatctctttccctcccagtgagagaggatgcacagttcggaaccgttattgcactcatcagcgtgaatgatctcgattctggagctaacggtcaggtcacctgttctctcatgcctcacgtccccttcaagctcgtctctaccttcaaaaattattacagtctcgtgctggactcggccttggatagggagagagtcagtgcatatgagttggttgtcacggcgcgagacgggggatcaccaagcctgtgggcaacagcctccttgtccgttgaagttgccgacgtcaacgataatgcgcctgctttcgcacaacctgagtatacggtcttcgtgaaggagaataatccacccggatgccacatcttcacagtgtcagctagagacgccgatgcccaggagaatgctctcgtctcttattctctagtggaacgaagggtaggcgaaaggtccctgtcgtcttatatttcagttcacactgaatccggcaaagtctacgccctacagccattagaccatgaagagctcgagctactgcagttccaggtctctgccagagatgcaggcgtgcctcctctgggttctaatgtgacactgcaggtgtttgtcctcgacgagaatgacaatgcccctgccctcctagagccgcgagttggcggaacgggtggggcagcttcgaagcttgtgcccaggtccgtcggcgctgggcacgtggtggctaaagtgagagcagttgacgccgactctggctacaacgcctggttaagctacgagctacaaccagccgctagcagcccacgaattccctttcgggtggggctctacaccggcgagattagcacaacccgcgtgctggatgaggcagactcacctcggcaccggctgctggtgctcgtcaaagaccacggagagccggcattaacggcaaccgctacagtcctcgtttcacttgtggaatcaggacaggcccctaaagcgtcctcacggcagtctgctggtgtgctgggcccagaggctgccttggtggatgtcaatgtttacctcattatcgctatctgtgccgtttcttcgttgctggtgctgactcttctgctgtataccgcactcaggtgctccgcgctgcccactgaaggcggatgtagagccggaaagccaaccctggtgtgttcctccgcagtaggttcctggagttacagtcagcagcagccccaaagggtttgttcaggtgaaggaccacctaagaccgacctaatggccttctcaccatgtctgccgcctgacttagggtcagtggatgtcggcgaggagcaagatcttaatgtagaccacggactgaaagttagcccattcaaattccggacgcataaattttatctgtggaagctgtag

SEQ ID NO: 237306 - DNA, 2853 bp, synthetic construct
  misc_feature 1..2853: note = Description of Artificial Sequence: Synthetic coding sequence
  source 1..2853: mol_type = other DNA
atggactaccattggcgcggagagctgggttcttggcgactcttactgctgctgctccttctcgctgcctggaaggtaggatctggccagctacattactctgttcctgaagaagccaaacacggaacgtttgtagggagaatcgcacaagatctcggattggaactggccgaattagttcccagattgtttagagtggcatcaaagaggcaccgggacttgctggaggtaagtctacagaatggtatcctgtttgtgaattcccggattgatcgcgaagaactgtgcgggagatccgccgagtgctccattcatctggaggttatcgtggaccgtccgctgcaggtgttccacgtggatgtggaagtgaaagatgtgaacgacaaccctcccgtcttccgggtcaaggatcagaagttatttgtaagtgaatctcggatgcccgattcaaggtttcccctcgagggtgcgtccgatgcagacgtaggagcgaactccgtgctgacctatcgtctaagctctcacgactatttcatgcttgacgtgaactcaaagaatgatgagaacaaattagtagagctggttttgagaaagagtctggatcgggaggacgcacccgcacatcatctgtttcttactgcaaccgacgggggaaagccagagttaacagggaccgtgcagcttctggtgactgttctggacgtgaacgataatgcgccaacatttgaacagagcgagtacgaggtgcgaatatttgagaacgctgacaatggcacaactgtgataaaactgaatgcctccgatcccgatgaaggtgctaacggggctatttcgtatagctttaactcgctcgtcgagactatggtgatcgaccatttttccattgataggaacacaggcgaaatcgtaatccgcggaaatttagatttcgaacaggagaatctgtataaaatcctgatcgacgccacagataaaggtcaccctccaatggccggtcactgtactgtcttagtaagaattttagataaaaacgataacgtacccgaaatcgcactgacaagcttgagcctgccggtgcgggaggacgcgcaatttggaacagtaatcgcactgattagcgttaacgaccttgactctggagctaatggacaggtgacctgctcgctcatgccccacgtaccgtttaagctcgtctccacttttaagaactactacagcctggtgctggatagtgccctggaccgagaacgagtgtccgcatatgagctggtggttacagccagggatggcggatccccttctctgtgggccacagcgtcattatcggtcgaggttgccgatgtcaacgacaacgcccctgcattcgctcaaccggagtatactgtgttcgttaaagagaataatccacctgggtgccatatcttcacggtcagcgccagggacgcggacgcgcaagaaaacgccctggtgagctacagcctggtcgaacggagggtgggtgaaaggagtctgtcttcttacatatccgtgcacaccgaatctggcaaggtgtacgccctgcagccactagatcacgaagaactagagctgcttcagttccaagtgagtgcccgagacgccggagtgcctccgctaggaagtaacgtgacgctgcaggtcttcgtcttagacgaaaacgacaatgcaccggcacttttagaaccgcgagtcgggggaaccggaggagcagcttcaaagctcgttcccagatctgtcggcgctggccatgtggtggctaaagttagggcagtggatgctgacagtggatataacgcctggctgtcgtacgagctccagcctgccgcaagctccccaaggattccctttcgcgtgggattatacacaggcgagatttctactacgcgggtgcttgatgaggctgacagtccaagacacagacttcttgtgttagtcaaagaccatggggaaccagctttgacagccactgcaacggtccttgtttcactagtggagagtggacaggcgccaaaggcgtccagtcggcaaagtgctggggtcctcgggcctgaggcagccctggtggacgtgaacgtttacctcatcatcgccatttgtgccgtctcctctttacttgttctaaccttgctattatacactgcccttagatgcagcgcgctgcccacagagggtggatgccgcgcaggcaagcccactcttgtttgcagcagcgcggtgggcagttggtcatatagtcaacaacaaccccaacgggtctgttcaggcgagggaccacctaagactgacctgatggccttctctccctgtttgcccccagatctgggcagtgtggatgtcggggaggagcaagatctgaatgtcgaccatggcctgaagccacggcagcctaatccggattggcgttactcagctagcctgcgggctggtatgcacagtagcgtacacctcgaggaagcgggaattctcagagcgggaccgggagggccagaccaacagtggccgaccgtctccagcgccacccccgaacctgaggcaggggaagtctcgccacctgttggggctggggtaaacagtaattcatggaccttcaaatacggacctggaaatcccaagcaatccgggcctggtgagctcccagataagttcatcattcccggaagccctgctattataagtattcgccaggaaccaaccaattcccagatagataaaagtgactttattactttcgggaaaaaggaggaaactaagaaaaagaaaaaaaaaaaaaagggcaataagacccaggagaaaaaggagaagggcaattctacaactgataacagcgatcagtag

SEQ ID NO: 237307 - DNA, 2529 bp, synthetic construct
  misc_feature 1..2529: note = Description of Artificial Sequence: Synthetic coding sequence
  source 1..2529: mol_type = other DNA
atgctgtactcttctcgtggtgatcctgaaggacaacccctgctgctaagcttgcttattctcgccatgtgggtggtcggatccgggcagttgcattacagtgtccccgaagaagccgaacatggcacctttgtcggtcgaatcgctcaggatctgggacttgaattagccgaattggtacctcggctgtttcaactggattccaagggacggggagacctgctcgaggtgaacctccagaacggcatcctgttcgtgaattcacggatcgaccgcgaggagctgtgcggtcgctccgctgaatgtagcatccatcttgaagttatagtggataggcccttgcaagtgttccacgtggatgttgaggtcaaggacattaatgacaacccaccggtctttccggctacccaaaagaatctgttcatcgccgaatcccggccactggattctcgattccctttagaaggcgcatccgatgctgacattggagagaacgccctgctgacctaccggctttcccctaatgagtatttcttcttggacgtcccaacctccaaccagcaagttaaaccactggggctggttctgcgcaagctgttggacagggaagaaacccctgagctccatctgctactcaccgctaccgacggcggaaaaccagaactaaccggaacagtccagctgcttattactgtcctggataacaacgataatgcccctgtgtttgaccggactctgtatacagtcaaactgccggagaatgtttcaatagggaccctagtcatacacccaaatgcatcagacttggacgaggggcttaatggcgatattatatatagtttctcatcagatgtaagcccagacatcaagtctaaattccatatggatccgttgagcggcgctattacggtgatcggacacatggattttgaggaaagcagggcacacaaaatacctgtcgaagctgtggataagggcttcccaccactcgcaggccactgcactctgttggtcgaggtggtggacgtgaacgacaatgcacctcagctcaccatcaaaactttatctgtgcccgtgaaggaggacgcccagttaggaactgtaatagctctcatctctgtgatcgacctggatgccgacgcaaatggccaggtcacatgtagtctgaccccacacgtgccctttaaacttgtctcaacctacaaaaattattatagtctggtgctcgacagagcacttgaccgcgaaagcgtttcagcctacgaactcgttgtaactgcgagagatgggggttcaccttcgctgtgggccaccgcccgagtgagtgtcgaggtcgctgacgtcaacgacaatgctcctgccttcgctcagtctgaatatacagttttcgtcaaggagaataaccccccaggttgtcatatatttacagtctctgctcgcgatgcggatgcccaggaaaacgcactggtaagttactcactcgttgaaagaagacttggggaacgcagcttgagttcctatgtgtctgtgcatgccgagtcagggaaggtatacgctctacagcccctggatcacgaggaactggagctgctccagttccaggtaagcgctcgcgacgccggtgtcccaccactgggcagtaatgttacactgcaggtcttcgtgttggacgagaacgataacgcgcctgccctgctaacccccagaatgcgcggtaccgacggcgcagtctcagagatggtcttgagaagcgtcggcgctggggtagtcgtggggaaggtccgtgccgttgatgccgactctggatataacgcttggctgagctatgagttgcagcccgagacggcctccgctagcataccattccgggtgggtctgtatacaggcgaaatcagcactacccgagccttagacgagactgacgcacctcgccaaagactgctagtgctcgttaaagatcatggggagcccgctctgaccgcgaccgctaccgtgttggtgtcgctggtcgagtccgggcaggcaccgaagagttcatcccgcgctagtgtcggcgctaccgggcctgaggtgaccttagtggacgttaatgtatacctgattatcgccatttgcgccgtgtcatcgttgctcgtgttaacactgctgttgtatactgtgctcagatgtagtgccatgccaaccgaaggcgagtgcgcaccaggaaaacccacactggtttgtagctctgcggtggggtcatggtcatattcccaacaaagacgacagcgtgtgtgcagtggggaaggcaagcaaaagacggacttgatggccttcagccccggtctcagtccctgcgctggcagcacagaaaggacaggggaaccttctgcatcaagtgacagcaccgggaaggtcggtttttcttcaatactgttcatttatatcatctttttccttgagcgatactaccgcctcctgcctggggctgtgcagatcgttctgttcatttttctggagatacagcagatcttctttctgattaagtag

SEQ ID NO: 237308 - DNA, 2853 bp, synthetic construct
  misc_feature 1..2853: note = Description of Artificial Sequence: Synthetic coding sequence
  source 1..2853: mol_type = other DNA
atgctttatagctccaggggggatccagagggacaacctttgctgctgtccctcctgattctcgccatgtgggtggtgggatccggacagctgcattacagcgttcccgaggaagccgaacacggcacattcgttgggaggatcgcgcaggatctcgggcttgaactggctgagctcgtccccagactctttcagctcgacagtaaggggagaggcgacctgctagaggtgaacctacaaaacggaatactgtttgtaaattcaagaattgaccgggaagagctgtgtggtcgatccgccgaatgcagtatccacctcgaggtcatcgtggacagacctctgcaggtgttccatgtcgatgtggaagtcaaggatatcaacgacaatcccccagtttttcctgccacacagaagaacctcttcattgcggagtcgcgccctctcgatagccgattccccctcgagggtgcctcagatgccgatatcggagagaatgctctgttaacttatcggttgagtcccaatgaatattttttcctggacgtgccaacatctaatcagcaagtaaagccccttggcctggtgctgagaaagcttttagaccgtgaagaaactcctgagttgcatctcctgttgactgccacagatggtggcaaacccgagctgaccgggaccgtgcagctgttgataacagtgctggataataatgataacgccccagtctttgaccgcacactgtacaccgtgaaactgcctgaaaatgtgtccatcgggactctggttattcaccccaacgcatcggatctggacgaaggcctcaatggcgacatcatctatagtttctcatctgatgtctcgccagacattaaaagcaagtttcacatggacccgctctccggggcaatcacagtgatcggacacatggactttgaagagtctagagctcataagatcccagtggaagccgtggacaagggttttcctcctcttgccggacactgtactcttctggtcgaggtcgtggatgtcaatgacaacgcaccccaacttacgattaaaaccctcagcgttccagtcaaggaagatgcgcagttaggcacagtcatcgcactgatcagtgtcatcgacctggatgctgatgcaaacggccaggtgacgtgcagccttaccccacacgtgcctttcaaactggtcagtacctacaaaaactattattccctggtgctagaccgcgctctggatcgcgagagcgtaagtgcatacgagctcgtggtcacggccagagatggcggaagcccaagcctctgggctactgcgagggtgtcagtggaggtggccgatgtcaacgataatgcacccgcttttgcccagtctgagtataccgtgttcgtgaaggagaataatccccctggttgtcacatatttacagtgtctgcccgtgacgctgacgctcaggagaacgcgttggtgtcctactccctggttgaaagacgcctgggagagcggagtctgagcagctatgtgtctgtgcacgctgagtctggaaaagtgtacgccctccagccgttggatcacgaggagctcgaacttctgcagtttcaggtgtctgccagagacgccggagtgcccccattgggtagcaatgtcaccctccaggtcttcgtccttgacgagaatgacaacgcccctgcactacttacccctcgaatgaggggtaccgacggagcagtgagcgaaatggtactgaggtctgtcggagctggcgtggtggtcggaaaagttcgcgcagtagatgctgacagtggttacaacgcctggctgtcctacgaactgcagcctgagacagcaagtgcttctatccctttccgcgtaggcctctacaccggagaaatctcgacgacccgggcactggatgagacagacgctccaagacaaaggctgctggttctcgtgaaggaccacggagaacccgcattgaccgccacggcgactgttctggtgagcctggtggaatccgggcaggctccaaagagctcctcaagagccagcgtgggggctaccggccctgaggtgactttggtggacgttaacgtctatctgatcatcgccatttgcgcagtgtccagcttgttggtgctgactctgctgctctacaccgtgcttaggtgttccgcgatgccgaccgaaggcgaatgtgccccaggcaagccgactctggtgtgtagcagtgccgtgggctcctggagctactcacagcagcgtagacaacgggtctgttcgggagaaggaaagcagaagactgacctcatggcatttagcccaggtctgagtccctgcgctggaagcacagagcgcacaggcgagccttcagcctcttctgatagcaccgggaagcccagacagcccaatccggattggaggtattccgcctcgctgcgtgcaggcatgcactcgagcgtacacctggaagaagccggaatcttgcgagcgggaccgggaggcccagatcagcagtggcccacagtgagcagtgcaacaccagaaccagaagctggggaagtgagtcctccggtaggagcgggagtcaacagcaacagctggacctttaagtacggccctgggaatccaaaacagtccggcccaggcgaattgcccgataaattcataatcccaggcagcccagctattatcagtatacgtcaagaaccaacaaattcacagattgacaaatctgactttatcacttttggcaagaaagaagagaccaagaagaaaaaaaaaaagaagaaaggaaataagacccaggaaaagaaggaaaaggggaactccaccactgacaacagtgaccagtag

SEQ ID NO: 237309 - DNA, 2892 bp, synthetic construct
  misc_feature 1..2892: note = Description of Artificial Sequence: Synthetic coding sequence
  source 1..2892: mol_type = other DNA
atggtcggttgtggcgtcgcagtactgtgcctctgggtgagctgtggggcagccgcaggtcagctggaatactccgtacctgaggagacagaaagaggcgtggccgtcggcaacctttcagctgatctaagattgcctgcggcagccatgagctctagaaacttcaggttcctctcttcgcaccgggagttgtactttggggttgatcttccgtccgggaacctggtcgtccgagagcctgccgacagagagcagttatgtagggctaaagctgcgtgtgtgttgacttacgacttggttctggaagacccgttagagttacataagattcggattcacgtcctcgacacaaacgacaacagcccgctgttccccgctggcgacgtgcagcttcatattccggaattcctcactcctggcgctaggtttacactgcccaatgcccaggatgatgatgagggttcaaatggtatcctctcatactccctcagcccatcccagcactttcggttggatatgggatctcgtgtggacgggtcggaatatcccgagttggttctggagaaagcactggacagagagcagagagcaacacacttactcgtcctcacagccagagacgggggactaccagcccgttccggcgatgcacaggtgaccataattgtggtggacacaaacgacaatgcacctgtttttgaaagatcagtctaccggaccaaggtcccggagaccgcacccaatgggaccgtgttattccgagtgcaggctctggatccggacgaggggtctaacggggaggtccagtacagcttatccaattctactcaggcagaactacgccatagatttcatgtgcacccaaagagtggcgaggtacaggttgcagccagcctcgggcctccggagacgttgctggaagcgtatattgaagccagggacgagggagtgtttggactagcctcgaccgccaaattgctcgtagaggtgaccgatgtcaacgatcacgccccagaactcgattttctgactctgagtaacccggttccagaagacgctgccccagggactgtcattgctctgttttctgtgaaggacgaagacctagattccaacggaagagtcatatgcggtatgagcagcgctggcccattccaactgacggcttcctttgacaattactacagtctcctgattgatggtcctttggaccgcgagcagatcagcgagtaccaggtgcttataactgcctctgactcagggtcaccccctctgtctacacgccgtacgataactgtgtcggtggccgacgtgaacgataatacaccaaacttccctcaaccgcagcaagagctatttgtggcagaaaataatggacccggtgcttctctggggagagtctttgcccaggatcctgacttagggaagaatgggctcgtctcctatgaactgctggacgtaatctctgaaggcccttctgcatcctctctgctggcggtggaatccagctccggagcaattaccgcaaagacaagcttcgactttgagcagcttcgtgggtttcactttcaggtagaaggcagagacggcggtatccctccccgatctgccactgtgaccatcaatctgtttgtggttgatcggaacgataactatcccgtaattttatttccactgccacgtaacggttctgttcctgtggagatcgtgcctcggtccgccaggactggtcatctggtcaccaaagtagtggctgaggatgcagacagtggctctaacgcttggctgagttatcacatttctagagcttcagattcctctttgttccgcatctccgccaatataggggaactgcgaaccgctcgcttagtactgccaacagatgccgtcaagcagagagtggtggttgttgtccgggaccatggagatccaccgttatcatctagtgtaacactcggagtgctcctgtccaacagcgtgccacaactacttccagatttcgaggacgtgtgggagcctggcggacagttatcagctcaaaacctgtacttagtaatcgccctagcgtgcatttccttcctgttcctcggatgcctgcttttttttgtatgtaccaagctccatcaatcaccaggctgttgtgcccaatcctgttgccgtagcaccgaggacctgcggtacggcagcaaaatggtcagcaacccatgcatgactagcgctacaatagatgttaccaccgtcgagcgcctctcacagacctacctctatagggcatctctggggctgggttccgataataattcactgttactgcggggtgagtataacgcagctgacctccgaaatcttgctactggcgtcggattgaacctccccatatcatgtatacagattaggaatagaaagggtgatcatgccaacgttaacgcaatgcccaggcagccaaacccggactggaggtactccgccagcttacgcgctggcatgcactcttccgtccacctggaggaagccggtatcctgcgggctgggcctgggggacccgaccagcagtggcctaccgtgtccagcgcgactcccgagccagaggccggagaggtgagtccccctgttggggctggcgtgaattctaactcttggacgtttaaatatgggcctggcaatccgaaacagagtggcccaggcgaactgcccgataagtttatcatccctggctcacctgcaataattagcatccgtcaagaaccgactaattctcagatcgataagagcgattttatcacatttggcaagaaggaggaaaccaagaagaaaaaaaaaaagaaaaaaggcaacaagacccaggagaaaaaagaaaaaggaaacagtaccactgacaatagcgatcaatag

SEQ ID NO: 237310 - DNA, 2457 bp, synthetic construct
  misc_feature 1..2457: note = Description of Artificial Sequence: Synthetic coding sequence
  source 1..2457: mol_type = other DNA
atggtaggctgtggagttgccgtgctatgtttgtgggtcagttgcggcgcagccgctggtcaactcgagtacagtgtgccagaggagactgagcgtggggtggctgtaggaaatttgagtgctgaccttaggctgcctgccgcagccatgagtagcagaaattttcgcttcctctctagtcatcgcgagctctacttcggcgtggatcttccctccggtaatctggtggtgcgggagccagccgatcgagaacagctgtgccgggcaaaagcggcttgtgttctgacctacgacctggtgctggaggatccactagagctgcataagatcagaatccacgtgttagataccaatgataattctccgctgtttcccgcaggcgacgtgcagctgcatattcccgaattcctgactcctggtgccagattcaccttacccaatgcgcaagatgacgacgagggctccaatggaatcctctcatacagtctgtctccttctcagcacttcagactggatatggggtcccgagtagacgggtccgagtacccagagctggtcctggaaaaggcgctcgatcgggagcagcgcgctacgcacctcctggtccttactgccagggatggagggcttccagcccgaagcggagatgctcaggtaacaattatcgtggtggatacgaacgacaacgccccagtgtttgaacggtccgtgtaccgcacaaaagtccccgaaacagcgcctaacggtactgtgttatttagagtacaggcactggacccagatgagggtagcaatggcgaggtccaatactcattgtctaattccactcaagcggaattgagacatagatttcacgtccaccctaagtcaggcgaggtgcaagtagctgcgtcgctgggaccacctgagacactgttggaagcttacatcgaggctcgcgatgagggagtattcgggctagcgagtaccgccaagctcctggttgaagtgaccgatgttaatgatcacgcccctgagctggattttctgacgttgagtaaccctgtccctgaagatgctgccccaggaactgtaatagctctgtttagcgtaaaagatgaagacctggactcaaatggacgagtcatttgcgggatgagtagcgctggtccctttcaattaactgcaagtttcgacaactattacagtttgctgatcgacggtcctttggatagagaacagatttccgaataccaagtgctgattaccgcaagcgatagcggctctccacccctgtcaacacgccgtacaataacagtctccgtggctgatgtgaacgacaacaccccaaactttccccagcctcagcaagagttgttcgtcgccgagaataacggccctggcgcttctctgggcagagttttcgctcaggacccagacttaggtaaaaatgggttagtgtcatatgagctcctcgatgtgatctccgaaggcccatcggcaagttccctgctcgcagtggaaagcagcagtggggctatcaccgcaaagacttctttcgacttcgagcagctccggggtttccattttcaagttgagggcagagacggtggtatcccaccacgaagtgcgacagtcacaatcaatctgttcgttgtcgatagaaacgacaattatccagttatcctcttccccttaccacgaaacggcagcgttccagtggaaatagttcccagaagtgcacggacgggccacctggttacaaaagttgtggccgaggacgcagattctggctctaatgcttggcttagttaccacatctccagggctagcgatagctctttgtttaggatttccgccaacattggggagctgcgaactgccagattggtcctcccaaccgacgctgttaaacagcgcgtggtagttgtggtgcgcgaccatggggacccgcctctgtcttcaagcgttactttgggcgtgctgctgagcaacagtgttccccagcttctccccgattttgaggacgtgtgggagcccggagggcaattgtcagctcagaacctatatctcgtgatcgcactggcctgtatcagcttcctgtttctgggctgcttgcttttcttcgtttgcactaagcttcatcagtcaccagggtgttgtgcccagtcatgttgtcgttccaccgaggacctgagatacggatcaaaaatggtgtccaatccatgtatgacatccgccaccattgacgttaccaccgtagaacggctttcccagacctatctgtatcgggcaagtcttggtctgggaagtgacaacaattcactgctgctgcggggagaatacaacgctgcagatctaaggaatctagcgactggtgtgggtctgaatcttcctatatcatgtattcagataaggaacagaaagggggaccatgccaacgttaatgccatggtgtccaaattctacggcatatag

SEQ ID NO: 237311 - DNA, 3024 bp, synthetic construct
  misc_feature 1..3024: note = Description of Artificial Sequence: Synthetic coding sequence
  source 1..3024: mol_type = other DNA
atggagcaggccggtactcgccctgctgccaccgagcatcctcggctcaggcgacctatgccctggctgctgctgttaccactcctgttactgctgcttctgctgctgcctggtcccgcagcgtcccagctgcgctacagcgtgcctgaggagcaggccccaggtgctctggtcggtaacgtggcacgtgccctcggcctggaactccgacgcctgggccctggttgcctgagaattaatcatctgggagcgccatcacctagatacctcgagcttgatctcacttcaggagctctgttcgtgaacgagcggattgatcgcgaggccctgtgtgagcagagaccgaggtgcttattaagcctcgaagtcttggcacataatccagtcgctgtcagcgctgtcgaagtagaaatactggatataaacgacaactcccccagattcccaaggcctaattaccaactgcaggtgagtgagtcagtggcgccaggcgcacgcttccatatcgagtctgcacaagatcccgacgttggcgcaaactcggtccagacttacgaactttcccccagcgagcactttgaattggacctcaagcctctccaggaaaacagcaaggtccttgagctggttctgcggaagggactcgatcgcgaacaggcagccctgcatcacttggtgctcacagccgttgatgggggaattccagcccgaagcggtacagcccagattagcgtgcgggttttagacaccaacgacaattcccctgccttcgaccaatccacctaccgagtacagttgcgggaggactctcccccaggaacgctcgtcgtcaagctcaacgcatccgatccagatgaaggctctaatggcgagctgcgctattcgctgagtagttatacctcagatcgggaaaggcagctgttttccatagatgccagtacaggcgaagttagagtcattggcggtctagactacgaagaggcttcctcctaccaaatctatgtgcaggcaaccgacagggggccagttccgatggcagggcattgtaaagtcttggtggacatcgtggatgttaacgataatgccccagaggtggtgttgactgatttatacagtccagttcctgagaatgcgacgcctaacactatagtagccgttctgtctgttaatgatcaggacagcgggcctaaccggaaagtttctctggggttagaggctaccctgccattccgtctaaatggtttcgggaacagctatacactggtggtaagcgggcctctagatcgcgagagggtggctgtgtataatatcacggtgacagcaactgatggtggtatcccccagcttacttctttgcgtactttaaaagttgagatctcggatattaacgacaatccaccttcgttcctggaggattcctactcaatatacattcaagagaataatttgcccggagtgctgttgtgcactgtacaggccacggatcctgatgagaaagaaaatgccgaagtgacttattctctgctcgagcgggagatacaaggcctcccggtaacaagctacgtttctattaattcggccagcggaagcctgtatgccgttaactcttttgactacgagaagtttagggagttttttgtcacagttgaagctcaggataaaggaagcccaccgttgagctccaccgtgaccgccaacgtttatgtcgttgatatgaacgaccatgcccctcacatcctgtatcccacctctacgaactcaagtgctgctttcgagatggtccccagaacagctcctgcagggtatctcgtaacaaaagtgattgccatggacagcgacagtggacagaacgcctggctattctaccacctcgctcagacttcggatctggacctctttaaagtggagctccataccggagaaatcagaaccactcggaagatgggtgacgaaagcggaagcaccttcaaccttacagtcgtagtgcgagataacggggagccaagtctttcagccagcgtagcaatcacagttgccgtggtggacagggtcagtaaaattctacccgacacgcaaagacacgtgaagagcccacggacgtactcggagatcactctgtaccttatcatcgcattgtccacggtctcattcatcttcctgctgactattataatcttaagcatcataaagtgctatcggtacacagcatacggcacagcctgttgtgggggtttttgtggagtacgcgagcgaagccctgccgaactgtacaagcaggctaacaacaacatcgatgctcgaattccgcatggcctgaaagtacagccacatttcatcgaagtccgcggtaacggttctctcaccaagacatattgttataaagcctgtctgactgcaggttccggttccgacacgtttatgttttataacactggcgcacagactggcccagggccaagtggagctcaggctgctgtgacagacagccgaaacttgacaggtcaaagcggccaaaacgctggaaaccttataatcctgaagaacgaggctgtaagtcagaacgagcctcgccagccaaatccagactggcgctattcagcatcactgagggctggcatgcatagctcagtgcacctggaagaagccggaatcctccgcgcaggtccgggtggcccagatcagcagtggcctacagtgagcagtgccacgcctgagcctgaggctggcgaagtgagtcctcccgtgggtgcaggggtgaacagcaattcctggaccttcaagtatgggccaggcaatcctaaacaaagcggccctggcgagctacctgacaaattcataataccaggaagcccagccatcatttcaatcaggcaggaaccgacaaattcccagattgataagtctgactttatcacattcggcaaaaaagaagaaacaaagaagaagaaaaaaaagaaaaaaggtaataaaactcaagagaagaaagaaaaaggcaattccacgacagataactcagatcagtag

SEQ ID NO: 237312 - DNA, 2457 bp, synthetic construct
  misc_feature 1..2457: note = Description of Artificial Sequence: Synthetic coding sequence
  source 1..2457: mol_type = other DNA
atggcagggacccgacggaaatccctgcaaaaccgacaggtggggtccctcctcatcttcctctgcatatctgtaggagacgctacaaccatcagatacagcgtggcagaggaaatggagtccggcagctttgtcgcgaacgttgcaaaagacctagggctggaagtgggaaagctcgctgcccgtggcgctcgcttggtttctgaggggaacaagatgcactttcgactgcatcggaagacaggtgacctctttgtgaaggagaagctggaccgcgaatcactctgcggaaaagctgatccttgtgttctccacttcgaggttgtgctggtggagcctctgcagtcatttagggcggaagtgcgagttttcgatatcaatgataacgcaccggtgttcttgaataaggaacctcttttgaagataccggaaagtactccgctcggcagtcggttccctttacagtcagctcaggacttggacgtgggtcttaacggcttgcagaactacaccctcagtgctaatgggtattttcatctgcatacccggttctgcagtcacggcccaaagtatgctgagcttgtactgaacaaaccgctcgatcgcgaggagcagcccgaagttaatctcaccatcacagcggtagatggtgggtccccacccaaaagcgggaccgcccacattcacgtcgtcgtgcttgatgtgaacgaccacgtcccgcagttttcacgattggtctacagagcccaggtgtcggagaatagccccaatgggtcattggtagctactgtgacagctgttgacctggacgagggtaccaacaaagcaattacctactccctggcccagaacccagaagcaattttaaaaacattccagatcgatccccagaacggagaggtgaggctgagaggtccattagacttcgaggcaatcgagacatatgatatcgatatccaggctaccgacggcggaggactgtctgcacactccaaggtcttggtcgaagtcgtagatgtcaatgataaccccccagaggttatggtcagcagtgttagtagtccgttacctgaagactctccgcctcaaacagtagtggccctcttcactattcgggatcgagatattcgggttggaggcaaggtcacctgcttcctacgggaggatctccccttcgttattaagcctactttcggcaattcttattcattagtgacagaccgctcgctagacagagaagaggtgtccggctataatatcacaattgtggctatggatacaggccctcccagtctctcagccgagaccatgatagaggtgcttatatctgacgtgaatgataacccgcctattttccgggaagattcttacatactcacagtccgggagaataatagtcctgccgtttttattggaaaagtgcatgctgaggatctcgatctcggtgaaaacgcacagatcacatattcactgctccctccgaagaatggagaccttagcgtattcgcttacatatccattaacagtggcaacggcaaattatatgcactccggaccatggactatgaggccattcaggatttccagttcgtggtgaaggccacagatggaggcttcctgagcctcagctcccaggtgactgttcgcgtggtggtgctcgatgataatgataacaggcctatgatactatatcccctacaaaatggtactctgccttgcaacgacctggtgccacggagtgctgaggccggttacttagtgacgaaagtcgttgccgtggacggagactcgggtcaaaacagctggctctcctaccacttactcaaggcaaccgacttagggctcttcagcgtgcagaggcagaatggcgagattcatacgctccgccagattagcgagcgtgaccccatgatgcagaaactgattatcctggtgcaggaccacggccagcccgcactgtcaactacagtatccctgaacattctgttggtcgatggatttagcgaaccctatcttcaattccaggaccccactaaacattcccggaaagtgaatccctctacaaagtacctcgtaatatcattagtaatcctttccttcctgttcttgcttagtgttatcgtgatctttatcatacatgtgtatcagaagatcaagtatcgcgaaaagtttacaatccaggaacacttctacgatgactgcaacttttctaataacctcgttcagggacaaggtaacggttcactgagccgaccatgcccttatgaaatgtgctccgctaccgggaccggtaattcagaatttaggttccttaagcggtttatgcctaactttccttttccccacgctacaggagagattaaaatggaagcaggaagctccctgccaccgaactccgatagaaacaaatcacagcggctggaaggacatgatcaggtgtcagatgattatatgtag

SEQ ID NO: 237313 - DNA, 2394 bp, synthetic construct
  misc_feature 1..2394: note = Description of Artificial Sequence: Synthetic coding sequence
  source 1..2394: mol_type = other DNA
atggagaaccaaggaacccggacacagcaaatcagacaagtgctgctgcttttcgttctgcttggaatgtctcaggcaggatcagagacttggtccttttcagttgctgaagagatgcagagcgggagcttcgttgggaacttggccaaagacctgggactgaaggtgagagagttgtcttcaaggggggctcgggtggtttctaacgacaagaaacagcggctgcagttagatataaacaccggcgacctgctcctgtccgagacgctagaccgcgaggaactgtgcgggagcattgaaccatgtgtgctgcatctgcaggtgctaatgcaaaatcccacccagttcttgcagattgaactgcaggtgcgggacattaatgaccacagtccaatattttcagagaaacaaatgctgttggagatcccagagaacagtcccgtaggcgctgtgttcctgctggaaagtgccaaggacctggatgtggggatcaatgcagtcaagtcgtataccatttcccctaacagccacttccatattaagatgagagtgatccctgataataggaaatatccggaactggtccttgataaagccctcgattacgaagagctgccagagctgtccttcattctatctgctctggacggcggttcaccaccacgcagtgggacagcattagtgcgggtcgtggtggttgacatcaacgacaacagtcccgaatttgagcaggcattttacgaggtcaagatacgcgagaacagcattctcgggtcactgatcctaatagtgagcgcctgggatctggacagtgggacgaatggagagatttgctatacatttagccacgcatctgaggatatcagaaagacattcgagattaatcagaagtcgggcgagatcaccctgagagccccattggacttcgaaacgatcgaatcctactcaataattattcaggcgactgatgggggtggcctgtttggaaagagcaccgttattatccacgtaatagacgtcaatgacaatgctcccgagatcaccgtgtcttcaatcacatctcccattccagaaaatacacctgaaaccgtcgtaatggtgttctctatccaggatattgattctggtgataatggtcgaatcgtgtgttccataccagaagacctgccgttcgtcctcaaaagttctgtcgagaattattatacactggagacggagcgtcccctggatcgcgagagcacagctgagtataacataacgatcacagtcacagacttgggcattcctagactgaagaccgagcataacaccacggtgcttgtttccgacgtcaatgataacgcccctactttcacccagacatcatataccttgttcgttagggaaaacaattcaccggcacttcatatagggagtgtgagtgcgaccgaccgcgactccggtaccaacgcccaggtcaattatagccttcttcctccgcaggacctgcatctgccgctggcctcactggtcagtatcaacaccgataacggtcaccttttcgcccttcgcagcctcgattacgaagcactccaggcgtttgattttcgcgttggtgccacggatcgaggatctcccgcattatcaagcgaggccctggtgcgggtgttggtacttgatgctaacgacaacagccctttcgtgctatatccccttcaaaatggttccgcaccatgtaccgagctggtgccgagagctgccgaacccggttatttagttactaaggtagtggctgtggacggagatagtggtcaaaacgcatggttgtcttaccagttgttgaaagcaaccgagcccggattatttggagtatgggcccacaacggggaagtgcgcaccgcacggcttttatccgagagggatgcagccaagcaccgattagtggttctggtgaaagacaacggagaaccaccaaggtcagctacagccacgttacaagtactcctggtggacggcttcagccagccttacctgcccctacctgaagcagcacccgcacaggcacaggccgactcactcacagtgtacctggtggtggccctcgcgtctgttagctcactgtttcttttctctgtgctactctttgttgccgttagactatgtcgaagatcccgcgctgcaagtgtgggcagttgtagcgtgcccaaagggccttttcctgggcatttggtcgacgtttccggaacagggacattgtcacaatcttatcagtacgaggtctgtttgaccggcggaagcgaaacaaatgaatttaagttccttaaacctgtcatccccaatatccaggctaagggactgggcaagaactctgaagagaacagtacatttcgcaattcatttggttttaacttctag

SEQ ID NO: 237314 - DNA, 1299 bp, synthetic construct
  misc_feature 1..1299: note = Description of Artificial Sequence: Synthetic coding sequence
  source 1..1299: mol_type = other DNA
atggttttctcaatccaggacatcgactcaggggataacggtcggatcgtctgtagcatcccagaagacctgccttttgtcctgaaatcatcagtggagaattattacacactcgaaactgaacgccctttggaccgggaaagcactgctgagtacaacatcacaattactgtgacagatttaggaattcctcggctgaaaaccgaacacaacaccacagtgttggtgtcggatgttaacgataacgcacctacgttcactcagacatcttataccctcttcgtgagagagaacaacagtccagccctacatatcgggtctgtgtccgccactgatcgcgactcagggacgaacgcccaggtcaactatagtctcctcccccctcaagatctacatctgccgctagcaagtctggtgtcgatcaatactgataatgggcacctcttcgcgcttcgcagcctggactatgaagcacttcaggcctttgacttccgggtaggggctacagaccgaggctccccagccctgtcttcggaggccttggttcgcgtgttggtcctggacgccaacgataactctccattcgtactttacccacttcagaatggttctgccccatgcaccgaattggtgccacgagctgccgaacctgggtacttagtgaccaaagtggtggctgtggacggggattcggggcagaatgcatggttatcctaccagctgcttaaagccaccgaacccggattgttcggtgtgtgggcccacaatggcgaggtgcggaccgccagactcttatcggaacgcgatgctgccaaacatcgcttagttgtgctagtcaaagacaatggagagccgccaagaagcgctactgccacactgcaggtgttactggtggatgggttctcccaaccctatttgccactacccgaagcagcccctgcacaagcacaagccgacagtttgaccgtgtatttagtggtggcgttagcttccgtctccagtctgttcctgtttagcgtcctgctgttcgtggcagtgcgactctgtaggcgtagtcgcgcagcatcggttggctcatgttcagtgcctaagggaccttttccgggacaccttgtagatgtgtctggcacaggtactctgagccagtcttaccaatacgaggtatgtctgaccggtggttcagaaaccaatgagtttaaatttctgaaacctgttatcccgaacatccaggcgaaaggtctggggaagaattccgaagaaaactctacttttcggaacagcttcggatttaacttctag

SEQ ID NO: 237315 - DNA, 399 bp, synthetic construct
  misc_feature 1..399: note = Description of Artificial Sequence: Synthetic coding sequence
  source 1..399: mol_type = other DNA
acaatcgagtcgtacagcataattatccaggctaccgatggcggaggcttgttcgggaaatctaccgtaattattcatgtaattgatgtgaatgataatgccccagagataaccgtgtcttcgattacctctcctattcctgagaatactccagagaccgtggtgatggtgttcagtattcaagatatcgatggtaccactgaagagctgtttgtaccatttagaaagacaagccacgttttgaagagctcggtggagaattactacacactcgagaccgagcggccattggacagggagtccaccgctgagtacaacatcaccatcaccgtgacagaccttggtattccaagattgaagaccgagcataacacgaccgttcttgtgagtgacgtctag

SEQ ID NO: 237316 - DNA, 2388 bp, synthetic construct
  misc_feature 1..2388: note = Description of Artificial Sequence: Synthetic coding sequence
  source 1..2388: mol_type = other DNA
atggaaaacgggggtgctggcacacttcagatccggcaggtgttactgttcttcgtcctcctgggtatgtcccaggccggaagcgaaacgggcaattttctggtcatggaagagctgcagtcaggcagttttgtaggcaacctcgcaaagacattgggtctggaggtgtccgaactgtcctctcgcggagcgagggtcgtttccaacgataataaggaatgcttgcagttggatacaaatactggagatcttcttctgagagaaatgctcgacagggaagaactctgcggctcaaacgagccctgcgtactgtattttcaagtactgatgaagaatcctacccagtttttgcagatagagctccaagtgcgcgacataaacgatcactcacccgtgtttcttgagaaggagatgttgctggagatacccgaaaattcccctgtgggcgcagttttcctgttggagtctgcgaaagaccttgacgttggaataaatgcagtaaaaagctataccattaatcccaacagtcattttcacgtaaaaatcagggtgaatcctgacaacagaaagtatccagagctggtgcttgacaaggcacttgattacgaagaaagacctgagctcagcttcatcttgactgctctagacggcggaagccccccaaggagtggcaccgcgctcgtccgtgtcgtggtcgtggatattaatgacaatagtcccgaattcgagcaggcgttctatgaagtcaagatccttgagaacagcatcctcgggagcctcgttgtcactgtgtcagcatgggatttagactcgggcactaactctgagctctcatacaccttttcccacgcctctgaggatatacggaagacattcgaaattaaccaaaaaagcggggacatcactcttacagccccactggattttgaggctatagaaagctattccatcattattcaggctacggacggaggcggattattcggcaagtcaacagtgcggattcaggttatggatgtcaacgataatgcacctgaaataaccgtctccagcattaccagccccatcccagaaaatacgcccgaaactgtggtcatggttttccggatccgagatcgggactccggcgataatggaaaaatggtgtgttccatccccgaagacatccccttcgttctgaaatcaagtgtgaataactactacaccctggagacggagagacctcttgatcgtgagtccagagcagagtataatattaccataacagtgaccgatctgggcacacccaggctgaaaactgagcacaacattacggtgctggttagtgacgtcaatgacaacgcgcctgctttcactcagacctcctatgctctcttcgtccgagagaataattctccagcactgcatatcggatccatttccgccacagaccgggactccggtactaatgcgcaggtaaattatagtttactccccagtcaggaccctcacctgcccctcgccagtcttgtgtctattaatgccgataacgggcatctgttcgctttaagaagccttgattatgaagctttgcaaggtttccagttccgagtgggtgccaccgaccacggctccccagccctgtccagcgaagccttggtaagggtacttgttctggacgccaatgataattccccttttgtcctctaccccttgcagaatggatctgctccctgcacagagctggtgccttgggcggcagaacctggctacctggtaaccaaggtggttgcggtggacggagattcaggccagaatgcctggctctcctatcagcttctgaaagccaccgaacctgggctttttggggtgtgggcccacaatggcgaggtgaggaccgcaaggctcctgtccgagcgcgacgcagccaagcaccgcctggtggtgctcgttaaggacaatggagaacctcctcggtcggcaacagctacattacacgtgctcctggtggacgggttcagccagccctatcttcctttgccagaggccgctcccgctcaggcgcaggcagatagtcttactgtttatctagtggtggccctcgcttctgtgtctagcctcttccttttttccgtactcctctttgtggccgtccgcttgtgccgtcgaagcagagctgcccctgtgggcaggtgcagtgtgccggaaggcccatttccaggccaccttgttgatgtgtctgggacaggcacactctcacagagctaccattatgaagtctgtgtgactggcggtagcagatcaaataagtttaaatttctcaagccaattattcctaatttcctgccacagagcacaggttcagaggtcgaggaaaaccctccatttcagaacaatctggggttctag

SEQ ID NO: 237317 - DNA, 1257 bp, synthetic construct
  misc_feature 1..1257: note = Description of Artificial Sequence: Synthetic coding sequence
  source 1..1257: mol_type = other DNA
atggtgtgtagcatccccgaggacatcccgtttgtgttgaaatctagtgtgaacaactactatacactcgagacagaacgaccactggatcgagagagtcgggcagagtataatatcactattaccgtgacggacctaggaaccccgaggctgaagactgagcacaacattactgttttagtctccgatgtgaacgataacgccccagcctttacccagacttcctatgcactgttcgtgagggagaacaactcgcctgctcttcatataggatctatctcagcgaccgaccgggactctggcacaaatgcccaggttaattactcgctgcttccctcccaggacccgcacctgcccctggcaagcctggtgtctattaacgccgataacggacatctgttcgctctgcgatccctggattacgaagctcttcagggctttcagttcagggttggcgcaaccgaccacggatctcctgccctgtcgtctgaagccctggttcgggttctggtactcgacgccaatgacaactcaccttttgtgctgtacccattgcagaatggctctgctccctgtactgagctggtaccgtgggcagccgagcccggatacctagttacaaaagtggttgcagtggacggcgactcaggacagaacgcctggctctcctatcagctgctaaaggcaactgagccaggactcttcggcgtttgggcccataacggtgaggtaagaaccgctcgtctgctgagcgagcgcgatgccgcaaagcacagactggtcgtgttagtaaaggacaatggagaaccccctcgcagtgccacggcgacgttgcacgtcctcctggtggacggctttagtcagccatatctccccctgcctgaggctgcaccggcacaagcacaagctgactccctcacggtttacctggtggtggcactcgcctctgtgagctcgctgtttctgttttccgttctgctgtttgtcgctgtgcggttgtgccgtcgatcccgggcagcccctgttgggcgttgcagcgtccctgaaggccctttccccggacatctggttgatgttagcggcacaggaaccctctctcagtcttatcactacgaggtgtgcgtgaccggaggaagcagatccaacaaatttaagtttctgaaaccaattataccaaacttcctcccgcagtccactgggtctgaagtcgaggagaacccccctttccagaacaacctaggcttctggatacagtag

SEQ ID NO: 237318 - DNA, 1377 bp, synthetic construct
  misc_feature 1..1377: note = Description of Artificial Sequence: Synthetic coding sequence
  source 1..1377: mol_type = other DNA
atggacgtgaatgacaatgcgcctgaaattactgttagctcaattacatcacctatccctgaaaacacacctgaaaccgtggtgatggtgttcagaataagggaccgggatagcggtgacaatgggaaaatggtttgctctatacctgaagacataccttttgtcctgaagtccagtgtgaacaactattatacattggagacagaacgccctttagatcgggagagccgggctgagtacaatattacaatcacagtcactgacctaggaacccctcgcctgaaaaccgagcataacataaccgtgctagtctcggacgttaacgataatgccccagcttttacccagacatcttacgcgctcttcgtccgggaaaataacagtcccgcactgcacattggctcaattagcgccaccgacagagactctggaaccaatgcccaggttaactacagtctgctccccagccaggacccacatctgccgctggcctcactggtgtccatcaacgcagacaatggccatctgttcgctcttaggagcctggactacgaggcactgcagggcttccagttcagggtcggagcaacagatcacggctcccccgcactgtcctccgaggcattggtcagggtccttgtgctggacgccaacgacaacagcccatttgtcctttaccccctccaaaacggaagtgcaccatgtaccgaactggtgccttgggcagccgaaccgggatatctggtcactaaagttgttgctgttgatggagatagtgggcagaatgcatggctttcatatcagctactgaaggctacagagccgggactgtttggtgtatgggcacataacggtgaggttcgcaccgcccgacttcttagcgaacgcgacgccgcaaaacaccgtctggtggtgctggtgaaagacaatggggaaccccctcgtagtgcgactgccacactacacgtgctgttggttgacgggttttcgcagccctacctcccattgccagaggccgcacctgcacaggctcaggccgacagtctcactgtgtatctggtagtcgccctagcatccgtgtctagcctgttcctgttctccgtcctcctgtttgtagctgtccggctctgcagacgatcccgtgccgctcccgtgggacgctgctcagtcccagaaggccctttccccggtcatttggtggatgtaagtggaactgggaccctgtcccaaagttaccactacgaagtgtgtgtgacagggggtagcaggtccaacaagtttaagttcctgaaacctatcattcctaactttctgccccagtctaccgggtcagaggtggaggaaaaccctccttttcagaacaacctgggattttag

SEQ ID NO: 237319 - DNA, 2397 bp, synthetic construct
  misc_feature 1..2397: note = Description of Artificial Sequence: Synthetic coding sequence
  source 1..2397: mol_type = other DNA
atggaagcgtcagggaagctgatctgccgccagcgacaggtattattcagttttctccttctgggtctgtccttagctggggctgcagagcccaggtcttattctgttgttgaagagacagagggttcttcttttgtgaccaatttagccaaggatctcgggcttgaacaacgggagttctcccggagaggcgtgcgtgtcgtgtccagaggtaacaagttgcaccttcaactaaatcaagaaacagctgacctgctgctgaacgaaaagctcgaccgggaggacctatgcggtcacacagaaccttgtgtactacgctttcaggtgctgcttgagagcccatttgaattctttcaggcggaacttcaagttatcgacatcaacgaccactcccctgtcttccttgacaagcagatgttggtgaaggtttcagaatccagcccgcctgggacaaccttccccctgaaaaatgcagaggatctggacgttgggcagaacaatatcgagaactacatcatttcccccaacagctactttcgggtgttgacacgcaagaggagtgacggccgaaagtacccagagctcgtcctcgacaaagcactggatagggaggaggaggcagaattacgcctcaccctgaccgcattggacggcggatcgccaccacggagtggaacagcccaggtatatatcgaggtccttgatgtgaatgataatgcaccggagttcgaacagccattttatcgtgtacagatcagtgaggattcccccgttgggtttttagtggtcaaagtttctgctactgatgtggataccggtgtgaacggcgaaatcagctacagtctgtttcaggccagcgaggagatcggtaaaacttttaagataaaccccctcacaggagaaatagaactaaaaaaacagctcgacttcgaaaagcttcagtcttatgaggtgaatattgaggcccgtgacgccggtacattcagcgggaagtgcactgtgctcattcaggtgatagacgtgaatgatcatgccccagaagtaaccatgagcgcctttacgtcgcctattcccgagaacgcaccagagacggtggtcgcgcttttcagtgtatcggatctcgactcaggcgagaatggaaaaatatcctgctctatccaggaggacttacctttcctgttaaaatctgcagagaatttttacaccttgctaacggagagaccattagatagggagtccagagccgaatacaatatcacgatcacggtcacagatctgggtacccctatgctgatcacacagttgaacatgactgtcctaattgccgatgtgaatgataatgcaccagcctttacgcagacttcttatactctgttcgttagggaaaataattctccagccctacacatacggtctgtgtccgctacagatagagactccgggactaatgcccaggtgacatactcattacttcccccacaggacccacacctcccccttacctcactcgtttctattaacgcagataatggacacttattcgccctgcgcagcctcgattacgaagccctgcaaggatttcagttccgggtaggggcatccgaccatgggtcgcccgcactgtcttccgaagcactcgtccgagtggtggtgttggacgcaaacgataacagccccttcgtgctatatcctctgcaaaacggctccgccccatgtactgagctggtacctagggctgccgagcccggttacctcgtgacaaaagtcgtagccgttgacggcgacagcggccaaaatgcttggctatcctaccagctgctcaaagccactgaactgggattgttcggcgtgtgggctcacaatggcgaagtacggacagctcgtctactgtccgagagagacgcggctaaacatagactcgtggtactggtgaaagataatggggaacctcctcgttccgctacagcgaccctgcacgtcctcctcgtggacggcttctcgcagccttacctacctttaccggaagccgcacccacgcaggctcaggcagacctgttgactgtctacctggtggttgccctggccagcgtctcaagtctgttcctgtttagcgttctcttgttcgtggcggttcggctctgtcgcaggagtcgcgctgcaagcgtaggccgatgcctggtgccagaagggccacttccaggacacctcgtcgacatgagcgggactaggaccctgtcccagtcctatcagtatgaggtttgtttggccggaggctctggcacgaacgaatttaaatttctaaagccaattatcccaaactttccaccccagtgtccagggaaagaaattcagggcaactccacatttcccaataactttggctttaatatccagtag

SEQ ID NO: 237320 - DNA, 2235 bp, synthetic construct
  misc_feature 1..2235: note = Description of Artificial Sequence: Synthetic coding sequence
  source 1..2235: mol_type = other DNA
atggaagcatccgggaagttaatctgtaggcaacgccaagtgctcttttcctttctgctgctgggactcagcctggcgggagccgctgaacctaggagctacagcgtcgtggaagagactgaggggtcgagcttcgtaaccaatcttgccaaggatctggggctcgaacagcgcgaatttagcaggaggggcgtccgagtggtctcccgtgggaataagcttcacctgcagctgaatcaagagacagccgacctcctgctgaacgagaagttggacagggaggatctctgtgggcataccgagccttgcgtgttgagattccaggttctcctcgagtcacctttcgagttttttcaggccgagctgcaagtcatcgacattaatgatcattccccagtatttctggataagcagatgctggtgaaagtgtcagagtcttcacctcctgggacaacattcccactgaagaacgcggaggatctggatgttggccagaacaatatcgagaactacatcatttcacccaactcctactttcgggttctgactagaaagcggtcagacggacgcaaatatcctgagctggttctcgataaagccctggaccgggaggaagaagcagagctccggctaaccctgacagccctcgatggcggaagtcctcctcggtccgggactgcccaggtctacatcgaagtcctggatgttaatgataacgcgcctgaattcgaacaaccattttacagagtgcagatttccgaagattctccagttggattcctcgtggtgaaagtgtctgcaactgatgtggataccggggtgaatggagaaattagctacagcctctttcaggccagtgaagaaattgggaaaaccttcaagattaacccccttaccggagagattgaactgaagaaacagttagatttcgaaaagctgcagtcctatgaggtgaatattgaggccagggacgccggaactttctccggcaaatgtaccgtgctcatccaggttatagatgtcaacgaccacgcaccagaagttaccatgagcgcctttacatcccctatccccgagaatgccccagaaacagttgtggccctgttttccgtgagcgatttggacagcggagagaacggtaagatatcttgcagcattcaggaagatctccctttccttctgaagtccgccgagaacttttacacactactgaccgagcgcccactggatagagagtcgcgagccgaatacaacatcacgatcacagtcacagacctcggaactcctatgctgattacccagctgaatatgaccgtgcttatcgccgacgttaacgataatgcgccagctttcacacagacttcttataccttgtttgtgagagagaataactcccctgccctgcatatcaggagcgtcagcgccaccgaccgcgacagcggaactaatgcccaggtgacgtatagtctgctgccccctcgcgtcgtggtccttgacgccaatgataattccccatttgtactctatcctctgcagaacggctccgccccttgcaccgagttggtgccgcgagccgcagagcccggatacctagtaaccaaggtggtggcggtggatggagatagcgggcagaatgcttggctctcctatcagctgctaaaagccacggaactggggctattcggcgtgtgggcacacaatggtgaggttcgtaccgctagactcctctctgaacgtgacgcggcaaagcatagactagtggtgctagtgaaagacaacggagagccgcctagatctgccactgccaccttacacgtcctcctggtggacggcttctctcagccctacctgcctctgccagaagcagcacccacacaggcccaagctgacctgctgaccgtgtacttggtagtggcactggcaagcgtttctagcttgtttcttttctctgtactgctattcgttgcggtccgcctatgtaggagaagccgtgccgcatctgtgggaaggtgtctggtgcccgagggtccattacccggtcacctggttgatatgtccggcactcggacactgtcccaatcctaccagtacgaggtgtgcttggcaggcggatctggaactaatgaattcaaattcctgaagcccatcatccctaatttcccccctcagtgccctggcaaagaaatccagggtaacagcacattcccaaacaacttcgggtttaatatccagtag

SEQ ID NO: 237321 - DNA, 2409 bp, synthetic construct
  misc_feature 1..2409: note = Description of Artificial Sequence: Synthetic coding sequence
  source 1..2409: mol_type = other DNA
atggaagcttccgggaagctaatatgtaggcagcgacaagttctgttctcattcctgctcctgggactgagcctggcaggcgctgctgagcccaggagctacagtgtcgtggaagagaccgaaggctccagttttgtgactaatttggccaaggacctggggctggagcagagagaattctccagacggggagttagggttgtgtcaagaggcaacaagttgcacctgcagcttaatcaagaaactgccgacctcctgttgaatgagaagctggacagggaggacctgtgcggacacacggagccttgtgtgctgcgtttccaggtgctacttgagtctccctttgaatttttccaggccgaacttcaggtcatcgatatcaatgaccactcaccggtcttcttagataagcagatgctggtcaaagtgtccgagtcttctccccctggcaccactttccctttaaaaaacgcagaggatctcgatgtcggacagaacaacattgagaactatatcatatctccaaactcgtatttcagagtgctcaccagaaagaggagtgacggcaggaagtaccccgagcttgtgttagacaaagctttggatagagaggaggaggccgaactacgcttaacactgaccgcccttgacggcggtagcccccctcgtagcggcaccgcacaggtctatatagaagtgctggatgtcaacgataatgcaccagagtttgagcagccattttatagagtgcaaattagcgaagattcgccagtcggctttcttgtcgtgaaggtgtctgctactgacgttgacaccggagtcaatggcgaaatctcctacagcttgtttcaggcaagtgaggaaatcggcaaaaccttcaagatcaaccctctcacaggtgagatcgagcttaaaaagcaattggatttcgagaagctgcagagctatgaggttaacatcgaggcgagggacgcaggtaccttctcaggaaagtgtacagtgctcatccaggtgattgatgtaaacgatcatgctccagaggtgacgatgtctgcctttacgtccccaatcccagagaacgctcctgagacggtggtagcgcttttcagtgttagtgatctcgacagtggggaaaatggtaagatctcatgctccatccaggaggatctgccatttctgctgaagtctgccgagaatttctacactctgctgaccgagagaccgctggatcgggagtccagggctgagtacaatatcactattaccgttacggatctggggacaccaatgctgattacacagctgaacatgacggtgctgattgctgacgttaatgacaatgcacctgcgttcacgcagactagctacactctcttcgtgagggagaacaattcacccgcactgcatatacgaagcgtgtccgcgaccgatcgcgactcagggaccaacgctcaggtcacttactctttactaccgcctcaagacccccacctgcctcttacttcccttgtttctataaacgcagataacggccacctgttcgctctcaggtccctggactatgaggcgcttcagggcttccaattccgagtcggagcttcagaccacggcagtcctgccttgtccagtgaggccctggtgcgtgttgtggtactcgacgccaacgataactcgcccttcgttctgtaccccctccagaacggctcagcgccttgcaccgagctcgtccccagggccgcagagccgggatatctagtaactaaggtggtggcggttgatggcgacagcggccagaatgcctggctttcttaccagctgttgaaggcaacagagctgggtctgttcggcgtgtgggcccacaatggggaagtgcgcactgctcgtctgttgtccgagcgcgacgcagccaagcaccgcctggtcgtgctggtgaaagacaacggtgagccccctaggagtgcaaccgctacgttgcacgttctcctggttgacgggttttcacagccttatctgccactgccagaagcggctcctacccaagctcaggccgacctgttgacagtttacctcgtggtggccctggcttccgtcagctctttattcctgttctccgtactgctgttcgtcgctgtgcggctgtgccgaagatctagagcagcatctgtcgggcgttgcctcgtccctgagggaccactgcccggtcatctcgttgatatgtctgggacccggactttgtctcagagttaccaatatgaagtctgccttgcaggaggttctgggaccaatgaatttaagtttttgaagccaatcatcccaaatttcccgcctcagtgccctgggaaagaaatccagggcaatagtacatttccaaatctttgtgtgtgcaacattgtgcggatttacagctag

SEQ ID NO: 237322 - DNA, 2397 bp, synthetic construct
  misc_feature 1..2397: note = Description of Artificial Sequence: Synthetic coding sequence
  source 1..2397: mol_type = other DNA
atggaaatccgcggtgccctggatctcaggaagagacaggttctcatatttctggtgctgctgggcctttcccgcgctggaaccgaatcagctcattactctgtggcagaggagactgaaatcgggagtttcgtggcaaacttagcaagagatttagggctgggagtggaggaactctcctcccgcgaggctagagttgtgagtgatgataataaaaaatatctgcatcttgatttgcttactgggaatttgcttttgaacgagaagttagacagggacgagctttgcggttctactgagccttgcgtcctgcactttcaggtggtgctcgagaatccactgcagtttttcagatttgaactgtgtgtcaaggatatcaatgaccactcaccgacattcttggataaggagatactcattaaaatcagtgagggcacaaccgtgggggcaacattcttgatggagtccgcacaggatcttgatgttggatccaacagcctgcagaactatactatcagccctaattctcacttttatattaagatccctgattcttctgatcgcaagatatatccagaactcgttctggaccgggcactggattacgaacaggaggcagagctgaggctcacattaaccgctgtggacggaggatctcccccaaagagcggaactacgctcgtgcttataaaggtcctggatatcaacgacaacgctccggaattcccccagagcctctatgaggtacaagttcctgaagataggcccctggggtcctggatcgcaacaattagcgcaaaggacctggatgccggaaattacggcaagatatcttatacctttttccacgcatcagaagatattcgtaaaacttttgagataaatccaatcagcggtgaagtcaaccttaggtcacccttggactttgaggttatacaatcctatacgatcaacattcaagccactgacgggggtggcctgtccggaaaatgtacattacttgtaaaggtcatggatattaatgacaacccccctgaggtgacaatcagctcaattactaagcggatccccgagaacgcatctgagacgttggtcgccctcttttccatccttgaccaggatagtggcgacaatgggagaatgatttgttcaattcaggacaacctcccctttttcctgaagccaactttcaagaacttcttcacattagtatctgagaaggcgctggaccgcgagtcacaggctgagtataatattaccatcacagtgaccgacctgggtacaccgagacttaaaactgaatataatatcaccgtgctcctcagcgatgtgaatgataatgcccctaccttcacacagacctcatatacattgttcgtgagagaaaataattctccagcgctccatatcggaagcgtgtcagccactgaccgcgacagcggtactaacgcacaggtgaattatagtctgctgccgcctcaggaccggcatctcccactggcctcgctcgtaagcattaatgccgataacggacacctgtttgccctgcgtagcctcgattacgaagctctgcaggaattcgagtttagagtgggagccacagatagaggctcccccgctttgagctcagaggcattggttcgggtgctcgtcttagatgctaacgataatagcccatttgtgctctatcccctacaaaacggttccgccccatgcacagagttagtgccacgtgcggctgaaccagggtacctggtgaccaaggtggtggccgtggatggagattctgggcagaacgcgtggctaagctaccagcttctgaaagctactgagccgggtttattcggcgtatgggcccacaatggggaagttcgcacggctaggttgttgtcagagcgcgatgccgctaaacacagacttgtggtcctcgtgaaggataatggcgaaccgcctagaagcgctaccgctactctacatgtgcttcttgtagatggtttttctcaaccatacctccctctcccagaagcagccccagctcaagctcaagctgattctctcacagtgtatctggtggtcgccctggccagtgtaagtagcttattcctgtttagtgttctcctgtttgtggctgtccggttgtgccgtagaagtagagcagcctccgtgggtagatgctcggtaccggagggtccttttccagggcacctcgtcgacgtgtcagggacggggacgctgagccagagctatcagtacgaagtgtgcctgaccggtggatcaggaaccaacgagttcaaatttcttaagcccattattccaaactttcaggtacacgacaccggcagaaacatgggggaaattgagaacttcaggaatagcttcggactgaacatccagtag

SEQ ID NO: 237323 - DNA, 1938 bp, synthetic construct
  misc_feature 1..1938: note = Description of Artificial Sequence: Synthetic coding sequence
  source 1..1938: mol_type = other DNA
atggaatcggcccaggatctggacgtgggcagtaactccctgcagaactatacgatttctcctaactctcatttctatataaaaatccctgattcctctgatagaaagatctatcccgaactcgtgctcgaccgggcactggattacgagcaagaggccgagctccggcttaccctcaccgctgtcgacgggggtagccccccaaagtctggaacaactctggtcctgattaaggtcctcgacatcaacgacaatgcccctgagttccctcaatccctttacgaggtgcaggtgcctgaggaccggcctctggggagttggattgcaaccatttccgctaaggaccttgatgcgggaaactacgggaaaattagttatacttttttccacgcatccgaggacatcaggaaaacatttgaaattaaccccatctccggtgaagtgaatcttcggtcccctctggatttcgaggtcatccaatcatatactatcaacattcaggcaaccgacggagggggtttgtctggcaaatgtactctgctggtgaaggtcatggatatcaacgataatcccccagaggtcactatctcaagtattacaaaacggatacctgaaaacgcctcagaaacgctggtagccctgttcagcatactggaccaagattctggagacaacggacgaatgatttgttccatacaggacaatctgcccttctttctaaagccaacctttaaaaacttctttaccttagtgagcgaaaaagctctggatagagagagtcaggctgagtacaacattactatcaccgtgacggatttaggcacgcccagacttaagacagaatataatattactgtgctgctgagcgatgtgaatgacaacgctccaacttttacacaaaccagttatacccttttcgttagggaaaataatagcccagccctgcacatcggcagcgtatctgcgacagaccgggattcgggaactaacgcccaggtaaattattccctactcccaccgcaagatcggcatttgcccttggccagtctggtcagcattaacgctgataacggtcatttatttgccctccgctcccttgactacgaggcacttcaggagtttgagtttagggtgggagctaccgaccggggatcgccggctttatcgagtgaggccttggtcagagttctggtgctcgacgcgaacgataacagtccattcgtcttgtaccctttacagaatgggtcagcaccatgtaccgagctggttcctagggccgctgaacccggttacctggtgacaaaggtggtggctgttgacggcgattctggccagaacgcctggctttcttaccagctcctgaaagccactgagcctgggctatttggggtatgggcacataatggtgaagtgaggacagccaggcttttaagtgagagagacgccgctaaacacaggctggttgtcctcgtgaaggataatggggagcccccaaggagcgccaccgcaacgttgcatgtgcttttagtggacgggttttcacaaccttatctaccgctgcccgaagccgctccagctcaggcacaggcagactctctgactgtctacctggtagtagccttagccagcgtgagttctttgtttctgttttccgtactgctgttcgtggctgtgaggctgtgccgcaggagtagagcagcaagcgtgggaagatgttccgttccagagggcccttttcctgggcacctagtggacgtcagcggcaccgggacactgagccagtcataccagtacgaggtgtgcctaactggagggtccggtaccaacgagttcaaatttctcaagcccatcatacccaacttccaggtacatgatactggcaggaacatgggggaaatcgaaaattttcggaacagttttggcctcaacattcagtag

SEQ ID NO: 237324 - DNA, 2382 bp, synthetic construct
  misc_feature 1..2382: note = Description of Artificial Sequence: Synthetic coding sequence
  source 1..2382: mol_type = other DNA
atggaagccagagttgagcgggcagttcagaagcggcaagtgctctttctgtgcgtatttctggggatgtcctgggcgggtgccgagccactgcgatacttcgtggcagaggaaacagagaggggaactttccttacaaatctggccaaggacctgggactgggtgtcggagagctaagagcgcgaggaactcgcatagtcagcgaccaaaatatgcaaatcctgctcctttcaagcctgaccggagatctcctactcaacgagaaactagatcgcgaggaactgtgcggtcccagggagccttgcgtcctgcctttccagttgttgttagagaagcctttccaaatctttcgcgctgagctgtgggtgagggacatcaatgaccacgcgcctgtgttccttgacagagagatctctctgaaaatcttggagtcaaccaccccgggagccgcatttctgctggagtccgcccaggactctgatgtcggaaccaatagcctgtccaactacacgatcagcccaaacgcctattttcatatcaatgttcacgattcaggggaagggaacatctaccccgagctggtgctgaatcaggtcttagaccgggaagaaatccctgagttttccttaactctcaccgccttagatggcggatcaccaccacgttctgggaccgccctggtgagaatcctggtgctcgacgtaaacgacaatgcccctgacttcgttaggtctttgtataaagtgcaggtccctgagaactctccagtgggctcaatggtagtgtcagtgtctgccagggacttagatactggctcaaacggggaaatcgcgtacgccttcagctatgctacagaaagaattctgaaaacgttccaaatcaacccaacttctggctctctccacttaaaagcccagctggattacgaggccattcagacgtacactttgacgatccaggctaaggatggcggtggactcagcgggaagtgcaccgtggttgttgatgtgacagacataaacgacaacaggcctgagctgcttctatccagcctcaccagcccaatcgcagagaattctcccgagaccgtggtggctgtctttcgaatcagggatcgagatagcggaaataatggtaagactgtctgtagtattcaggacgatgtcccttttatactgaaaccgagtgtggagaacttttacacgctcgtgactgagaagcccctagacagggagcgcaacaccgagtacaacatcacaatcactgtcactgatctcgggacccccagactgaaaacagagcacaacatcaccgtactagtgtccgatgtgaatgataacgcgcctgcttttacccaaactagttacaccctgtttgtgagggaaaacaattcccctgctcttcctattggcagtgtcagcgctaccgaccgggattccgggaccaatgcacaggttatctattccctccttccatcccaggatccccacttgcccctggcgagccttgtctccataaatgccgataacggccacctgttcgccctcagatccttagattatgaagcgcttcaagcattcgagtttagggtgggagctacagacagggggtcccctgccttgtcctctgaagctctggtccgcgtgctggtgctagatgctaacgacaatagcccgtttgtgttatatccactgcagaactcatctgccccatgtaccgagccccttcccagagccgcagagccgggttacctggttacgaaagtcgtcgccgtagacggcgactctggtcagaacgcatggctgtcctatcagcttttgaaggcaaccgagcctggcttgttcggggtatgggcccacaacggggaggtacgcaccgccagattactgtcagagagagatgcagccaagcaacgacttgtagtcttggttaaggacaacggagaacctcccagatcagcaaccgccactctgcatgtcctactggtcgacgggttctctcaaccttaccttagacttccagaggccgctccagaccaagccaattccctcaccgtttatctcgtcgtcgcactcgcttctgtatcttcactgtttctgttgtctgtcctgctgttcgtagccgtgcgcttgtgcagacgctcccgagcagctccagtgggcaggtgttctgtgccagagggcccttttcctaggcatcttgtggatcttagcggaacgggtacccttagccagagctatcaatatgaggtgtgcttaacggggggttcagggaccaatgaattcaaattccttaagcccattatcccaaatttactgccgcagtctacaggtcgagaagtcgaggaaaatcggccatttcagaacaacctgggtttttag

SEQ ID NO: 237325 - DNA, 2331 bp, synthetic construct
  misc_feature 1..2331: note = Description of Artificial Sequence: Synthetic coding sequence
  source 1..2331: mol_type = other DNA
atggagatcggatggatgcataataggcgccagcgccaggtactggtctttttcgtgctgcttagtctgagcggcgctggcgcagagctcggctcttatagcgtggtggaggagacagagaggggaagcttcgtggcaaatctgggaaaagatctgggactcggactgactgagatgtcaaccagaaaggctagaattatttcgcagggcaacaaacagcaccttcaattaaaagcccagacgggagacttgctgataaacgagaagctggaccgcgaagagctctgcggtcccactgaaccatgtatccttcatttccaagtcctgatggaaaatccactggagatatttcaggctgagctgcgggttatcgatattaacgatcatagccctatgtttacagaaaaagagatgatcctgaaaattcctgagaacagtccgctgggtacggagtttcccctgaatcatgcactcgacctggatgttggatcaaacaatgtccagaactacaaaataagcccaagctcgcattttagagtgctgattcatgagtttcgagatgggaggaagtatcctgaattggtccttgataaagaactggacagagaagaggagcctcaactacgccttaccctaacagcgctcgacgggggatctcctcctcggtcgggaacagctcaagttcgaattgaggtcgtcgatattaacgataacgcaccagagttcgaacaacccatctataaggtccagatcccagagaatagcccacttggcagcctggttgcgacggtgagtgctagggatcttgatgggggagcaaacggaaagatcagttacacacttttccagccgtccgaagatatctcaaagaccttggaggtcaaccctatgacaggcgaagtgcgcctccgaaagcaggtggatttcgaaatggtgacttcttacgaggtgaggattaaggccacagacggcggaggcctgtctggaaagtgtacattactcctgcaggtagttgatgttaacgacaatcccccacaggttactatgtctgcgcttactagtccaatacccgagaactcaccggagatcgttgttgccgttttttcggtaagcgaccctgatagcgggaataatggcaaaacgattagcagcatccaagaggacctaccatttctcctgaaaccatccgtgaagaacttttacacattagtgactgagagggctttagaccgtgaagcacgtgccgagtacaatatcacacttacagtgaccgatatgggcaccccccgattgaagacagaacataacatcacagtacaaataagcgatgtcaacgacaatgcccctacctttacgcagactagttacaccctctttgtgagggaaaacaacagtcccgcattacatatcggcagtgtcagtgccacagaccgcgactcaggcacaaacgctcaagtgacctatagcctccttcctccacaggacccccatctgcctctggcctcactcgtgtcgattaacgccgataatggccacctctttgccctccgctccctggactatgaggcactccgggagtttgagttccgtgttagtgcaacagaccgtggcagtcccgctctgagttccgaagctttagtaagagtgctggttctggatgctaacgacaattcgcccttcgtcctgtatcctcttcagaacgggtctgccccttgcactgaactcgtgcctcgcgctgccgagcctggctaccttgtcacaaaggtggttgctgttgatggagattccggacagaacgcttggctaagctatcagttattaaaagccacagagcccggactgtttggcgtgtgggctcacaatggcgaagtgcgcaccgctagattgctctcagagcgtgatgctgcaaaacagcggctcgtggtattggtgaaagataatggcgaaccccctagaagtgcgacagccaccttgcacgtactccttgtagatggtttctctcagcccttcctgcctcttcctgaggcggcacccggacagactcaagccaacagcctcactgtgtatctggtggtcgcactagctagcgtgagttctcttttcctcttttccgtcctgttgttcgttgccgtccggctttgcaggagatcacgtgctgcatcggttggtagatgcagtatgccagaggggcctttccctgggaggctggtggatgtctctggcacggggacgctgagtcagtcttaccagtatgaagtttgtctgaccgggggttcagagacctcagagtttaagttcctcaaaccgatcatcccaaatttcagtccgtag

SEQ ID NO: 237326 - DNA, 2397 bp, synthetic construct
  misc_feature 1..2397: note = Description of Artificial Sequence: Synthetic coding sequence
  source 1..2397: mol_type = other DNA
atggaggccggagagggaaaggagcgggtgcccaagcaaagacaagttctcatcttctttgtccttttgggcatcgcccaggcaagctgccagcccaggcactatagcgtcgcagaggagactgaaagcgggtcctttgtggccaacctgctcaaggacctcggcctggagattggagaactggcggtcagaggggctcgggtcgtgtctaaaggcaagaagatgcatctccaattcgacagacagaccggtgatttactgcttaacgaaaagctcgaccgtgaagagctgtgcgggcctaccgagccctgtgttctgcctttccaggtcctcctggagaatcccttgcagttctttcaagcagaattacggattagggacgtgaacgaccacagccccgtcttcctggacaaggagattctgttgaaaattcccgagtccattacaccgggtacaacattcctgatcgagagggctcaagatctggatgtggggaccaacagtttgcagaactacacaatttcaccgaattttcacttccaccttaatctccaagattcactcgatggcataattttaccccaactggtgctgaatagggcactggaccgggaagaacagcccgagattcggttgacactcacagcgctcgacggtggctccccaccacgctccggaacagcccttgttcgcattgaagtggtggacatcaatgataacgtccctgaattcgctaaattgctctacgaagtacagataccagaagattcccctgtgggctcccaggtggcgatcgtgtcagccagagatctggacattgggaccaacggagaaatcagctatgcttttagccaggcctccgaggatatccgaaaaacattccggctttcggccaaaagtggtgaactgctgctcagacagaaactggactttgaaagcattcagacctatactgtcaacatccaggcaacggatggcggagggctttctggtacttgtgtagtatttgtacaggtgatggacttaaatgataatccacccgaactcaccatgtctaccctcattaaccagattccagaaaatctgcaggacactcttattgcagtcttttcagtaagtgatccagattctggggacaacggcagaatggtgtgttcaattcaggatgacctgccattctttcttaaaccatccgtggaaaacttttataccctcgtcatttccactgctctggaccgcgagaccagaagcgagtataacatcaccatcactgtaactgacttcggtaccccgagattgaagacggagcacaacatcaccgtgctggtctccgacgtcaatgacaacgcacccgcatttacacaaacatcatataccctgtttgtgcgggaaaataatagccccgctttacacatcggctccgtgtccgcgacagacagggattcaggcacgaacgcccaggtgacttattccttgctcccacctcaggaccctcatctccctctggcctctctggtgtccattaatgctgacaatgggcaccttttcgctctgcagagtcttgactatgaggccctccaggctttcgagttccgtgtaggtgctgccgatagaggcagccccgcacttagctccgaggcgctggtcagggtcctggttttggacgcaaatgacaattcaccgtttgtgctctaccccctgcaaaacggaagtgccccatgcacagaactagtgccgagggctgcagaaccaggctatttggtaacaaaagtcgttgctgtggatggtgattctggacagaatgcatggctgtcataccagctattaaaagcaactgagcccggattgttcggggtgtgggcccataacggggaagtccggactgctagactccttcgcgaaagggacgctgccaagcagaggctggtggttctagttaaggataatggcgaaccacccaggtccgctactgcaaccctccatgtcctgttggtcgatggctttagtcagccttatctgctgctgccagaagccgctcccgcacaggcacaggctgacctgctgaccgtctatctggtggtggccctggcatcagtgtcctcgctgtttctctttagtgtcctgttatttgttgccgtcagactctgccgtcgcagtagagccgcttccgtgggaagatgcagcgttcctgagggaccatttccagggcaaatggtggatgtaagcgggacaggtacactgagtcagagctaccagtacgaggtgtgcttgactggcggatccggtaccaatgaattcaagttcctgaaaccaatcattcccaacttcgttgcgcagggcgcagaacgtgttagtgaggccaacccctcattccgaaaaagcttcgagtttacctag

SEQ ID NO: 237327 - DNA, 648 bp, synthetic construct
  misc_feature 1..648: note = Description of Artificial Sequence: Synthetic coding sequence
  source 1..648: mol_type = other DNA
atgaatttagtggggtcatatgcccatcaccatcaccaccaccacccacatccagctcatcctatgttacatgagccttttttattcggtccagcatcacggtgtcaccaggaacgaccttattttcagtcttggctgctcagtcctgccgatgccgcaccggacttccccgcaggaggacctccacccgctgccgctgctgcagcaaccgcttacggtcccgacgcaaggcccggacagtcaccaggacggctggaagccttgggcggaagactaggtcgcagaaagggatccgggccaaagaaggagcgtcgcaggactgagtccatcaacagtgcgttcgccgaactcagggaatgcattcctaatgttccagccgacaccaagctgtctaaaatcaagaccctccggttagccacctcatatattgcctacctgatggacgtcctggctaaagacgcccaatcgggggatccggaagcatttaaagcagaattgaagaaggcggatggtgggagagagtccaaaaggaaacgtgagctgcagcaacacgaaggatttcccccagcccttgggccagtcgagaagagaatcaagggcagaacagggtggccacagcaagtgtgggctctggagctcaaccagtag

SEQ ID NO: 237328 - DNA, 2388 bp, synthetic construct
  misc_feature 1..2388: note = Description of Artificial Sequence: Synthetic coding sequence
  source 1..2388: mol_type = other DNA
atgaagaaacttggtcggatccatccaaacaggcaggtactggcatttatccttatggtgttcctaagtcaggtgaggctggaaccgatacgctattccgtgctcgaagagaccgaatccggtagtttcgtggcccacttggccaaagatctcggtctgggcatcggcgaacttgcaagcagatctgcccgagtgctgagcgatgacgacaaacagaggcttcaattggaccggcagaccggtgatctgctgctgagggagaaactggatagagaggagctctgcggtcctatcgagccctgtgtgctccacttccaggtctttctggaaatgccggtgcagttcttccagggcgagctgctgatccaggacataaacgaccattctccgattttccccgagagggaggttctcctgaaaatcctagagaattcacagcctggtacactgttcccactgctgatcgccgaagaccttgatgttggaagtaacggtctccagaagtacactatcagccccaactcgcattttcacattctgacccgcaatcatagtgaggggaagaagtaccccgatttggtccaggataagcctcttgacagagaagagcagccagaattctctctgaccctcgttgcactggatggtggctctcccccaaggtcgggcacagtgatggtcaggattcttatcatggatatcaacgacaacgcaccagagtttgttcataccccttatggggtccaagtacttgagaattcgcctctcgactccccaattgttagagtcctcgcacgggatatcgacgcgggaaattttggttccgttagttacggactgtttcaggcatccgacgaaatcaaacagaccttctctattaacgaagtgactggggaaatactgcttaagaaaaagttagacttcgaaaaaattaaatcatatcatgttgagatagaggccaccgacggcggagggctatcaggtaaaggcacagtcgtgattgaggtggtggacgtaaatgataatccgccagaattgatcattagcagtctgacttcctcaattcccgagaacgccccagagacagtggtaagcatttttcgtatcagagatagagactcaggcgaaaatgggaaaatgatctgcagtataccagacaatctaccctttattctgaagccgactctgaagaatttttatactctagttacagagcgccctctcgatagggagacaagcgccgagtacaacatcacgatcgcggtcactgatctcggaacgcctcgactcaagacacagcaaaacatcacagtccaggtttccgatgtgaacgacaatgctccagcatttacacagacatcttataccttgtttgtgagagaaaacaattcgcccgctctccacataggtagtgttagcgcaactgaccgagactctggtacgaatgcacaagtgacctacagtttgttgcctccgcaggaccctcatttaccactggcttctttggtgagtataaacgctgataacggacacctcttcgcgctcagaagcctggattatgaagcgcttcaggcatttgagtttcgcgtgggagcctcggatcgtggatctccggcactgagtagcgaagctcttgtgcgagtgctggtgcttgacaccaacgacaatagccctttcgtactatatcccttacagaatggcagcgccccttgtaccgaacttgtgccaagggctgctgaacccggatacctggtcacaaaagtggtagctgtggacggtgacagtgggcagaacgcatggttaagctaccaactgctcaaggcaacagaaccaggactcttcggcgtttgggcccacaacggagaggtgcgaaccgcaaggctcctctcagagcgcgatgcagccaagcacagactcgttgttcttgtgaaagacaacggggagcctccacggtctgccaccgctaccctgcacgtgctgttggtggacggcttctcacagccctatcttcctctgcctgaggccgctcccgctcaggctcaagctgattccctgacagtttacctggtggttgcactggcctcagtttcgtctcttttcctgttctcggtcttacttttcgtggctgttcggctttgtaggcgaagtagagccgctagcgtcggcagatgctctgtccctgagggcccttttccaggtcacctggtagacgtgtcaggcactgggacactcagccaaagctatcagtacgaagtctgcctaaccggtgattccggtacgggcgagttcaaatttttgaagcccatctttccaaatctgttggtgcaagacacaggccgtgaagttaaagagaacccaaagtttcgcaacagcctcgtgttctcctag

SEQ ID NO: 237329 - DNA, 2391 bp, synthetic construct
  misc_feature 1..2391: note = Description of Artificial Sequence: Synthetic coding sequence
  source 1..2391: mol_type = other DNA
atggaggctgggggagagagattcttaaggcaacgacaggttttgcttctgttcgttttcttggggggaagtctcgctggttctgaatccagacgatactccgttgctgaggagaaagagaaaggcttcctcatagccaatttggccaaggacttgggtctgcgggttgaagagcttgccgcacgcggagctcaggtcgttagcaagggcaacaagcagcacttccaacttagtcatcagaccggggacttattgctcaatgagaaattggacagggaggaattgtgcggccctaccgagccatgtattctgcattttcagatcctactgcagaaccccctgcagttcgttaccaacgagctgaggattatcgatgtgaacgatcacagcccagtgttcttcgaaaatgagatgcatcttaaaatcttagagtccactttgcctggcaccgtcatcccactgggcaatgctgaggacctggacgttgggaggaatagcctgcagaactatactatcacaccaaactcgcattttcacgtgcttactcggtccagaagagatggtcgaaaatatccggaacttgtattagataaggctctggaccgcgaagaacagccagaactgagcctgactttgaccgctttagatgggggaagtccaccacgatcagggactgctcaaataaatatacaggtcctcgacattaatgataatgcacccgaattcgcccaacctctgtacgaggtcgcggtcctggagaacactcccgtgaattcagtgatcgtgaccgtttccgccagcgacctcgacaccgggagtttcggaacaatttcatatgcgttcttccacgccagtgaggagattagaaagacctttcaacttaatcctatcactggcgacatgcaactggtgaagtatctcaatttcgaggctatcaattcttatgaagttgatattgaggcaaaagacggcggagggttgtccggcaagagcacagtcattgtccaagtggttgacgtgaacgacaatcccccagagcttactctgagtagtgtgaactctccaatccctgagaactctggcgagacagtgctggccgtgttttcagttagtgaccttgactccggtgataatgggcgtgtcatgtgcagtatagaaaacaacctgccctttttcctaaagcccagcgtggagaacttttacaccctcgtgagtgagggagccctggatagggaaacccgatctgagtataatatcaccataacaatcaccgatctgggcacacccaggctgaagaccaagtataatatcactgtactggtgagcgatgtaaacgacaatgctccagccttcacgcagatttcctacaccctattcgtcagagaaaacaactcacccgcattgcatatcggatccgtatcagctacagaccgcgacagcggcaccaacgcccaggtgacctactcactgttgccgccacaggacccacatctgcccttaagtagtttggtttcaatcaatgctgacaatggacacctgttcgctctgcgttcactggattatgaggctctccaagcctttgaattccgagtaggagctaccgatagaggcagcccggcactgtctagcgaggcgctcgtgcgggtcttggttctggatgccaacgacaacagtcccttcgtattatacccactgcagaacgggagcgctccttgcacagagctggtccctagggccgcagagcccggttatcttgtgacgaaagtagtagctgtcgatggagacagtggccagaatgcatggttgtcctaccagttgttaaaggcgacggaacccggtctctttggtgtgtgggcgcacaatggagaggttcgcaccgctcgactgctttctgagcgcgatgcagcaaagcacaggctcgtcgtactcgtgaaagataacggggagccacctcggtctgctaccgccacgttgcacgtactgctggtcgatggcttctcccaaccctatctgcctctccccgaagccgctccggcacaggcccaggctgatctgcttacagtgtatctggtggtggctctagcctctgtgtcctcgctgttcttattctccgtcttgctgttcgttgctgtgcggttgtgcaggagatcgcgcgcagctagcgttgggagatgttccgtgcccgagggcccattcccaggacagatggtcgatgttagcggtaccggtaccctttcgcaaagttaccagtacgaagtctgtttaactggtggcagtggcactaacgaattcaagtttctgaaaccaattatcccaaattttgtcgcacagggcgctgaaagagtgagtgaagctaatcccagctttaggaaaagtttcgaattttcttag

SEQ ID NO: 237330 - DNA, 1107 bp, synthetic construct
  misc_feature 1..1107: note = Description of Artificial Sequence: Synthetic coding sequence
  source 1..1107: mol_type = other DNA
ggaggcgctccccctcggtccggcaccaccaccatccgcattgtggtgttggataacaatgacaacgcccctgagtttctccagtccttctatgaagtgcaggtgccagaaaattcaccacttaatagcctggtggttgtagtgagcgccagggatttagatgcaggagcatatggatccgtagcttatgccctatttcagggcgatgaggtcacccaaccattcgtcatagacgagaagactgcagagattcgtctgaagagggccttggacttcgaggcgacaccctattacaatgtcgaaattgtggccaccgacggaggaggcctctccgggaagtgtaccgtggcgattgaagttgtcgacgttaacgacaacgcacctgaactcactatgtcgactctgagttcacccactcccgagaacgccccagagaccgtcgttgctgtgtttagtgttagcgatccggatagcggagataatggtcgcatgatatgcagcattcagaacgacctgcccttcctattgaagcctactctcaagaatttttacacactggtgactcagcgcactctggaccgggagtcccaggctgaatacaatattaccattaccgttaccgatatggggactcctcgtctgaaaaccgagcacaacatcaccgtactggtgtctgacgtgaacgataacgcccctgcctttactcagactagttacacccttttcgtgagagagaataattcacctgctctgcatatcgggtccgtatctgcaaccgatcgagatagcggcactaacgcacaagtaacttattccctgcttccccctcagaacccccacctgcgtttggctagtttggtctcaatcaatgccgacaacggccacctgttcgccctaagatccctagattatgaggccctgcaggcttttgagtttagagtgggagcaacggataggggttcacccgctctctcctctgaagctctcgtgcgcgtcctttgctggacgccaaccactacgcgtccctcatgctgtatccgttgtagaaccgccagaaggctcgcacccagctggtgccctgggcgaccatccagagccacatggtag

SEQ ID NO: 237331 - DNA, 2388 bp, synthetic construct
  misc_feature 1..2388: note = Description of Artificial Sequence: Synthetic coding sequence
  source 1..2388: mol_type = other DNA
atggagacagcgttggctaagacaccacaaaaacgccaggtaatgttcctggccattttgctcttactatgggaagcgggtagcgaggctgtgcggtactctattccagaggaaaccgaatccggttactccgtcgcaaacttggctaaggacctgggcctgggggtcggggagctggccactaggggcgctcgaatgcactacaaaggcaacaaagaactgctccagttggatatcaaaaccggcaacctcttgctgtacgagaaactggacagggaggtgatgtgcggcgctaccgagccctgtattctgcattttcagctactgctggaaaacccagttcagttcttccagactgacctccagctgacagatataaatgaccacgcgccagagttccctgagaaagagatgttgctgaagatacctgaaagtacccagcctggcactgtcttccctttaaaaattgctcaagactttgacattgggagcaatacagtacaaaattatacaatctccccgaactcacattttcatgtggccacacataaccggggagacggccgaaagtatcccgaattggtactggataaagccctggacagagaggagcggccagaactctcgcttactcttacggcgctcgatgggggtgcacctcccaggtctgggaccacgaccatcaggatcgtcgttcttgataacaacgataacgcgcctgagtttcttcagtccttctacgaggtgcaggtgccggagaacagccccttaaattccctagttgttgtggtcagcgctcgagatcttgatgctggcgcttacggctccgtggcatatgctctgtttcagggcgacgaagtaacacaaccatttgtcatagatgaaaagacagccgaaattaggctgaagcgggcactcgactttgaagctactccctattataacgtagagattgtggccactgatgggggtggactctccgggaaatgcactgtggcaatagaagttgtagacgtaaatgacaatgcaccggagctgactatgtctaccttgtcatctcccacaccggaaaacgcacccgagactgttgtggcagtcttttctgtatcagatccagactctggtgacaacggtcgaatgatttgctccattcagaatgatctgcctttcttgctgaagcccaccctcaaaaacttttacactctggttactcagcgaaccttggatcgagaatcacaggctgagtacaatatcaccataacagtgacagatatgggcacacccaggcttaaaaccgagcacaacatcactgtgctcgtcagcgatgtgaatgacaacgccccagcattcacccagacctcctacacgctcttcgtgcgggagaataatagccctgctttgcatattggttccgtctctgcaacagatcgggattctggcacgaatgcccaggtgacatactctctgctcccaccccagaacccccacctgcgcctggctagcctggtatccatcaacgcggataacggtcatctgtttgcactccggagtctggactacgaggcgctgcaggcattcgagtttcgagtaggggctactgaccgagggtcacccgctctctcctccgaagctttggtccgcgtgttagtgctagatgctaacgacaatagcccctttgtgttgtatcctttacagaacggaagtgccccttgcacagagctggtgccaagagccgctgagcccggataccttgtgacaaaggtagtggccgttgatggcgactccggccagaacgcttggcttagctaccagttgctgaaggcaaccgaacccggtctgttttccatgtgggcgcataatggagaggttaggacagctcgcctcctctctgagagagatgctgccaagcatcgccttgtggtcctagtgaaagataacggagagcctcctagaagcgcgactgccaccctgcacgtcctgttggtggatgggttcagccaaccatacctgcctttgccggaggctgctcctgcccaggcccaggcagatagcctaaccgtatatctagtcgtagccctggcctccgtgtcctctctttttctgttttcagtgctactctttgtggccgtcaggttatgcaggagatcgcgtgctgcctcagttggcagatgctccgttccagagggcccttttccagggcatctcgtggacgttagtggaaccggcacactatctcaatcatatcactacgaggtttgcctcactggggattctggggcaggggagtttaaattcctgaagccaatcattcctaatctactgcctcagggagctggtgaagagatcgggaagacagctgccttccggaactcatttggactcaattag

SEQ ID NO: 237332 - DNA, 1107 bp, synthetic construct
  misc_feature 1..1107: note = Description of Artificial Sequence: Synthetic coding sequence
  source 1..1107: mol_type = other DNA
ggcggtagcccacctcgatctggcacatcggagatccagattcaggtccttgacatcaacgacaatgtccccgagtttgctcaggaactgtacgaggctcaggtccctgagaataatcccctgggatccttggtcattaccgtgtctgctagagatctcgacgctggtagctttggtaaggtaagctatgcgctcttccaggtggatgacgtcaatcaaccctttgagatcaatgcaatcactggagagatcagactgagaaaggcccttgatttcgaggagatccagagttacgacgtggatgtggaagccactgacggaggcggtctctctggaaaatgcagccttgttgtgagagtgctggatgtgaatgataatgctccagagctgacgatgtctttcttcattagtttgattccggaaaacctccccgagattacagtggctgtgtttagcgtttctgatgcagattctgggcataaccagcaagttatttgcagcattgagaataatcttccatttctcttgcgtccatctgtggagaacttttatactctggtaactgagggagcgcttgacagggaaagcagagcagaatacaatatcaccatcactgttactgacctgggcacgcctcggcttaagacccagcagagcatcactgtgcaggtctctgacgtgaacgacaacgtgccagctttcacacagactagctacacgttgtttgtgagagagaataattcaccggctttacatatcggctccgtaagcgccaccgaccgcgatagcgggataaatgcacaggtgacctactctctcttgccccctcaggatccacatctgcccctgtcttccctggtgtctattaacgcagataatggacatctcttcgctctccggagcctggattacgaagctttgcagtcctttgagtttcgggtgggggcaaccgacagaggaagtcctgccctgagttccgaagctctggtacgactcctgtgctggacacccacgacaacccgcccttcgtgttgtaccagatgtaggacagcacccaggccagcgccatcctggtgtcccggtcggccatcccgggcaacatggtag

SEQ ID NO: 237333 - DNA, 1977 bp, synthetic construct
  misc_feature 1..1977: note = Description of Artificial Sequence: Synthetic coding sequence
  source 1..1977: mol_type = other DNA
atgctgctgaagatcagcgagatcactatgcctggcaagattttcccactcaaaatggcgcacgacctagatactggctccaatggtcttcagaggtacaccatatctagcaaccctcatttccacgtgctcacgagaaataggtctgagggaaggaagttccctgagctcgtcctggataagcctctggatagagaggagcagcctcaacttagactgaccctgattgccttggatggaggcagcccacctcgcagtggaacatccgaaattcagatacaggtactcgatatcaacgataacgtaccagaattcgctcaggagctgtatgaagcccaagtgccagagaacaatccgctgggatctctcgttatcaccgtgtcggcgcgagatttagacgccggatcattcgggaaggtgtcgtacgccttgttccaggtcgacgacgtgaaccagcctttcgagatcaatgcaatcactggagagattcgattgcggaaggccctggacttcgaggagatccagtcctacgacgtcgacgtcgaggccaccgatggcggaggattgtccggcaaatgctcgttggtagtaagggtgttggacgtgaacgacaacgcccctgagctcactatgtcctttttcatctccctgattccagaaaatcttcctgagattacagttgccgtgttctccgtttccgacgccgacagtggtcacaaccaacaggtgatatgtagtatcgaaaataaccttccattcctacttaggccatcagtagagaacttttataccctggtgacagagggcgctctggatcgcgaatcacgcgctgagtataacattacaatcacagtgactgacctcggtaccccgaggctcaaaacccagcagagtattaccgttcaagtgtccgacgttaacgataacgtgcccgcatttacccagacaagctacacgctcttcgtaagagaaaataatagtccggctcttcacatagggtccgttagtgcaacagatcgcgacagcggaataaatgcccaggtgacctatagcctgctgcctccccaggacccccacttgccattaagttctctggtgagcattaatgccgataacggacacctcttcgctttgcgttccctggactatgaagccctgcagagcttcgagtttcgtgtcggggcaacagatcgtggctcacctgctctatcatcagaagcactcgtccggctccttgtgctcgacgcgaatgacaatagccctttcgttctctatcctttacagaacggaagcgcgccttgtactgagctcgtgcctcgcgcagcagagcccggatatttagtgacgaaagttgtagctgtagatggtgactccggacagaacgcttggctgtcatatcagttgctgaaagctacagagctcgggttgtttggcgtgtgggcacacaatggcgaagtgaggaccgctcgcttgcttagcgagagagatgcagctaaacaccgcttggtcgtgctcgttaaggacaatggtgagcctccacggtcagctacagctaccctgcatgtgctgttagtggacggattttcacaaccttacctgccactgccagaagcagccccagctcaggcacaggctgattcactgaccgtgtacctcgtggtggctctagcctcggtctcctccctgtttctcttcagtgtactgctattcgtggccgtgcgcctgtgtcgccgtagccgcgctgccagcgtaggcagatattcagtgcccgaagggcctttcccgggacaccttgtggatgtgtcagggacaggtacactatcccagagttatcaatataaggtgtgcctaaccggcggatctgaaaccaatgaattcaaattcctgaaaccgattatgccaaacttcccccctcagggcactgagagagaaatggaggagacacccacttccagaaactcattcccattcagttag

SEQ ID NO: 237334 - DNA, 2385 bp, synthetic construct
  misc_feature 1..2385: note = Description of Artificial Sequence: Synthetic coding sequence
  source 1..2385: mol_type = other DNA
atgatgcaaaccaaagtgcagaataagaaacggcaagtggcgttttttatcctgctcatgctgtggggagaagtgggctccgagtccattcagtattccgtgctcgaggaaaccgaatctggaactttcgtggcaaacttgaccaaagacctcggcttgcgcgtgggtgaactggcatcgcgtggagctcgagtcgtcttcaaaggaaaccggcagcacctacagtttgatccccagacccacgacctgttgctcaacgagaagttagaccgggaggagctgtgtggctccacggagccctgtgtgctgccattccaggtgctcctggaaaacccactgcaattttttcaggcaagtctcagagtcagagatattaacgaccacgctccagagttcccagcgagagagatgttgctgaagatcagcgaaattaccatgcccggtaagatttttccgctcaaaatggcccacgacctcgataccggttctaatggactccaacgatataccatttcttctaatccccacttccacgtgttaactaggaatcgaagcgaggggcgaaaatttcccgaactcgtcctggacaaaccccttgaccgggaagagcaacctcaactgagactcacacttatagctctcgatgggggtagtccgccaagaagcggcacttcagagattcaaattcaagtgctggatatcaacgacaatgttcctgagttcgcccaagaactgtatgaggcacaggttccagagaacaaccccctagggtcccttgtgatcacagtatcagctagggatctagatgccggatcttttggaaaggtcagttacgcattgtttcaggtagatgacgttaaccaacccttcgagatcaacgctattactggtgagattcgcctgagaaaagcgctggactttgaagagattcagagctacgatgtcgatgtggaggcgacagatggaggaggactctcaggaaagtgctctttggtcgtcagggtgcttgatgtaaacgataatgctcctgaactgacaatgtccttctttatcagcttgattcctgagaacttaccagagataacggtggccgtcttttcggtgtccgatgccgacagcggtcataatcagcaggtgatttgttcgatcgaaaacaacctgccttttttattgcgccctagtgtggaaaacttctatactcttgttaccgaaggagcacttgaccgcgagtcaagagcggagtataacatcaccattacagttaccgatctcgggacccctcgcctgaagacccagcagagtatcacggtgcaggtgtctgacgtcaacgataatgtccctgcattcactcagactagctacacgttgttcgtccgtgaaaataattcccctgccttgcatatcggctctgtgtctgcaacagaccgggatagcggaattaacgcccaggtgacctactctttacttccacctcaggaccctcatctgcctctctcaagtctcgtctcaatcaacgccgacaacgggcatctgttcgcactgaggagtctggactacgaggctctgcagtcatttgagttccgagttggcgcaacagaccgagggtctcctgcactgtctagcgaggctctcgtccggcttttggtactggacgcgaatgataatagcccatttgtgctctatccgcttcagaacggatccgccccatgtacagagctggtacctcgtgctgccgaaccgggttatttagtaacaaaagtggtagctgttgacggcgattccggtcagaatgcttggttgtcttaccagcttctcaaagcgaccgaactggggctattcggcgtctgggctcacaacggggaggttcgaaccgccaggttactgagtgaaagagacgccgcaaaacatcgtctggtcgtcctcgtgaaagataatggtgaacctcccagatctgccacagcaacgctacacgtgttgttggtggatggattcagtcaaccctacctacctcttcccgaggccgcacctgcccaagcccaagccgactcactcaccgtgtacctggtagtggcgctcgcttcagtcagtagcctgttcttgttcagcgtcctcctgttcgtcgccgtgcggctgtgtaggaggtcccgggcagcctcagttggtagatactccgtgcccgagggccctttccctggccatctggtggatgtgtcaggcacaggcaccctgtcgcaatcataccagtataaggtctgtcttaccggtggcagcgaaactaacgaatttaaattccttaaaccaattatgccaaacttcccacctcagggaacagagcgagagatggaggaaaccccaaccagtcggaattctttcccttttagttag

SEQ ID NO: 237335 - DNA, 1107 bp, synthetic construct
  misc_feature 1..1107: note = Description of Artificial Sequence: Synthetic coding sequence
  source 1..1107: mol_type = other DNA
gggtctcctccgaggtctggtacggcgctcgtgaggatccttgtgcttgacgtcaatgacaatgccccagatttcgttcgatcactgtataaagtgcaggtcccagaaaactcgccggtgggctctatggtcgtcagcgttagcgctcgggatctggacacaggatccaacggggagattgcatatgcctttagctatgccactgagaggattctgaaaacgtttcaaataaatccaaccagcggcagcctccatttgaaagcgcagttggactacgaagcaatacagacatatacgctcactatacaggccaaagatggcggtggcttaagcggcaaatgcaccgtggtggtggacgtgacagatatcaacgacaacaggcctgagctgctactcagctcattgacgtcaccgatagcggaaaactcacccgaaacggtagtggccgtgtttcggatcagggaccgagacagtgggaataatgggaagaccgtttgtagtattcaggatgacgtgcccttcatcctgaagccaagcgttgagaacttctacacgctggtgacggagaagccactcgacagggagcggaacacagaatataacatcaccatcacagtcactgacctggggaccccgagactgaagacagagcacaacatcacggttctcgtctctgacgtgaacgataatgcccctgcctttacacaaacatcctatacactgtttgtgcgggaaaataatagccccgctctcccaatcggcagtgtttccgcaacagaccgagatagcggtaccaatgcacaggttatttacagcctgttgccttcccaggatcctcatctgcccctagcttcgctcgtttctatcaatgccgataatggccacctgtttgcactgcgaagtctcgactacgaggctctgcaggcctttgagttcagggtgggggctaccgacagagggtctcccgctttgagtagtgaggccctggtgagggtcttatgttggacaccaacaaccaccagaccctcatgttgtactaggtgccgcaccgccccacggccagcccctagccgctgtcccggtcgaccatcccgcgcaacctggtag

SEQ ID NO: 237336 - DNA, 2406 bp, synthetic construct
  misc_feature 1..2406: note = Description of Artificial Sequence: Synthetic coding sequence
  source 1..2406: mol_type = other DNA
atggaagcatcaggcaaactcatctgcagacaacgccaggtgctcttcagctttctgcttcttggactgagcttggcaggcgctgcagagccaaggtcctacagtgtcgtcgaggaaacagagggaagcagctttgtgaccaatctcgccaaagatctgggtctcgagcaacgcgaattttccagaaggggcgtgagggttgtcagtcggggtaacaaacttcatctccagctcaaccaggagacagccgatttactactgaatgaaaaactggacagagaagatttatgtggacataccgaaccgtgtgtcttgcggtttcaggtgctgctcgagagcccattcgaattctttcaggcagagctgcaggttatagatatcaacgaccacagtccagttttcctcgataagcagatgttagtcaaagttagcgaaagctccccaccgggtactgccttccctctgaaaaatgcagaggatctggatatcggtcagaacaacatcgagaattacatcataagcccaaattcttacttccgagtcctgacaaggaaacgctctgacggtcggaaatatccagagctggtcctggacaaggcactcgacagggaggaggaagccgaattgcgactgactctgaccgcactcgacggcggttcaccacctcggtctggcacagctcaggtgtatatagaggtcgtcgatgtgaatgataatgcacctgagttcgagcaacctttctaccgagtgcagataagtgaagacagtcccatctccttcttagtcgtcaaggtcagcgcgaccgatgtggataccggcgttaacggcgagatatcttactcactctttcaggcctccgatgagataagcaagacttttaaggtcgactttctcacaggggagattcgactgaagaaacagttggacttcgaaaagttccaatcgtacgaggtgaacatagaggcacgtgacgccggaggcttcagcgggaagtgtaccgtcctcatccaggttatcgatgtgaatgatcacgctcccgaggttacgatgtccgctttcaccagccctatccccgagaacgcacctgagacagtggtggctctattcagcgtcagcgatctcgattcaggggaaaacggaaaaatatcatgctctatccaggaggatctcccgtttttgcttaagagttctgtgggcaatttctataccctgctgaccgagacacccctcgacagagaaagcagggccgagtataacgtcactataacagtgaccgatctggggactcctcggcttacaacacacctgaacatgactgtcctcgtctctgatgtaaatgacaatgctcccgctttcacgcaaaccagctacaccctgttcgttagggaaaacaattctcctgctcttcacatcggatctgtctcggccacagacagggattccggtaccaacgctcaggtcacatactctctgctcccccctcaggaccctcacctgccgctggcatctctggtgtctattaacaccgacaatggccacctgttcgcactgcggagcttggactacgaagccctgcaagcattcgaattccgggtgggcgcttccgacaggggctccccagccctgagctccgaggccctggttagggtcctcgtcttggacgccaacgacaacagcccatttgtgctgtaccccctccaaaacggctccgcaccttgcacagagttagtccctcgcgcagcagagcccggataccttgttactaaggtggtggcagtggacggcgattctggacagaatgcctggctgtcgtatcaactgttgaaagctactgagcctggtctgtttggcgtatgggcccacaatggggaggtgcgcactgccagactgctgtctgaaagggacgcggcaaaacagcggttggtagttctggttaaagataatggagagcctccctgcagtgccacagcaacactacaccttctgttggtggacggattttctcagccctacctgccactgccagaggcggctccggcacagggccaagccgacagcttgaccgtgtacctggtggtggcactggcttctgtgtccagcctctttctcttttcggttctgctctttgtggcggtcctgttgtgccgtcgcagccgcgctgcaagcgtagggcgttgcagcgttcctgaaggacctttcccaggacatctcgttgatgtccgtggtaccgggtcgttgtctcaaaattaccagtacgaagtctgtctggcgggagggtcaggtaccaatgagttccagttcctaaagcctgtactcccgaacatccaagggcattctttcggccctgagatggaacagaactctaatttccgcaatgggttcggcttctctcttcaactgaaatag

SEQ ID NO: 237337 - DNA, 2472 bp, synthetic construct
  misc_feature 1..2472: note = Description of Artificial Sequence: Synthetic coding sequence
  source 1..2472: mol_type = other DNA
atgaaaatccaaaagaaactcacaggatgcagccgtctgatgctgctctgtctctcgctcgagttgctgctggaggcaggggctggcaacattcactacagcgttccagaagagaccgacaagggatccttcgtcgggaatattgccaaagaccttggcctgcaaccccaggagctagccgatgggggagtgcgcatcgtgtcccgcggaagaatgcccttatttgccctcaacccacgaagcgggtcgctgatcactgcaagaagaattgaccgcgaggagctctgcgcgcagtccatgccatgcctggtgagttttaatatccttgtcgaggataagatgaaactctttccggtggaagtcgagattatcgatattaatgataacacaccacagttccaactggaggagctcgagttcaaaatgaatgagataacaacgcctgggaccagagtctctcttccatttggacaggacctcgacgtgggaatgaactcgctccagtcatatcagctatcctcaaatccacatttcagcttggatgtgcaacaaggcgctgatggccctcagcatcctgagatggtgctacagtctcctcttgaccgcgaagaggaggccgttcatcacctcatcctgacggccagcgacggcggagaacctgtgcgcagcggtacactgcgcatttatatccaagtggtggacgccaacgataaccccccagcgtttacccaggcacaataccacatcaatgtgcccgagaatgtgccactcggaacacagctcctgatggtaaatgccacagatcctgatgaaggagcaaatggcgaagtgacctattcatttcacaacgtggatcacagggtcgcccagatattcagactggacagctataccggagaaataagcaacaaggagcccctggattttgaggaatataaaatgtactccatggaagtccaggcccaggatggcgcaggcctgatggccaaggtcaaggtgttaataaaagtcctggatgtcaatgacaacgcacccgaggttaccattacaagcgtaactacggctgtcccagagaactttcctccaggtaccatcattgcattaatatctgtgcatgaccaggattcaggcgacaatgggtacacaacttgttttataccgggaaacctaccgttcaagctggaaaagctcgtggacaactactatcgtcttgttacagagaggaccctcgaccgggagctgatcagcgggtacaatataacaataactgcgatcgatcaaggaactcccgctttaagcacagaaacccatatttcgttacttgttacagatatcaacgataattcacccgttttccaccaggacagctactccgcctacattcctgaaaacaaccctagaggcgcttccatattcagtgtccgggcacacgatctggacagcaacgagaatgcccagattacctactcacttatcgaagatacaatccagggggcaccgctatctgcttacctctctataaacagcgacacaggcgttctctacgccttgagaagctttgactatgagcagtttcgtgacatgcagctcaaggtgatggccagggactctggagatccacctctgtcaagcaatgtttcactgagcttgtttctgctggatcaaaacgataacgccccagagattctgtatccagctttgccaaccgatggatctactggtgtggaattggctccgcttagcgcggaacctgggtatttagtcacaaaggtggtcgctgtcgacagagattctggccagaacgcttggctctcttatcgcctgctcaaggcttccgagcccggacttttcagcgtggggctacacactggagaggtccgcacagccagggctctcctcgacagagacgctctgaaacagagcctggtggtagctgtgcaggaccacgggcagccgccactctccgctactgtgacacttaccgtggctgtggccgatagaatcagcgacattttagcagacctgggctccctcgagccgagcgccaagccaaatgacagcgacctcacactgtacttggttgttgctgcagccgctgtcagttgtgtctttttagcttttgtgatcgtgctcctcgctcaccgcctccggagatggcacaaatctagattgctgcaggcatctggtggaggactggcctccatgcctggttcccactttgtgggagtggatggagtgcgggctttcctgcagacctactcacatgaggtgagcctgaccgcagatagcaggaaaagccatctgatctttcctcagcctaactatgccgatacgcttatctcacaagaatcttgcgaaaaaaaaggttttctttcggccccacagagtttgctagaggacaagaaagagccttttagccaagtcaacttctgcgatgaatgcatcagttatttggagaaaaacaatagctag

SEQ ID NO: 237338 - DNA, 2796 bp, synthetic construct
  misc_feature 1..2796: note = Description of Artificial Sequence: Synthetic coding sequence
  source 1..2796: mol_type = other DNA
atgaagattcaaaagaagcttacaggctgcagtagactgatgcttctctgtctgtctctggagttgctgcttgaagctggcgctggtaacatccattactctgtgcccgaggaaactgacaagggatcttttgtgggtaacattgctaaggatttgggcctgcagccgcaggaactcgccgacgggggtgtgagaattgtatcccgcggacgaatgccactcttcgctttaaatcctaggtccggttctttgatcaccgctcgtcggatcgatcgcgaagagttatgtgcccagtctatgccctgcctcgtgtcctttaatattctggtcgaggataaaatgaagctgttccccgtcgaggtggagatcatcgacataaacgacaataccccccagttccagttagaggaactggaattcaaaatgaacgaaatcacaacgccagggaccagggtgagtctgccattcggccaggatctggatgtgggcatgaacagcttgcagtcctatcaactgagctctaatccccatttttcgctagacgtgcaacagggagcagacggcccacagcaccctgagatggtgctgcaatcccctctggaccgggaggaggaggcggtccatcacttgatcctgaccgcctctgatgggggtgagccagtgaggtccggcaccctgcggatctatatccaggtggtggatgccaacgataacccacctgctttcacacaggctcaataccacataaacgtgccagagaatgtacctctcgggacgcagctgctgatggtgaatgccacggaccccgatgagggagctaacggagaagtgacttactcctttcataacgtcgaccaccgagtggcccagatttttaggctggacagctataccggtgagatctcaaacaaggaaccattggacttcgaagagtataagatgtatagcatggaggtgcaggcacaagatggcgcaggactgatggccaaggtaaaggtcttaattaaagtcctcgacgtgaatgacaacgctcccgaggtgacgataacgtctgttaccaccgctgtgcctgaaaattttcctcctggaacaatcatcgctctcatttcagtgcatgaccaagatagcggggataacggatatacaacgtgtttcatacccggaaacttaccctttaaactcgagaaattagtcgacaattactatcgactggtgaccgagagaactcttgacagggagctcatttctggctataacatcaccatcactgcaattgatcaaggcacccctgccttaagcaccgagacccacatctctctcctggttacagacatcaatgataactctcctgtctttcaccaggattcttacagcgcctacattcccgaaaataatccacggggtgcctcgattttttcagtgagggctcatgatctagactcgaatgaaaatgcccaaatcacctacagcctgatcgaggatacaattcagggcgctccgctttctgcttatctgtccattaacagcgatacaggtgtgctatacgccctgcgaagcttcgattatgagcaattccgcgacatgcagctgaaggtgatggcgagggacagcggcgatcccccactgtcttcaaatgtgagcctctccctgttcctcctcgaccagaatgacaacgcacctgagatactgtacccagctctgcctaccgacgggagtaccggtgtcgaactggcccctctgagcgccgaaccaggatatcttgttacgaaggtcgtagcagtcgatcgcgattccggccagaacgcgtggttgagttataggttactcaaggcctccgagccaggcttgttctcagtgggcctccataccggggaggttagaaccgctagagccctgttggaccgcgacgctctgaaacagtcacttgtagtggccgtgcaggatcacgggcagccgcctcttagcgctacagtgacattgaccgtcgccgtggcagacagaatctctgatattctagccgatctgggtagcctcgaaccatctgctaaacccaacgatagcgaccttacattgtatctggtggttgccgctgctgctgtctcctgtgtctttcttgcttttgtaattgtgttacttgcacatcgcctgcgaagatggcataagagcagactgctccaggcaagtggcggaggtctggcttcaatgcccggaagtcacttcgtaggtgtggatggtgtgagggccttcttgcagacgtacagccatgaagtgtcccttaccgccgactcaaggaagagtcaccttattttcccccaacccaattatgccgacacactcatttcccaggagagttgtgagaaaaaaggctttctaagcgcaccacaatccctgctggaggataaaaaggaaccatttagtcagcaggcgccacccaacacagattggcgattctcccaggctcagagaccaggaacttctgggtctcaaaatggtgatgacacgggcacctggcccaataatcaattcgacacagaaatgctgcaggctatgattcttgccagcgccagtgaagccgctgacggttctagcacactgggcggtggagcgggaaccatgggactgagcgcccgttacgggcctcagtttactctgcagcacgtgccagactaccgacagaacgtgtatattcccggatcaaacgcaacgctgacgaacgctgctggaaaacgggatggcaaagcccctgcgggtggaaacgggaacaagaaaaagagtggcaaaaaagagaagaaatag

SEQ ID NO: 237339 - DNA, 2811 bp, synthetic construct
  misc_feature 1..2811: note = Description of Artificial Sequence: Synthetic coding sequence
  source 1..2811: mol_type = other DNA
atggcagcccagaggaacagatccaaggaatccaaagattgttccggcttagtattgttgtgcctgttcttcggtattccctgggaggcaggggcaagacaaatctcttacagcataccagaggagctcgaaaagggctctttcgtcggtaatatcagcaaggacctgggcctggccccaagggaactggccgaacgaggtgtgcggatcgtgagcagagggcgtacccaactgttctcccttaatccacggtctggttccctaattaccgccggtaggattgatcgggaggagctgtgtgctcaaagtgctaggtgcgtggtttctttcaacatactggtcgaggatagggttaagctctttggtatcgagattgaagtgaccgatatcaacgataatgcgccaaagttccaagcagagaatcttgacgtcaagatcaacgaaaatgtggctgcgggtatgcggtttccacttcccgaagctattgacccagatgtcggcgtaaactccctccagtcctatcagctctcgccaaacaaacacttcagcctgcgggttcaaagcagggctaacggcgtgaaatatccggaactcgttctggagcacagtctggaccgcgaagaagaagctattcatcacctggtgctcactgcgtccgacggcggagatcctctgcgttctggaaccgtgctagtgtccgtcaccgtcttcgacgcgaacgacaacgctcctgtgttcaccctccccgagtatagagtgtcagtgcctgagaacttgccagtgggcacgcagctacttacagtgaccgctacagacagggatgagggggctaacggcgaggtcacatactcctttcgaaagctgcccgacacacagctactcaaattccagttaaataagtatacgggagaaataaagatttccgaaaacctggattacgaggaaaccggcttttatgagattgagatccaggccgaagatgggggagcctacctcgctacagcaaaagttctgataacggtcgaggacgtgaacgataattctcctgaactaactataactagtctcttctcccctgtcacagaagatagtcctctaggtacagtagtcgctctcttgaacgtccacgacctggattccgaacaaaacgggcaggttacctgctccattcttgcctacttaccatttaaactagagaaatctatcgattcttattacagactggtcattcaccgagccctcgatagggaacaggtatcgtcctataacatcacggtgacagccacggatggcggaagccctccattgtccactgaggcccatttcatgctccaggtggccgacattaacgacaaccctccaactttttcacaggtgtcatattttacctatatccctgaaaacaatgcaaggggggcatctatatttagcgtgacagccctggatcctgactccaaagagaacgcccagatcatttattcactggctgaggacaccatacaaggtgtgccactgtctagttacatctcaattaacagcgatactggggtgctctatgctctccgcagcttcgattatgaacagtttcacgaactccagatgcaggtcaccgcgagcgattcaggggacccccctctttcctcaaatgtgagccttagcctgttcgtgttggaccagaacgacaacgctccagaaatcctgtacccagcccttccaacggatggcagtacgggtgtcgaacttgctcccaggtccgcggagccgggatatctcgtgaccaaggttgtggcagtcgacagagattccggtcagaacgcttggcttagctaccggctgttgaaagcgagtgagccgggactttttgccgtaggcgaacacacaggcgaggtgcgaacggcgagagctttgctcgatagagatgcccttaagcagagcctggtagtcgctgtccaggaccatggccagcctccgttaagcgctactgtcacgctaacagtggctgttgccgatagtatccctcaggtcctcgctgatctcggcagtttcgaatctccggctaatagtgagacttctgacctgaccttgtatctcgtggtggcagtggctgctgtctcatgcgtattcctggctttcgtgattgttctgctggctcacagactacgcaggtggcacaagtcacgactgctgcaagcttccggcggaggcctgacaggtgtctcaggttcacatttcgtgggcgtggacggcgtgcgcgctttcctgcagacctactctcacgaagtatcacttacagccgactccaggaaatcacatcttatttttcctcagcctaattatgcggatacactgattagtcaggagagttgtgagaagaacgatccactgagcctgctggacgatagtaagttccccattgaagacacacctttggtccctcaagccccacccaataccgactggaggttctcacaggcccagcgcccaggcacgtccggctcccaaaatggagacgataccggaacttggcccaacaatcagttcgacactgaaatgctgcaggcaatgatcttggcatccgcatcagaagctgcagatggaagctccaccctgggagggggagccggaactatgggcctgtctgctcggtacggacctcagttcaccctgcagcacgtgcctgattacagacaaaacgtgtacattcctgggtctaatgctactctgacaaatgccgcaggcaagcgcgacggaaaggccccagctggaggcaatggaaacaaaaagaaaagcggcaagaaagaaaaaaagtag

SEQ ID NO: 237340 - DNA, 2808 bp, synthetic construct
  misc_feature 1..2808: note = Description of Artificial Sequence: Synthetic coding sequence
  source 1..2808: mol_type = other DNA
atggctaaccgattgcagaggggcgaccgctcacgactgctgctgctgctgtgcatttttctcgggactctgagaggcttccgcgctaggcaaattcgctactccgtccccgaggagactgaaaagggctctttcgttggtaacattagcaaagacttagggcttgaacccagggaactggccaagcgaggagtccgtatcgtgtccagaggaaagactcaactttttgccgtgaatcctcgcagcggtagccttattactgcaggcaggatagaccgggaggaactctgcgagacagtatcaagttgctttttaaacatggagctgctggtggaagacactctgaaaatttacggcgttgaagttgagattatcgacataaacgacaacgctcctagtttccaggaggatgaagtggaaattaaggtttctgaacatgctattcctggtgctcgcttcgccctccctaatgcccgagatccggacgtgggggtcaactcactgcaatcttatcaactgtcccccaacaattacttctccctccagttaagggggcgaactgatggcgcaaagaaccctgagctcgtgctcgagggttccctagacagggaaaaagaagcagcccatctgctcctattaaccgctctggacggaggagacccaatcaggaaaggagcagttccaatacgggtcgttgtgctggatgtcaacgatcatattcccatgttcacccaatcggtgtatcgggtcagtgttcccgagaatattagctccggcacccgcgttctgatggttaacgctaccgacccagatgagggtatcaatggagaagtgatgtacagttttagaaacatggaatcaaaagcctccgagatctttcagctggatagccagactggggaggtgcaggtgagaggtagcctcgattttgaaaagtaccgattttatgaaatggaaattcagggccaggacggcggtggcctgttcacaaccactacaatgcttataaccgtggtcgacgttaatgacaatgctcctgaaattaccattacatcatccatcaactcgatcctagagaactcgccgccaggaacagtaatcgcactccttaacgtccaggatcaagatagtggcgagaacgggcaagtcagctgttttatacccaaccacctgcccttcaagctggagaagacttacgggaattactataagcttattacctcccgcgttctggatcgcgaactggtccagtcctataatatcaccctcacagcgaccgatcagggatccccccctctcagtgccgaaacccacgtttggttgaacgttgccgatgataatgataacccccctgttttccctcatagctcttactccgcgtatatacccgagaataacccacgcggtgcaagcatcttctcagtcactgccctggatccggacagcaagcagaacgctctcgtgacatacagcctgaccgatgataccgtccagggggttccactatcttcatacgtctccatcaattcaaatacaggggtcctgtacgctctgcagagtttcgattatgagcaattcagggacctggaattgagagttattgccagagactctggggacccaccgcttagctccaatgtttcactatccttatttgtgctcgatcagaacgataacgccccagaaatactgtaccctgccttgcccaccgacggatccaccggggttgaactggcaccgagatcggcggaaccgggatacttagtgactaaggttgtagctgtggacaaagacagtggtcagaacgcgtggctatcctaccgcctccttaaggcttctgaaccaggactgttcgctgtcggcgagcacactggggaggtccggactgccagagcccttctggaccgagatgcgcttaaacaatctcttgtcgttgcagtccaagaccatggtcaaccacccctttccgctaccgttactctgactgtagcagtggcagatagcattcccgaggtgcttgccgacctggggtcactggagtcgctcgcaaactctgaaactagcgacctcagcctctacctggtagtggctgtggccgcagtatcctgcattttcctagtgtttgtgatagttctcttggcgctgaggttgtggagatggcacaagtcacggctgttgcaggcgtctgagggaggactggccggaatgcctacctcgcattttgtgggcgtggacggggtccaggccttcctccaaacctactctcacgaggtgtccttaattgccgattctcaaaaaagccacctcatattcccccagcccaattatggggacacactgatcagccaggaatcatgcgagaaaagcgaacccctactgatcgccgaagactctgccattatcctcgggaagtgcgatcctacttccaatcaacaggcaccacccaatacagattggcgcttctctcaggcgcagcgtcccggaacatcagggtctcagaacggagacgataccggcacctggcccaataaccaatttgacactgagatgctgcaggccatgatccttgcaagtgccagcgaggcagcagatggcagcagcactctcgggggtggagcgggaactatgggtctgtcggcgaggtatggccctcagtttactctccaacatgtgcctgattacagacaaaatgtgtacattccaggaagtaatgctaccctcacgaacgcagcaggaaagagagacggcaaggcacccgctgggggaaacggcaataagaagaaaagcggaaagaaagaaaagaaatag

SEQ ID NO: 237341 - DNA, 2253 bp, synthetic construct
  misc_feature 1..2253: note = Description of Artificial Sequence: Synthetic coding sequence
  source 1..2253: mol_type = other DNA
atggcgaacagacttcagcgcggtgacaggagccggcttctgctcctactgtgtatctttctaggtactctaagaggtttcagggccaggcagatacggtatagtgtcccggaggagaccgaaaaaggcagcttcgtgggaaatatctcgaaagatcttggcctggagccccgagaactcgcaaagcgtggtgtcaggatagtgagtagggggaaaacccagctgttcgcggtaaatcctcgaagcgggagcttgatcacggccggacgaatcgaccgtgaggagctttgcgagaccgtcagttcctgtttcctgaacatggaactgctggtcgaggacacccttaaaatttacggcgtggaggtggagatcatcgacattaatgacaacgcacccagcttccaggaggacgaggtggaaattaaggtttccgagcatgctattccgggagcacgctttgccctgccaaatgccagggatcccgatgtgggtgtgaattctctgcagtcgtaccagttgagcccaaacaactacttctcactgcaattaagaggacggaccgatggcgctaaaaaccctgaattggtcttagaaggcagcctcgatagggaaaaggaggccgcacatctccttctgctgaccgccctggatgggggtgatcccatcaggaagggtgcagtgcctatccgtgttgtggtgctagacgttaatgaccacatccccatgtttacacagtccgtgtatagagtaagcgtcccagagaacatctccagcggtacaagagtcctgatggttaacgcgacggaccccgatgaggggatcaacggagaagttatgtattcatttcggaacatggagtcgaaggcatctgaaattttccaactggatagccaaacaggtgaagttcaggtgcgcggatctctcgattttgaaaagtaccgcttttacgaaatggagatccagggccaagacgggggaggactcttcacaacaaccacaatgttgataaccgtcgtggatgtaaacgacaatgcccctgaaattaccatcaccagcagcattaattctatccttgaaaatagcccgccaggaaccgtgatagcattgctcaacgtccaggaccaggatagtggcgaaaacggtcaggtgtcttgtttcattcccaaccacttacctttcaagctggaaaagacgtatgggaattattataagcttattacatccagggtgttagatagagagctggtgcaatcctataatatcacgttgaccgccactgaccagggcagtccccctctcagcgccgaaacgcatgtttggctgaacgtcgccgatgacaacgacaatccacccgtgtttccccatagcagttacagtgcttacattcctgagaataatccaagaggtgcgtctatcttctctgtcactgccctcgaccccgactctaagcagaacgccttagtcacatactctcttactgatgatacagtccaaggagtccctctgtcctcgtacgtgagtattaatagtaacacgggcgtgctgtacgcactgcagagtttcgattacgagcagtttcgggacttagaactcagggtgattgcaagggatagtggcgaccctccactgtcttccaacgtttccctgtctctgtttgtcctagatcagaacgataacgcaccggaaatcctctatcccgctctccccacagacggttcaaccggagtcgagctcgctccaaggtctgcagaacctgggtatttggtcacgaaggtggtggcggtggataaggacagtggtcagaatgcatggctgagctataggctacttaaggcctccgagccagggctgttcgccgttggggagcacacaggggaacaggcacctccaaacacagattggcgtttctcccaggcacagagacctggcacatctgggtctcagaatggagatgacactgggacctggcctaataaccagttcgataccgagatgttgcaagcgatgatccttgccagcgcttctgaggccgcagatggctcctcaacgctgggcggtggcgcaggaactatgggcttgtccgccaggtatggaccccagtttacactccagcacgtccctgactacagacagaatgtgtatattccgggaagcaatgctactttgaccaacgctgccggtaaacgcgacggcaaggcgccagctgggggtaacggaaataaaaaaaaaagcgggaagaaggaaaaaaaatag

SEQ ID NO: 237342 - DNA, 2799 bp, synthetic construct
  misc_feature 1..2799: note = Description of Artificial Sequence: Synthetic coding sequence
  source 1..2799: mol_type = other DNA
atgattcctgcacgcctgcacagagactataaaggattagtgcttctcgggatactgttgggaactctctgggaaacgggatgtacccagatcaggtattccgttcccgaggagcttgaaaaggggtctcgtgtcggggacatttccagagatctgggcctggagccgcgtgagctggcagagagaggggtgagaataatcccaagagggaggacgcaactcttcgcgcttaatccaaggagtggctcactcgtcacggcaggacggatagaccgagaggaactgtgcatgggggcaatcaaatgtcagctgaacctcgacattctcatggaggacaaagtgaagatatatggggttgaggttgaagtgagagacatcaacgacaatgcgccttatttccgagaaagtgaactggaaataaaaatttctgagaatgctgccaccgagatgagattcccccttccccacgcctgggatcctgatattggaaagaatagcttacagtcttatgagctctcacctaacacgcatttttctctaatcgtccagaacggagccgacggtagcaagtatcctgagctcgtactcaagagggctctggaccgcgaagagaaagcagctcatcacttagtcttaacagccagcgatggtggggatcccgttaggacaggaaccgctcgcattagagttatggtgctggatgccaatgacaatgcgccagcctttgcccagccggagtacagggcatctgtgcctgagaacctggctcttggcacccagctgctcgtcgtcaatgccactgaccccgacgagggggtaaacgccgaagtgcggtactcattcagatacgtggacgataaagctgctcaggtctttaaacttgactgcaacagtggtactatctccaccataggtgagctggatcatgaggaatcggggttctatcagatggaggtgcaggcgatggacaatgccggttatagtgcacgggctaaagtgctcattaccgtgctggacgtgaatgacaatgctccagaagtggtgctcacgtcattggccagctccgtgccagaaaattccccacgtggaactctgatcgcccttttgaacgtaaacgatcaggacagtgaggaaaacggacaggttatatgcttcatccagggcaatctgccctttaagttagaaaagagttacggtaactactattctttagtcacagatatcgttctcgaccgcgaacaggtgccctcctacaatattacagtgaccgcgacagaccggggtactcctccactgagtaccgagactcatatcagtcttaacgttgcggacaccaacgataacccgccagtgtttccacaggcgtcctacagtgcgtacatcccggaaaacaaccctagaggcgtgtcactcgtaagcgtgaccgcccacgatcctgattgcgaagaaaatgctcagataacctatagtctggccgaaaacaccatccagggcgcaagcctgtcatcttacgtgagtattaattccgatacaggggttctgtatgccctgagttccttcgattacgagcaatttagggatctgcaggtgaaggtgatggcgagggataatggacatcctcccttgtccagtaatgtgagtctctcactgttcgtgcttgatcagaacgacaatgcacccgagatattatacccggcactgccgactgatgggagcaccggtgtcgagttggcccctagaagtgctgagccaggttacctagtgaccaaagttgttgcagtggaccgggactcgggccagaatgcatggttgagctaccggctactgaaggcatccgaacccggattgttttcggtcggcctgcataccggtgaggtacggaccgcacgggcactgctggacagagatgccctgaaacagtctttagtggtggccgtccaggatcatggacagccacctctttctgccaccgttactctgaccgtggctgtcgctgactcaatcccgcaggtcctggcagacctgggctcgctggaaagcccagcgaacagtgaaacttctgacctgacgctttacctcgtcgttgccgtggccgctgtctcttgtgtgtttctggcgttcgttatccttctgctggccctgagactacgacgatggcacaaatcacgactgctgcaggcctctgggggtggtctcactggcgctcctgcctcacacttcgtgggagtggacggagtacaggcattcctacagacttactcccatgaggtgtctctgacgactgactcacgcaagtcccaccttatctttccccagccaaattacgccgacatgctggtgagtcaggagtcctttgaaaaatctgagcctcttctgctgtcaggcgacagtgtgttctctaaagactcgcatgggttaatcgagcaggcaccccctaatacggattggcggttctcccaggctcagaggcccggtacctccggatcccaaaatggcgatgacaccggcacttggccaaataaccaattcgatactgaaatgctacaggccatgatcctggcgtcggccagcgaggccgctgatggttcaagcacactcggcggtggcgctgggactatggggcttagcgcaaggtacggccctcagttcacactccagcatgtgccagactaccgtcagaatgtgtatatacccggaagtaatgcaactctcacaaatgccgctggtaagagggacggtaaggccccagccggaggaaatgggaataaaaaaaagtcgggtaaaaaggaaaagaagtag

SEQ ID NO: 237343 - DNA, 2799 bp, synthetic construct
  misc_feature 1..2799: note = Description of Artificial Sequence: Synthetic coding sequence
  source 1..2799: mol_type = other DNA
atggccgctcttcaaaagcttccacactgcagaaaactcgttctgctgtgttttctattggctacgctctgggaagcaagggctggccaaatccggtattcagtcagggaggaaattgacagaggcagcttcgtggggaatatcgccaaggatctcggcctggagcctctggccctggcggaacagggtgttagaattgtgtcccgaggacgcagccaactgttcgccctgaaccccaggagcggatcactggtcactgccaacagaattgaccgtgaggaactgtgcgctcagtccgccccatgcctcctcaacttcaatatcctgctggaggacaaactgacgatttatagcgtggaggtggagataacagatataaatgataacgctccacgctttggcgtagaggaactggagctgaagatcagcgaaaccaccactcccggtttccgaatccctctgaagaacgcccacgatgcggatgtgggcgaaaacgcattgcaaaagtatgcgcttaatcctaacgaccacttttctcttgatgtgagaagaggggctgacgggaacaagtaccccgaactggtcttggagcgttctctggatcgcgaagaggaagccgtacaccacctagtgttagttgccagcgatgggggtgatccggtcctctcaggcacctctcgcatttgtgtgaaggtgctcgacgccaacgacaatgccccagtgttcacacagccagaatatagaatcagtataccagaaaataccctcgtaggcacaaggatactgacagtgaccgcgaccgatgcagacgagggctattatgctcaggtggtgtacttcctggaaaaaagccctggggagacctccgaggtatttgaactgaaatccaccagcggggaactcacaatcattaaggatctcgactatgaggacgcgacctttcatgagatcgatattgaagctcaagacggacctggtttgttaactcgggcaaaagtgatcgtcacggttctggacgtgaacgacaacgctccagagttttacatgacatcggctacaagcagtgtatcggaagactccctcccaggaactatcataggtttgtttaacgtgcacgaccgagattctggccagaacgccttcaccacttgttcccttccagaggatctgccttttaaactcgaaaaaagcgtggataattattatagactcgtgaccacccgcgcactcgacagagagcagtttagtttttataatatcactctcacagcgaaagacggcggaaacccttcgctctctaccgacgctcatatcctgcttcaggtggccgacatcaatgacaatgccccagcgttctcaaggacatcttattccacatatattcctgagaataaccctagaggcgctagtgtgttcagtgttacagcacacgaccccgattccaatgataacgcacatgttacctacagtttcgcagaggatactgtgcagggtgcccctctgtcctcctatatcagcattaattccgataccggggtgctctatgctcttagaagctttgattatgagcagctgcgagacttacaggtatgggttatagccagagacagtggaaaccctcctctctcaagtaacgtatcgctgtctctgtttgttctggaccagaatgataatgctccagagattctgtatcctgcctttcccaccgatggctctacaggtgtggaactggctcccagaagtgcagagcccggatacctcgttaccaaagtcgtggccgtagaccgtgattcgggacaaaatgcgtggctttcgtaccacctcctcaaggctagtgagccaggcctcttctctgtgggacttcatacgggtgaggtgcggacagccagggccctgctggaccgcgacgcccttaagcagtcccttgtggttgcgatccaggatcacggtcagccgccattgtccgccacagtgaccctgaccgtcgctgttgcagaccgtattcccgacattctcgccgacctaggatcactggagccctctgccattcccaacgatagtgacctgaccctgtatttggttgtcgctgtcgccgctgtcagctgcgtgtttttagctttcgtgatcgtgctacttgctcacagactcagaaggtggcataagagtcgactacttcaggcaagcggaggatcccttaccggcatgcaatcctcacatttcgtcggggttgacggcgtgcgcgcattcctgcagacatacagccacgaagtgtcccttacagccgattccaggaagtcccatttgatcttccctcagcctaactacgcagacaccctcatttcccaggaaagctgtgaaaagaaggatttcctcagcgccccacaatcactccttgaggaagagcgggaagagacattttctcagcaggcaccccctaatacagattggcggttttcacaggctcagaggccgggaacaagtgggagccaaaacggagatgacacggggacttggcccaacaatcagtttgatacggaaatgcttcaggccatgatcctcgcttcggccagcgaagccgcagacggttccagcacactgggaggcggagctggcacaatgggcctcagcgcccgatacggtccacagttcacgctccagcacgtcccggactaccgccagaacgtgtatatcccaggaagtaacgcaactttgactaacgccgcaggaaaaagagacggtaaagcccctgccggtggaaacggcaataaaaaaaagtcaggcaagaaggaaaagaagtag

SEQ ID NO: 237344 - DNA, 2799 bp, synthetic construct
  misc_feature 1..2799: note = Description of Artificial Sequence: Synthetic coding sequence
  source 1..2799: mol_type = other DNA
atgaccaactgcttatcttttcgcaacgggagagggcttgcactgctgtgtgcattgttgggcacactctgtgagactggctccggccaaatacgatactcggtgagcgaagaactggataaagggagcttcgtggggaacatcgccaatgatttgggcctggaaccccgagaactggcagagagaggggttcgaatagtgagtaggggaaggacacagctcttcagcctcaatcctcaatctggctcactggtgacagccgagcggatagatagagaggaactgtgtgcccagatccccctgtgtctcgtgaagatcaacattttagtggaggacaaactcaagatctttgaggtggaaatcgagatcaaagatatcaacgataatgcacccaacttccccactgaagaattggagatcaagatcggagagctcacggtgcccggtaccagattccccatcaagacagcctttgatcctgacgttggaatcaattccctgcagaactataaactgtcccccaatgactatttcagtctcgccgtgaactccgtcagcgaaggggctaaatatcctgagctggtgttagaacgagccctggatagggagaagaaggagattcatcagttagtactcgtggcatcggatggcggtgatcccgtccattccggcaacctacatatccaggtgattgtgctcgacgctaatgacaaccctcccatgttcacccagcccgagtacagagtctcagtctgggagaatgtcccagtcggcaccaggctgctgacagttaatgctacagaccccgatgaagggtttaatgcccaagttagctacatcttagataagatgccaggcaagatagccgaaatcttccaccttaacagcgtctcgggcgaggttagcattcttaagagtctggattacgaggacgccatgttctacgaaattaaaatcgaggctcaggatgggccaggccttctcagtcgcgcaaagatcttggtgaccgtgctagacgtgaacgataacgccccagagataaccataactagcttaacatcttctgtgcccgaagaaggcactgtcgggagggaaatcgctttgatcgacgtccatgatcgtgactcaggccagaatggccaggtggaagtgtttgtactggggaaccttccgttcaagctggaaaagagcatcgatcagtattaccggctggtgaccgcgaccagcttagaccgggaacaaatctcggagtataacatcagtctgagggcttcagatgggggaagcccacctttaagcactgagacccatatcactctgcacgtcatcgacataaatgataaccctcctacgtttccccatcttagctattctgcctacatcccagagaacaacccacggggagccagcatttttagcgtgactgcccaggacccggatagtaataacaatgcacgcataacctatgctcttactgaagataccttgcagggggctccgctcagttcctttgtgtccattaattccaacaccggcgtgctatacgccttgcgtagctttgactacgagcaattcagagatctcaagctactcgttaccgcctcagatagtgggaatccccctttatcgtcaaacgtgtcactgaacctgttcgtgttggatcagaacgacaatgctcctgagatactctaccctgctctccccacggatggatctacaggtgtggagcttgccccacggagcgcggagccaggttacctggtgacgaaagtggtagcagtggacagggacagcggtcaaaacgcctggctgagctaccgactgttgaaagcgtccgagcctggtctattctcagtgggcttgcacactggcgaagttagaaccgccagggccttgttggaccgggacgccctgaagcagagcttggtcgtggcggtgcaggaccacggacagccacccctgagcgccaccgtcacactgacagtggccgttgctgaccgcatcccggatattctggcagacttagggagtctggagcccagcgccaagcctaatgacagtgacctcactctgtacttggtggtcgccgtcgctgcagtgtcctgcgtgtttctggcctttgttatagtcctcttggccctcagactgagacgatggcataagagcaggcttttacaagcaagtggtggtggactcgcaagtactccaggaagtcactttgtcggagcagacggcgtccgcgcatttctgcagacctattctcatgaagtgagcctgaccgcagattcgcggaagtcgcacttaatttttcctcagcccaactatgccgataccctcatatctcaagagtcttgcgaaaaatcagaacctcttcttatcacccaggacctgcttgaaatgaaaggcgacagcaacctgcttcagcaggcccctcctaataccgactggcgattcagccaggcccaaaggcccggtacaagtggctctcaaaatggggacgataccggaacctggcccaacaaccaattcgacacagaaatgctgcaagccatgattctggccagtgcaagcgaagcagccgacggttcaagcactctcgggggtggtgcaggaacaatggggctgtccgccagatacggcccacagtttacactgcagcatgtacccgactacaggcagaacgtctacattcctggcagcaatgctacccttaccaacgcggctggcaagcgtgatgggaaggctcctgcgggaggcaatgggaacaagaagaaatccggcaaaaaggaaaagaagtag

SEQ ID NO: 237345 - DNA, 2796 bp, synthetic construct
  misc_feature 1..2796: note = Description of Artificial Sequence: Synthetic coding sequence
  source 1..2796: mol_type = other DNA
atggcctctcctccacggggatgggggtgcggtgagctgctgctgccctttatgctgctggggacgctttgcgagcctggctccgggcagatccgctatagtatgcctgaagagcttgataagggatcctttgtggggaacatagctaaagacctgggactggagccccaggagctggctgagcgcggagtgagaatcgtttcacgtgggaggacacagttatttgcccttaaccccagatcagggtcactggttacggcaggcaggattgatagagaggaactttgtgcccagtcacctctgtgtgtggttaatttcaacattcttgttgagaacaaaatgaagatttacggggttgaggttgaaatcatagatattaatgacaatttcccaagattcagggatgaggagctcaaagtgaaagtcaacgaaaatgccgcagccggaacccgtctggtcctaccctttgcacgggacgccgatgtgggggtcaattccttgcggagctaccagctgtctagcaacttgcatttctctcttgatgtggtgtctggaaccgacggtcagaagtacccagaattggtgctggaacagccccttgacagagagaaggagacagtgcatgacctactgcttactgccctggatggcggtgacccagtactaagcggaaccacgcatattagagtgacagttttggacgcaaatgacaacgcccctctattcaccccttccgaatactcagtttccgtgccagagaacatacctgtcggcactcgccttcttatgctcacggccacagatccggacgagggaatcaatggaaaactaacttattcgttccggaatgaggaggaaaagatcagtgagacgttccaactcgacagcaatctcggggagattagtaccctgcagtctttagactatgaagagtcacgcttctaccttatggaagtggtcgcccaggatggtggggcacttgtggcatctgctaaagtcgtcgtgactgtgcaggatgtgaatgataacgccccagaagtaattttgactagcctcacttcttccattagcgaagactgcctgcctggaacggtgatcgccctcttcagcgtgcacgacggagatagcggcgagaatggtgagattgcctgctcaatacctcgcaacctgcccttcaagcttgaaaagagtgttgacaactattaccatctgttgacaacccgcgatttagatagagaggagacaagtgactacaacatcacactgacagtgatggatcacggtacccctcccttgtcaacggagtcacatattcctctgaaagtagctgatgttaacgacaacccccctaacttcccccaggcctcatattccacaagtgtgaccgaaaacaaccctcgcggagtctccatcttctctgtgaccgctcatgatcccgatagcggcgataatgctcgcgttacatactcacttgccgaggacacattccagggagcacccctgagctcgtatgttagcatcaactcagacacaggcgtcctatatgccttgagatcttttgactatgaacagctgcgtgacctccaactttgggtgacagcctccgattctggcaatccgccattatcctcaaatgtgagcctatcgctgtttgtgttagaccagaatgacaatacacctgagattttatatccggcactgccaaccgatggctcaactggcgtggaactagccccacggagcgctgagccgggttatctggtcaccaaggttgttgcggtcgataaagattcaggccagaacgcatggctgagttaccgcctgctgaaggccagtgagcccggtctctttgctgtgggactgcataccggagaagtgcggacagcacgggcattgctggatcgggacgctctaaagcagtccctggttgtggccgtggaggatcacggacagccaccgctgtcagccacatttaccgtgaccgtagccgtcgcagaccgcattcccgacatcctggccgatttaggcagcatcaaaacgccaattgatcctgaagacctcgacctcactctgtacctggttgtcgctgtcgccgctgtgtcttgcgttttcctggccttcgtgatagtgctgttggtcttgaggctcaggaggtggcataagagtcgcctgctgcaggcagagggcagccgattggctggcgttcctgccagtcatttcgtcggcgtcgatggagtgcgggctttcctgcagacttatagccatgaagtgtccttaactgctgattctagaaagtcacatctaattttcccccagccgaactacgccgacactctcttatcagaagagtcatgcgagaagtccgaacctctcttgatgtcagataaggtcgatgccaacaaagaggaacggagggtgcagcaggcaccaccaaacacggactggcgattctcccaggcacaaagaccaggaacatctggtagtcaaaacggggacgataccgggacttggccgaacaaccaattcgacaccgagatgttgcaggccatgattctagcaagtgctagtgaagccgcagatggatccagcacacttggtggaggagctgggaccatgggactgagtgcccgatacgggccacagttcacgctgcagcacgtccctgactatcgtcagaatgtctatatccctggatctaacgcaacgctgaccaacgcagccggaaagcgcgacggaaaagcccctgccggaggaaatggcaacaaaaaaaagtcgggcaaaaaggagaaaaagtag

SEQ ID NO: 237346 - DNA, 2799 bp, synthetic construct
  misc_feature 1..2799: note = Description of Artificial Sequence: Synthetic coding sequence
  source 1..2799: mol_type = other DNA
atggccccaccccagcggcaccctcagaggagtgaacaagtacttctcctcacccttcttggaaccctgtggggcgctgctgccgctcagattcgctacagcatccccgaagaactggagaagggatccttcgtcgggaatatcgtcaaggacctcggtctggagccccaagagctggctgaacacggagtccgtatcgtctctcggggtcggatgcaattgttttctttgaacccccgtaatgggtccctcgtgaccgcaggaagaattgatcgggaggaactgtgtgctcagagccccagatgtctagtctcattcaacatacttgtggaagataaactcaacctataccccgtggaggtggaaattgtagacatcaacgacaacacacccaggttcctgaaggaggagctggaggtgaagatacttgagaatgcggctccttcttcccgttttccactgatggaggtatacgatccggatgttggtatgaatagcctgcaaggcttcaaactaagtggtaattctcatttcagcgttgatgtgcagagcgaggctcacgggcctaagtacccagagctagtcctggagggaactctggacagagaaggagaggccgtttacaggctggtgcttacagcgatggacgggggagaccctgttaggtcaagcgtcgcacagatcctagtcaccgtgctggatgtgaatgataacacacccatgtttacacaaccagtctaccgggtctctgtgcccgagaatctacctgttggcactccggtgctggccgtcactgcaacagatcaagacgaaggggtgcatggtgaagtgacctactcctttgtgaagatcacagagaagatatcacagattttttgcctgaacgtgttgacaggcgagattagtacatcagccaacctggactatgaagatagttcgttctacgagctcggtgttgaggctagggatggcccaggacttcgagatcgggctaaagtgctaatcacaattctcgacgtgaatgacaatgtgcccgaggtggtggttacatcaggatcccggacaattgccgagtcagcacccccaggcacggtgatcgcccttttccaggtgttcgacagagacagcggtctgaacggactggtgacttgctcaattccaaggagcttaccatttgagttggaaaaaagcgtcggaaactattatcggctggtgaccaacgccgctctcgatcgggaagaggttttcctgtacaatatcacggtcaccgctaccgacaagggcaccccccctcttagcactgaaaccattattagcctgaacgtcgccgataccaacgacaatccccctacattcccacacagttcgtattccgtatacgtactggagaacaatcctcgcggtgcgtcaatattttctgtgaacgccctcgaccctgatgtagaccagaacgcgcaggtgagttacagcttagccgaagacaccctacagggggcacccttaagttcgtacgtgagtatcaattcagacaccggaattctatatgcactgcgctcgttcgattacgagcagctgcgagatctccagttgtgggtgactgcgtcagactccggagacccccctcttagtagcaatgtaagcctcagtctgttcgtgctggaccaaaacgacaatgctcccgagatcctttatcccgcactgccaactgatggctccactggggtggagctggctccgaggtcagccgaacccggatacctggtgactaaagtagtcgcagtggatcgcgatagcggccagaatgcctggctctcctacagactgctcaaagccagcgagcctggattgttctctgtgggtctgcacacaggagaggtcagaaccgcgcgagccctgctcgaccgagacgcactaaagcagagcctcgtggtggcggtccaggaccacggacagccacctctgagcgccactgtgactcttactgtcgccgtagctgacagaatccccgacatattagccgatctcggttcccttgagcccagtgctaaacccaatgacagcgacctgacactttatttggtcgttgcagtcgcagctgtctcttgcgtttttttggcgttcgtcatcgttcttcttgcactgaggctgcagcgatggcacaaaagcaggcttttacaggcatctgggggaggcctggccagcatgccaggatctcattttgtgggggtggaaggcgttagggcctttctgcagacctacagccacgaggtgagtcttacggcagattcccgcaaaagccacttaattttcccccagcctaactatgcagacaccctgatcaaccaggagtcctacgaaaaaagcgaaccactgctgatcacgcaagatctcctggagaccaagggagagcctagacaactgcaacaggccccacccaataccgactggcggttcagccaggctcaacgaccaggcacaagcggctcacagaatggggatgataccggtacatggcccaataaccagtttgatacggagatgctgcaggctatgattctggcttctgcaagcgaagccgcagatggctcttcgactctgggcggtggcgctgggactatgggcctgagcgccaggtatggcccacagtttactctccagcacgtccctgattatcggcagaatgtctacatccccggttctaacgctacattaactaacgccgctggaaagcgggacggaaaggcacccgctggtggcaacggcaacaaaaagaagtcaggtaagaaagaaaagaaatag

SEQ ID NO: 237347 - DNA, 2799 bp, synthetic construct
  misc_feature 1..2799: note = Description of Artificial Sequence: Synthetic coding sequence
  source 1..2799: mol_type = other DNA
atggccgctcagccccgaggcggtgactatcggggatttttcctcctgtcaatcttactgggcactccgtgggaggcttgggccggaagaatcttgtattccgtctcagaagagaccgataagggttcatttgtgggggacatcgccaaagacctcggacttgagccccgtgagttagccgaacggggagtgagaataatctcccgagggagaacccagctgttcgcactgaaccagcggtctggtagccttgtgaccgccggtagaattgatcgggaagaaatatgcgcacaatccgcacgttgtctggtgaatttcaacatcttaatggaagataaaatgaacctctatccgatcgatgtggagattatcgacatcaacgataacgttcctagattcttaaccgaggagatcaatgtaaaaataatggaaaacactgcccctggtgttcgattccctctgtccgaagccggagatcctgacgtcgggacgaactcactgcagtcttatcaactgtcacccaatcggcatttttcgctggcggtgcaatcaggggatgatgagactaaatatcctgagcttgtcttagagcgcgtcctcgacagggaagaggaacgagtacatcacttggtgcttacagccagcgatggtggggatccccctcgctcttctaccgcccacatacaagtcactgttgttgacgttaatgatcatacccctgttttcagcctacctcagtatcaagtcaccgtgccagagaatgtgcccgtaggcacgcgccttctgactgtgcacgcaattgatctggacgagggcgtgaatggcgaggttacctacagcttccggaaaattacgcctaagctgccaaagatgttccacctgaattcacttacaggcgagattagcactctggaaggcctggactacgaagagaccgcgttctacgagatggaagtgcaggcacaagacggtccaggcagcctcaccaaagccaaagtcctgattaccgtgttggacgtgaatgataacgccccagaagttacaatgacaagtctcagtagctctatccctgaggatacccccctcgggacagtgatcgcactgttctacctgcaggatagagactcaggaaaaaacggagaagttacctgtaccatacccgagaatctgcccttcaaactcgagaagtcaatcgacaactattacaggctggtgaccacaaagaatctggaccgcgaaacacttagtctgtataacataactttaaaagcaactgacggaggaacacctcccctttcacgagagactcacatcttcatgcaggtggccgacacgaacgacaaccctcccaccttcccccactctagctactctgtctacatagccgagaataaccctcggggagcttctatttttctggtgaccgctcaggaccacgattccgaggataatgcccaaataacctactctcttgcggaggataccatccagggcgctcctgtttcgtcctatgtgtccatcaatagtgatacgggtgtgctatacgccttacagtccttcgattacgaacagcttcgcgaacttcagttgagagttactgctcacgactccggcgatcccccactgtctagcaatatgagcctcagtctttttgtgctcgatcagaatgataatccaccagagatcctatatccggctctacccaccgatggatctactgggatggagttggcaccacgcagtgccgaacccggatacctggttaccaaggttgtcgcagtggataaggactctggacagaacgcctggttgtcatacctactcctcaaagcgagtgagccaggcctcttcgcggtgggtttatatactggtgaggtgaggactgctcgtgccctgctcgatagggacgccttgaagcagtccctggtggtggctgtgcaggatcatggtcaaccccctctctcagccacagtgactctgacggttgctgtggcggacagtatcccagaggtcttggctgacttaggatcattggaaccatccgacggcccttataattacgatttgactctgtacctggttgtggcagtggcaactgttagctgcgtgtttttggcctttgtgctagtcctgcttgcccttaggctccgcagatggcacaagagccgactgttgcaagccagcgagggaggactcgccaacgttccaacctcccactttgtgggtatggatggagtccaagctttcctgcagacttacagtcacgaagttagtctgacggccgattcccgaaagagccacctcatcttcccacagcccaactatgtggacatgctgatcagtcaggaatcctgcgaaaagaacgactccctcctgactagtgttgatttccaggaatgtaaggaaaatctgccaagtattcagcaggctcctcctaatactgactggaggttctctcaggcgcagcggcctggtacgtctggaagccaaaatggcgatgacacaggaacctggccaaacaaccaattcgacacagagatgctgcaagccatgatccttgctagtgcttccgaggcggctgacggaagcagcacattgggtggaggtgccggtacaatgggtctttctgctcgctacgggcctcagttcacacttcaacacgtgcccgactatcgacaaaacgtatacatacccggaagtaacgccacgctcacgaatgccgctggaaaaagagatggcaaggcacccgctggaggtaatggcaacaaaaagaagtccggcaagaaggaaaagaagtag

SEQ ID NO: 237348 - DNA, 2799 bp, synthetic construct
  misc_feature 1..2799: note = Description of Artificial Sequence: Synthetic coding sequence
  source 1..2799: mol_type = other DNA
atggcagccccacaatctcgccctcggcgtggggagctgatactcctgtgtgcactgttgggcacactgtgggaaataggacgaggtcaaatccgctactccgtgcctgaggaaacagacaaaggaagctttgtgggaaatatctccaaagacctggggttggaccctagaaaactggctaagcacggtgtccgaattgtgagcagagggcgtacacagctgtttgcccttaatcctcggagtggatccctgatcacagcaggtcgtattgaccgggaggaattatgcgcccagagcccaaggtgcctcattaacataaatacattggtggaagataagggaaaactctttggggttgagatagaaatcatagacattaatgataacaacccgaagttccaggtggaggatctagaagtaaagatcaacgaaatagcagtgcccggagcccgttaccctctcccagaggccgtcgaccctgacgtgggcgtgaacagtttacaaagctaccaattaagcccaaaccaccacttctctctcgacgttcagactggagacaatggagccatcaatcctgaattggtattagaacgcgcactcgatagggaggaggaagcagctcaccatcttgtcttgaccgcttctgacgggggaaagcctcctcgctcatccactgtgcgcattcacgtaactgtgctggataccaatgataacgcacccgtgtttccacacccaatctacagggtgaaggttctggaaaacatgccgcctgggacccggctgctcactgtgactgcgagcgatcctgacgagggcataaacggaaaggttgcttataagttccgaaagatcaatgagaagcagacaccactgtttcagctcaatgagaatacaggcgaaattagtattgccaagtctctggattatgaggaatgttccttctacgagatggaaatacaggccgaagacgtgggggcactgctcggcaggacaaagctgctaatctccgtggaggatgtgaacgacaatcgcccagaagtgatcatcacttctctgttcagtcctgtgctggaaaactctcttcctggaactgtcatcgcttttcttagtgtccacgaccaggactctgggaaaaatggtcaggtggtctgttacacccgcgacaacctgccctttaagctagagaagagtatcggcaattactacagacttgttaccagaaaatacctggaccgggagaatgttagcatctataacattacggttatggcaagtgacctgggcacacctcccctgagtaccgaaacccagattgcccttcacgtggctgacattaacgacaatcctcctaccttcccgcatgcaagctacagcgcatacatcctggaaaataatctccgtggagcctctatattttccctgacggcccacgaccccgactctcaagagaatgctcaggtgacgtattcagtgaccgaggataccctacagggtgcacccctgtcgagttacatctctattaactctgatactggtgtattatatgcactccagagctttgattatgaacagatccgtgacttgcagctgctggttacagcctcagattccggggaccctcctttgtctagcaatatgtccctgtccttattcgtgctggatcagaatgataatgccccagaaatcctgtaccccgctctgcccaccgatggttccaccggagtggagctggcccctaggtctgcggagcgtggttatctagtgacaaaggtcgtagcagtggatagagatagcggtcaaaacgcttggctttcctaccggttgctcaaagcgagcgagcccggactgttctcggttgggctgcacacgggggaggtccggacggctcgtgccctgctcgatcgcgatgccctgaagcaaagccttgtggtagccgtgcaggaccacggtcagcctccactctcagccaccgtcactctcaccgttgccgttgccgattctatccctgaggttctcaccgaattagggtctcttaagcctagcgtggatcccaacgacagcagtcttactttgtacctagtggttgcagtggcagcgatcagctgcgtgtttctggcgtttgtggcagtgttactggggctgaggttgaggagatggcacaagtcccgccttttgcaggattccgggggtcgactggttggcgtcccagcatctcattttgtgggagtggaggaagtgcaggcatttcttcagacatactcacaggaggtgagcctgacagcagattcccgcaagtcacatcttatttttcctcaacccaattacgcagatatgctcatttcccaggagggctgcgaaaaaaatgatagcctgctcacgtctgtggatttccatgagtacaagaacgaggctgaccacggacagcaggcgccacccaacaccgattggagattttcacaggctcagcggccaggcacttctggctctcagaatggagatgatacgggtacctggcctaacaaccagttcgatacggagatgctccaggcaatgatcctggccagtgcaagcgaagccgcagatggaagcagtacattaggtggaggtgcagggactatgggcttgagtgctagatacggaccacaatttaccctgcaacatgtacccgactaccggcagaatgtttatatcccaggctcgaacgccacccttactaacgcagccggaaagcgggatggaaaagcgccagctggaggtaacggcaataagaaaaagtccggcaaaaaagaaaagaagtag

SEQ ID NO: 237349 - DNA, 2784 bp, synthetic construct
  misc_feature 1..2784: note = Description of Artificial Sequence: Synthetic coding sequence
  source 1..2784: mol_type = other DNA
atgcagagagctagggaagcagagatgatgaagtcacaagtgctgtttccgttcctgctgtctctcttctgtggagccattagtcaacagattcgatacacaatccctgaggaactggccaatggttctagagtgggcaagctggccaaggatctaggacttagcgttcgcgagctaccaacacggaaactgagagtttcagcagaggattatttcaatgttagccttgagagcggggacttacttgtgaatggcaggatcgacagagaaaaaatctgcggcagaaagcttgaatgcgcactagaattcgaaacggtggccgaaaatccaatgaatgtttttcacgtcgtggtggtgatccaggacattaatgataatgctcctcgattcgtggccaagggtatagatctggagatctgcgagtctgctctgccaggtgtaaagttttccctggattccgcccaagatgccgacgtggagggaaacagcctgaaattatatacaataaaccctaaccagtacttcagtttgtcaaccaaggagtcgcccgatggaagcaaatatcctgttttgctgctcgagaaacccctcgacagggagcaccagtcaagtcatcgcctcatcctaaccgcaatggatgggggagatccccctttatctgggactacgcacatctggattcgggtcacagatgctaacgataacgcccctgtattctcacaggaggtgtatcgagtttcactgcaggagaacgtgccatggggaactagtgtgcttcgggtaatggctaccgaccaagacgaaggcattaatgcagagatcacctacgcctttttaaacagtcccatttccacttctctgtttaacctcaatcctaatacaggcgatattacaacaaacggcaccctcgacttcgaagagacctcaaggtacgtgctgagcgtggaggccaaggatggcggagtacacaccgcgcactgtaatgtgcagattgaaatcgtagacgaaaacgataatgctcccgaggtgactttcatgtcattcagcaaccaaattccagaggatagcgacctgggaactgtcatcgcgctcattaaggtgagagataaagactctgggcaaaacggcatggtaacttgttatacccaggaagaggtgccatttaagctggagagcactagcaagaactactacaagctggtgattgcaggggctttgaatagagaacagactgccgactataatgttacaatcattgccacggacaaggggaagccagcacttagtagcaggacatccattaccctccacatctccgatatcaatgacaatgccccagtgttccatcaggcaagctatgtcgttcacgtgtcagagaacaaccctcctggtgcatccattgcccaggtgtccgcgtctgacccagacctggggccaaacggaagagtctcatactctatactggcgtcagacctcgaacctagggagcttctgtcctatgtcagcgtgtctccccaaagcggggtggtgttcgcacagagagcctttgatcacgagcagctgagagcattcgagttaaccctgcaggccagagatcagggctctcccgctttgagtgccaatgtaagcttacgagtcctggttggtgacttgaacgataacgctccccgtgtcctttatcccgctcttggacccgacggcagcgccctgtttgacatggtgcccagggctgccgaacctgggtacctggttacgaaggtggtagctgtcgacgcagatagcggccacaatgcgtggctctcttatcacgttctgcaggccagtgagcccggtctgttctctttgggcctgcgcacaggagaggtgagaaccgcacgagccttgggagacagggatgccgcacgacaaagacttttagtggctgtgcgcgacggcggacaaccccctttatcagctaccgctacactccacctgatctttgctgattccctgcaggaggtgcttcctgatctgagtgaccggccagaaccatctgacccacagaccgaacttcagttttatctggtggtggccttggcactgatcagtgtgctcttcctactggctgtaatcctggctatcgcactgcggctgcgtcgctccagtagtctcgacactgaggggtgtttccagactggactctgtagtaagtctggtcctggagttccccctaatcacagcgagggcacattgccttactcatataacctgtgcatcgcctctcactcagccaaaacagagttcaactccttaaacctgacccccgagatggcaccaccccaggacctgctatgtgacgacccttcgatggttgtctgtgctagtaatgaagaccataaaattgcgtacgacccaagcttgtcgagtcaccaggctcctccgaacacagactggcgcttcagccaggcccagaggccgggaacctcaggttctcaaaatggcgatgacactggcacctggcccaataaccaattcgatactgaaatgctgcaggcgatgatcctggcctccgcttccgaggcagccgacgggtcttctaccctcggcggtggggctgggaccatgggcctgtccgctcgatatggacctcagtttacattgcaacatgtcccagattatagacagaacgtgtacatccccggtagcaatgctactctgacaaatgctgctggtaagcgggacgggaaggccccagccggaggaaacggtaataagaagaaatccgggaaaaaggagaaaaaatag

SEQ ID NO: 237350 - DNA, 2796 bp, synthetic construct
  misc_feature 1..2796: note = Description of Artificial Sequence: Synthetic coding sequence
  source 1..2796: mol_type = other DNA
atgaaggcctcttcaggaagatgcggccttgtgaggtggctccaagtcctgttaccattcttgctgtcgttatttcctggagcccttcccgtgcagattcggtactctatcccagaggagctggcgaagaactccgtggtcggcaacttggccaaagacctgggtttgagtgttcgggacctaccagccagaaagttgcgggtctccgctgagaaagaatatttcacagtgaaccctgagtccggggacctgttagtctcggatcggattgaccgtgaacagatttgtggaaagcaaccactgtgcgtgttggatttcgacaccgtcgccgaaaacccccttaacattttctacattgcagttatcgtgcaggacattaatgacaacaccccactgttcaaacagacaaaaattaacctgaagattggtgaatccaccaagcctggaactacgttcccactcgacccagctcttgactccgatgtgggtcccaattctcttcagcggtatcacttgaatgacaacgaatactttgatctcgctgaaaaacagacccctgacggcaggaagtaccctgaattgatcctgaagcactctctggaccgggaggagcatagcctccaccagttagtgctcaccgccgttgatggcggagaccctccacagagcgggacaacacagatcagaatcaaggttaccgatgccaacgataaccctccagtgtttagccaagatgtatatcgcgtgaccctccgagaggacgtgccacccggatttttcgtgctgcaggtaactgccacggacagagatgaaggcataaacgctgaaattacttacagcttccacaatgtcgatgaacaggtcaagcatttctttaatctcaatgaaaagaccggagaaataaccaccaaagatgacctggacttcgaaatagcctccagctacaccctgtctatagaagcaaaggacccgggtgaccttgccgcacactgctctattcaggtcgaaattctggatgacaatgattgtgctcctgaagttattgttacatccgtgagcacacccttgcctgaggacagccccccaggtacggtaattgctttaatcaagacaagggaccgtgactccggagagaatggggaggtctattgccaagtgctgggaaatgcaaagttcatcctgaaatcttcctctaagaactactacaaacttgtgactgacggggctcttgatcgggaggagattcccgaatataatctcacaatcaccgctactgatggagggaagccacccctttcatctagtataattgtaaccctgcatatcagtgatgtcaacgataatgcaccagtgttccagcaaacaagctacatggtgcacgttgctgaaaataatccacctggggcatcaatcgcacagatttcagcctcagaccctgatctggggccttctgggcaggtgagttatagcattgtggcctccgatttgaaaccaagggaaattctctcttacgtctctgtgagcgcccagtcgggggtggtctttgctcagagagcattcgaccatgaacaattaagagcattcgaactgacactacaagcacgggatcaggggagccctgctttgagtgccaacgtgtctctccgcgttcttgtgggagatctgaatgataatgcccctcgggtgctgtacccagcactaggcccagatggctctgcgctctttgacatggtcccccgtgccgctgagcctgggtacttggtgacgaaggtggttgctgttgacgcggactctggccacaatgcatggttgtcttaccacgttctccaggcaagcgaacccggtctgttttcacttggattgcgcacgggtgaggtgcgcactgcgcgtgctcttggtgaccgagatgcagctcgccaaaggctgctggttgccgtccgcgatggcggtcaacctcctctgtctgccaccgctacgctgcacctgattttcgctgattctttacaagaagtgctgccggaccttagcgatcgcagagagcctagtgatccacaggctaaactccaattttatctggtggtcgcgctcgccctgatcagcgtacttttctttttggccgtcatacttgcaatctctctgaggctccgactctcctcccgctccgatgcttgggattgctttcaacctgggcttagctctaaaccagggccaggggtgctgcccaactatagtgagggtacccttccatatagttacaacctgtgcgtggccagccagtctgcaaagacggaattcaattttctgaatatcacccccgagctagtcccagcccaggacttggtgtgcgacaatgctagctgggagcagaatactaatcacggtgccgctggcgtaccattcgctagtgatacaatccttaagcaggcgccacccaatactgactggagattctctcaggcacagcgaccagggacctcgggatcacagaatggcgacgacacaggaacctggcccaataaccagtttgatacagaaatgttgcaggcaatgatattggcatccgcatccgaagccgcagacggctcaagcaccttgggcggtggtgcgggtaccatgggattatcagcgagatacggtcctcagttcaccttgcagcacgtgccagactatagacagaacgtatatattcccggaagcaacgccactctgacaaatgctgctggaaagagggatggcaaggcgccagctgggggtaacggaaacaagaagaaatcagggaaaaaggaaaaaaaatag

SEQ ID NO: 237351 - DNA, 2772 bp, synthetic construct
  misc_feature 1..2772: note = Description of Artificial Sequence: Synthetic coding sequence
  source 1..2772: mol_type = other DNA
atgggatccggcgctggggaactgggcagagccgagcgtctgcctgttctatttcttttccttctttccctcttttgtccagctttgtgcgaacagattcgatacaggatccccgaagagatgccaaaggggagtgtggtcggcaatcttgctactgatctcggcttcagcgtacaagagctccctacgcgaaaactgcgcgtttcttcagaaaaaccatactttaccgtttcagcggagagcggagaattgctagtgagctctcggctggacagagaagagatttgtggcaagaaacctgcttgtgccctagagttcgaagccgtcgcagagaatcctttgaacttctatcatgtgaatgtggagatcgaagatatcaacgaccatacacccaagtttactcaaaattcgtttgagctgcagattagtgaatctgctcaacccggaactcggttcatcttgggaagcgcgcatgacgctgatatcggcagtaacacactgcagaactaccaactatcacccagtgatcactttagcttgattaacaaggagaagtctgacggctccaaatatcccgagatggtcctgaaaactccactggatcgtgagaagcaaaaatcctaccacctcactttgactgctctggactttggcgctcctcctttgtctagcacagctcagatccacgtcctcgtgaccgacgctaacgacaacgcccctgtgttctcccaggacgtgtatcgggtctccctgagcgagaatgtttaccctggtactacagttctgcaggtcaccgcaaccgaccaagacgaaggcgtgaacgcagagattaccttttccttctcggaagcaagtcaaattacacaattcgacctgaacagcaacaccggagaaatcactgtgcttaacacactagacttcgaggaagtcaaggagtactcgatagtccttgaagcgagggacggcggaggaatgatcgctcaatgcacagtagaagtggaagtgatcgatgagaacgataacgccccagaagtgatcttccagtccttacccaatctgataatggaggacgccgagctgggaacacacatcgctctcttaaaagttcgcgacaaggattccagacacaacggcgaagtgacttgtaagcttgagggcgatgtgccatttaagattttgacgagcagccgcaatacctacaaacttgtcaccgatgcagtgttggatagagagcaaaatcctgagtacaacatcacagtgaccgccacagaccggggaaagcctcctctatctagttcctcttcaataacactgcacattggcgacgtaaatgataacgccccagtttttagtcagagcagctatattgtgcatgtcgccgaaaacaaccccccaggggctagcatctcgcaggtacgcgctagcgaccccgacctcgggcctaacggccaggtttcctattgtatcatggccagcgacctcgagcaacgtgagctgtccagttacgtatctatctccgcagaaagcggggtggtcttcgcccagcgcgcattcgatcatgagcagctgagggcttttgagctcacactgcaagccagagatcaggggtcgcctgccctgtcagctaatgtctcgctgcgagtgcttgttgacgataggaatgataacgcacccagggtcttgtatcccgctctgggaccagacggtagcgcgctgttcgatatggtgccccatgcggctgagcctggatacttggtgaccaaagtggtggcagtcgatgcagactcgggacataacgcttggctgtcctaccacgtgttacaggcctccgagcctggcctctttagcctggggcttcggaccggtgaggtccgcactgcacgcgctctgggggaccgggacgcagttaggcaacgtttactcgtggccgttcgtgacgggggacagcctcctttgtctgccaccgcgactctccatttagtgttcgcggattctcttcaagaggttcttcctgatatcaccgaccgcccagatccttccgatctgcaggccgaattacagttctatttagtagttgccctggcactcatttccgttctgtttctggtcgccatgattctggcaatagccttacggctcagaaggtctagctctcccgcttcatggtcctgctttcagccaggactctgtgtgaagtcagagagcgtcgtacctcctaactatagcgagggaaccctcccctactcatataatctgtgcgtcgctcacaccggtaagactgaattcaatttcttgaagtgttctgagcagctcagctcgggccaagatatcctatgtggagatagtagtggggcactgtttcccctgtgtaacagttcagagctaacctcccaccaacaggcccctcccaatacagattggcggttctcccaagcacagagaccaggcacaagtggaagccagaacggggacgacactggtacctggcccaataaccagttcgatacggaaatgctgcaggccatgattctagcctcagcgagcgaggcagcagatggatcttcaacgctaggcggaggagccggtaccatgggattatctgccagatacggtccacagttcacactgcaacacgtgcctgattaccggcaaaacgtgtatattccgggaagtaatgcaaccttgaccaacgccgctggaaaacgtgacggcaaggccccagccggtggaaacggtaacaagaaaaagtctgggaagaaggagaaaaaatag

SEQ ID NO: 237352 - DNA, 2793 bp, synthetic construct
  misc_feature 1..2793: note = Description of Artificial Sequence: Synthetic coding sequence
  source 1..2793: mol_type = other DNA
atgggaggatcatgcgcccagagaagaagggccggacctcgccaggtgctgttcccgcttcttctaccactgttctaccctacgctgagcgaaccgatcagatactccatccccgaggaactggcaaaaggaagtgtggttgggaatctcgctaaggacctggggctgagcgttctggatgtcagcgccagaaaactgcgtgtgagtgctgagaagcttcacttctctgtggacgccgagtctggcgacctgctggtgaaaaacagaatcgacagggagcaaatttgcaaagaaagacggagatgcgaactgcagctagaagcagtggtcgagaatcctctcaatatcttccacgttatcgttgtgatcgaggatgtcaacgatcatgcaccccagttcgataagaaggagatacaccttgagatcttcgaaagtgcaagtgctggcacccggctgagcctggacccagccacagaccctgacatcaacattaacagcataaaagattataagatcaatagtaatccctatttttcactcatggttagggtgaactctgatggaggaaagtatcccgaactctccctcgagaagctgctcgatagagaagaacaacggagtcattccctcattttgacagctctcgacggtggcgatccacccaggtcagccacagcccatatcgaaatttccgtgaaagatacaaatgataatccgcctgtgtttagccgggacgagtatagaataagtctgtcggaaaacttgcccccaggctctcccgtccttcaagtcaccgccactgatcaggatgaaggtgtcaatgcggaaattaattattatttcaggagcactgcccagagtacaaaacacatgtttagtttggatgagaaaactggtatgatcaaaaacaaccaatccttcgatttcgaggatgtagagcgttacacaatggaagtcgaggccaaagatggcggtggtctgtctacacagtgcaaagtgataattgaaatcctggatgagaacgataattccccagaaataatcataacatccctgagcgaccagattctggaaaatagcccaccagggatggtcgttgctctcttcaagacaagagatttggattttggagggaacggggaggtgaggtgtaatattgaaactgatattcccttcaaaatctattcatcctcaaataactattataaactggtgacagatggcgcactcgatcgcgagcagacacccgaatacaatgtcactatagttgccactgacagaggtaagccccctctctcttctagtagatcgattacactgtacgtggcggatattaacgacaatgccccagtatttgatcagacaagctatgtcgtgcatgtcgccgaaaacaaccctcctggggcaagcattgcgcaggtgtccgcaagtgatcccgacttaggccttaatggccacatcagctatagcatcgtggctagcgatctcgaaccattggccgtgagtagttacgtcagtgtctccgcgcagtcaggcgtcgtattcgcccagcgggcatttgaccatgagcaattgagagcttttgctcttaccctacaggcaagagaccacggaagtccaaccttgagcgccaacgtttccctcagagttctagttggtgacagaaacgataacgcccctagggtgttatatcctgctctcggacccgatgggagcgcattttttgacatggtaccaagaagcgcagaaccaggctatctggtgactaaggtcgtggccgtggatgccgattccggccataacgcctggctgtcttaccacgtcctgcaagcatcagagccaggactcttctctctcggcctgcggaccggggaagtgcgcacagcccgagcgctgggagaccgcgatgcggcacgacaacgcctactggttgctgtccgggatggcggtcagcctccccttagtgccaccgctaccctccatctcgtgtttgccgacaatttgcaggagatattgcccgatttgagcgataggccggtactttcagacccccaggcagagctgcagttttacctggtggtagctctggcgctgattagtgtgctgtttctcctggctgtaattctggctatagccttgcgactacgccgaagtctttctcccgcaacatgggattgcttccaccctgggctgtgtgtgaagagtggacccgttgtaccgcctaactacagcgagggtactctgccttactcctataatctatgtattgcccacacagggacgaaggaatttaacttcctgaaatgctctgtaccccttcattcaaacgaggatatggtatgcagtgtgagtccgggtgcccttatccctccacacggcggagaggacctgacctcgcatccggagactctgacgagccaagctccccctaataccgactggcggttcagccaagcccagcgaccaggcacatccgggagccagaatggggatgacacagggacttggccgaacaaccaattcgataccgagatgctgcaggccatgatactcgcatctgccagtgaggctgcggacggttcttctactctggggggaggcgctgggaccatgggactgtccgctagatacggccctcagtttacccttcagcatgtgccagattacagacaaaatgtctatattcctgggagcaatgccacactgacaaatgctgccggaaagcgcgacggcaaagcaccagcgggaggtaacggtaacaagaagaagtccggcaagaaggaaaaaaaatag

SEQ ID NO: 237353 - DNA, 2790 bp, synthetic construct
  misc_feature 1..2790: note = Description of Artificial Sequence: Synthetic coding sequence
  source 1..2790: mol_type = other DNA
atgggcggatcatgcgcccagcgcaggcgcgcagggccaagacaggtgctgttccctcttttgcttccactgttctacccgactctgtgtgaacccatcagatacagtattccagaggaacttgcaaaaggttcagtcgtcgggaatctggccaaggatttaggtctttcagttctggacgtgagcgccagagagcttagagtttcagcagaaaagttgcatttcagtgttgacgctcagtctggtgatctgctggtgaaggataggatcgatcgcgagcagatttgtaaggaacggaggcgatgtgagctgcagcttgaagcagtcgtggagaatcctctgaacatattccacgtgatcgtggttatcgaagacgtgaacgaccacgcaccccagttcagaaaagacgagattaatttagaaattagtgagtccgtcagcctgggtatgggcaccattctcgagagtgccgaggatcccgatatcagcatgaactcccttagcaaatatcagctttcaccaaatgaatatttctccctcgtggagaaagacaatcctgacgggggaaagtatcctgagctggtgctgcagaagacacttgatcgggagacccaaagcgcccatcacctagtactcacagctctagacggtggggatcctccaagaagcggtaccgcccagatccgtatactcgtgatagatgctaacgacaaccctccagttttttcgcaggacgtgtatcgggtgtccctgcgagaagacgtgcccccaggcacttccatcctgcgagtcaaggccaccgatcaggacgagggaattaactcggagatcacctattcattcttcggagttgccgataaggctcagcacgtgttctcccttgactacactactggaaatatcctaacccagcagcctctggattttgaggaagtcgagcggtacacaatcaacatagaggccaaggacagagggtctctgtctacgcggtgcaaggttatcgtggaagtcgtggacgaaaacgacaattcccccgagatcattattactagtttaagcgaccagatcatggaagattcccctcctggggtcgtggtggcccttttcaagaccagagatcaggactccggggagaacggtgaggttaggtgctcactgagcaggggagtcccatttaagatccactcttcttcaaataactattacaagctcgtgacagacgaggctttggatcgtgagcagacccccgagtacaacgtgacgattgcagcgactgatcggggaaaacccccactgtccagctctaagacgattactctacatattacagacgtcaatgacaatgcaccggtgttcggccagagcgcgtaccttgtccacgtgcccgagaataaccagcctggcgctagtatcgcccaggttagtgcctccgacccagactttggcctcaacgggcgtgtctcttactccctgattgccagtgacctggagtccagaaccctttctagttacgtatctgtttccgcacagtccggtgtggttttcgcccagcgcgcttttgatcacgaacaactgcggacatttgaattgactctgcaggctcgtgatcaggggagcccagctttaagtgctaatgtcagtttaagggtgctggtgggggacaggaacgacaatgcacctagggtcttgtatcccgctctaggtccagacggatcggcactctttgacacagtacctagggcagcccagcctggatatctggttacgaaggtggttgcagtggacgccgactccggccacaatgcatggctgtcctatcacgttgtgcaggcatccgagccagggctctttagtctggggctgagaacaggcgaagtgcgtatggttcgagctcttggtgacaaggactcagtgcggcagcgcctcctggtcgccgttcgcgatggaggacaaccccctctatccgctacagccacacttcacctcgtctttgctgacagtctgcaggaggtcctgcctgatttcagtgaccatcctacacctagtgattcccaggctgagatgcaattctatcttgtagtggcgctcgctctgatcagtgtcctgttccttctggcggtgatcctggcgatcgccttgcggcttcgacaatccttcagtccgaccgccggagattgctttgagtctgtgttgtgtagcaagagcggccctgtaggccctcctaattacagcgaaggaactttgccctatgcctacaacttctgcgttcccggtgaccaaatgaaccccgaattcaatttcttcacttctgtggaccactgcccagcaactcaggacaacttaaataaagattccatgttactggcaagtatactcactccttctgtggaggctgacaaaaagattctgaagcaacaggcccctcccaacactgactggcggttctcacaggctcagagaccgggtacgtccggttcgcagaatggggacgacacgggaacatggcccaacaaccagttcgataccgaaatgctgcaagctatgatcctcgcaagtgcttcagaagccgcagatggctcctcaaccctcggcggtggcgcaggtacaatgggcctgtcagcgaggtacgggccacagttcaccctgcagcatgttccagactaccggcaaaacgtttacattcctggctcaaatgcgacgttgaccaacgccgctggtaaacgcgacgggaaggctcccgcaggtggtaacggaaataaaaaaaagtctggaaagaaagagaagaaatag

SEQ ID NO: 237354 - DNA, 2805 bp, synthetic construct
  misc_feature 1..2805: note = Description of Artificial Sequence: Synthetic coding sequence
  source 1..2805: mol_type = other DNA
atggtgccagaggcttggcgaagtggcttggtctccactggtcgggttgttggagtgctcttgctccttggagcgcttaataaggcctcaaccgtgatacactatgagataccagaggagagggaaaagggatttgcagtgggaaatgtggtagccaacctgggcctggatctgggcagtctgtctgctcggaggttcagggttgtgagcggggcaagccgacgtttctttgaggtgaaccgagagactggagagatgtttgttaatgatcgcctcgatcgagaagagttgtgcggcaccctcccatcttgcaccgttaccttagagctggtagtagaaaatccccttgaattgttctcagtggaggtcgttatccaagacatcaacgacaataatcctgcttttcccacacaagagatgaagctggagatttccgaggccgtggcaccaggaactcggtttccgttggaatccgcacacgatccagacgtagggagcaattccctacagacatacgaactgtctagaaacgaatactttgccctgagagtccaaacccgcgaggactctaccaagtatgcagaactggtcttagaacgagcccttgaccgtgagcgtgaaccctctctgcagttagtcttgacagccctggacggtggaaccccagccttatccgcaagcttgccgatccatattaaagtcttggatgccaacgataatgcccctgtatttaatcaaagcctctacagggcacgggtcctagaggatgcacctagcgggacccgcgtagtacaggttttagcgacggatctcgacgaaggccctaacggggaaatcatctactcatttggatcacataacagggcgggagttcggcagctgtttgccctcgatttggtgaccgggatgttaacgatcaagggcaggctagacttcgaagacactaaacttcatgagatctatattcaggcgaaagacaagggagccaatcctgaaggggcacattgtaaagtcttagtggaggtggtcgatgtgaacgataacgcacccgaaatcaccgtcacttccgtttactcgcccgttcccgaggacgcaccgttggggaccgtcatcgcattgctgagtgtcacggacctcgacgccggagagaatggacttgtgacgtgcgaagtcccacctggactgcctttcagtttaaccagctctctaaaaaactattttacgctgaagaccagcgcggacctcgatagggagactgtccctgaatataatctgagcatcaccgcacgtgacgcagggacccccagcttgtccgcattaactatcgtccgcgtccaggtatctgatattaacgacaaccctccacaaagcagccaaagctcctatgatgtctacattgaggagaacaatctgcccggagcccctattctgaatttgtccgtttgggatcctgacgcaccccagaacgcgagactctctttttttcttctcgagcagggggctgagacgggcttggtggggagatatttcactatcaatagagataacggcattgtctcttcgctcgtgccactggattatgaggatcggagggaattcgaactcaccgcccatataagtgatggcggaacaccggtcctcgcaacaaatatctccgtgaacatcttcgtgaccgaccgcaatgataacgctccccaggtgctctatcctaggcctggagggagctccgttgaaatgctgccaaggggaacatctgcgggacaccttgtcagtcgcgtggtcggttgggatgccgatgccggtcataacgcgtggctgagctactccttgctggggtcacctaaccagtcactgttcgctatcggtctgcataccggccagatctccacagccagacccgtgcaagataccgactcccctcgccaaactctgacagtgctaattaaggataacggcgaaccgtccttgagcactaccgccaccctgactgtgagcgtgacagaagattcccctgaagcacgggcagagttcccatctggctctgcaccccgagagcagaaaaagaatcttactttctatttattgctgagtctgatcctggtaagcgtcggcttcgtagtgacagtatttggcgtgataatttttaaagtctacaaatggaagcagagccgcgatctatatagggcccctgtttcgtctctttaccggactcccggtccttcactgcatgctgatgctgtgaggggcggtcttatgtcaccacacttgtaccatcaggtgtacctgacgaccgatagtagacgttccgaccccttgctgaaaaaaccaggtgcagcttcgcctctggccagccgtcagaacacgctgaggagctgcgaccctgtattctaccgtcaggtgttgggggctgaaagcgcccctccgggacaacaggctccccctaacactgactggcggttctcccaggcccagaggcctggaacaagtggaagccagaacggggatgacactggaacgtggccaaataaccaatttgatactgagatgctgcaagctatgattcttgcatctgcctccgaagctgccgatggcagcagcacactggggggtggggctgggactatggggctgtctgccaggtacgggcctcagttcacactgcaacacgtaccggactacaggcagaatgtgtacatcccaggcagcaacgcaacactgactaacgccgctggaaagcgggatggaaaagctccggctgggggtaacgggaacaaaaagaagtcagggaaaaaggaaaagaaatag

SEQ ID NO: 237355 - DNA, 2817 bp, synthetic construct
  misc_feature 1..2817: note = Description of Artificial Sequence: Synthetic coding sequence
  source 1..2817: mol_type = other DNA
atgctcaggaaggtgagatcctggaccgagatctggagatgggcaacacttctgtttctcttttatcacctcggctatgtctgtggccaaattagatatccggtgcctgaagagtcgcaggaggggacgttcgtcggtaatgtggctcaggacttcctactggacactgacagtctgtccgcccgtcgcctgcaggtggcaggcgaggtcaaccaacggcacttcagggtggatctcgattctggcgctcttctgatcaagaacccaatcgaccgcgaagccctttgcggcctgagcgccagctgcatagttcccctggagttcgtcacagaaggacccctagagatgtatcgtgcagaagttgagattgtcgacgtgaatgaccatgccccacggttccccagacaacagcttgacctcgaaatcggggaggcggcacccccagggcaaagatttcccttggagaaagcgcaggatgcagatgtcgggagcaacagcatctcatcataccgcctgagttcgaacgagcattttgctctagatgtgaagaagagatcagacggcagcctggtccctgagttactgctagaaaagcccctggatcgcgaaaagcaatctgactatagactggtcctgacggcagtggatggcggaaatcccccaaggagcggtaccgcagagctccgggtatcagtgctcgacgtcaacgataacgcaccggcattccaacagagttcctatagaatttcagtgttggaatcagccccagccggaatggtcctgatacaacttaacgcctctgatcccgatctggggccatcaggcaacgtcaccttctacttttcaggccacacccctgaccgggtgaggaacctcttctcgttgcaccccaccactggcaagctcaccctcctaggtccacttgatttcgaaagcgagaactactacgagtttgatgtccgcgcaagggatggtggatccccagcaatggaacagcactgcagcctgcgcgtggacctgttagacgtcaacgataatgccccatacataaccgtgacatcagaactgggtacactccccgaaagcgctgagccgggtaccgtagtggcactcatctctgtccaggatcccgatagtggaagcaacggagatgtgtctctgcgtattcccgatcaccttcctttcgcgctgaaatctgccttccgaaaccaattcagccttgttacagccggacctctggaccgcgaggcaaaaagcagctacgatatcatggttacggctagcgatgccggaaatccacccctgagcacccaccgcaccattttccttaatatatcagatgtgaacgacaacccacccagctttttccaacgaagtcacgaggtgttcgtgccggaaaacaataggcccggtgatctcctgtgttcattagccgcatctgaccctgactctggcctgaacgcactgattagttattcactgcttgagcccagaaatcgggatgtttcggcttcgtctttcatcagccttaacccgcaaacaggtgccgtgcacgccacacggtctttcgattatgagcagacccagactctgcaattcgaagttcaagctcgggaccgcggaaatccaccactatcgagcacggtaactgtaaggctgtttgtcctggatctgaacgataatgctcccgctgtccttcggcctagggcacggccaggatcactctgcccacaggccctgccaccatccgttggagctggacaccttatcactaaggtgacggcagtggatctggacagcggctacaatgcttgggtctcctaccagctgctcgaagctcccgacccatccctgtttgcagtcagcagatacgctggcgaagtaagaacagctgtgcctatcccagcagacttgcccccacagaagctggtcattgtcgtcaaggacagtggaagcccccctttatctacttccgtaactctcctggtgtccttagaggaggatacacatcccgtagtgcctgatcttagggagagcagtgcaccccgtgagggggaaagtcggctgactttgtacctagccgtgtccctggtcgccatctgttttgtttccttcggctcatttgtcgccctgctgtccaagtgtctccgtggagccgcttgtggcgtgacttgcttcccagccggaacatgtgcctgccttaccagatccagacgtcgcgaagggctgcccccatccaatgggattctgagaatccaactgggaagcgacgacccaatcaagttcgtggatgtcggcggacactcccatgggtgtactcccctggcctctgcaccgaccagatccgattcattcatgatggtgaagagtcccagtgctcctatggccggagaaccagtacggccatcttgtccccctagtgacttgctgtatgggctagagcaggccccaccaaatactgattggagatttagtcaggcccagcgcccaggtactagtggatctcaaaatggtgacgacacagggacctggccaaataaccagtttgacacggagatgctccaggccatgattttggccagcgcgtccgaagccgctgacggatcaagcaccctgggagggggagctgggacaatggggctgtcagcgcgttacggccctcaatttacactgcagcatgtcccagactacagacaaaacgtctatatacctggatcgaacgctaccctcactaatgcagcaggtaaaagggacggaaaggctcctgccggtgggaacgggaacaaaaagaaatccggaaaaaaagagaagaagtag

SEQ ID NO: 237356 - DNA, 2835 bp, synthetic construct
  misc_feature 1..2835: note = Description of Artificial Sequence: Synthetic coding sequence
  source 1..2835: mol_type = other DNA
atgggccctaaaaccctgccccaactggctggaaaatggcaggtcttatgcatgctgtctctttgctgttgggggtgggtcagtgggcaactgcgttatagtgtcgttgaggagagtgaacccggaacccttgtggggaatgttgctcaggatctggggttgaagatgacagatctgctttcacgacggcttcagcttggttccgaggagaacggacgctacttctccctgtcactgatgtctggcgcactggctgtgaaccaaaagatcgaccgggaatccctgtgcggagcttctacatcgtgtcttctccccgtccaggtcgtgacagaacaccctctcgaactgatccgggtggaggtggaaatcttagatctgaatgataactccccatcttttgctacccctgagagagagatgagaattagtgaaagcgctgcaagcggcgcacgctttccattagatagtgcccaagacccagacgtggggacaaacaccgtgagtttctatactctgtccccaaactcacacttctccctgaacgtgaaaactcttaaggatgggaaaccctttccagagctagtgttggaacagcagctcgacagagaggcgcaagccagacatcagcttgtgctcactgctgtcgatgggggtacccccgcaagaagcggaacaaccctgatttcggtgattgtgcttgacatcaacgataacgcgccaaccttccagtcctctgtcctgcgggtaggcatacctgaaaatgctccaattggcacactgcttttgagactcaatgccaccgatccagacgaaggcaccaacgggcagctggactactctttcggggaccacaccagcgaagcggtgcgtaacctttttgggcttgatccttcatctggtgctattcacgtgctcggtcctattgattttgaagaatcccgattttacgagattcatgcgcgtgcccgtgaccaaggccaaccagcaatggaaggccattgcgtgatccaggtagacgtaggcgacgtaaacgacaacgctcccgaggtacttctcgcgagtctggcaaacccggtcctcgaatccacgcccgtaggcacggtcgtgggcctgtttaacgtgagagatagggattcaggcagaaatggtgaggttagcctggatatctcacccgacctgccgtttcagattaagccctcggagaatcactacagtctgctgacctcacaacccttggatcgggaggcaacttcccactacatcattgagttgctggcctccgacgctggaagcccaagtctgcataagcatctcaccattcgactcaacatcagcgacgtcaacgataatgcgcctcgcttcaaccagcagttatatacagcctatatcttggagaaccgacctcctgggagtctgttgtgtaccgtagcggcttccgatccggatacaggcgataatgcccgattgacctatagcatagtgggtaatcaggtgcagggagccccagcctcatctttcgtctatgtcaatcccgaggatggcagaattttcgcgcaacgtaccttcgactatgagctactgcaaatgttgcagatcgtagtaggagtcagagacagcggatctcctcccctgcatgccaatacaagcctgcacgtgtttgtgcttgacgagaacgataacgcgccagcagttctccatccaaggcctgattgggaacactccgcacctcagcgcctcccacgatccgccccaccaggatcccttgtgaccaaagtcactgccgtggatgccgacgcgggtcacaatgcctggttatcctacagcttgctcccccaatctactgcccctggtctgttcctcgtgagcacccatacaggcgaggtcagaacagctagagcgttgttggaggatgattccgatactcagcaggttgtggtgctcgtgcgggacaacggcgaccccagtctctcttctactgccactgtgttgttagttctggaagatgaagatcccgaagagatgcccaagtcgagcgacttcctcatccatcccccagagcgttctgacctaactctttacctgatcgtggctttggctaccgttagcttgctatctctggtgaccttcacttttttgagcgctaaatgcctgcagggcaatgctgatggcgacgggggtggcggacagtgctgtcgacggcaggattctccgtccccagacttttataaacaatcaagtcctaacctgcaagtgagttccgacggcacacttaagtacatggaggttactctgcggcctaccgactcacagtctcattgctatcgaacctgtttttcccctgcaagcgatggcagtgacttcaccttcctccgaccgttgtccgttcagcagcctacagctctggcactggaacccgacgcaattcgctcacgcagcaacaccctgagagaaagatcccaacaggcacctcctaacaccgattggagattcagccaagctcagagaccaggcaccagcgggagtcaaaacggagatgatacggggacctggcctaacaaccaatttgacaccgagatgttgcaggcaatgatccttgcttcagcgagcgaggctgctgatggaagttcgaccctgggcggtggggcaggcacaatgggtctgtctgccaggtatggaccacagttcaccctccagcacgttcccgactacaggcagaacgtctatatccctggcagcaatgctacactgactaatgctgctggtaagcgagatggaaaggctcccgctgggggaaacggcaacaaaaaaaaatcgggtaaaaaagagaaaaaatag

SEQ ID NO: 237357 - DNA, 5867 bp, synthetic construct
  misc_feature 1..5867: note = Description of Artificial Sequence: Synthetic coding sequence
  source 1..5867: mol_type = other DNA
atgttccggcagttttacctttggacttgtcttgccagcgggattatcctgggatctcttttcgaaatatgtcttggccagtacgatgacgactgcaagctcgcgagagggggaccaccagccactatcgttgcaattgacgaagaatcacggaacggcacaatcctcgtggacaatatgttgattaaggggacggctggaggccctgatcctactattgagctgtcgttgaaggataacgtcgactactgggttctgatggatccggtcaagcaaatgctttttcttaacagcactgggagagtgttagacagggaccccccaatgaacatccatagtatcgtggtgcaggtacagtgcattaacaagaaagtcggaaccattatctatcacgaagtgcgaattgttgtccgggacagaaatgacaatagtccaacctttaaacacgagtcttattatgcaacggttaacgagctgacccccgtgggtactacaatttttaccgggttttctggggataatggcgctacagatattgacgacgggccaaatggtcaaatcgaatacgtgatccagtataatccagatgaccccactagtaatgacacctttgaaatacctttgatgctcactgggaacatagtactccgcaaaagactaaactatgaggataaaacaagatacttcgtgatcattcaagcaaatgacagagcgcagaacctcaacgagcgcaggactaccaccaccactctcaccgttgacgttcttgacggagatgatctaggccctatgttccttccgtgcgtgcttgtcccaaatactcgggactgccgccctttgacctatcaagccgctattcctgaactgcgcaccccagaggagctgaacccaatcatcgtgacacctcccattcaggcaattgatcaggatagaaacattcagccaccctctgatcggcctggaattctgtattccattcttgtgggtacacccgaggactacccaagattcttccacatgcatccacgcactgctgaactgtccctgctggaaccggttaatagggattttcaccagaagtttgatctggtaatcaaggctgagcaagacaacgggcaccctctgccagccttcgcaggtcttcacatcgaaattctggacgaaaataaccaatccccctatttcactatgccaagttaccaaggctacatcctggaatcggctccagtgggagccacgatctcagatagcctcaatcttacgtcccctcttaggatagtcgccctcgataaagacattgaggatactaaggacccggagctacatctgtttcttaatgactatacgtcggtattcacagtcacacaaaccggcataactcggtatctcacactgctgcagccggttgacagagaggagcagcagacgtataccttttcaatcacagccttcgatggggtgcaggaatcggaaccagtgattgtgaacatccaggttatggatgctaatgacaataccccaacgttcccagagatctcttatgacgtctatgtgtataccgacatgcgcccaggtgacagtgtcattcagctgacggcagtggacgccgatgaaggttccaatggtgaaatcacctacgagattctggtaggggcacaaggagacttcataattaacaagactaccggcctgataactatcgcgccaggagttgagatgatagtggggagaacatacgctctgacagtacaagcggctgataatgcccctccggctgagagacggaacagcatctgtacagtctacattgaggtactgccgccaaacaaccaaagccctccacggttcccccaattaatgtactcactggagatttcagaggccatgagggttggggcagtcctgctgaaccttcaggccaccgatagggaaggggatagcatcacatacgctatagagaatggggacccccagagagtttttaacctgtcagaaacgacaggaattctcacactggggaaagccctggaccgcgagagcaccgataggtacattctcattatcaccgcctctgatgggagaccagacggtacctcaactgcaaccgtgaatatcgtcgtcactgatgtcaacgataatgcgcctgttttcgatccgtatctgcccagaaacctatctgtggtcgaggaggaagctaacgctttcgtgggccaggtgaaggctaccgacccggacgcaggtatcaatggacaggttcattactcactcggtaactttaacaatctgtttcgaattacgtctaacggctcaatttacacggccgtgaagctgaaccgcgaagtaagggattactatgagcttgtggtggtggcaacggatggggcagtgcatccacggcacagtaccttaaccctggccattaaggtgctggacattgacgataactcccccgtgtttacgaactctacttacaccgttttggtggaagaaaacctgcccgctggcactacaattcttcagattgaggcgaaagacgtggaccttggggcaaacgtgtcctacaggattcgttccccagaggtgaagcacttctttgccctgcaccccttcactggcgagctcagtctgctcaggagtttggattacgaagcgtttcccgatcaggaggctagtattacatttctggtagaggcttttgacatttacggaaccatgcctcctggtatcgctaccgtcacagtgatcgtcaaagacatgaatgactaccctcctgttttctccaagcgcatctataaaggcatggtggcacctgacgctgtcaagggtaccccaatcaccactgtttacgcggaagacgcagatcctccaggcctgccagcaagcagggtgaggtatagggtggacgacgtgcagtttccttatcctgccagtattttcgaggtagaggaggactctggacgagtgatcactagagtcaaccttaatgaagagcctacaaccatttttaaattagtagtggtcgctttcgacgatggggaaccagtcatgagttcctctgctacagtgaaaatcctcgtcttacacccaggcgagatcccgaggtttactcaggaggagtataggcctccacctgtttctgagctcgcgactaaagggacgatggtcggggtaatcagcgccgctgcaatcaaccagagcattgtttattcaatagtcagtggcaacgaagaagatactttcgggatcaacaatataaccggagtgatctatgtgaatgggccattggactatgagacacgaacatcctatgtcttgagagttcaggcagatagtttggaggtggtgctcgcaaatctgagagtaccgagcaaaagcaacaccgctaaggtgtatattgagatccaagacgagaataaccaccctccagtttttcagaaaaaattctatataggcggtgtgtctgaagacgctaggatgttcacgtctgttttgagagtcaaagcaacggataaggacactgggaattattcagtcatggcatacaggctgattatacccccaataaaggaggggaaagagggttttgtcgtggagacttacactggcctcatcaagactgcaatgctgttccacaacatgcggagaagttatttcaaattccaggtgatcgcgaccgatgactatggcaaagggctgagcgggaaggcagatgtgctcgtgtcagtggtgaatcaactcgacatgcaagttattgtgagtaatgtcccacccactcttgttgagaagaaaatcgaggacttgacggaaattttagacagatacgtgcaggaacagattccgggagctaaagtggtcgttgagtcaatcggtgcacgccgacacggcgacgcattctccttggaggactatacgaaatgtgatctcactgtgtatgccatcgaccctcagactaaccgcgctattgaccgaaatgaattatttaaatttctagacggcaaacttcttgacataaacaaggatttccagccttactatggggaaggcggaagaattctggaaatccgcacaccagaggccgtgaccagcatcaagaagcgaggtgaaagcttggggtatacagaaggcgctctgctggctttggcctttataatcatcctctgttgtatccccgctatccttgtagtactggtctcctatcgccagttcaaggtgcgccaggcggagtgcacaaagacggcgagaatacaggccgctctgcctgcggcaaagcctgctgtccccgctccggcacccgtagccgctccccctccacctccaccaccaccgcctggcgcacacctatacgaagagctaggtgactcttctatcttgtttttactctatcatttccagcagagtcggggaaacaactcagtgagtgaagaccggaagcatcagcaagtggtgatgccgttcagtagtaatactatcgaggcccacaagagcgcccacgtggacgggagccttaaatcaaataaactcaagtctgcaagaaagtttacctttttatcagacgaggatgacctgagcgctcataatcccctgtataaggaaaatatcagccaggtgtctactaactccgatatttcacaacgtacggatttcgtggatccattcagtccaaagatacaggccaagtctaaaagtcttagggggccaagagagaaaatccagaggttgtggtctcagtcagtcagtttgccaaggagactgatgcgcaaagttccgaacagacctgagataatcgatcttcagcagtggcagggaacacggcaaaaggctgaaaatgaaaataccggcatatgtactaacaagcgcggaagttcgaacccccttttgactaccgaggaggccaatctgaccgaaaaggaggaaattagacaaggtgagactctcatgattgaaggtaccgagcagctaaagtctctttccagcgatagcagcttttgttttccacgacctcatttcagcttctctacgctgcccaccgtatcccggacagtggagttaaagagcgaacctaacgtcataagtagcccagctgagtgtagcttggaacttagcccctcccgtccttgcgtgctacacagtagtctgagccggagggagacaccaatttgtatgctgcccatcgagaccgagcggaacattttcgagaatttcgcccatccacctaatataagtccatccgcctgtcctctgcctcccccaccaccgattagccccccatctcctccgccagccccagcccctctagcccctcccccagatattagtccttttagtcttttctgccctcctccatcaccaccatcaatccccctgcccctgcctcctccaaccttctttccattatcggtctcgacatccgggcctccaacaccccctctacttccgccatttccaacaccactgccaccaccaccacctagcatcccttgcccacccccacctagcgctagttttttaagtaccgagtgcgtgtgcatcacgggtgtgaaatgcacgacgaacctcatgcccgcagaaaagattaagtcgagtatgacacagctgagcacgaccacggtgtgtaaaaccgatccgcagcgcgagcccaaaggcatcttgcggcatgtcaagaatctggccgagctcgagaagtcagttgcaaatatgtacagccagattgagaagaactatctgcgtactaacgtgagtgagctgcagactatgtgcccttcggaagtgaccaacatggagatcacatccgaacagaataagggctcattgaataatatagtagaaggtacagagaaacagtcccactctcagagcacctcactgta

SEQ ID NO: 237358 - DNA, 5873 bp, synthetic construct
  misc_feature 1..5873: note = Description of Artificial Sequence: Synthetic coding sequence
  source 1..5873: mol_type = other DNA
atgtttaggcagttttacttgtggacatgcctggcctccggtatcattttagggtcactctttgagatttgcctggggcaatacgatgacgattgcaagcttgcacgtggcggtccgcctgctacaattgtcgctattgacgaagagagtagaaacggaaccatcttggtcgacaatatgcttatcaaaggaacagccggagggcctgatccaacgattgaactcagtctgaaggataacgtcgactactgggtgctcatggatcctgtcaagcaaatgctgttcctgaattctaccggtcgggtcctagaccgggaccctcccatgaatatccattccatcgttgtccaagtgcagtgtataaataaaaaggtgggtactatcatttatcacgaggttcgtattgtggtgagggatcgcaacgacaactcacccaccttcaaacacgagtcttactatgcaaccgtaaatgaactgacccctgtggggaccactatatttacagggttttccggggacaatggtgccacagacatcgacgatggccctaatggacaaatcgagtatgtcattcagtataatccagatgacccaacttcgaatgataccttcgaaattcccctcatgctgactgggaacatcgttttgcgcaaaaggctaaattatgaggacaagacgaggtattttgtgattatacaagctaacgatcgagcccagaacttgaatgagagaagaactactacaaccactctcaccgttgatgtcctagatggcgatgacctggggcctatgttcctcccctgtgtactggtcccaaatacacgagattgtagacccctgacttatcaggccgcaatccccgagctacgcactcctgaagaactgaaccccatcattgtaacacccccaatccaggccatcgatcaggacaggaatattcagcccccttcagataggcctgggattctttattccatcctggtgggcaccccggaagactacccaaggttttttcatatgcacccacgtactgccgaactgtcactgctagagcctgtgaaccgcgactttcaccagaaatttgacttggtaattaaagctgagcaagataacgggcacccccttcccgctttcgctgggctgcacattgagatattagatgaaaataaccagagcccctacttcactatgccgagctatcaagggtacatccttgagtcagcccctgtgggggcaaccatctccgactctctgaacctgacatctcctctgcgtatcgtcgcactggacaaagatatcgaagataccaaggaccccgaactgcacctgtttctcaatgattatacaagtgtcttcactgtgactcaaacaggcataaccaggtacttaaccctccttcagcccgtcgatcgggaagaacagcagacgtataccttctctatcacagcttttgacggcgtacaggagagcgaaccagtaatcgtgaatattcaagtgatggatgcgaacgacaacacacctacctttccagaaatctcatacgacgtatatgtctatactgatatgcggcctggggacagtgtcatacagctaacagcagtggatgcagatgagggaagcaatggcgagataacgtatgagatcttggtcggtgcccagggcgatttcattattaataagactactggcctcataacaatcgccccaggcgtagagatgatcgtggggagaacatacgctctgaccgtacaggcagctgacaatgcaccccctgcagagcgtcgaaactcaatttgcactgtctatatcgaagtgcttcctccaaacaatcagtcacccccacgctttccacagcttatgtattccctggagatcagtgaagcaatgcgggtgggcgctgttctgctaaatttacaggctactgaccgagaaggcgattcgatcacttacgccatcgaaaatggcgacccacagagggtgttcaatctgagcgaaactactggtatccttaccttgggaaaggccttggaccgggaatccaccgatcgatatatcctcataattaccgcatctgacggccgtccagacggaacatccacagccacagtaaatatcgtggtgacagatgtcaatgataacgctccagtgtttgatccttacctgccgaggaacctgtctgtggttgaggaagaagccaacgcctttgtggggcaggtgaaagccacagatcctgatgcaggaatcaatgggcaggttcattactctctgggaaattttaacaatctgttccggatcacgagcaacggctctatctacaccgccgtcaagctgaaccgggaagttcgtgattactacgagctagtggtagtggcaactgacggggctgtgcatccccgacacagtaccctgacccttgcaatcaaggtgctggacatcgatgacaactcccctgtttttaccaactccacttatacggtgctggtcgaggaaaatttacctgcagggactacaattctgcagatcgaagccaaagacgttgatctcggcgcaaacgtgagctatagaattagaagtcctgaggtgaagcacttttttgccctacacccctttactggcgaattgtccctccttcggtcactcgactatgaagctttcccagaccaagaagcctctatcactttcttagtggaagcattcgacatctatggcaccatgccgccagggatcgcgactgtgaccgtgatagtaaaggacatgaatgactaccctcccgtgttttctaagcggatctataaggggatggtggcaccagacgcggtgaaggggaccccaataaccaccgtgtatgcagaagacgctgatccccctggcctgcctgcatcacgggtgcgatatagggtggacgatgtccagttcccctacccagccagcattttcgaggtggaagaagacagtgggagagtcattacccgggtaaatcttaacgaggagcccacaacaatcttcaagcttgtggttgtggcgttcgatgacggcgagccagtcatgtcgtcctcagcgactgttaagattttggtgcttcaccccggagaaattccacgctttacgcaggaggagtaccggccaccacctgtgagcgagctggccaccaagggaaccatggtgggagtcataagcgccgcagctatcaatcagtcgattgtctattccatcgtgtctggcaacgaggaagacactttcggaataaacaatatcactggagtgatctacgtcaacgggccactggactacgaaaccagaacatcctacgtattgagagttcaggctgacagtctagaagtggtcctcgctaatttgcgggtgcccagcaagtcgaacaccgccaaagtgtacatcgagattcaggatgaaaataaccaccctccagtgttccagaagaaattttacatcggaggagtctccgaagacgctcgcatgttcacatccgtcctgagggtgaaagccaccgacaaagacaccggcaattatagcgtgatggcgtatcggctgatcattcctccaatcaaggagggcaaagagggttttgtggtagaaacatacaccgggctgattaaaaccgccatgttgttccacaatatgcgcaggtcctactttaagtttcaggtaatagctacagatgactacggaaaagggctgtccggaaaagccgatgtattggtgtctgtcgtaaaccaactcgatatgcaggtcatcgtcagcaatgtcccacccaccctagtggaaaagaaaatagaggatttaaccgaaatcctcgacaggtatgttcaggaacagatcccaggtgccaaggtggtggtggagtcaatcggcgcaagaagacacggggatgcattttcactcgaggactacactaaatgcgatttgacagtatatgctattgatccacaaacgaaccgcgcaattgatcggaatgagttgttcaagtttttggacgggaaacttctggacatcaataaagactttcagccatactacggtgaaggaggtcggatcctggaaatcagaacacctgaagcagtcacgagtatcaagaagcggggagaatcgctgggctacaccgagggcgcactgctagcccttgcctttattatcattctttgctgcatccccgcaatattagtggtgttagtgtcttatcggcagttcaaagttcggcaggccgaatgtactaagactgcccgtattcaggcagccttgcctgctgctaagcctgccgtacctgcgcctgctcctgttgctgcgcctccaccacctccccctcctccgccaggcgcacacttatatgaagaactcggagacagtagtatgcacaatctgtttctcttgtatcactttcagcaatcaagagggaacaatagcgtgagcgaggaccgcaagcatcagcaagtggtaatgcccttcagctctaatactatcgaggcacacaaatctgctcatgtggatggttcgttaaaaagcaacaagctgaaatctgctcgaaaattcacatttttaagcgacgaggacgatttatctgcgcacaaccccttatataaagaaaacatttcccaggtgagcaccaactccgacatatcacagcgaacagatttcgtagacccattttcacctaagatccaagcaaagagcaaaagcctccgcggaccacgggagaagatccagaggctatggagccaatccgtgagcctcccacgcaggttgatgcgcaaggtgcccaaccgccctgagataatagacctgcaacagtggcaagggaccagacagaaggctgagaatgaaaatactggaatttgtaccaacaagcgtggaagctctaacccgctcctgaccacagaggaagccaatctcacagagaaggaggaaatacgccagggcgaaacccttatgatagagggaaccgagcaactaaagtcactttctagtgactctagtttctgtttcccccgacctcatttctctttttctaccctgccgacggtttcccgaacagtggagctgaagagtgagccaaacgtaattagcagcccagcagagtgctccctggagctgagtccttctcgaccctgtgttctgcactcctccctgagccgaagggagactccaatttgtatgctgcctatcgaaacggagagaaatatctttgagaactttgcccaccctcctaacatcagtccatcggcttgccctctccctccccctcccccaatttcgccacccagcccccctccggcacccgctcccctggctcctccgccagacatcagcccgttctctctattctgcccacccccaagtcctccgtctattccactcccattgcctcccccaacattctttcctctgagcgtgtcgacttccggacctccaaccccccctctactcccaccgttccccactcccttgcctcctccgccaccaagtatcccctgtcccccaccacccagcgcttcatttctgtctacagagtgtgtatgcattacaggagtgaagtgtacaacaaatttgatgccagccgaaaagattaagagcagcatgacacagttgtcaaccacaaccgtttgcaaaacggatcctcagagagaacctaagggcatcctcagacatgtgaaaaacctggctgaacttgaaaaatccgtggcaaacatgtacagtcagatcgaaaagaactacctacggacaaacgtgagtgagctccagactatgtgcccatctgaagtaacaaacatggagataacatccgaacagaataaagggtcactgaacaacatcgtggagggaactgagaaacagtctcattcacagtcaaccagcttata

SEQ ID NO: 237359 - DNA, 2886 bp, synthetic construct
  misc_feature 1..2886: note = Description of Artificial Sequence: Synthetic coding sequence
  source 1..2886: mol_type = other DNA
atgtttcggcagttctacctgtggacttgcctcgcatcgggtatcattctcggaagcctgttcgagatctgcttgggacaatatgatgatgattgtaagctcgctcggggaggacctcccgcaacgatagtcgccatcgatgaggagagtcgcaatggtacaattctggtggataacatgcttattaagggaaccgcagggggaccagaccccactatcgaactgtcgctgaaggataacgttgattattgggtgctgatggatcccgttaagcagatgctgtttctgaatagcacaggacgcgtcctggatcgagaccccccaatgaatattcactcaattgtcgtgcaggtccagtgtataaataagaaagtcgggacaatcatctatcacgaggtgcgcattgtcgtcagggatcgaaatgataacagtcctacattcaaacacgaatcctattatgcaacggttaatgaacttacacctgtgggaaccacaatttttacaggcttttccggtgacaatggggctaccgatattgatgatggacccaatggccagatcgagtatgtgatccagtataatcccgacgatcccacgtccaacgacacgttcgaaatcccgcttatgttgacaggaaatatcgtgctacggaagcgcctgaattacgaagataagacccgatacttcgtcattatacaggccaacgaccgggctcagaacctgaacgagcggagaactactaccaccactctgaccgtcgacgttctggatggcgatgacctcggacccatgtttctaccctgcgtgctggtgcccaatacgagggattgccgtccgctcacctaccaagcagccatcccagaactgcggaccccagaggagctgaacccaattatagtgacaccaccaatccaggccatagaccaagaccgcaacattcaacctccctccgaccggcctggcatcctgtattcaatactggtggggacacccgaggactacccgagattctttcacatgcaccccaggaccgctgagctcagcctactcgagcccgtcaaccgcgacttccaccagaagtttgacctcgtgattaaagccgagcaggataacgggcatcctttgcctgcttttgcgggtttgcatatcgaaatactggacgagaataaccaatccccctatttcacaatgccttcataccaggggtacatcctcgagtcggcgcctgtcggtgctacgatttctgactctctgaatcttacctcccccctccggatcgtcgccttagataaggacatagaagatacaaaggacccagaactccacctgttcttgaatgattatactagcgtttttaccgtcacacagactggaatcactcggtatctgaccttgctgcagccagtggatagagaagagcagcagacctacacgttttctataaccgcatttgatggggtgcaggagtccgaaccagttatcgtgaacattcaggtcatggacgccaatgataatacccccacatttcccgagattagctacgatgtgtatgtttataccgatatgcgcccaggcgactctgtgattcaacttactgccgtggatgccgatgaggggtcaaacggagagatcacttacgagatactggtcggggctcagggagacttcatcatcaataagacgacagggctgatcaccattgcccctggcgtggagatgatcgtcggtcggacctatgcattgactgtgcaggcagcagataatgcccctcctgccgaaagacgaaacagcatttgtacagtgtacattgaggtcctaccccctaataatcaaagtccacccaggttcccacagctcatgtatagtctcgaaataagcgaggcaatgagggtcggggctgtactgttaaatcttcaggccacggatcgtgaaggcgacagcatcacctacgctatcgagaacggcgaccctcagagggttttcaacctgtccgaaacaaccggcattctgacactgggcaaagctcttgatcgggagagcacagatcggtacatcctgataattactgcttctgatggaaggcctgacggaaccagcacagccacagtcaacattgtcgtgaccgacgtaaatgacaacgccccagtcttcgatccctacctgcccaggaacttgtctgttgtggaagaggaagccaacgcatttgtgggccaggtgaaagcgaccgatcccgacgctggcatcaacggacaagtgcattacagtctggggaactttaataacttatttaggatcacctctaacggctccatctatacagccgtcaaactgaatagagaagtgcgcgactattatgagctcgttgtggttgcaactgatggcgcagtccatccaagacatagtaccctgacattggctataaaggttcttgatattgacgataactctcccgtcttcaccaactctacttacactgttttggtggaagaaaatcttcccgcaggcaccaccatcctgcagattgaagcaaaagacgttgacctcggagccaacgtgtcctacaggatccggtctccagaggtgaaacattttttcgccctgcatccttttacaggcgagctgtcgttattacgcagtctggactatgaggcatttcccgaccaggaggcctccatcacctttttggtggaagcattcgatatttacggaaccatgccccctggcattgctactgtgaccgtgattgtgaaagatatgaacgactaccccccagtgttctctaagagaatatacaagggaatggtcgctcccgacgctgtgaagggcactccaattaccacggtatacgccgaagacgctgatcccccagtttcacgtagacactag

SEQ ID NO: 237360 - DNA, 2430 bp, synthetic construct
  misc_feature 1..2430: note = Description of Artificial Sequence: Synthetic coding sequence
  source 1..2430: mol_type = other DNA
atgtttcggcagttttatctttggacttgcctcgccagtggcatcattctaggttccttattcgaaatctgcttgggtcagtacgatgacggaacaatactcgtggacaacatgctgataaagggcaccgcaggcggacccgatccaactatagaactttcattaaaagacaatgtagattactgggtgttgatggatcctgtgaagcagatgcttttcctgaacagtacgggccgtgtgctggacagggatccgccaatgaatattcattccattgtggttcaggtgcagtgtatcaacaagaaggtgggaacgatcatctaccatgaggttcgtattgtcgtccgcgatcgcaatgacaactcccccacctttaaacatgagtcatactacgcaactgtgaacgagctcactcccgtggggaccaccatttttacagggttctcgggtgataatggcgctaccgacatagatgatggccctaacggacagatagaatacgttatccaatataacccagacgaccctaccagcaatgacacattcgagattccacttatgctgacaggtaatattgtgctgcggaaacgacttaactacgaggataaaacacgatatttcgtcataatccaggccaacgaccgcgcacagaatctaaacgaaagacgtaccacaacaactaccctgacggtggacgtgctcgatggggatgatctcgggcctatgttcctgccctgcgtcttagtgcctaatacaagggactgcaggcccctgacctaccaggcagccataccagagctgaggacccccgaggagctgaaccctatcatcgttaccccgccaatccaggctattgatcaagaccggaacattcaaccaccctccgacagacctggaattctttattcaattctggttgggactccagaagactaccccagatttttccacatgcatccacgcacagctgagctaagtttgctggagccggtgaatagggactttcatcagaagttcgatcttgtgatcaaagccgaacaggataacggacacccactgcctgcctttgctggattgcacatagaaatcctcgacgaaaacaatcagtcaccctactttactatgccttcgtatcagggatatatcctcgaaagcgcaccagtgggagcgactattagcgatagtctgaacctgacaagccccttgaggattgtcgccctggataaagacattgaagacactaaagaccccgaactacacctgtttctcaacgactacacatctgtgttcaccgtgacgcagacaggtatcacccgttatctgaccctcttacaacctgtggaccgcgaagagcagcaaacatacaccttttccattactgctttcgatggagtgcaagagtccgaaccagtgattgttaacattcaagtcatggatgctaatgacaatacgcccacattcccagagatcagctatgacgtgtacgtatacaccgacatgcgacctggcgatagcgtgattcaactaaccgctgtggatgctgacgaagggtccaacggcgagatcacttacgagatcttggtgggagcccagggggatttcatcattaataagactaccgggctgatcaccattgccccaggagtcgaaatgatcgtcggacggacctatgccttaaccgtccaagcagccgataatgccccaccagccgaacggagaaactccatctgcacagtgtacatcgaagtcttgccaccaaacaatcaatccccacctagattccctcaactgatgtactccctggagatatccgaggctatgcgagtgggagccgtgcttctcaatctgcaggctacagatcgcgagggcgacagtataacttacgccatcgagaatggcgatccccaacgcgtctttaacttaagtgagactaccggcatcttgacactcggaaaggcacttgaccgggagagcaccgataggtacatcctgatcattactgcaagcgacggaaggcctgatggaacttccacagctactgtcaacatcgtggttactgatgtgaatgataatgcccctgtgtttgacccttatctcccgaggaatctctctgtggtagaggaagaggcaaacgcattcgttgggcaggtgaagttaagcaccactacagtttgtaaaacggacccacagcgggaacccaagggcattctccggcatgtgaaaaacctcgctgagctagagaagagtgtggctaacatgtacagccagatcgagaaaaactatcttcgcacaaatgtgagcgagttacagaccatgtgcccatccgaggttaccaacatggaaatcacatcagagcaaaataaggggtcacttaataatatagtggagggaaccgagaaacagtcacattcgcaaagcacttctctctag

SEQ ID NO: 237361 - DNA, 5054 bp, synthetic construct
  misc_feature 1..5054: note = Description of Artificial Sequence: Synthetic coding sequence
  source 1..5054: mol_type = other DNA
atgtttagacagttctacctgtggacatgcctggccagcggcataatcctaggatcacttttcgaaatatgcctagggcagtacgatgacgactgcaaactcgctcgcggaggtccccctgccaccatcgtcgccatcgatgaagagtctcgtaacggaaccattttagtggacaatatgctgatcaaaggaacagccggaggtcctgatcccacaatcgagctgtcactcaaggacaatgttgactattgggtactcatggatccagtaaagcaaatgttgttcctcaatagcactggtagagttctggaccgggatcccccaatgaatatacactcaattgtggtacaagtgcagtgcattaataagaaggtgggcactatcatttatcacgaagtgcgcattgtggtgcgcgacagaaacgataactctcctacgtttaagcacgagtcctactatgccaccgttaacgagctgactccagtggggaccactatattcaccgggttttccggagataatggggctactgatatcgatgatgggcctaacggccaaatcgaatacgtgattcaatacaatccagacgacccgacatctaacgatacgttcgaaattccactgatgttgaccggcaacatagttttaagaaaaagactaaattacgaggataagacaaggtactttgtcataattcaggctaacgatcgggcacagaatctcaatgaacggagaactactacaacgaccctgacagtggacgtcctggacggtgatgacttgggccctatgtttcttccctgcgtgctcgttccaaatactcgggactgccggccactgacgtaccaggccgcaatcccagaactgaggacaccagaggaactcaaccccataattgtgaccccccctatccaggccatagaccaggataggaatattcaaccacccagtgaccggccaggcatcttgtacagcatattggtagggacccctgaggattacccacggtttttccacatgcatcctcggactgctgaactgagtctactcgaaccagtgaacagggacttccatcagaaatttgatcttgtcatcaaagctgagcaagacaacggccaccctctgccagcctttgccggtctccacatcgagatcctggatgagaacaatcagtccccctacttcaccatgccctcctatcagggctacattctagagtctgcccctgtcggtgctaccattagtgacagcctgaacctcacatcgcccctccgcatcgtggcccttgacaaagatatcgaggatgtgccgccaagtggcgtgcccacaaaggaccctgaactgcatttattcctaaatgactacacatccgtcttcactgtgacacagacaggaatcacccgttatctgaccctgttgcaaccagtcgacagggaagagcaacagacctataccttttcgattacagctttcgacggagtgcaggagtccgagccagtgatagttaacattcaagtgatggacgcgaacgacaacacacctaccttcccagaaatcagctacgacgtgtatgtttacactgatatgcgaccaggcgactctgttatccagctcaccgctgtggacgctgacgaggggtccaacggggagataacgtatgaaatcctagtgggagcgcagggagatttcattattaataaaaccaccgggctcatcacgatcgcacctggcgtcgaaatgattgtgggtcgcacatatgcactgaccgtacaagcagccgataatgcccctcctgccgagcgcaggaattccatttgcacagtttacattgaagtacttccacctaataatcagagccctccgagatttccccagcttatgtattccctggagatttccgaggctatgagagtgggcgctgttttactgaatctccaggctacggatagggaaggcgatagcataacgtacgctatcgagaacggagacccccaacgagtgttcaatttgtccgaaaccacaggcattctcactctggggaaagcactcgatcgcgaatcaaccgataggtacattctcatcattacggcttccgatgggagacctgacggcacgtctactgctacggtgaatatcgttgtgacggacgtgaatgacaacgctccagtatttgacccttatttgcccagaaatctgagcgtggtcgaggaggaggcaaatgcctttgtgggacaagtgaaggccaccgatcccgatgcaggcatcaacggacaagtccactactccctcgggaacttcaataatttgttcaggatcacctccaatggcagcatctatacagcggtgaagcttaatcgggaagtgcgtgactattacgagctcgtagtcgtggccaccgatggcgctgtgcatccaaggcattcaaccctgacactagcgatcaaggtcctcgatatcgatgataattccccagtatttaccaactctacttatacagtcctggttgaggagaatttgcccgctggaacgaccattttgcagattgaggccaaggatgtggatttgggcgcaaacgtgagttaccggatcaggagcccggaagtaaaacattttttcgctctacacccctttacgggagagctctccctcttgcgctcactggactatgaagcctttccagaccaggaggcgtcaataaccttcctggtggaggctttcgatatctacggcactatgccccctggtatcgccacagttactgtgatcgtgaaggacatgaacgattatccgccagtattttccaaacggatctacaaggggatggtggcaccagatgcagttaaggggactcccattaccacggtctacgccgaggacgctgatcctcccggattacctgcttcaagagtccgttatcgagtagatgatgtacagtttccgtatcccgcaagcatatttgaagtcgaagaggatagtggacgggtgatcactcgggttaatcttaacgaagaaccgaccacaatcttcaagttggtcgtggtagccttcgacgacggcgagccagtcatgtcttcctccgccacagtcaagattttagtgctgcatcccggagaaatcccgagatttacccaggaagaataccgacctccacctgtaagtgaattggctacgaaaggaaccatggtcggcgtaattagcgcagcggcaattaaccaatccatagtgtattcaattgtcagtgggaacgaagaggacactttcggaattaataacatcaccggtgtgatttacgtcaatggcccattagattatgagactcggacttcttatgtcttgagagttcaggctgacagtctggaagtcgtgctcgcgaacctcagggtcccctccaagagcaatactgccaaagtctacatcgaaattcaggatgagaataatcatccaccagtattccaaaaaaagttctacattgggggtgtaagtgaagatgctcgaatgtttacgtccgtactgagagtcaaagcaacggacaaggatactggtaactatagtgtgatggcctaccggcttattattccaccaattaaggaggggaaggaaggcttcgtcgtagagacatacactggattgatcaagaccgcaatgttgttccacaacatgcggcgttcatatttcaagttccaagtgatcgccacagatgactacgggaaaggactgagtggcaaagctgatgtactcgtatcagtagtcaaccagttagatatgcaggttatagtgtctaacgttccgcctactttggtggagaaaaagatcgaagatctaaccgagatcttggacagatacgtgcaggagcagattccgggtgccaaagtagttgtggagagcattggggctcgccgacatggtgatgctttttctctcgaggattatactaaatgcgatctgaccgtttatgcaattgacccgcagacgaatagagctatagaccggaatgagttgttcaagttcctggatggaaagctactcgatatcaacaaggatttccaaccatattacggggagggagggagaattttagagatccggactcctgaagccgtcacctctattaagaaaagaggagagagcctaggctacacagagggtgcactcctcgcacttgctttcataattatactgtgctgcataccagctatcctggtggtgctggtgagctaccgccagtttaaggtcaggcaagccgaatgcaccaaaaccgcacgcatacaggcagcactgcctgccgctaagccagctgtcccagcgcctgctcccgtggccgcaccaccaccacccccacccccacctcctggcgctcatctgtacgaggagctgggcgactccagtatgcataagtatgagatgccccagtacggtagccggagacgtttactaccacctgcaggacaagaggaatacggagaggtcgtgggcgaggccgaggaggagtatgaggaggaggagtgggccagaaagcggatgatcaagctcgtggtggacagagagtacgagacaagttccacaggcgaggatagcgcacctgagtgccagcgaaaccgcctgcaccatcctagtatccacagcaatatcaatgggaatatttatatcgcgcaaaacgggagtgttgttaggacacggagagcatgtctcacagataatctgaaggtggcgagtcccgttaggctggggggtccttttaaaaaactggataagcttgcggtgacacacgaggagaacgtcccgctgaacacactctctaaaggacccttcagcacggagaagatgaatgccagacctacccttgtgacatttgccccttgtccagttggtaccgataacacggctgtgaagcccctgcgaaaccgcctaaagtcaacagtcgagcaggagtcaatgattgacagcaagaatatcaaagaagccctcgagtttcactccgatcatacacagagcgatgacgaagagctgtggatgggcccatggaataacctgcacatccccatgaccaagttgta

SEQ ID NO: 237362 - DNA, 5858 bp, synthetic construct
  misc_feature 1..5858: note = Description of Artificial Sequence: Synthetic coding sequence
  source 1..5858: mol_type = other DNA
atgttccgacagttttacctatggacgtgcttggcctcaggcatcatcctgggtagcttgtttgaaatatgcctggggcagtatgacgatgattgcaaattagccagaggtggtccccctgccacaatcgtagctatcgatgaggagtctaggaatggcacaattctcgtggacaatatgctcatcaagggcaccgccggagggccagaccccaccatcgaactctcactgaaggacaatgttgactactgggtgctgatggatcctgtcaaacaaatgctgttcttgaacagtactggacgcgtgctggaccgcgaccctcccatgaacattcactcaatcgttgtgcaggtacagtgcatcaacaagaaggtgggaacgatcatctatcacgaggtgaggattgtagtgagggaccggaatgacaattctcccacattcaagcacgaatcttattacgccacagtgaacgagctcactccagttggaactactatctttacaggtttctccggagataacggcgcaactgacatagacgacgggccaaatggtcagatcgagtacgtgattcagtacaaccccgacgaccctacgtctaacgacacattcgagatcccactgatgcttacaggcaacattgtgctgcggaaaagactcaactatgaggataagactcgctactttgtcattatccaggccaatgatagggcacagaacttgaacgagagacgcaccacaactactactctgaccgtagacgtgctcgacggcgatgacctcggtccaatgttcctgccttgcgtgttagtgccaaacaccagggattgcagacccctgacgtatcaggctgcaatacctgaattgcgaacaccagaggaattgaatcccataattgtgacccctccgattcaggccatagaccaggataggaatatccagccccctagtgatcgacctggaattctgtacagcatcctggtgggaacaccggaggactatccgagatttttccacatgcaccctcggacagctgagcttagccttctcgaacccgtcaaccgagattttcatcagaaatttgacctcgtcattaaagctgaacaggataatggtcaccccttgccggctttcgctggtctgcacatcgagatactggacgagaataatcagtctccttacttcacaatgccaagttaccaagggtacattttggaatccgcccctgtcggggcaaccatctccgacagcctaaatcttacctctcccctcaggattgtggccctggacaaagacatcgaagacacaaaggacccagaactccacctctttctgaacgactacacatcagtttttaccgtgacccagactggcataactagatatctcacgttgctgcagcccgttgatcgcgaagagcagcaaacatatacattctccattactgcttttgatggcgtccaggagtcggaacccgttattgtgaacatacaggtaatggacgccaatgacaacacgcccacttttcctgagatctcctacgacgtctatgtgtatactgacatgcgacccggagattcagtaattcaattaaccgctgttgacgcggatgaaggctctaatggcgaaatcacatacgagatattagtgggagctcagggcgactttattataaataaaaccactggactgataacaatcgcacccggagtagagatgatcgtcggtagaacatatgcgctcacggttcaagctgcagataacgccccacctgccgagagaaggaatagcatatgtacggtatatattgaggttctgccacccaataatcagtccccaccgcgtttcccccagctgatgtattcactggagattagcgaggctatgagggtcggcgctgtgctgctcaatttgcaggctactgaccgagaaggtgacagcatcacgtacgcaatcgagaacggggacccacagagagttttcaatctctcagaaacaacaggcatcctgaccctggggaaagcgctcgacagagagagtactgacaggtacattctaattataactgcctcagatggaaggcctgatggcacttcgaccgccaccgttaatattgttgtcaccgacgtcaacgacaatgcacccgtgtttgatccctacctgcccagaaacctctcagtggtagaagaggaagccaatgcattcgtggggcaggtaaaggctactgacccggatgcaggaattaacggccaagttcactattccttaggtaacttcaacaacctttttcgcattacttccaacggctctatctataccgccgtgaagttgaatcgggaagttagagattattacgaactcgtcgtcgtggcaacagacggcgctgtgcaccctaggcatagcacgctgactctagctataaaggtcctggacatcgatgacaatagccctgttttcacaaactcaacttacactgtgctcgtggaggagaatctcccggctgggactactatacttcaaattgaagctaaggacgttgatctgggtgcaaacgtgtcttaccgcatccgctctcccgaggtcaagcacttctttgcgctacatccctttaccggagagctgagtctgctgagatctttggactatgaagcattcccagaccaggaggcatctatcacttttctcgtagaggcattcgacatttatggaacgatgcccccaggtatcgccaccgtgacagtcattgttaaagatatgaatgactacccccctgtgttcagtaaaagaatttacaagggcatggtggctcctgatgccgttaagggaacaccaatcaccactgtgtacgctgaagacgccgatccacccggtttaccagcatctcgggttcggtacagggttgacgatgtgcagttcccgtatcctgcaagcatcttcgaggtggaagaggattctggcagggtgattactcgtgtaaacctgaacgaggaaccgactacaatatttaaacttgttgtggtggcatttgacgacggagagccagtcatgtcttctagcgccacagtgaaaatcctagtcctgcatcccggagagatcccccgttttactcaagaggagtaccggcctcctcccgtctccgaattggccacaaaagggactatggtgggggtgatctctgccgcagcaataaaccagtctattgtctatagtatcgtctccggtaatgaagaagatactttcgggatcaacaatatcactggggtcatatacgtcaatggccctttggactatgaaaccagaacctcctacgttctgcgagtacaggcagactcattggaggttgtactggctaacctcagagtcccatccaaatcgaacacagcgaaggtatacatcgaaatccaggatgaaaacaaccaccctcccgtattccagaagaaattttatattggaggcgtgtcagaggatgccagaatgtttactagcgttcttcgggtgaaggcaacagataaagacactgggaattatagtgtgatggcatataggcttatcatccctccaataaaggaagggaaggaagggttcgtggtggagacatataccggcctgatcaagacggccatgttgtttcacaatatgaggagatcctacttcaaattccaggtgattgccactgacgattacggaaagggcctcagcggtaaggctgatgtactggtctctgtcgtaaatcagctggatatgcaggtcattgtctccaatgtcccaccgactttggtggagaagaaaatcgaggaccttaccgaaattctcgaccgatacgtgcaggaacagatccctggggcaaaagtggtcgttgagtctataggagccaggcgccacggcgacgcattcagcctggaggactatacaaagtgcgatttaacagtctacgccatcgacccacaaactaaccgggctatcgatcgcaatgagttgtttaaattcctagacggaaagctcctggacataaacaaggatttccagccttattatggcgagggtggaagaatccttgaaattcggacaccagaggcagtgacttccataaaaaaaagaggcgaaagtctgggctacaccgagggagccctgcttgcgctggctttcattatcatcctgtgttgcatccccgcaatcctcgtagtgctggtttcctacaggcagaggcaggctgagtgcaccaagaccgcccgtatacaggccgctttgcctgcagcaaagccagctgtgccagctcccgcacctgtggccgctcctccacctcctccacccccaccacccggtgcccatttgtacgaagagcttggcgacagttcaattttgttcctgctgtatcacttccagcagagtcgcggaaacaacagcgtgagcgaagatcgcaagcatcagcaagtggtgatgcctttttccagcaatacaatcgaagcccacaaatcagcccatgtcgacgggagccttaagtcaaacaagcttaaatctgctcggaagtttacatttctcagcgacgaagatgatctgtccgctcacaaccccctgtacaaagaaaatatctcccaggtgagcacaaactcggatatcagtcagcgcaccgacttcgtggacccctttagccctaagatacaggccaaaagtaaaagcctgagggggcctagggagaaaattcagagactctggtcacagtcagtgagtttgcccagacggctgatgcgaaaagtgcccaatcggcctgagatcattgacctgcagcaatggcagggcacgcgccagaaggctgaaaacgagaacactggcatctgtaccaataaaagaggctcaagcaatccgttgctaacaactgaggaagccaacttgaccgaaaaagaagaaattcggcagggagaaacgctcatgattgaaggaactgagcagctaaagagtctgagctcagactcatctttctgtttccccagaccgcattttagcttctccaccctgccaacagtttccaggactgtggaacttaaatctgagccaaacgtgataagcagtccggcagaatgtagcctggagttgagcccgtcccgtccctgcgtgttacactcaagtctctccaggagggagacgcccatttgtatgctgcctattgaaacagaaaggaatatattcgagaactttgctcatccccctaacatatccccgtcggcatgccccctgccgcctccaccgcctattagtcccccatctccaccaccagctcccgctcctctggcccctccacccgatatttcaccattttccctattttgcccacctccttctccgccatcgatcccgctgccactgcctccacctacattcttccctctctccgtgagtacgtcaggacccccaacacctcccttgctgcctccattccccacacctctgcctccgcctcctccttccataccatgtccccctcccccttcggcgtcttttttaagtacagaatgcgtatgtattacaggagtcaaatgtaccactaatctgatgccagccgagaagattaagtcttctatgacgcagttgagcaccactaccgtgtgcaagacggacccccagcgagagccaaaagggattctgcggcacgtcaagaatctcgccgagctggagaagtcagtcgccaacatgtactcccagatcgagaaaaactacctccggacaaacgtgtcagagctgcaaactatgtgcccatctgaagtgactaacatggagataacatcagagcaaaacaaagggagtctgaacaacatcgtggagggcacagaaaagcagtctcactctcagtccaccagcctcta

SEQ ID NO: 237363 - DNA, 5748 bp, synthetic construct
  misc_feature 1..5748: note = Description of Artificial Sequence: Synthetic coding sequence
  source 1..5748: mol_type = other DNA
atgtttaggcagttttatttgtggacttgccttgcctccgggataatcctgggctccctatttgaaatttgcctgggacagtacgatgacgattgtaagttggcgaggggcggaccgcctgctacaattgtcgcgatcgacgaggagtcccggaatggcacaatcctcgttgacaatatgctaatcaagggcactgccggtggtccggacccaaccattgagctgagtctcaaggataacgtggactattgggtgctgatggatccagtaaagcagatgctgtttcttaactctacagggagggtgctggatcgggaccccccaatgaacatccatagcatcgttgtgcaagtacagtgtattaacaagaaagtgggtacaatcatttatcatgaggtgcgtattgtagttcgagatagaaacgacaactcaccaaccttcaaacacgagtcatattatgctaccgtcaatgagctgacgccggtggggaccacaatattcacgggcttttcaggcgacaacggtgctacggacatagacgatggccctaacggccagattgagtacgtcatccagtacaaccccgatgatccagacagggcccaaaatctgaatgaacggagaactacaactacaacccttacagtagacgtgctggacggcgacgatttaggcccaatgtttcttccctgcgtccttgtgcccaacactcgcgattgtcgcccacttacgtatcaggccgcaatcccggagctccggacaccggaggaactgaacccaatcatcgtaactccccctatacaggctatcgaccaggatcgcaatatccagccacccagtgacagaccgggaattctgtactccattctagtgggaactccagaagactacccaaggttctttcatatgcatcccagaactgcggaactgagtcttctggagccggtgaatagggactttcaccaaaagttcgatctggtcataaaggcagaacaggacaatggccacccgctgcctgcgtttgcgggtctccatatcgaaatcttagacgaaaacaatcagtctccatatttcaccatgccatcataccagggctacattcttgagagtgcaccagttggcgcaaccattagcgactcactgaacttaacttctcctctgagaatcgttgcgctggataaagacatcgaagacaccaaggatcccgagctccacctgttcctgaacgattacacatccgtgtttactgtgactcagactggaattacccgctacctcactctgctacagcctgtcgacagggaggagcagcaaacttatacctttagtatcaccgcctttgatggagtccaggagagcgaaccggtcatcgtgaacatccaggtgatggatgcaaatgacaacacccccactttccctgaaatctcttacgatgtctatgtctatactgacatgaggcctggggactctgttatccagctgactgcagttgatgcagacgagggcagcaacggcgagataacttacgaaattctcgtgggggcacaaggcgattttataattaacaagacaacgggtctgatcaccatcgctcctggcgtggaaatgatcgttgggagaacatatgctctcaccgttcaggctgctgataatgccccacctgctgagcggcgaaactcaatctgcacagtctatattgaagtcctgcctccaaacaaccagagtccccctcgatttccccagctgatgtattctttggaaatatcagaggctatgcgggtaggggctgttctgctgaatctgcaggccacagaccgtgagggcgactcgatcacatacgccattgaaaacggtgaccctcagagagtgttcaacctgagtgagacaacaggcatcctgactctaggcaaagcccttgacagggagtccacagacaggtacatcctgattatcactgcaagtgacggtaggccagacgggacaagcacagctacggtgaacattgttgttaccgatgtgaacgacaacgccccagtgtttgatccatatctgccaagaaatctatctgtcgtggaggaagaggccaacgccttcgtcgggcaagtgaaagccacagatccggacgccggaattaacgggcaggtgcactactctctgggcaactttaataacttgtttaggattacctccaacggtagcatttacaccgctgtaaagttaaatcgagaggtacgcgattactacgaactggtggtagtggctactgacggtgcagtccatcctcggcattccaccctcacacttgccataaaagtactggacattgacgacaactcgccagtcttcacgaacagcacctatactgtactcgtggaggagaacctacccgcaggcacgactatcttgcagatcgaggctaaggacgtggacctgggagctaacgtgtcctacaggattaggagccctgaggttaagcacttttttgcactacacccattcacaggcgagctgagtctgctgcggagcctagactacgaagcctttcccgaccaggaggcttcaataacgtttttggtggaggccttcgatatctacggcactatgcctccaggcattgcaacagtgacggtgattgtgaaagatatgaatgactatccaccggtgttttcaaaaagaatctataagggaatggtcgcccctgatgcggtcaagggcacccctatcaccacagtgtatgctgaggatgcagacccccctggactgcccgcttctcgtgtacgctacagagtggacgacgtgcagttcccatacccggctagcatcttcgaagtcgaagaggactccgggagggtcatcacacgcgtgaatttgaacgaagagcccactactatttttaaactcgtggtggtagcctttgatgatggtgaaccagtgatgagtagctcggctaccgtgaaaatcctcgtactgcatcccggagagataccacggttcactcaagaggaatatcgccctcccccagtttctgagctcgcaaccaagggaaccatggtcggcgtgatcagcgccgctgcaatcaatcagtctatagtgtattcaatagtctctggaaacgaagaggacactttcggtatcaacaacatcaccggggttatctacgtgaacggtcccttggattatgagacccggacatcctacgtgctcagggttcaggccgacagcttagaggtggtgctggcgaacctgagagtccctagcaagtccaacacagccaaagtatacattgagattcaggatgagaataaccaccctcctgtcttccagaagaagttctatattgggggtgtgtcagaagatgcaaggatgtttacgagcgttttgcgggtgaaagccaccgataaagacacagggaactatagtgtaatggcctacagactgatcatcccccctatcaaggaagggaaggagggctttgtggtcgagacatacactggattaattaagacggcaatgctcttccacaatatgaggcgatcgtacttcaagtttcaagtgattgcaaccgatgattatggcaaaggactcagcggcaaagccgatgttttagtttctgtcgtgaatcagttggacatgcaggtaatcgtgagcaatgtgccccctaccctcgtcgaaaagaaaatcgaggacttgaccgagatcttggatcgctatgtgcaggaacagatccccggagccaaagtggtcgtggaatcaatcggggcacggcgacacggggatgccttttcactggaggactacaccaaatgtgacttgactgtctatgcaatagatccccagactaacagagcaatcgatagaaatgagctgttcaagttcctcgacggtaagttgctcgatattaataaagatttccagccttattacggtgagggcggtagaatattggaaatccggacgcccgaagccgtgacctcaattaagaaaagaggcgaatctctagggtacacggagggtgcccttctggcccttgcattcattattatcctctgctgtatccctgccattctggtagtactggtctcttatcgtcaacgccaggcggaatgcaccaagaccgctcggatccaggctgcattgcccgctgcaaagccagccgttcccgcacctgcccctgtggccgcaccccctcccccacctcctccacctcccggtgcccacctgtacgaagagctgggcgatagcagcatcttattcctgctgtatcatttccagcagtctcgagggaacaattcagtgtctgaagatcggaaacaccagcaggtggtgatgccattcagctctaacaccattgaagcccataagtcagcacatgttgatggctcactgaagtctaacaaattaaaatcagccagaaagtttaccttcctgagcgacgaggacgacttaagcgctcataatccactatacaaagagaacatatcacaggtgagtacaaacagcgatatctcacagcgaacagatttcgtcgatcctttttctccaaagatccaagctaagtccaaatccctgcggggacctagagaaaaaatccaaaggctgtggtcacagagcgtgtccttgccacgccgactcatgagaaaagtgcctaatcggccagaaatcatcgaccttcagcaatggcaggggacaaggcagaaggcagagaatgagaataccggaatctgtacaaacaagcgtggatcttctaatccattgctgaccaccgaagaggccaacctgacggagaaagaagagattcgccaaggcgagactctgatgatcgaaggcactgagcagttgaagagcctgagctccgatagctcgttctgctttcccagacctcatttttcgttttcaacgttaccaacagtatcacgcacagtggaattgaaatcagaaccaaacgtgatctctagcccggcagaatgcagcctggagctgtctccatctcggccatgtgtgctgcacagcagtctcagtaggcgggaaacccccatctgtatgttgcctattgagactgagaggaatatctttgaaaacttcgcccatccccctaacatctctccttccgcgtgtcccctccctccaccacccccaatctcgcccccatcgccccctcctgcccctgcgccactggcgccacccccagatatttccccattcagccttttttgtcctcctccgtctccgccttctattcctctccccctgcctccaccgaccttcttcccgttgtccgtgagcacatctggtcctcctacacccccactcctgccaccgttcccaacacctttgcctccaccccctccttcgataccgtgcccccctccaccaagtgcatcattcttatccacggagtgcgtgtgcatcacaggtgtgaagtgcacaaccaatctgatgcccgcagagaaaataaagtcttccatgacccagctttctactacaacagtttgcaagaccgaccctcaaagggagcctaagggaattctcagacacgttaaaaacctcgccgagctcgaaaaaagcgtcgcgaatatgtattcgcagatcgagaagaactacctacggaccaatgtgtccgaattgcaaacaatgtgtcccagcgaagttacaaatatggagattacgtccgaacagaacaagggatccttgaacaatatcgttgagggtaccgaaaagcagtctcattctcagagcacaagcctgtac

SEQ ID NO: 237364 - DNA, 5798 bp, synthetic construct
  misc_feature 1..5798: note = Description of Artificial Sequence: Synthetic coding sequence
  source 1..5798: mol_type = other DNA
atgtttcggcagttctacctgtggacttgcctggcaagcggaatcatcctgggtagtcttttcgagatctgtctggggcaatacgacgatggaacaattctcgtagacaacatgttaataaagggcacagccggtgggcctgatcctacgatcgaactatcattaaaggataatgtggattactgggtcctgatggacccagtcaaacagatgctctttctaaactcaaccggtagggtgctggaccgcgacccaccaatgaacatccacagcatagttgtacaagttcagtgcataaacaaaaaggtgggcacaatcatttatcacgaggtgcggattgttgtcagggatcgaaacgataacagccctacctttaaacacgagtcatactacgctacagtaaacgagcttacaccagttgggacaaccattttcactgggttttccggcgataacggggcaacagatatcgatgacggccctaatggacagatcgagtacgtgatccagtataatccagacgatcccacgagtaacgatacttttgaaattccacttatgctcacgggtaacatcgtgctacgaaagcggttgaattacgaggacaagaccagatattttgtcataatccaggccaacgatcgagcccagaacctgaacgaaaggagaactacaaccaccactctgacagtggacgtcctcgatggggacgatctggggccaatgtttttgccttgcgtgcttgttccaaacactcgagactgtcgtccattgacctaccaggccgcaatccctgagttgagaacccctgaagaactcaaccccattatagtaacaccgcctatccaggctatcgaccaggatcgaaacatccagccaccatccgacagacctggcattctttattcaattttggttgggacccccgaagattatccgcgattcttccacatgcatccaaggaccgccgagctgtccctgctggagccagtgaatagggacttccaccagaagttcgatcttgttatcaaggccgagcaagacaatgggcacccgctgccagcattcgctggcctccacatagagatacttgatgaaaataaccaatcaccttacttcacaatgccttcgtatcagggatatattcttgagtccgcacctgttggcgctaccatctctgactcactgaatctgacaagccctctgcgcatagttgccctggacaaggacattgaagacacaaaggatcccgagctgcaccttttcctgaacgattatacatcggtgtttactgttacacagacaggaataactagatatctgaccctgcttcagcctgtggaccgcgaggaacagcagacatacacgttctctataaccgcctttgatggcgtccaggagtcagagccggtgattgtgaacatccaagtcatggacgcaaacgacaacacccctacatttccggagatatcatatgatgtgtacgtttataccgacatgaggcctggggattccgtgattcaattgacggcggtggacgctgatgagggctcgaacggcgaaatcacttacgaaattctggtgggagctcaaggcgactttattattaataaaacaactgggcttattactatcgccccaggtgtggaaatgattgtggggagaacatacgcgctgacagtgcaggcggctgataacgctcccccagccgaacgcaggaactcaatttgcacggtatatattgaggtactgccccctaacaatcagtctccccctcgattccctcaattaatgtattcgctggagatatccgaagctatgagggtgggcgcagtgcttctgaatttacaggctaccgatcgggaaggcgatagcatcacctacgccatcgagaacggcgatccccagcgcgtgtttaatctgtccgagacgacgggaatcctcaccctgggcaaggcgcttgatagggagtcgacggatagatatattctgattattaccgccagcgatggaaggcccgacgggacatccaccgccactgttaacatcgtcgttacagacgtgaatgataacgcacctgtcttcgatccatatttgccaaggaacctttctgtcgttgaggaagaggccaatgcctttgtcgggcaagtcaaggcaaccgatcccgacgctggaataaatggccaggtgcactattcccttggcaatttcaacaacctgtttcgaattacgagcaatgggtccatttacactgccgtgaagttgaatagagaggttcgtgattactacgaactggtagtggtcgcaacagatggggcagtgcatccacgtcattctaccttgacactcgccatcaaggtgttagacatagacgacaacagtccagtatttactaacagcacctatactgtgctcgtcgaggaaaacttaccagccggaacaaccattcttcagatcgaagccaaggatgtggacctgggcgcaaacgtgtcttaccgcatccgttcacctgaggtaaaacatttcttcgcacttcatcctttcaccggagagctatctttgctacgttcgttggattatgaagcatttcctgatcaggaagcaagtattacctttctggtggaagcttttgacatctatgggaccatgcctcctggtattgcaaccgtaaccgttatcgtcaaagatatgaacgattatcccccagttttcagcaaacgtatctataaagggatggtcgcacccgatgcagtgaaggggacccccatcacaacagtttacgctgaagatgcagacccaccaggtttgccagcttccagggtgagatatagagtggatgatgtccagttcccctacccagccagtatcttcgaagtcgaggaagattcaggcagagttataacgcgagtcaatcttaatgaagagccaactaccatattcaagctggtggtagtggcttttgatgacggagagccggtcatgtcatccagcgccaccgtcaaaatcttggttcttcaccccggtgagatcccgagatttacgcaggaagaataccgaccaccgcctgtgagtgaactggccaccaaaggcaccatggtgggcgtgatttcagccgcagctatcaatcaaagtatcgtgtatagcattgtttctggaaacgaggaggacaccttcggtatcaacaacatcaccggggtgatctacgtcaatgggcctctggattatgagacgagaacgagctacgtcttgagggtgcaggccgactcgcttgaagtggtactggccaacctgcgagtgccaagtaagagcaacaccgccaaagtgtacatcgaaatccaggacgagaacaaccaccccccagtttttcaaaagaaattctatatcggaggagtgtccgaggacgctagaatgttcacaagtgtgctgcgtgtgaaagccaccgataaggacaccggaaactattccgtcatggcctaccgactgattatccccccaataaaagagggaaaggagggattcgtggtcgagacctacaccgggctgatcaaaaccgcaatgttattccacaacatgcgccgatcgtactttaagttccaggtgattgccactgatgactatggtaaggggctgtctggtaaagctgatgtcctagtaagtgtggtgaatcagctggatatgcaggtaattgtctcaaatgtgccaccaactctggtcgaaaagaagatcgaggacttaaccgaaatcctcgaccggtacgtgcaggaacaaattcccggagcaaaagtggttgtcgagagcataggcgctcgacgtcacggcgatgcttttagtcttgaggactacacgaagtgtgatctgaccgtgtatgcaatcgatccccaaactaacagggcaatcgaccgtaatgagttatttaagttccttgacggcaagctgttggacattaacaaggattttcagccgtactatggggagggcggtagaatcctcgaaattcgcactcccgaagccgtgacctccataaagaaacgcggagagtcgttgggatatactgaaggggcactattagccctggccttcattattatcctctgctgcatcccagcgatcttggtggtcttggtatcatacaggcagaggcaagccgaatgtactaagactgccagaattcaggccgctctgcctgccgcaaagccagccgttcccgctccagcgccagtcgcggcacccccacctcctccaccaccacccccaggggcacacctgtacgaagaattaggagattcctccatgcataatttgttcctgctctaccatttccaacagagcagggggaacaattcggtgagcgaagaccgtaaacaccagcaggtagtcatgccctttagttcaaacacgatagaagctcataagtccgcacacgtagacggctcccttaagtcaaacaagttgaagagcgcacggaaattcacattcctgtctgatgaagatgacctctccgcgcataacccattatacaaggagaatatttcccaggtgtctaccaacagcgacatctcacagaggacagatttcgttgacccgttctcaccaaagattcaagcaaagagtaagtccctgagggggccaagagagaagattcagaggctgtggagtcagagtgtctctttgcctcgaagactgatgcgaaaagtcccaaacagacctgagattatcgacctgcaacaatggcagggcaccaggcagaaagcagaaaatgaaaatacagggatctgcactaacaagcggggttcatctaatccccttcttacaacagaagaggcgaacctgaccgagaaagaggaaattagacagggagagacattgatgattgaaggtacggagcaattgaagagcctgagcagcgatagcagtttttgctttccacggccacattttagcttttcaactcttccgactgtttctaggacggtcgagttgaaatcggagcccaacgtgatctcctctccagcagaatgctctctggagctgagtcccagtcgcccatgcgtgctacatagctccctgagccggagggaaacaccgatctgtatgttgccgatagagaccgaacgtaatatattcgaaaattttgcccaccctcctaatattagcccgtctgcctgccccttaccaccacctcccccaatctccccaccaagcccacctccagcacccgctccgctcgctccgcctcctgacatttctcctttcagccttttctgccccccaccttcacccccttccatcccactgccgttgcccccacccacattttttcccttgagcgtctctacctctggcccaccaacccctccgctattgcctcccttcccaacgcctctgccgccacccccaccatcaatcccctgtcccccaccaccatctgcttccttcctgtctactgagtgcgtttgtattaccggagtcaaatgtactacaaacttgatgcccgcagagaagatcaaaagcagtatgacccagcttagcactactactgtctgtaagacagacccccagcgcgagcccaagggcatattacgccacgtgaaaaatctcgctgaattagagaagagcgttgctaacatgtacagccagatcgaaaaaaactaccttaggactaatgtgagtgagctccagactatgtgcccaagcgaggtgacaaatatggaaattacttcagaacagaataagggcagtttgaataatattgtcgaaggaaccgagaagcagagccactcccagagtactagccttta

SEQ ID NO: 237365 - DNA, 4620 bp, synthetic construct
  misc_feature 1..4620: note = Description of Artificial Sequence: Synthetic coding sequence
  source 1..4620: mol_type = other DNA
atgtttaggcagttctatttgtggacatgtctggcttccggcatcattcttggctccctgttcgagatttgtctagggcagtacgacgacgactgtaaactggccagaggcggtccccctgccacaattgtggccattgatgaggaatccaggaatggtaccatcttggtcgacaatatgttaatcaagggcaccgccggtggtccagacccaactattgagttgagcctcaaggacaacgtcgattactgggtgttgatggaccctgttaaacagatgctgtttctcaattcgacgggccgagtgctggaccgggaccctcctatgaacatccatagtatcgtcgtacaggttcaatgtataaacaaaaaagtgggtactatcatctaccatgaagttcgcatcgtggtgcgggataggaacgacaactctcccaccttcaaacacgagagctattacgcaactgtgaatgagcttacgccggtcggaactacgatcttcacaggctttagcggcgataatggggcaacggacatcgacgacggaccaaatgggcaaattgagtacgttatacagtacaaccctgacgatccaacatcgaacgacacattcgaaatcccccttatgctcaccggcaacatcgtcctcaggaagcgactgaattatgaagacaaaacgaggtactttgtgattattcaggccaatgaccgtgcccagaatttgaatgagaggaggactaccacaacaacacttaccgtggatgtgctggacggggatgatctgggtccaatgttcttgccctgtgtcctagttccgaataccagagactgtcggccattgacataccaggccgcaatccccgagctgcgcaccccagaggagcttaaccccataatcgtaacccctccaatccaagcgatcgatcaggacaggaatatccaacccccatccgataggccaggcattctctattctattctcgtgggcaccccggaggactatccaagattctttcatatgcatccccgaaccgccgagctctccctcttggaaccagtgaatcgcgattttcaccagaagtttgacctcgtcatcaaggccgagcaggacaatgggcaccccctccctgcgttcgccggattacacattgagatcttggatgagaataatcagagtccatacttcacgatgcctagctaccagggctacattctcgaatctgcccctgtgggggcaacaatcagtgatagcctgaacttaaccagcccactcagaatcgttgcactcgataaggatatcgaggatactaaggaccctgagctgcatcttttcttgaatgattacaccagtgtcttcactgtgactcagacagggattacacgctacctgaccctgctgcaacccgtggatcgagaagagcagcaaacgtataccttctctatcaccgccttcgatggggtacaggagtcggagcctgttattgtgaatattcaggtcatggatgcaaatgataacacacctacttttcctgagatttcctacgacgtctacgtttataccgatatgcgtcccggtgattcagttatacagctgaccgccgtggacgctgacgagggatcaaatggagagattacatatgaaatcctggtcggagcccaaggtgattttattatcaataagaccactggtctcatcactattgcaccgggagtggaaatgattgttggcagaacttatgcccttaccgtgcaggccgctgacaatgccccacccgcagaaaggcgtaattcgatctgtaccgtgtacatcgaagttttgcccccaaataaccagtcacctccgaggtttcctcagctgatgtacagcttggagatctcagaggcaatgcgggtcggggctgtgctcctgaatctccaggctaccgatcgcgagggggactccattacatatgcaatcgagaacggagaccctcagcgtgtgttcaatctctctgaaaccaccggtatcctgacgctgggcaaggcactggaccgtgaatctaccgatcggtacattttgattattacagcctccgatggtcggcctgatggaacgtccaccgctacagtgaatatcgtggtaaccgatgttaatgacaatgcacccgttttcgatccttatctccctcggaacttatcagtggtggaagaggaagccaacgcctttgtgggacaggttaaggccactgacccggatgcaggtattaatggtcaggtccactattcactgggaaattttaacaatctattccgtataacctcgaacgggtccatttacactgccgtaaaattgaatagagaggttcgggactactatgagttagttgtcgtggctacagacggtgctgtgcacccgagacactccacactcactctggctatcaaggtgctggatattgatgacaattcgcctgtattcaccaattcaacttacacagtcctggtggaagaaaatcttccggcaggtactacaatcctgcagatcgaggcgaaggacgtggacctgggggctaatgtgtcatataggatccgctcccctgaggtcaagcatttcttcgccctgcatccttttacaggagagctgtccctgctccgatcactagactacgaggctttccccgatcaggaggcttctattacttttctagttgaagcctttgatatctacggaaccatgcctcctgggatcgctacagtcaccgtgattgtgaaagatatgaacgattaccctcctgtgttttccaagaggatttataaggggatggtggcaccagatgctgtaaaaggcacccccatcacaactgtgtatgctgaggacgcagaccccccaggactcccagcgtccagggtgaggtacagggtggacgacgtccaattcccttaccccgcatccatatttgaggtcgaagaagactctggacgtgtgataaccagagttaacctgaatgaagagccaaccaccatcttcaagctcgtcgttgtggcttttgacgacggggaaccggtgatgagctcatccgccactgttaaaatcttggtgctccacccaggagaaatacctcggttcacacaggaggaatatcggcctccccctgtatcagaactggcaactaagggtacaatggtcggagtcatctccgccgctgcaattaaccaaagcattgtgtacagcattgtttctggcaacgaggaggatacctttggtatcaacaatatcaccggggtcatttacgtgaatggcccactagattacgagactcggaccagctacgttctcagggttcaagcagattccttagaggtggtgctagctaacctgcgcgttccatccaagtctaacacagccaaagtctacatcgagatccaagatgagaacaaccatccacccgtgtttcagaagaagttttacatcggcggtgtgagtgaggacgcccgaatgtttacctccgtactgcgcgttaaagctactgataaagacacgggaaattacagcgtgatggcgtatcgcttgatcattccaccgattaaagagggcaaagaggggtttgtcgtagagacatacactggactgataaaaacagcaatgctgtttcacaatatgcggcgttcgtatttcaagtttcaggtgatcgccacagatgattacgggaaaggactctccggtaaggcagacgttctggtttctgtagtaaatcaactcgacatgcaagtgattgtcagtaatgttccaccaactctggtggagaaaaagatcgaagacctaaccgaaatactcgatcggtacgtacaggagcagataccaggcgctaaggttgtcgtcgagagtataggagctagacgccatggggacgcattcagtcttgaggattataccaagtgcgaccttacagtctatgcaatagatccccagactaacagagccatcgataggaacgaactgttcaagttcctggacggaaaactcctcgatataaataaggacttccagccctattatggagagggcggaagaatccttgagattcggactcccgaggccgtaacatccatcaagaaaaggggagagagcttgggctacaccgagggcgctctccttgccctcgcctttattatcatcctttgttgcattccagcaatactcgtggtcctggtcagctaccgccagttcaaggtgcgccaggcagaatgtactaaaacggctcggatacaggctgctctgccagcggcaaagcctgccgtaccagcacctgctccagtggctgctcctccgccacccccacctcctccacctggtgcacacctgtacgaagaattaggggacagttctatgcataaaaactacccatggtccctagagctcatcttagcacgaaacatggacaaaataattacggttatgagcatgggcatgaagtgcctgaatatgggcgtcgccgttgattgctatcaccagctggataggcgaaatatggtaagatggttggtcaagttgcgcaagaatatgagacggaagaggaagtcacagcgtaaattgaaaaaccagaggttaaaattagaatccctcgtgagacggaaaaaatag

SEQ ID NO: 237366 - DNA, 2160 bp, synthetic construct
  misc_feature 1..2160: note = Description of Artificial Sequence: Synthetic coding sequence
  source 1..2160: mol_type = other DNA
atgtttcgacagttctatttgtggacttgcctggccagtggcatcatcctcgggtctctctttgaaatttgtttgggccagtacgacgacgactgtaaactcgccagaggaggtcctcctgcaaccatagtggctatcgacgaagaaagtaggaatgggacgattcttgtcgataacatgctgattaagggaaccgctggaggtcccgaccctacaatagagttgtcattgaaagacaatgtagattattgggtgctgatggaccccgtcaaacagatgctctttctgaatagtaccggacgagtgttagatagggaccctcccatgaatatccactctatcgtggtgcaggtacaatgtatcaacaagaaggtgggaactattatatatcatgaggttcgtattgtggtgagagaccgcaatgataattctcctacgtttaagcatgagtcttactatgcaaccgtgaacgagctgacgccagtaggtaccaccatcttcacaggcttcagtggcgataacggagccactgacatcgacgacggccctaacggtcagatcgagtacgtgatccagtacaatcctgacgaccctacaagcaacgacacctttgagatccccctcatgctgactggcaacatagtacttaggaagaggctgaattacgaggacaagacaagatactttgtgatcatccaggcaaacgacagagcacaaaatctaaacgagaggcgcaccacgacaaccaccctgacggtggacgttcttgacggagacgatctggggcctatgttcctcccctgcgtgctggttcctaatacacgagattgtaggcccctgacctaccaggccgcaatcccagaactccggacaccagaagaacttaacccaattatagtgacaccccctatccaggctatcgaccaggacaggaatatccaacctccaagtgaccgtcctggaattttatattcgatcctagtgggcacaccagaggattacccacggttcttccatatgcatccaagaactgcagagctatctctgctggagcccgtcaatagagattttcaccagaagtttgacctcgtgattaaagccgagcaagataatggccatcccctgcctgcctttgccggactgcatattgaaatactcgatgagaataatcagtcaccatactttaccatgccgagttaccaggggtacatcctggagtctgctccagttggggctacaatctctgactccctgaatcttacatcccccctgcgcatagtggctcttgacaaagatatcgaggacgaagaacctaaaaaaatcaagaagcctaaagttgaaattcgggaacccagcgaggaagaagaggtcgtcgtgaccattgagaaacctccagcagcagaacctacatacactacgtggaaacgggcaaggattttcccgatgatatttaaaaaggtccggggtttagcggataaacggggaattgtggatctggagggcgaggaatggcagagacgtctagaggaggaggacaaagattatctgaagctcactctggaccaggaggaagcgacggaaagtaccgtggaatccgaggaagagtcgagcagcgactacacggagtattccgaagaggagagtgaattttctgaatctgagaccaccgaagaggagtcagaaagcgagaccccaagcgaagaagaggagagcagtacaccagagtccgaggagagcgagtccactgaatccgagggcgaaaaggcccgaaagaacatcgtcctggccaggagacggccaatggtggaggaggtcaaggaagtgaagggcagaaaggaggagccccaggaggagcaaaaggaaccaaaaatggaggaggaggagcactctgaggaggaggagtccggtcctgctcccgttgaagagtcaacggatccagaggcccaggacatccccgaagaagggtccgctgagtcagcgtcagtcgagggaggcgtcgagtctgaagaggaatcagaatctgggtcttcatcttctagctctgagtctcagagtggcggaccctggggatatcaggttccagcatacgaccgcagcaaaaatgctaaccagaaaaagtctcctggtgctaatagtgaaggctacaacacggctctctag

SEQ ID NO: 237367 - DNA, 1953 bp, synthetic construct
  misc_feature 1..1953: note = Description of Artificial Sequence: Synthetic coding sequence
  source 1..1953: mol_type = other DNA
atgttccggcagttttatctctggacctgtcttgcctccggcatcatcctgggaagcctgtttgaaatctgcctgggccagtacgacgatgattgcaagctcgcgcgtgggggaccacctgcaaccatcgtggccatcgatgaggagtcgcgtaacggcactattctggtggacaacatgctcattaagggtacagctggcggaccggaccccacaattgaattaagcttgaaggacaatgtggactattgggtactgatggatcctgttaagcaaatgctctttctaaatagcacagggcgtgtgctggaccgtgatcctcccatgaatatacactcgattgtggtacaagtgcagtgcataaacaagaaggttggtaccatcatatatcacgaagttaggattgtcgtcagggatcggaatgataatagcccgacctttaagcacgaatcctactatgccacagtgaatgagctgactcccgtggggacgacaatatttaccggtttttcaggagacaatggagccaccgacatcgacgacggtcctaacggccaaatcgagtacgtgattcagtataaccctgacgatcccacaagtaatgacacttttgaaatccccctgatgctgacggggaacatcgtgttaagaaagagactcaattatgaagacaaaacccgatactttgtcatcattcaagcaaatgaccgcgctcagaacctcaacgagcggcgtaccactacaacgacactgaccgtcgatgtgctggatggagatgaccttgggccaatgttcctgccctgtgttcttgtgcccaatactagagactgccgccctctcacttatcaggccgcaattcctgagctgcgtacacccgaagaactcaaccccataatcgttacacccccaatccaggctatcgatcaggaccggaatatccagccaccaagcgatcgtcccggtatcctgtatagtatcttggtcggcaccccagaagattacccgaggttctttcacatgcacccacgaaccgccgagttatctttactcgagcccgtgaatcgcgatttccatcaaaagttcgatctggtgatcaaagaggagccaaaaaagataaagaagcccaaggtggagattagagagccaagcgaagaggaggaagtcgtcgtgactatagaaaaacccccagccgctgagcctacctacacaacatggaaaagagcccgaatttttcccatgatcttcaagaaggttcgaggactcgctgataaaagaggcattgtggatctagaaggggaagaatggcagcgcagacttgaagaggaggataaggattatctaaagttaaccctggaccaggaggaggcaactgaatcaacggtggagtcagaggaggagagttcctctgactatacagaatactcagaagaggaaagcgaatttagtgaatcagagacaaccgaagaggaatccgagagcgagacacctagcgaagaagaggagagtagtacccccgagtccgaggagagcgagagtaccgaatctgaaggcgagaaagcgaggaagaacattgtgctcgctcgccgaaggcccatggttgaagaggtaaaagaggttaagggaagaaaggaggagccccaggaagagcagaaagaacccaaaatggaagaggaagaacacagtgaggaggaggaatccggacctgcccctgtggaggagtctactgatcctgaggcacaggatatccccgaggaagggtccgccgagagtgcaagcgtggaggggggtgtcgagtctgaggaagaatccgagagcggaagttcctcatcatcaagcgaaagccagtccggaggtccatggggttaccaggtgcccgcatacgacaggtctaagaatgcgaatcagaaaaaatctcccggagctaacagcgaggggtacaatacagccctatag

SEQ ID NO: 237368 - DNA, 5357 bp, synthetic construct
  misc_feature 1..5357: note = Description of Artificial Sequence: Synthetic coding sequence
  source 1..5357: mol_type = other DNA
atgtttcgtcaattttatctgtggacttgcctggcctccgggataatcctcggaagcctgttcgaaatttgcttgggccagtacgacgacgactgcaaactcgccagggggggacctcccgcaacaattgttgcaatcgacgaggaatccaggaatggcactatcctggtagacaatatgcttattaagggaacagccggtggcccagacccaaccatcgaactgtctctcaaggacaatgtcgactactgggtcctcatggacccagtaaagcagatgttattcctgaactccacaggacgggtgctcgacagagaccccccaatgaacatacattcaattgtagtgcaggtgcaatgcattaacaaaaaggtggggactatcatttaccatgaggtacgcatagtggttcgagatagaaacgataacagtcctacctttaaacacgagtcttattacgccaccgtcaatgagctgacgcctgtcggcaccaccatcttcaccggattctccggcgacaatggagcaaccgatatcgacgatggaccaaacgggcagatcgagtacgttattcagtacaacccggatgaccctacctctaacgatacatttgagatacctctgatgctcactggcaacattgtgctcaggaaacggttaaactacgaggataaaaccaggtacttcgtgataatacaagccaatgatcgggctcagaacctcaatgagcgccgtactacaacaacaacattaacggttgatgtgctggatggggatgacctcggacccatgttcttaccgtgtgtgttggtgcctaataccagagattgcaggccactgacctaccaggcagctataccggagctcagaacccctgaggagctgaacccgataatcgtgacaccccctatccaagccattgatcaggatcgcaatattcagcctccttccgaccggccaggaattctgtattctatcctcgttggaaccccagaggactacccgcgttttttccacatgcaccccagaacagcggagctctctttgttagaaccagtgaatagggatttccaccagaagttcgatctcgtcattaaggcagagcaggacaatgggcatcccctgccggcatttgcaggcttgcatatcgaaattctagacgagaacaaccaatcaccctacttcaccatgcccagttatcaggggtacatcctggaaagcgctcctgtcggagccactattagtgattccttgaacctgaccagccccttgagaattgtagctcttgacaaagatatcgaggatgtcccgcctagtggcgttccaaccaaggaccccgaactgcacctcttcttaaacgactacaccagcgtgttcactgtcacccagaccggtattacaaggtatctgacacttctccagcccgtggaccgcgaggaacagcaaacctataccttttccattacggcctttgacggggtccaggaatcagagcccgtgatcgtcaatatacaggttatggatgccaatgacaacacacctacatttcccgaaatctcatacgacgtttacgtatatactgacatgagacctggtgattccgtgatccagctcacagctgtggatgccgatgagggcagtaacggagaaattacctatgagattctggtaggggcacaaggggattttattatcaacaagacaaccggactgatcaccatcgcaccaggggtcgagatgattgttggaagaacctacgcactgacagtgcaggctgccgataacgctcctcctgcagaacgacgaaacagcatctgcacagtctacattgaggtgttaccccctaataatcagtcacctccacggttcccccagctgatgtattcactggaaatcagtgaggctatgcgggtgggcgcagtgctgcttaatctgcaggccactgaccgtgaaggcgacagcattacctatgccatcgagaatggcgaccctcagagagtatttaatctgtccgagacaactgggatcctcactctaggcaaggccctggatagggagtccaccgaccgatacattctgattattacagcatccgacggaaggccagacggcacaagcacagcaacagtcaacatcgtcgttaccgatgtgaacgacaatgcccctgttttcgacccgtacctccctcgcaatctgtccgtcgtggaggaggaggcgaatgctttcgtcggacaagtcaaagctactgatccagacgctggaatcaacggtcaagtacactactcactgggcaattttaacaacctctttaggatcacatccaacggtagtatttatacagctgtgaagctgaatagagaggtccgtgattactacgagctggtagtcgtggccacagacggtgccgtccaccctagacactcaaccctcacattggcaatcaaggtgttggatatagatgacaattccccagtttttaccaattccacctacactgtgttggtggaggagaatcttcctgcagggacaactatcctgcagatcgaagccaaggacgtggaccttggtgccaatgtcagctacaggatccgctcaccagaggtaaagcacttctttgcattgcatccgttcaccggcgagctctctttactccgtagtctggattatgaggcattcccggatcaggaggcctctatcacctttctggtggaggctttcgatatctatggaaccatgccaccgggaatcgcaacagtgactgtgatcgtcaaggatatgaacgattacccgccagtgttttcgaagcggatttataaaggcatggtcgcccctgacgctgtgaagggtacacccatcacaaccgtatacgcggaagatgccgatccccctgggttacccgcttcccgtgtgcgctaccgagtcgacgacgtgcagttcccctaccctgcctccatatttgaagtggaagaggacagcgggagggtgatcactcgcgtgaatctaaatgaggaaccgaccacaatctttaagctggtggtcgtggccttcgacgatggcgagccagttatgtcatccagcgcaacagtcaaaatccttgtgttgcaccccggagaaattccacgtttcacgcaagaggagtatagacctccccctgtgtctgaactcgccactaagggtaccatggtcggagtgatctccgccgcagcgatcaatcagtccattgtatattccattgtgtcagggaatgaagaggacacttttgggatcaataatattacgggagtgatttatgttaacggacctctcgattatgaaactcggacgtcctacgttctgcgtgtgcaggccgactccctggaggtagtgctcgctaacctcagagtaccctcaaaaagcaataccgccaaagtgtatattgagatccaggacgaaaataaccatcctcccgtgtttcagaaaaagttctatatcggcggtgtctccgaagatgccaggatgttcactagcgtattgcgagtcaaggccaccgataaagacaccgggaactactctgtaatggcctatcgtctcatcatcccccctatcaaggagggcaaggaaggtttcgtggtggaaacttacacaggacttattaagacggcaatgctcttccataatatgagacggagttatttcaagttccaagtcatcgccactgatgactacgggaaggggttgtcaggcaaagccgatgtgctggtgagcgtggtgaaccaactggatatgcaggtgatcgtgagtaatgtaccccctactctggtcgagaaaaagatcgaggatctgacggagatactcgatcggtacgtgcaggaacagattccaggcgcaaaagtcgttgtggagagtatcggagcaagacgacacggtgacgcattttctcttgaagactacactaaatgcgaccttaccgtttatgctatcgatcctcagaccaaccgtgccatagaccgaaatgaactgttcaagtttttggacggcaaattgctggacataaataaggatttccaaccctattatggtgagggcggacgaatccttgagatcaggacccccgaggctgtgacctccattaagaagaggggggaaagtctgggatataccgagggcgcactgttagctctcgcctttatcattattctgtgttgtatcccagcgatcctcgtcgtgctggtctcatatcgacaattcaaagtacgtcaagcagagtgtaccaaaaccgccaggattcaggcagcgctacctgcggctaaacctgccgtacctgctcccgcaccagttgcagcccctccacctcctccccctccaccgcctggtgcacatctgtacgaagagttaggcgactcctctatgcataagtacgagatgccacagtatggctctaggcggagattgctcccaccagccggacaagaggaatacggtgaagtggttggtgaagcagaggaagaatatgaagaggaggaggaggagcccaagaagatcaaaaagcctaaagtcgaaatacgagagccgagcgaggaagaagaagtggtcgtgacaattgagaaacccccagcagctgagcccacatataccacttggaaacgggctcggatctttccaatgatttttaaaaaagtgcgcggattggctgacaaacggggaatcgtggacctggagggtgaagagtggcagagaagactggaagaagaagataaggactaccttaagctgacactggatcaggaggaggcgactgagtccacagtagagtctgaagaagaaagtagcagcgactacaccgagtactccgaagaggagtccgagttcagcgaatccgagacgacagaggaggaaagcgagagtgaaaccccctctgaggaggaggagtctagcactcccgaaagtgaggagtcagaatcaacagaatccgagggagaaaaggcgcgtaagaacatcgtgcttgctcgtcgaagaccgatggtagaggaggtgaaagaggttaaggggagaaaggaagaacctcaagaggagcagaaggagcctaaaatggaggaggaagaacattcagaagaagaggaatcaggccctgcccctgtcgaggaatccacggatccggaggcccaggacatccccgaagaaggttctgctgaaagcgctagcgtagagggcggtgtcgaatccgaagaggaatctgagtctggatcctctagctcttcatccgaatcccagtctgggggaccatggggctaccaggttccggcttacgacagatcaaaaaacgccaaccagaaaaaatctccgggagcgaattccgaaggctacaataccgcgctgta

SEQ ID NO: 237369 - DNA, 2946 bp, synthetic construct
  misc_feature 1..2946: note = Description of Artificial Sequence: Synthetic coding sequence
  source 1..2946: mol_type = other DNA
atgttccgacagttctatctatggacttgtttagcatccgggatcattttgggctcactgttcgagatttgtctgggacaatacgacgatgattgtaaactcgcgaggggaggtcctcccgcaaccatagttgctattgatgaagagagcaggaacggaacaatcctggtggacaacatgcttatcaaaggaacggcgggagggcctgatcccacaatcgaactttcactgaaggacaatgtggattattgggtgttaatggaccccgtaaagcagatgctgttcctgaacagcacagggagggtactggatagggacccccctatgaatattcactccattgtggtgcaagtccagtgcatcaacaagaaagtgggtactatcatctaccacgaagtgagaatcgtagtgcgcgacagaaatgataactctcccaccttcaaacatgagtcgtactatgctacagttaatgagctgacccctgtgggtaccaccatcttcactggcttttccggggacaatggagccactgatatagacgacggcccaaacggccagatcgaatacgtaatccagtacaatccggacgaccctactagcaacgacacgtttgagattcctctcatgcttactggaaatatcgtcctccgcaagcgcctcaactatgaggataagacacggtacttcgtcatcattcaggctaatgacagagctcagaatcttaatgagcgacgcacgaccacaaccaccctgactgtcgacgtgttggacggcgacgaccttggtccaatgttcctgccatgtgttctcgtcccgaatacgcgagattgtagaccccttacttatcaagccgctattcccgaactgcggacgcccgaagaactaaaccctattattgttacccccccaatccaggcaatcgaccaggataggaatatacagccaccctctgacagacccggaattctgtactctattctggtaggaacccctgaggactaccctcgcttctttcacatgcatcccagaacagcagagttgtccctgctggaacccgtaaatagagatttccatcaaaagttcgatctggtcatcaaagccgagcaggacaacggccatccactcccggctttcgcgggtctccacattgaaatcttagatgagaacaaccagagtccctacttcactatgcccagctatcaaggctatatacttgaatctgctcctgtgggagccactatctcagacagccttaatctgactagtcctctcagaatcgtggcactcgataaggacatcgaagacaccaaagaccccgaactccatctcttccttaacgactatactagcgtttttacagtcacacaaacaggcatcacaagatatctcaccctcctgcagccggtcgaccgggaagaacagcagacctacaccttcagtatcaccgcctttgatggcgttcaggagtcagagcccgtaatcgtcaacatacaggtcatggacgcaaatgacaacacacctacattcccggaaattagctacgacgtctatgtatacaccgacatgcgccctggggattccgtcattcagctcactgctgtcgatgccgatgaggggagtaacggagagattacgtacgaaattttggtgggcgctcagggtgactttattatcaacaaaacaacggggcttatcaccatagcgcctggggtggagatgattgttgggagaacctatgccctaaccgtgcaggcggcagataacgctcccccagctgagagacgtaattcaatttgcaccgtttatatcgaagtgttacccccaaataaccagagtccacccaggttccctcagctgatgtactcactggaaatatctgaagcaatgagggtgggggctgtgcttctgaatctgcaggctaccgatcgggagggggacagcatcacctacgcaatcgagaacggagacccccaaagggtttttaacctgagtgagacaaccgggatcctcacactcggaaaagctctggaccgggaatcaaccgatcgctatattttaattatcaccgcatctgacggtcggccagacggggaggagccaaagaagatcaaaaaacccaaagtcgaaatcagggagccaagcgaagaagaggaggtcgtggtgacgatcgaaaaaccgcctgcggcagagccaacgtacaccacctggaaaagggcccgaattttcccgatgatctttaaaaaggtgcgcggattggcagataaaagggggattgtggatctggagggtgaggaatggcagagacgactcgaggaggaagataaagattacctcaagctaactctggaccaagaagaggctaccgagagtaccgtggagtcagaagaggaaagttcaagcgattataccgagtacagtgaagaggaatccgagttttcagagagcgaaaccaccgaggaagagtctgaaagcgaaacccccagcgaggaggaggaatcctctacccccgaaagcgaggagtcagaatccaccgagagcgagggcgagaaggccaggaaaaatatcgtcttggcccgtcgcagaccaatggtggaagaagtaaaggaggttaaaggaaggaaggaagaaccccaggaggagcagaaagagcccaagatggaggaggaggagcactctgaagaagaagagagcggtccagctccagttgaggagagtacggaccctgaggcccaggacatcccagaagagggtagtgctgaaagtgcttccgttgaaggaggggtggagtcagaagaagaaagcgagtccggttctagctccagcagcagtgagtctcagtcgggcggaccttggggttaccaagtacccgcttatgaccggtccaagaacgcgaatcagaaaaagtctcctggggctaacagtgagggctacaatactgctctctag

SEQ ID NO: 237370 - DNA, 3453 bp, synthetic construct
  misc_feature 1..3453: note = Description of Artificial Sequence: Synthetic coding sequence
  source 1..3453: mol_type = other DNA
atgcctagttaccagggatatattctggaatcagcccctgttggcgctacaatttccgactcattaaatctgacaagccccctgagaatcgtggcactggacaaggacatagaagatgttccaccgtcaggggtaccaactaaagatcccgaacttcatctcttcctgaatgactacaccagcgtgttcaccgtgacacaaaccgggattactcgctacctgacgctgcttcaaccggtggaccgcgaggagcaacagacttatacctttagtatcactgccttcgatggtgtgcaagagtcggagcccgttatcgttaatatccaagttatggacgctaacgataacacacccaccttcccagaaatctcatacgatgtatatgtgtataccgacatgagaccgggtgatagcgtcattcagcttacagcggtcgacgctgacgagggttccaacggcgagatcacctacgagatcttggtcggggctcagggggatttcataattaataagaccactggcctgataactattgctccaggcgtggagatgatagttgggagaacctatgcactcactgtgcaggctgcagataatgctcctcccgcagagagaagaaactccatttgcactgtctatatcgaagtgttgcccccaaataaccagtcaccaccgcgttttcctcagctaatgtatagtcttgagatttcagaagctatgcgagttggcgctgttctgttgaatttacaggctaccgaccgagagggggacagtatcacttatgctattgaaaacggcgacccacagagagtgttcaacctgtccgaaacaactggcattctcacactcggcaaggccctagatcgagagagtacagacaggtacatcctcattattaccgcttcagacgggcgtcctgacggaacatctaccgccaccgtgaacattgtggttacagacgtcaatgacaacgccccagtgtttgacccttatctccctaggaatctgagtgtggtggaggaggaggctaatgcgttcgttggtcaggtgaaagcaacagaccctgatgcgggaatcaacggacaggtgcactactctctgggcaacttcaataatctgtttcggatcactagtaacggatccatctacaccgccgtgaaattaaatagagaagtgcgggactattacgaactggtggtggttgcaacagatggggcagtgcacccaagacatagtaccctgactctggctataaaggtcctggacatagatgacaatagtccggtgttcacgaatagcacatatacagtcctcgtggaagaaaacttgcccgcagggaccaccatactgcagatagaggccaaggatgtcgatctgggcgcaaatgtgtcatacaggatccggagccccgaagtgaaacactttttcgctctccatccatttactggggaactctctttgctgcgaagcctggactacgaggcattccccgatcaggaggcatccatcacgttcctggtggaagcctttgatatctatgggacaatgccaccgggaattgccactgtcaccgtcattgtgaaggatatgaacgactaccccccagtgttttccaagcgcatatacaagggaatggttgccccagatgctgttaagggaacaccgatcaccactgtgtatgcagaggatgctgatcctccgggtttacccgcaagtcgagtccggtaccgggtcgacgatgtgcagtttccctaccccgctagcatcttcgaggttgaggaagatagcggccgtgtcattacaagagtgaatcttaatgaggaacctacaaccattttcaagctcgtggtggtggccttcgacgatggagagccagtgatgtcaagctctgccacagtcaaaatcttggtgctacatcccggtgagatcccccgattcactcaggaagagtatcggcctcccccagtctcggagctcgcaacaaaaggcaccatggtgggcgtcatcagcgcagctgccataaaccaaagtatcgtctatagcatcgtgtctggcaacgaagaggacacatttggcatcaataacatcactggagtcatctatgttaacggccctctggactatgagaccaggacctcctatgtgcttcgggtgcaagccgactcccttgaagttgtgctggcaaacttgagagtgccctcgaaaagcaatacagccaaggtgtatatagagatacaagacgaaaataaccacccgcctgtattccagaaaaagttctacatcgggggtgtgtcagaagacgccagaatgtttacctccgtactgcgggttaaggcaaccgacaaggataccgggaactactccgtcatggcttatcgattaataattccccctattaaagaaggtaaggaggggtttgtcgtggagacgtataccggtcttatcaaaaccgctatgctgtttcataatatgcgacgctcttattttaaatttcaagtgattgccactgacgattatgggaaagggctgagcggaaaagcagatgttttggtatctgtcgttaaccaacttgatatgcaggtcattgtatccaacgtaccccctacgctagtggagaaaaagatcgaagacttgacagagatcctcgacagatacgtgcaggagcagatccctggagcaaaggttgtggtggagagcatcggggcaagaaggcacggagatgccttttcgttggaagactacaccaaatgtgacttaaccgtctacgcaatcgatccacaaaccaacagagctattgatcggaatgaactgtttaaatttttggatgggaaactccttgatatcaacaaagactttcagccttactatggagaaggcggtcggattcttgagatccggacgccagaagctgtgacttctatcaaaaagagaggcgaaagcctcggttacactgagggcgctttgctggctctggcctttattatcatcctgtgctgtatccctgccatcctcgtggtgctggtgtcctatcgtcagtttaaagtgcgccaagcagagtgcacaaagaccgctcgtatccaggccgcattgcccgcagctaaacctgccgttcctgcacctgccccagtggctgccccacctccacctccacctccccctcccggagctcacttgtacgaagaacttggggactcaagcatgcataaaaactatccctggagccttgagctgatcctggcacggaatatggataagattataacggtgatgtcgatgggaatgaagtgtttgaatatgggggtggccgtagattgttatcatcagctcgatcgcaggaatatggtgcggtggctggtgaagctgcggaaaaacatgcgcagaaaaagaaagagccaacgcaagctgaagaaccagagactgaagctcgaatctctcgttcgccgtaagaaatag

SEQ ID NO: 237371 - DNA, 990 bp, synthetic construct
  misc_feature 1..990: note = Description of Artificial Sequence: Synthetic coding sequence
  source 1..990: mol_type = other DNA
atgtttcgccagttctatctgtggacgtgtctggcaagtggcattatccttggctccctctttgagatctgcctggggcaatacgacgacgattgcaagctggcaagaggcggtcccccagccaccatagtagccattgatgaggaaagccggaacggaaccatccttgtcgacaacatgttaatcaaagggaccgccggtgggccagaccccacaatcgagctttcgctcaaggataatgtggactattgggtgcttatggaccccgtgaaacaaatgctcttcctcaactcaacaggccgagttcttgaccgagatccaccgatgaatattcattctatcgtcgtgcaagtgcagtgcataaataagaaagttggcaccatcatctaccacgaggtaagaatcgtggtgagagaccgtaatgataactcccctacattcaaacatgagtcctactacgccacggtgaacgaactgaccccggtagggacgaccatctttaccggttttagcggcgacaatggagcaactgacatcgatgatggccctaatggccagatagagtacgtaattcagtacaatccagatgaccctacaagcaatgatactttcgagattcccctgatgctcacaggaaatatcgtattgaggaaacgtctgaactacgaggacaagacaagatacttcgtgattattcaggctaatgatcgcgctcagaatttaaacgagcgtaggactacaactaccaccctcaccgtcgacgtgctggatggtgatgacttggggccaatgttcctgccatgtgtgctggttccaaatactagagattgccggccactcacttaccaggctgctattccagagttacggacaccagacttaggatcgctgtgctcgggaactaattcgtggtgccaaggccgttctggcgttcattggtcttccccagcttggcgatgcctgtttccccgtcgcttgcatcagatgtag

SEQ ID NO: 237372 - DNA, 5045 bp, synthetic construct
  misc_feature 1..5045: note = Description of Artificial Sequence: Synthetic coding sequence
  source 1..5045: mol_type = other DNA
atgtttagacaattctacctttggacatgcctcgcctctggaattattctagggtctttatttgaaatttgtctgggccagtacgatgacggatggcggtatatgtactgcaagttggctcggggtgggccaccagctaccatagtggccatagacgaggagagcaggaacggaacgatcctggtcgacaacatgctcattaagggcacagccggaggtcctgatccaacaatagagctatccctgaaggataacgtcgattattgggttctgatggaccctgtcaaacagatgctgttcctgaactccacgggacgcgtactcgatagggacccgcctatgaacatacactcgattgtggtccaagtgcagtgcatcaacaagaaggtgggaaccattatataccacgaagtgaggatcgtggtccgcgacagaaatgataacagccccacctttaagcacgagtcatattatgcgacggttaacgaactgacacctgtgggcactacaattttcacaggtttctctggggataatggagcgacagacattgatgacggcccaaatggccagatcgagtacgtgatccagtacaatcccgacgatcctaccagtaatgatacatttgaaattccgcttatgctgaccggtaacatagtcctacgcaagcgcctcaactacgaagataaaacccgctattttgtgattatacaggcaaacgacagggcgcaaaacttgaacgaaaggaggacgaccacgacgactttaacagtggatgtgctcgacggagatgacctcggacctatgttcttgccttgcgtcctggttccaaatacccgcgattgcaggcctttaacgtatcaggcagcaattccagaactcaggactcctgaggagctgaatcctattattgtgacaccccctattcaggcgattgaccaggatagaaatattcaaccaccgagcgaccgacccggaatactatatagcatcctagtgggtacaccagaagattatcctcgtttctttcatatgcatcccagaacagcagagttgtccctgctagagccagtgaaccgtgactttcaccagaaatttgacctggtgataaaagccgaacaggacaatggtcatccactgccagccttcgctggcttgcacattgagatcctcgacgagaacaatcagagcccctatttcactatgccgtcgtatcagggttacatactagagtccgcccctgtaggggcaactatttctgattctctgaaccttacttctcctctgcgaattgttgcactggataaggacatcgaagatactaaggatcccgaacttcacctattcttaaatgattacactagcgtcttcactgttacacaaaccggtatcacccggtacctcactctcctgcagccggtcgatcgggaagaacagcagacctacactttctccatcacagccttcgatggggttcaggaatctgagccagtcatagtcaacatccaagtgatggatgcaaacgacaatacccctactttccctgaaattagttacgatgtgtacgtatatactgacatgcgccctggggacagcgtgattcagttaacggccgtggatgctgacgaaggatcaaacggagaaatcacatacgaaattttggtcggcgctcaaggggactttattattaataaaacaaccggcctgatcactattgcccctggcgtggagatgatcgtaggcaggacgtacgctttgacagtgcaggcggctgataacgcccctccagccgaacggcgtaacagcatctgcacagtgtacattgaagtgttgccaccaaacaaccagtctccacctaggtttccacaactgatgtactcccttgaaatctcagaggccatgagagtgggggctgtgctcctcaacctgcaggcaaccgatcgagagggcgattctattacctacgcaattgaaaacggggatccacaaagggtgtttaacctgtcagagactacgggcattctgacccttggcaaagccttagatcgcgagagcaccgacagatatattctgatcatcactgccagtgatggcaggccggatgggacgtctacagcaaccgtgaatatagtggtaaccgacgtgaatgataatgccccagtcttcgacccctacctcccaagaaacctgagcgtggttgaggaagaagcaaacgccttcgtggggcaggtcaaagctacagatcccgacgctggaataaacggccaggttcactattctctcggtaattttaacaacttgtttagaatcacttctaatggcagcatttacactgctgtgaagctcaaccgtgaagttcgggattattatgaactagtagtcgtagctactgatggcgctgtccaccccagacactccactctcacgctggcaatcaaagttctcgatattgacgataactctcccgtatttaccaacagcacgtacaccgtcctggtcgaagaaaatctaccggctggcactacaattctgcagattgaagccaaagatgtggatctgggcgcaaatgtcagttaccgcatcagaagtcccgaggtgaagcacttctttgccctccatccgtttaccggtgagctgtccctgctgcggtccctggattatgaggcattcccggatcaagaagcttctataacgttcctggtagaggctttcgacatttacggcacgatgccccctggaatcgccaccgtgacagtaattgtgaaagacatgaacgactacccccctgtgttctctaaacggatttacaaagggatggtagcgcctgatgcagttaagggtacccctataaccacggtgtatgcagaggacgccgatccgcctggattacctgccagcagggtaaggtatcgggtggacgacgtgcaattcccctaccccgcttctatttttgaagtcgaagaggattccggcagagtgattacacgtgttaatttgaatgaggagccaacgaccatttttaaactggtcgtcgtcgcgttcgacgatggagagcctgtcatgagttcctccgcaactgttaaaatcctggtgctccatcctggcgagatcccccgattcacgcaggaggaatataggcccccaccggtatcagaactggctaccaagggaaccatggtcggtgtgatctctgccgcagctataaatcagagtatcgtgtactcgattgtgtccggcaatgaagaagatacgttcgggattaacaacattacaggtgtcatatacgtcaacgggccacttgattacgagaccagaacctcatacgtgctaagggtgcaggccgactcccttgaggtagttttggctaacctgcgggtgccctctaaaagcaatactgctaaggtctacatcgagattcaggatgagaataaccacccccctgttttccaaaaaaaattttatatcgggggagtctcagaggacgccagaatgtttactagcgttttgagggtgaaagccacagataaagacacaggcaattattcggttatggcttatagactgataattccaccgataaaggaaggaaaggaggggttcgttgtcgagacttacacaggtctcattaagacagccatgctattccataatatgagacggtcatacttcaagtttcaggtgatcgccacagacgactacggcaaggggctaagtggtaaagctgacgtcctggttagcgtggtgaatcagctcgacatgcaggttatcgtctctaatgtgccaccaacactcgttgagaagaagatagaggacttgaccgagatactggataggtacgtgcaggagcagatccctggtgcgaaggtggttgtggaaagcattggcgctaggcggcatggtgatgcctttagtctcgaggactatacgaagtgtgatctgacagtgtatgcaattgacccacagactaaccgcgctatagacaggaacgaattattcaagtttcttgatggaaagctgttggacatcaacaaggactttcaaccctactacggagaggggggtagaatacttgaaatacggaccccagaggcagttacctcaatcaagaagagaggggagagcctagggtacaccgagggtgcgttactggccttagcattcataattatcctgtgttgcatccctgccattctcgttgtgcttgtaagctataggcaacgacaggccgaatgcaccaagactgcgagaattcaggcagccctgcctgctgcgaagcctgcggtgcccgctcctgctccagtcgctgcacctcccccacctccgcctcccccaccaggagcacacctttacgaggaactgggagactccagcatcctctattacaggtacgaaatgcctcaatacggctctagacgccgacttctcccacctgcaggacaggaagagtacggggaagtcgtgggggaagccgaggaagagtacgaggaggaagagtgggcaaggaaacgtatgatcaagctcgtagtggatagggagtatgagacatcctcgacaggcgaggattccgccccagaatgccagagaaatcggctgcaccatccctctatccatagtaatatcaacgggaacatttacatagcacaaaatggttcagtcgtacgcactcggagggcatgtctaactgacaacctcaaagttgcctcccctgtgcggctgggcggtccttttaaaaagctggacaagctggctgtgactcatgaagagaacgtcccactgaacactctctccaaagggccttttagtacagagaaaatgaacgctcggccaacactggtaaccttcgcaccatgccctgtcggcactgacaacacagctgtcaagcccctgcgaaatcggttgaaaagcacagtagagcaggaatcaatgatcgatagcaagaacatcaaggaggccctagagtttcattctgaccacacacagtctgatgacgaagaattatggatgggaccctggaacaatctgcatatacccatgaccaagctgta

SEQ ID NO: 237373 - DNA, 5888 bp, synthetic construct
  misc_feature 1..5888: note = Description of Artificial Sequence: Synthetic coding sequence
  source 1..5888: mol_type = other DNA
atgttccgccaattttatctctggacgtgcctggcgtccggcatcatccttggatctttatttgagatttgtctcggacaatatgatgacgcatacagctacgaagactgcaagctcgctcggggaggaccaccagccaccattgtcgccattgatgaggagtcccgcaacggcacgatcctggtcgacaacatgctgatcaagggaacggctggaggccctgaccctactatcgagctgagtctcaaagataatgtggactactgggtcctgatggatccagtgaagcagatgttgttcctgaactctaccgggcgagtgttggatagagatcccccaatgaatattcattcaatagtggtccaagttcagtgcataaataagaaagtaggaactattatttatcatgaggtccggatcgttgtacgcgatagaaatgataattcgcccacattcaaacacgaaagctactacgccactgtcaatgagttgacccccgtgggtactactatttttacggggttcagcggcgacaacggagcgaccgatatcgatgatggtcccaatggccagattgaatacgtcattcagtataaccccgacgaccccaccagcaatgacaccttcgagatcccgctaatgcttactgggaacatcgttttgcgcaaacggctgaactacgaagacaaaaccaggtacttcgtaattattcaggccaatgaccgagctcagaatcttaacgagagacgtacaacgactactacactgaccgtcgacgtcctcgacggcgatgatctcggcccaatgtttttgccctgcgtgctcgtcccgaatacccgcgattgccgaccgctgacatatcaggccgcaatccctgaactcagaacacctgaagagctgaatcccattattgtcacgcccccaattcaagctatagaccaggaccgaaacatccagccgccatccgaccggcctggcatcctttactctatactcgtaggcacacctgaggattaccccaggttctttcacatgcatcccagaactgcagaactcagccttttagaacctgtgaaccgggactttcatcagaaatttgatttagtgatcaaggccgaacaagataacgggcaccccttaccagcttttgcagggctccacattgagatcctagatgagaacaatcagagcccatacttcacaatgccgagctaccaggggtatatcctggagtctgccccagtgggtgccaccatatctgactcccttaatcttactagccctctccgcatcgtggcgctcgacaaagatatcgaggatacgaaagaccccgaactacacttgttcctaaacgactacaccagcgtttttacggtgacccaaaccggtattacgaggtacctgactctcttgcagccagtggatcgcgaggagcaacagacctataccttcagcattacagcgtttgatggcgtacaggagagcgaacctgtgatagtgaacattcaggtgatggacgccaatgataatactccaacattccccgagatcagctacgatgtatacgtgtataccgacatgagacctggagatagtgtgattcagctcacagctgtagacgccgacgaaggcagtaatggagagatcacctatgagatcctagtcggcgctcagggcgatttcattatcaacaaaacaaccgggttgatcacgatcgcacctggcgttgagatgatcgtcggaaggacttatgccctcactgttcaggccgctgataatgcccctcctgcagagcgccgaaactccatctgtactgtctatattgaggttctcccaccaaataaccagtcacctcctaggtttccccagttaatgtattccctggaaattagcgaagctatgcgggtgggagccgtgctgcttaatctgcaagccactgaccgtgagggagacagcatcacttacgcaatagagaacggcgaccctcagagggtcttcaacctgtctgaaacgaccggcattctgaccctgggtaaggcacttgatagagagtccactgataggtatattctgatcatcactgcaagcgatgggcgtcctgatggaactagcaccgccactgttaatattgtggtgactgacgtcaacgacaacgccccagtctttgacccatacctgccacgcaatctgtccgtggtagaagaagaggccaacgcattcgtcggtcaggtaaaggccacagaccctgacgccggaataaacggacaggtgcactactctctgggcaatttcaataacttatttcgtatcacttccaacggatccatctacacagcagtgaagttgaatcgcgaggtcagggattattatgagctggttgttgtggcaacagacggcgcagtccatcccaggcactccacactgacactggcgattaaagtgctggacatcgatgacaatagccccgtgtttactaacagtacctacacagtgctggtggaggaaaatcttccagccggaacgacgatccttcagatagaggcgaaggatgttgacctgggggctaatgtgagctacagaatccggtcacctgaagtgaagcactttttcgcactgcacccctttaccggggagctctcactcctgcgttcccttgattatgaagctttccctgaccaagaagcaagcattacattcctcgtagaggccttcgacatctatggaaccatgccgcctggaatagccacagtcacagtgatagtcaaagatatgaatgactatccaccagtttttagcaagcgaatctataaagggatggttgctcccgacgctgttaagggcacccctataaccacagtgtacgccgaagatgctgaccctcccggattgccagcaagcagggttcgctacagagtggacgatgtccagttcccttaccctgcctctatttttgaggtcgaggaagactccggcagagtaatcacccgggtgaatttgaacgaggaacctaccaccattttcaagctggtagtggtcgcatttgacgacggagaacctgtaatgagctcaagcgctacggtgaaaatcctcgtgcttcatcccggagaaatccctaggtttacacaggaggagtaccgtccgcctcctgtctcggaattagcaaccaagggtaccatggtcggagtgattagcgcagctgcgatcaaccagagcatagtgtactctatagttagcggcaacgaagaggacacctttgggataaataatataaccggtgttatctatgtaaatggcccactggattatgaaacacgaacaagttacgttcttagagtgcaagcagatagcttagaggtggtgctagccaacctcagggtgccctcaaagagtaataccgctaaagtgtacattgagattcaggacgaaaacaaccacccccctgttttccagaaaaagttttacatcggcggtgtgtcagaggacgccagaatgtttacatctgtgctaagagtgaaggctaccgataaagacacaggcaactattctgtaatggcttataggttgatcattccaccaatcaaagaagggaaggaaggtttcgtcgtcgagacttatacaggcttaattaagacagccatgctctttcacaacatgcggcgttcctattttaaattccaggtaattgccaccgacgattacgggaaaggccttagtggaaaggctgacgttctggtgagtgttgttaaccagctggacatgcaagtcatcgtgtctaatgtgcctcctacgctcgtggagaaaaaaatagaggatctgacggagattctggacagatatgtgcaggaacagatccctggggctaaggtcgtcgtggagtctattggagcaagacgccatggggacgccttctccctggaagattacacaaaatgtgacctcaccgtatatgccattgacccacaaaccaacagggccattgacaggaatgaactgttcaaattcctcgacgggaagctgctggacataaataaggattttcaaccttactatggggagggcggtcggatccttgagatcaggaccccagaagccgtcacttctattaaaaaacggggtgagtccctggggtatacggaaggtgcgctactggctttggcattcattatcattctttgctgtatccctgctatcctggtggtcctcgttagctatcgccatttcaagcgccgacaggctgaatgcaccaagaccgctcgcattcaggcagcgttacccgctgcaaaacctgccgtgcctgccccagctccagtggcggctcctcccccacccccaccacctcccccaggagctcacctgtacgaggaactaggcgattcgagtatgaaaggcctcttccttctttatcatttccagcagtcaagaggaaacaactctgtgtccgaagaccggaagcatcagcaggtcgtcatgccatttagctccaacacaattgaagcacacaagtccgcccacgtggacggatctctgaagtcgaataagctgaagtccgcgaggaaatttacttttctctctgacgaggacgacctgtcggcccacaaccccctgtacaaggagaacatcagtcaggtgtctaccaactcagacatcagtcaacgaacggacttcgtggaccctttttcacccaaaatccaggctaaatccaaatccctgcggggtccgagggagaaaattcagcggctgtggtcccagagtgtaagccttcctagacggttgatgagaaaggttcccaaccgacccgaaataattgatctccagcagtggcaggggacccgtcagaaagccgagaacgagaacactgggatttgtaccaacaagaggggcagcagcaatccactgctaactaccgaagaggccaacctgactgagaaggaagaaattcgtcagggggaaactcttatgattgaaggaaccgaacagctgaagtccctgtcttctgatagttcattttgtttcccacgccctcacttcagctttagcacattgcctaccgtaagccggacggtggagctgaagtctgaaccaaatgtcatctcttcacctgccgagtgcagtctcgagctgagcccgtcccgcccatgcgtgttacatagtagcctgagcagacgggagacacccatatgtatgttacctatcgagaccgagaggaacattttcgagaatttcgcgcatcctcctaacattagcccgtctgcgtgcccactgccacctccccctcccatttctccaccgtctcctcccccagctccagcccctttagctccaccccctgacatttccccattctcattattttgcccccctccatctcccccttccatcccattgcctctgcctccgcctacattcttcccactttctgtgagtacatctggcccacccactccacctctgctgcctcctttccccacgccactccctccgccaccaccttcgattccctgtcctccccctccttccgcctccttcctttcaacagaatgtgtctgcatcacgggagtgaagtgcactacaaacctcatgcccgctgagaaaattaaaagcagcatgactcagctcagcacgaccaccgtctgtaaaaccgacccccagagagagcccaagggcatcctgagacatgtgaagaatctggccgaactggagaagtcggttgcaaatatgtactcccaaattgagaagaattacctgaggactaacgtgagtgagctgcagaccatgtgtcccagtgaggtcactaacatggagatcacgtcagaacaaaataaggggagcctaaataatattgttgaaggaactgaaaagcagagccactctcaaagcacttccctcta

SEQ ID NO: 237374 - DNA, 5660 bp, synthetic construct
  misc_feature 1..5660: note = Description of Artificial Sequence: Synthetic coding sequence
  source 1..5660: mol_type = other DNA
atgtttcgacagttttatctgtggacatgcctggcctcaggaataatcctcggctcgctattcgagatttgtcttggtcagtacgatgatgactgcaaactggccaggggaggaccaccagccactattgtggcaattgacgaagaaagccgaaatggcaccatccttgtggataatatgctgattaagggcaccgccggtggccctgaccccaccattgaactatcactaaaagacaacgtggactactgggtattgatggaccctgtgaagcagatgctgttcctgaatagcactggcagagtgcttgatcgtgacccacctatgaacatacattccatcgtagttcaagttcagtgcataaacaagaaagttgggaccatcatatatcacgaagtccgaatcgtggtgcgagaccgtaatgataactcgcccacctttaaacacgaaagctactacgcaacagtaaacgagctgacccctgttggcacaaccatatttacaggattcagtggagataatggcgctacggatatcgacgatgggccaaatggacagatagaatatgtaatccaatacaatccggacgaccccaccagcaatgacacctttgaaatccctctaatgttgaccggtaacatcgttctacgtaaacgacttaattatgaggacaagacacggtattttgttataattcaggcaaatgatagagcccagaacctcaacgaaagacgaacaacaactacgacactcactgtggacgttctggacggtgatgacctgggacccatgtttctgccctgcgtcctggtcccaaatacccgcgattgcagaccacttacttaccaagccgcaattcctgagttgagaacgccagaggaactcaaccctatcatcgtaactcctccaattcaagccattgatcaagaccgaaacatccaaccccctagtgatagacctgggattctgtactcgattctggtagggacacccgaagattatcctaggtttttccacatgcatcctcggactgctgagctgtcactcctcgaaccagtgaatagggactttcatcagaagtttgacctcgtaattaaagcagagcaagacaatggacacccactgcccgcattcgccggactccacatagaaattttggacgagaacaatcagagtccatacttcacgatgcccagctatcaagggtatatcctggaatccgctcctgtcggagccacgataagtgatagccttaacctcactagccctctgcgtatcgtcgcacttgataaagatatcgaagatacaaaagatcccgagctccacctgtttctgaatgactatacctcagtcttcaccgtcacccagacagggatcacccgctatctcacactcctgcagccagtggaccgagaggagcagcagacctacaccttcagcattacagcattcgacggagtacaagaatccgagcccgtcattgtgaacattcaggtgatggatgccaacgacaacactccaacgttccccgagatcagttacgacgtgtacgtgtacaccgatatgcgacctggagatagcgtgatccaactcaccgccgtcgatgctgatgaaggtagcaatggggaaataacatatgaaatcctggtcggcgcacagggtgactttatcattaacaaaacaacagggctcataacgattgcgcctggtgtggagatgatagttgggaggacttacgcactaacagtgcaggcagccgacaacgcccctcctgccgaacgaagcacaggcatacttaccctgggaaaagccctggatagagagagtacagacaggtacattctgatcattactgcatctgacggacgacccgatggaacatctactgcaaccgtgaacattgtagtgactgatgtgaatgacaacgcgccagtgtttgatccatacctacctcgtaacctctctgtagtggaggaagaggccaacgcatttgtgggccaggtgaaggctaccgatcccgacgccggaatcaacggccaggtacattattctttagggaactttaataacctgtttcggattacatccaatgggagcatttacaccgccgtgaagttgaatcgcgaagtccgggactattatgaattggtcgtggtggctaccgatggagcagtgcatcctcgacactcaacacttacactagctattaaggtcctcgatattgacgacaacagtcctgtgttcacaaactccacctacaccgtgctcgtggaggaaaacctgccagccggtactacgattttgcagatcgaggctaaggatgtcgacctgggggctaatgtgtcttataggatccggtcccctgaagtgaaacacttctttgctctgcaccccttcacaggggagctctccctgctgcgctccctcgactacgaagcctttccagaccaggaggcaagcattacctttctggtggaggcctttgacatctatgggacaatgcccccaggcatcgctaccgtcacggtaatcgtcaaggacatgaatgattaccctcccgtgttctcaaaacgaatctataaagggatggttgctcctgatgcagttaaaggcactcccataaccactgtctacgccgaggacgctgaccctcctgggctgcccgctagcagagtgcgctatcgcgtggatgacgtgcagttcccctaccccgcatcaatatttgaagtggaggaggattccgggagggtaatcacccgcgtgaatctcaacgaggagccaacaactatttttaagctggtggtcgttgctttcgatgacggagagccagtaatgtcctcctccgctaccgttaagatcctggtgttgcacccaggcgagattccaaggttcacccaggaagagtatcgcccaccacccgtatcggagctggccacaaaaggcactatggtgggggttatctcagctgccgcaattaatcagtcaattgtctactccatcgtctccggaaatgaggaggacacctttgggataaacaatatcacaggcgtgatctacgtcaatggcccactggattacgagactaggacttcttacgtactgagggtgcaggctgattcccttgaagtggtgttagccaacctgagggttccctccaagtcaaataccgccaaagtatacatcgagatccaggacgaaaacaatcatcccccagtgtttcagaagaagttctatataggaggtgtctctgaagatgcccgaatgttcaccagcgtcctccgcgttaaggccaccgataaggataccgggaattatagtgtcatggcctatcgcttgattatccctcctatcaaggaggggaaagagggattcgttgtggagacctatactggcctgattaaaacagccatgctcttccacaatatgcggcgtagttattttaaatttcaagttatcgctactgatgactacgggaaggggctgtcaggcaaggccgacgtgttggtgtctgtggtcaatcagctagacatgcaggttatcgtatcaaacgtccctcccaccctggttgagaaaaagattgaggatctgaccgagatcctcgaccgctacgtccaggaacagattcctggggcaaaagtggttgtggagtccatcggagctcgtcggcatggggacgcctttagcttggaggattacactaaatgtgatcttaccgtgtatgcaatagacccgcagaccaaccgggctattgacagaaatgagctcttcaagtttctcgacggcaaactactggacatcaataaggactttcagccttactacggtgagggaggcaggattttggagataagaactcctgaagcagtaacgtccataaaaaagagaggtgaaagcctggggtatactgaaggcgctcttctggcacttgcgtttattataatactgtgctgcattcccgcaatactggtcgtcctggtgtcctaccgccatttcaaaaggagacaggccgagtgtacaaaaacagctcgaattcaggctgctctgccggctgcgaagccagcggttcccgcacccgctcctgtggctgcaccgcctccacccccaccacctccccctggcgcacacctctacgaggaattaggagatagttcaatgaaggggctgttcctgctgtaccatttccagcaatctagaggcaacaacagcgtgagcgaggatcggaagcaccagcaggtggtgatgcccttttccagcaataccattgaggctcacaagagcgcccacgtagatgggtccctgaaaagcaacaagctcaagtctgccaggaagtttactttcctgtctgacgaggacgacctgagcgcacataacccgctgtataaggaaaatatatctcaagttagtacgaattcagatatctcacaaagaacagacttcgtcgatccattttctcccaaaatccaagctaaaagtaaatcactgcgcggaccaagagaaaagatccaaaggttgtggagccaaagtgtgtctttgccacgtcgcctcatgcggaaggtccccaataggccagaaattatcgacctgcagcagtggcaaggcacaagacagaaagccgagaatgaaaatacgggtatctgtacaaataaaagggggagttctaatcctctgctgaccactgaagaggcaaatttgaccgaaaaggaggaaatccgacagggagagacactgatgattgaggggacggagcagctcaagagcctgagctctgattcatcattctgttttccgaggccgcacttctccttctctacgctcccgacagtgtcacggactgtggaactgaaatctgagcccaacgtcatctcttcacccgctgagtgtagccttgagttatctccgagtcggccatgcgttctgcattcatccctgtccagacgcgagactccaatctgcatgttgcctatagagaccgaacggaacatcttcgagaacttcgcacatccaccgaatatcagcccctccgcctgccccttgcctcccccaccacctatttcccccccatccccccctcccgcacctgcgcctttagcccctccaccagatatctccccattcagcttattctgcccacccccttctccccctagcataccgcttcccttgcccccacccacattcttccctcttagcgtttcaaccagtgggccacccaccccgccacttctgccacccttccctaccccattgccgccaccaccaccaagtattccatgccccccaccaccatctgccagctttctgagtaccgaatgcgtttgcattacaggagtgaaatgtaccacaaacctcatgcctgctgaaaaaatcaagagcagtatgacacagttgtctacaaccaccgtctgtaagacagatccccagagagaacccaagggcatcctgagacatgtcaaaaatctagcggaacttgaaaagtcagtggctaacatgtacagccagatcgaaaaaaattatctcaggacaaacgtgtcagaactgcagaccatgtgccccagtgaagttactaatatggaaatcacctccgagcagaacaagggcagtctcaacaacatagtggaggggacagaaaagcagtctcattcccagagtacgtctctata

SEQ ID NO: 237375 - DNA, 1965 bp, synthetic construct
  misc_feature 1..1965: note = Description of Artificial Sequence: Synthetic coding sequence
  source 1..1965: mol_type = other DNA
atgtttcgacagttttacctgtggacttgcctagcctcaggtattattctaggaagcctctttgaaatttgtttgggtcagtatgacgacgattgcaagttggcccgtggcggaccaccagcgacaatcgtggcgatcgacgaagagtccaggaatggcactattctcgtggacaatatgctgatcaagggaacagccggaggacctgatcctacgatcgaactgtcactcaaagacaacgtggactactgggtgcttatggatccagttaaacaaatgctattcctgaactccactgggagggtgctggaccgcgatcctcccatgaacattcattcaattgttgtgcaggtacagtgtatcaataaaaaagttgggacgatcatttatcacgaggtccggatagtggtgagggacaggaatgacaacagcccaacttttaaacacgaaagctactacgctactgtgaatgagctgacacccgtcgggactacaatattcacggggttttctggtgacaatggcgcaaccgatatcgatgatgggcctaacgggcagattgaatatgttatccagtataatccagacgatccgaccagcaacgacacatttgagatcccactgatgctcacgggcaacatcgtactccgcaaacggctgaattatgaagataaaacccgctacttcgtgattatccaagccaatgatagggctcagaatctcaatgagcgcagaacaactaccactactctgaccgttgacgttttagatggagatgatttgggccctatgtttttaccctgtgttcttgtgcccaataccagagattgtaggccactcacttaccaggccgctatcccagagcttcgcacccccgaagagctgaatccaattatcgttaccccaccgatccaggccatcgaccaggatcggaacatccaaccccctagcgaccgccctggtatactgtattccattctcgtgggaacacccgaggactatcccaggtttttccacatgcatcctcgcacagcagagttgtccctgctagaacccgtgaatagagattttcaccagaaattcgacctagtcattaaggccgagcaggacaacggccaccctctgcctgcattcgccggactccacatcgaaattctagatgaaaacaaccaaagcccgtactttaccatgcccagctaccaggggtacatcttggaatcagccccagttggggcaaccatcagtgattccctgaatttaaccagcccattgcgtatcgtcgccttggacaaggatatagaagacaccaaggacccagagctccacctcttcctaaatgattatacatccgtgttcactgtgacccagacaggaatcactaggtatttgaccctgctccagcccgtcgatcgtgaggaacaacaaacctatactttctccattacagcatttgacggcgttcaagagtccgagccggtcattgttaatatccaagtcatggacgccaatgataacacgcctaccttccccgagatctcatatgatgtgtacgtgtatacagatatgaggcccggagatagtgtgattcagctaactgcggtggacgcggatgaggggagcaacggtgaaattacctatgaaattttggttggcgctcagggagattttattattaacaaaactactggccttattacaattgcgcctggagtcgagatgatcgttggcaggacctatgctttgacggtgcaggccgctgacaacgccccacctgccgagcgtcggaactcgatttgcacggtctacatcgaggtactgcctccaaacaaccagagcccaccaagatttccacagcttatgtattctcttgagattagcgaggctatgcgagtgggggctgtgcttctcaacttgcagcacggagactccaatctccgagagagtaccggccagggaaagcactag

SEQ ID NO: 237376 - DNA, 5033 bp, synthetic construct
  misc_feature 1..5033: note = Description of Artificial Sequence: Synthetic coding sequence
  source 1..5033: mol_type = other DNA
atgttcaggcagttttatctgtggacctgtctggctagcggcatcatccttgggtctttattcgaaatttgtctgggacaatatgatgatgactgtaagttggcccgaggcggtcctcccgcaaccatcgtggctatcgacgaggagtcccggaacggaactatcctggtggataacatgttaatcaaagggacggccggtggcccagatcctaccattgagttgtctctcaaagacaatgtcgattattgggtactgatggaccccgtcaaacaaatgctgttcctcaacagcactgggagagtgcttgaccgcgacccccctatgaatattcacagtatagtcgtgcaggtccagtgcattaacaagaaggttggtactatcatttaccatgaggtgagaatagtagtccgggataggaatgacaattccccaactttcaagcacgagagctactatgccaccgttaacgagctgacacccgtgggtactacaattttcaccgggttctccggagacaacggcgctactgatatcgatgatggaccaaacgggcagattgaatacgtcatccagtacaaccccgatgaccccactagcaacgataccttcgaaatcccattgatgttgacgggcaacatagtccttaggaaacgcttaaactacgaggataagacaagatatttcgtcatcatccaagccaatgaccgagcccagaatctcaatgaaagacggactaccaccactaccctcacagtggacgtgctcgacggcgacgatctggggccaatgttcctgccctgcgtgctggtgcctaatacaagagattgcaggcccttgacatatcaagcagccattccggaacttaggacccccgaagagctgaaccccattattgtaacaccccctattcaggccatcgaccaggaccgtaacattcagcctccttccgatagaccgggtatcctgtacagcatactggtcgggacgccggaggactatcctcggttctttcatatgcacccaagaaccgcagaactgtcactcttagaaccagttaatcgcgatttccaccagaagtttgatctggtgatcaaggctgagcaggataatggacaccctctgccagccttcgcgggtctgcatattgagatccttgatgagaataaccagagtccatattttacaatgccatcttaccagggttacatcctcgagagcgcgcctgtcggcgcaaccatttccgattcgctgaatctgacctcccccctgagaattgtggctctggataaggatattgaagatacaaaggacccagaactgcacttgtttctgaatgattacacctcggtattcactgttacccaaactgggataactaggtacctgacattactccaacctgtggacagggaggaacagcagacctataccttttcaattaccgcttttgatggggtgcaggagtcagagccagttattgtcaacattcaggtcatggatgccaacgacaacactcctacctttcccgagatcagctacgacgtttatgtgtatactgacatgcgtccaggagactcagtgattcagctgacggccgttgacgcagacgagggctcaaatggtgagattacctatgaaattctcgtaggagcccaaggagactttatcataaacaaaacaacaggcctgataaccattgccccaggtgtggagatgatcgtagggcgaacctacgcgcttacagtgcaggcagctgataacgctccaccagccgagagacgcaactccatctgcactgtgtatattgaagtcctgccacctaacaaccagagccctccaaggttcccgcagctgatgtatagcttggaaataagcgaagcaatgagagtgggcgcagtactgctcaatctgcaagccacggaccgagagggcgattctataacctatgccatagagaacggcgaccctcagcgcgtgtttaatctatctgaaactaccggtattctgacactcggtaaagccctggatagagagtcgaccgataggtatattctcattatcacagcctccgacggacggcctgatggaactagcactgcaacagtcaatattgtggtcaccgatgttaacgacaatgctcccgtgtttgatccgtatctcccaaggaacttgtctgtggtggaggaggaggcaaatgctttcgtgggacaggtcaaggctaccgaccccgacgccggaatcaacgggcaagttcactatagtctgggaaacttcaacaacctgttccgcattacgagcaatgggagcatctatacggctgtgaagttgaacagggaagttcgggactactacgaactggtcgtggtcgccactgatggggcagtccatcccagacattccacactgacacttgctatcaaggtgctggatattgatgataacagcccagtgtttaccaatagtacctataccgtgctggtggaggagaacctcccagcaggcaccaccattttacagattgaggcaaaagacgtggatcttggtgcaaacgtttcttaccgaatccgctcgccagaagtcaaacatttctttgccctccatccatttactggcgaacttagcctcttacgcagtctggattatgaagcattccccgaccaggaggctagcataacctttctcgtggaagcgtttgacatttacggtacgatgcctccgggaatcgcaacagtgaccgtgatcgtgaaggacatgaacgattatccgcctgtgttctccaaacggatttacaaggggatggtcgctcctgatgccgtgaaggggacgcccatcacaacagtgtatgctgaggacgcagatccccctgggctgcccgcttctcgcgtgagatacagagtggacgatgttcaattcccataccccgcatcaatcttcgaggttgaggaggatagcggacgagttatcactcgggtgaacttaaacgaagagccaactaccatcttcaaactggtggtcgtagcatttgatgacggggagcccgtcatgtcttctagcgccaccgtgaaaatattggtgttgcaccctggggagatccctaggtttacacaggaagagtaccgtccccctccagtgagcgagctggccactaaggggaccatggtgggagtaatttctgcggctgctatcaaccagtctattgtctactcgattgtgtccgggaacgaagaagacaccttcggaattaacaatataactggcgttatttatgtgaacgggcctctcgactatgaaacaaggacctcctatgtgctgcgggttcaggccgactccctggaggtagtgctcgcaaatttacgcgtaccgtccaaatccaataccgccaaagtctatatcgaaatccaggatgagaacaatcaccctcctgtgtttcaaaagaagttttacattgggggtgtgtcagaagatgctcggatgttcacctcagtgctgcgcgtaaaagctactgacaaagatactggaaattactcagtgatggcctatcggcttattatcccccctatcaaagagggtaaggaggggttcgtggtagaaacatacactgggctaataaagacggctatgctctttcataatatgaggcgcagctactttaagttccaggtgatagccactgacgactacggcaagggactgagcggaaaggccgacgtcctcgtctctgtggtgaaccagctcgatatgcaggtcattgtctctaatgtgcccccaaccctagtggagaaaaagattgaggacctgactgagatcctggaccgatatgtgcaggaacaaatcccaggcgcaaaggtggtggtagagtctatcggcgctcggaggcatggcgatgctttcagcctggaggattatacgaagtgtgatttgaccgtgtatgccatcgatcctcaaacaaaccgcgcaatcgatcggaatgagctgtttaagttcctcgatggcaagctgctcgacattaacaaggattttcagccatactatggagagggcggacgcattctggagataaggacacctgaggcagtgacgagtatcaagaagcgaggagagagcctcggctatactgaaggggctcttctagccttagcatttattataattctgtgttgcatccctgccatcctggtggtcctggtgagctataggcactttaaaaggcgtcaggcggaatgcaccaagacagccaggattcaggctgccttgcctgcagcgaaaccggctgtgccagccccagctcctgtggccgctccccctcctccgccacctccgccacccggagcccatctgtatgaggagctgggggactccagcatttataggtacgaaatgccccagtatgggtccagaagacgtctgctacccccagccggacaggaggagtacggagaggtggtgggcgaggctgaagaggagtacgaggaagaggaatgggctagaaaaaggatgattaaactggtcgtggaccgcgaatatgaaacttcctccaccggagaggacagcgcgcctgagtgccaaagaaaccggctgcatcatccatccattcattccaacatcaatggtaatatttatattgcccagaatggctccgttgtgagaactcgtagggcctgccttaccgacaacttaaaggtcgcttccccagtgcgcctgggagggccttttaaaaagctggataaactggccgtgacccacgaggagaatgtccctctgaatacactcagcaagggaccattcagtaccgagaaaatgaatgctcgccctaccctggtgacttttgctccttgcccggttggaaccgataatactgcagtgaagcctctgaggaatcgcttaaaatccacagtggaacaggaatctatgatagacagtaaaaatattaaagaggcactagagttccactcagaccacacccagagcgacgacgaggaattgtggatgggtccttggaataatctccatattccaatgacgaaactgta

SEQ ID NO: 237377 - DNA, 279 bp, synthetic construct
  misc_feature 1..279: note = Description of Artificial Sequence: Synthetic coding sequence
  source 1..279: mol_type = other DNA
atgttccggcagttctatctctggacttgtttagcatctgggattatactgggctctctctttgaaatttgtctcggacagtatgacgatgactgcaaacttgcccgagggggaccccctgctacgatcgttgctatagacgaggagtcccgcaatgggacaattcttgttgacaacatgctgatcaaggggacagctggcggaccagacccgacaattgagctgagccttaaagataatgtcgattattgggtgctcatggatcctgtgaaacaatag

SEQ ID NO: 237378 - DNA, 3453 bp, synthetic construct
  misc_feature 1..3453: note = Description of Artificial Sequence: Synthetic coding sequence
  source 1..3453: mol_type = other DNA
atggctccccctttgcgcccactggcacggctgcggcctcctggaatgctgctgcgggcactgcttcttctgctccttctcagcccactgccaggcgtctggtgctttagtgagttaagtttcgttaaggaacctcaggacgtgacggtgacaagaaaagaccctgtggtgctggattgtcaggcgcacggggaggttcccattaaagtcacgtggctaaagaatggggctaaaatgagtgagaataaaaggatcgaagtgctgagtaatgggagcttgtacatttcagaggtggaaggccgaaggggggagcaatctgacgagggcttctatcagtgtttagctatgaacaagtacggagcaatcctcagccagaaggctcatctagctctttccacaatctctgcttttgaggttcagcccatctctaccgaggttcacgagggtggagtggctcgattcgcctgcaagatctcttcacacccccctgccgtgatcacttgggagttcaacagaaccactctgccaatgactatggatcgtattacagccctgccaacaggggtgctccagatctatgacgtgtcacagcgagacagtggtaattaccgatgtattgcagctaccgtcgcgcaccggaggaagtctatggaggcgagtttgacagtgatacctgcaaaagagtccaagtcattccatactcccacgataattgctgggccacagaacattacgactagcttacatcaaaccgtcgtgcttgagtgcatggccaccggcaaccccaagcccatcatctcctggtctagactcgaccacaagtcaattgatgttttcaacactcgggtgcttggaaatgggaacttaatgatttctgacgttcggcttcagcacgccggtgtctatgtgtgcagagctacaacccctggaacaaggaattttactgtggcaatggcgactctcacagtcctcgccccacccagttttgtggaatggcctgagtcactgacccggccaagggctggaactgcacgcttcgtttgtcaggctgaggggataccaagccctaaaatgagttggcttaagaatggcagaaaaatccacagcaatggccgaatcaagatgtataactcaaagttagttatcaatcagatcatacccgaggacgacgccatctatcagtgcatggccgagaattctcagggtagcattctgtctcgcgctagactcacggtcgtcatgagcgaggatagaccatctgccccttataacgttcatgccgagacgatgagctcgtctgctattctgttagcatgggagcggcctttatacaattccgacaaggtgattgcttacagtgtacattatatgaaggccgagggactgaataacgaggagtaccaagttgtgattggaaacgacactacacattacatcattgatgacttggagcccgcttctaactacaccttttacattgttgcctacatgcccatgggggctagtcagatgagtgatcacgtaacccaaaacacactggaggacgtgcctttaagaccccctgagatttcactgacctcaaggtcccccaccgatatactgatctcgtggctgcccatacctgctaaataccggagaggtcaggtggttctgtacaggctgtctttcaggctgagtacagaaaacagcatccaagttctggaactgccaggcacaacccacgaatacttattggaggggttgaagccagacagcgtgtatttagtccggattaccgcagcaacacgcgtgggtcttggcgaatcatctgtgtggacaagccatcgcacgccaaaggcaacttctgtgaaggctccaaaatcgccagaacttcacctcgaacccctcaactgcacaacaattagcgtgcgatggcagcaagatgtcgaggacacagctgcgatccagggctataaattgtattacaaggaggaaggccagcaagaaaacggacctatttttctcgacaccaaggacctgctgtataccctaagcggtttggaccccaggcgcaaatatcatgttagactgctcgcatacaataacattgatgacggatatcaggccgatcagaccgtgtcaacccccggatgcgtgtctgttcgtgatcggatggtgccgcctcctccacctcctcaccatctgtacgcaaaggctaatacatcctcttctatctttttacattggaggcgtcccgctttcaccgccgcacagatcatcaattatacaataaggtgcaatcctgtaggtctccagaatgcttcactggtgctctacttgcagacatccgagacacatatgcttgtacagggactcgaacccaacaccaaatacgagttcgcagtccgtctgcacgtagatcagctgagttcaccatggtcacccgtagtttaccacagtactctgccagaagctccggctggaccccctgtgggggtcaaagtgacccttatcgaggacgatactgcactcgtgagttggaaaccacctgacggccctgaaaccgtggtgactcgctacacgattttgtacgcgtcacggaaggcctggatagccggagagtggcaggtcctccatcgcgaaggtgcaatcaccatggccctcctggagaatctggttgccggtaatgtgtacatcgtgaaaatcagcgctagtaatgaggtaggcgaaggacctttcagtaactccgtggagttggctgttctgccgaaagagacttccgaaagcaatcagcggcctaagagacttgacagcgctgacgctaaggtttatagcggatattaccaccttgatcaaaaatctatgacggggatagccgtgggagtggggatcgctctgacctgcattcttatctgcgtcctgatactcatctatcgtagcaaagccagaaagagcagcgcgagtaaaaccgctcagaatggcactcagcaactgccacggacctctgcgtcactcgcaagcggcaacgaggttggaaaaaacctagagggggcagttggaaatgaggaatctcttatgcccatgattatgcccaatagctttattgacgccaagggaggtacggatctgattattaactcatatggtccgatcattaagaacaactctaagaagaagtggtttttctttcaggattccaagaagatccaagttgaacagccacagagacgttttacaccggctgtttgcttttaccaaccgggaactacagtattaatctctgatgaggacagtccatcttccccgggacaaacaacatctttttcaaggccttttggtgttgctgcggacacggaacatagcgccaactccgaagggagccacgaaacgggcgatagcggacgattcagccatgaatcaaatgacgaaattcatttgtcatctgtgatcagcacaaccccacctaatctgtag

SEQ ID NO: 237379 - DNA, 1434 bp, synthetic construct
  misc_feature 1..1434: note = Description of Artificial Sequence: Synthetic coding sequence
  source 1..1434: mol_type = other DNA
atgggcaggaccgtcgtcgttctgggcggaggcatctcggggctggctgccagttatcacctatctcgggcaccctgccctcccaaggtggtactagtggagtcatcagaacggttgggaggatggatccgctctgtcaggggccctaatggggctatcttcgagctgggaccccgtgggatccggcctgctggtgccctgggcgctcgaacattattgctagtttcggaactgggtctggatagcgaagtgttgcctgtgaggggagatcaccctgccgctcagaaccggttcctctatgtgggtggtgccctgcacgctttacccaccggcctgaggggcttgctgaggccgagcccgcctttctcaaagccgctgttctgggccggtctgcgggagttaactaagcccagaggtaaggaacctgatgagacggtgcatagcttcgcccagcgacggctgggacctgaggtcgcatctcttgccatggactcactctgtcggggtgtgtttgccggtaattctcgagagctttccatccgcagctgtttccctagcctcttccaggctgagcagactcatcgctcgatcttgttggggctgctgttgggggctggcagaactccacagccagatagcgcacttatcaggcaggctctggctgagaggtggtctcagtggagtctgcggggaggcttagaaatgctcccacaggctctagagactcacctgacgagcagaggggtttcagtactgcgcggacagccagtctgcggactctccctccaggcggagggccgatggaaggtctctttgcgggattcaagccttgaggcggatcacgtaattagtgctatccctgcctccgtactgagtgagttattaccagcggaagctgcccctctggccagggccttatccgccatcaccgccgtgtctgttgccgtggtaaacttgcaataccagggggctcacctaccagtgcaggggtttgggcacctggtgccttcttcagaggatccaggagtgctcggaattgtctatgactccgttgccttccccgagcaagacggctccccccctggactgcgagtgactgtgatgctggggggatcctggttgcagacactggaggccagtggctgcgtcctgtcacaagagctgtttcagcagcgagcccaggaggcagctgcaacacaactcggcttaaaggagatgccatcacactgtttagtacacctgcacaagaattgtatccctcagtatacgttagggcactggcagaagcttgagtctgccaggcaattcctgacagcacacagactgcctctgaccctggcaggcgcatcctacgagggggtcgcggtgaatgattgcatagaatccggtaggcaagcagcggtgagcgtgctcggcacggaacccaattcgtag

SEQ ID NO: 237380 - DNA, 1434 bp, synthetic construct
  misc_feature 1..1434: note = Description of Artificial Sequence: Synthetic coding sequence
  source 1..1434: mol_type = other DNA
atgggccgtacagttgtcgtgctgggagggggtatcagtgggttggccgcttcttaccacctgagtagagccccttgccctcccaaggtggtcctggtggagtcatccgaacggctaggcggttggatccgctctgtgagaggacccaacggggctatctttgaattgggccctagagggattagaccagccggtgccctaggagcaaggactttgctcttagtgagcgagcttggcctagactctgaagtgttgccagtcaggggcgatcaccccgctgcacaaaaccggttcctttatgtgggaggagcattgcacgctctccccacagggctcagagggctgcttcggccttcccccccatttagtaagcctttgttttgggcaggtctgcgggaactgactaagcccaggggcaaagaacccgacgagaccgtacactccttcgcccagaggcgtctggggccagaggtggctagtcttgcaatggacagcctttgccgcggagtgttcgcaggcaattcccgggagttgtcaattagatcctgctttcctagtttgtttcaagccgaacagacgcaccgctccatactgctggggctgctcctgggcgcagggagaacaccccagccggactcagccctgatccgtcaggcactggccgagcgctggtcacagtggtcactgcggggaggtctggagatgttgccccaagcactcgaaacacacctgactagcagaggggtgtccgtgctgaggggtcaacctgtttgcggattgagtctgcaagctgagggtagatggaaggtaagtctcagggactcatcgctggaagccgaccatgtcatatctgctatcccagcttccgtgctttctgagctactaccagccgaggccgctcctctggccagggccctgtcagccatcactgctgtttctgtcgccgtggtgaatctgcaataccaaggggctcatctgcccgtgcaggggttcggccacctggtgcccagcagcgaggaccccggagtcctaggcattgtctatgactctgtagcctttccagaacaggatggttctccgcctgggttgcgggtgacggtcatgctcgggggatcctggctgcagactctggaggcatcaggatgtgtgctgagccaagaactcttccagcagagggcccaggaagcagccgctacccagctcggactgaaggagatgcctagccattgcttagtgcatcttcacaaaaactgtatcccccagtacacgctggggcactggcagaagctggagagtgccagacaatttctgacagcccaccggctgcccctgaccctggctggtgcttcctacgaaggcgtggcagtgaacgactgtattgagagcgggaggcaggctgctgtgagtgtacttggtaccgagcctaattcttag

SEQ ID NO: 237381 - DNA, 717 bp, synthetic construct
  misc_feature 1..717: note = Description of Artificial Sequence: Synthetic coding sequence
  source 1..717: mol_type = other DNA
atgggcagaaccgtggtagtgctgggcggagggataagtggactggcggcatcataccacttgagtcgggctccttgccctcctaaagttgtattggtggaaagctctgagagattgggaggttggatccggagcgtgcgtggtcccaacggggctatcttcgagctgggcccacgaggaattaggcccgctggtgcacttggcgctagaactctcttactaggtttcgggcatctggtgccttctagcgaggacccaggtgtcttggggatagtgtacgatagcgtggctttcccggagcaggacggatccccacccggattacgagttacggtcatgttgggcggttcttggctccagactttagaggcctcaggctgcgtgctgtcccaagagctattccagcaaagagcccaggaggccgcagctacacaattaggcctgaaggagatgcctagccactgcttggtacacctgcataagactaagaatcagctgaagtggagacaatcacacgaccgaactgtggagtggcctaaggagtaccccggtcgctcacggaagcaggcaccctctattctccacgtacctggttgccagctcctgcgctgtcgtgaccgtgatcatctgggtgcggtctcggaacagccaaggagctcagctgaatcgcgtgtcggagtggccagtagtaccttcagtacattccctctgttctag

SEQ ID NO: 237382 - DNA, 1335 bp, synthetic construct
  misc_feature 1..1335: note = Description of Artificial Sequence: Synthetic coding sequence
  source 1..1335: mol_type = other DNA
atgggaagaacggttgtggtccttggcggaggcatttcaggtctagcagcatcttatcatctctctagggccccatgtccccctaaagtagtgcttgtcgaaagctcagagaggttaggcggatggattagatcagttcgtgggcctaacggggctatatttgaactgggacccagagggatcaggcctgcgggagccttaggggcaaggacccttctgctggcatgcggcgagcaagtttctgaactcgggttagatagcgaagtcctccctgtgcgcggtgaccatccggcagctcagaaccggttcctgtatgtgggcggagctctacacgctctgcccactggactgagcccgtccctcacacttaaagtcgccagccttgctatggacagcctatgtaggggtgtcttcgctgggaattcccgtgagctttcaatccggagttgcttcccttccctgttccaggctgagcagacacaccgatcaatcctcctcggtctccttcttggagcaggtagaacgccacagcctgattcagctctgattaggcaggctctcgcagaacgatggtctcagtggtctctgcggggtggtctggaaatgctcccccaggctttagaaacccacctcaccagtcggggagtttcagttttgcggggacagcccgtatgcggcctgagccttcaagcggaaggccgttggaaggtttctctaagggattcttcactggaagccgaccatgtgatcagcgccatccccgctagcgtgttgtccgaactcctgcccgctgaagccgctcctctggcaagggcactgagcgcaattactgccgtcagtgtcgccgtggtcaatctgcaataccagggcgctcatttgccagtgcagggtttcggccacctggttcccagctctgaggatcctggtgtattagggatcgtctacgactcggtcgccttcccggaacaggacggcagtccacccggacttagggtgacagtgatgcttggcggttcttggctgcagacactcgaagcttctgggtgtgtgctcagccaagagcttttccaacagagggcacaggaagccgcagccacgcagttggggctgaaagaaatgcccagtcattgccttgttcatctccacaagaactgcatcccgcagtataccctggggcattggcaaaaacttgagagtgctagacagtttctcaccgctcaccgcctgcccctcaccctcgccggtgcaagctacgaaggcgtcgctgttaatgactgcatcgagagtgggagacaggcggcagtaagcgtgctcggcacagagcccaattcctag

SEQ ID NO: 237383 - DNA, 144 bp, synthetic construct
  misc_feature 1..144: note = Description of Artificial Sequence: Synthetic coding sequence
  source 1..144: mol_type = other DNA
atggacattctcaagtcagagattcttcgtaaaaggcaacttgtggaagaccgaaacctactatcagaaagcatgtgtgctaacgacgcatacctgcagatggctattgggaatgccccttggcccattggggtaaccatgtag

SEQ ID NO: 237384 - DNA, 504 bp, synthetic construct
  misc_feature 1..504: note = Description of Artificial Sequence: Synthetic coding sequence
  source 1..504: mol_type = other DNA
atgatccgaacgtttcccggagagaacaagaagtattttaagaggagcgaactagccaaaaaagaggaggaagcctacttcgagcgttgtggctataaaatccagcctaaagaggaagaccagaagcctctcaccagttcgaacccggttctcgagttggagctcgcagaggagaaactgccaatgactctcagtagacaggaagtaatacgacgtcttcgggaacgaggagaaccaattcgcctattcggcgaaaccgattatgatgcattccaacgcttgcgcaaaatcgagatattgactcccgaggtgaataaaggtttgcgaaacgacttaaaggccgctctggacaaaattgaccagcaatatctgaacgagattgtgggaggtcaggagcccggagaggaagacacccaaaacgacctgaaggtccacgaggaaaataccactatcgaggagctggaggctttgggcgaaagcctcgggaaaggggatgaccactag

SEQ ID NO: 237385 - DNA, 750 bp, synthetic construct
  misc_feature 1..750: note = Description of Artificial Sequence: Synthetic coding sequence
  source 1..750: mol_type = other DNA
atgatccgtaccttccctggggagaataagaagtactttaagaggagcgaattggccaagaaggaggaagaggcatacttcgaacgctgtggatataaacccatcaatgagaagccatcaggtgaaattcagccgaaagaagaggatcagaagcctctcacctcttcgaacccagtgttagagctcgagcttgcagaggagaagcttccaatgactctgtctcggcaggaagtcatcagacgattgagggaacgaggcgaacccattcggctgttcggagaaacagattatgatgcatttcaacgacttcgaaagatagaaattctcacccctgaagtgaataaaggattgcgaaacgacctgaaagcggctttagacaaaatcgaccagcagtacctgaacgaaatagtgggagggcaggagccaggcgaggaggacacccaaaacgatcttaaggtgcatgaagagaacaccaccatcgaggagttagaagctctgggagaaagtctcgggaaaggggacgatcacaaggacatggacattatcactaagtttcttaaatttctgctcggagtatgggcaaaagagctgaacgctcgcgaggattacgtgaaaagatctgtgcagggcaagctgaatagtgccacacaaaaacaaacagagtcatacctccggcctctttttaggaagctgaggaagagaaacctccccgcagatatcaaggagagcattaccgatatcatcaagtag

SEQ ID NO: 237386 - DNA, 1029 bp, synthetic construct
  misc_feature 1..1029: note = Description of Artificial Sequence: Synthetic coding sequence
  source 1..1029: mol_type = other DNA
atggatattctgaaaagtgagatacttaggaaacgccagctggtggaagatcgcaaccttctcgtggaaaataagaagtacttcaagcgtagtgaactggccaaaaaagaggaagaggcttacttcgagcgttgcggttacaagatccagcccaaggaagaggatcaaaagcccctcactagttctaatccggtgctagaactcgaacttgccgaagaaaaattacccatgactctgagccggcaggaggtcatccgtcgcctgcgggagcgcggagaacccatcagattgtttggcgagactgattacgatgccttccagcggctgcgcaagattgagatcttgacaccagaagtgaataagggactgcgtaacgacctgaaggccgctctggacaaaattgaccagcaatacttaaacgagatcgtcggcggtcaggagccgggtgaggaggacacccagaacgacctgaaggtgcacgaagaaaacaccaccattgaagagctggaggctttgggcgaatctctcggtaagggcgatgaccacaaggacatggatatcattacgaaattcttaaagttcctgctcggcgtttgggccaaagaattgaacgctcgcgaagattacgtcaagcggtccgtacaggggaagcttaacagcgcgactcaaaagcagactgaatcctaccttaggccactctttcgcaaactcaggaagcggaacctccccgctgatattaaggaatccattacggatattattaagttcatgctacagagagagtacgtaaaggccaatgatgcatatctgcagatggccattgggaacgccccttggccaatcggtgtgaccatggtcggtattcatgccagaacaggtagggaaaagatcttctccaaacatgtcgcccacgtattgaacgatgagacgcaacgcaaatacatccaaggactcaagagactcatgacaatctgccaaaaacacttcccgacagacccctcaaaatgcgttgagtataacgccttatag

SEQ ID NO: 237387 - DNA, 750 bp, synthetic construct
  misc_feature 1..750: note = Description of Artificial Sequence: Synthetic coding sequence
  source 1..750: mol_type = other DNA
atgattaggacgtttcctggagagaacaagaaatacttcaaaaggtctgagctggccaaaaaagaggaggaggcttattttgagagatgtgggtataaacctatcaacgagaaaccatccggcgagatccaacccaaggaggaggaccaaaagccactcactagctcaaatcccgtcttagaactcgaactggccgaggaaaaacttccaatgactttatcccgacaggaagtcattaggcgcctgagggaaaggggggaacccataagactattcggggagaccgactacgatgccttccagcgcctccgtaaaattgagattctgactccggaggtaaacaagggcctgcgcaacgaccttaaggcggctctggacaaaatagaccagcagtacctgaacgagattgtgggtggacaagaaccaggggaggaagatacacaaaacgatctgaaggtccacgaggaaaatacaaccattgaagagctcgaggcacttggcgagtcactgggtaaaggagacgatcacaaagatatggatattataacgaagttcttgaagtttctgctcggcgtgtgggccaaagagctgaatgctcgagaagactacgtgaaaagaagcgtccaagggaaactgaacagcgctactcaaaaacagaccgagagctacctgcggcctctctttagaaaattgcgaaagcgcaacctcccggcagacattaaggagtccataacggatataattaagtag

SEQ ID NO: 237388 - DNA, 1083 bp, synthetic construct
  misc_feature 1..1083: note = Description of Artificial Sequence: Synthetic coding sequence
  source 1..1083: mol_type = other DNA
atggatacacctctgaggaggtcccgtagactcggaggactcagacccgagtcccccgaatcgctgacgtctgtctctcgaacaaggcgagcacttgtcgagttcgaatccaacccagaggagacccgcgaaccaggtagccctcccagtgtgcagcgagcaggcctcgggtctcccgagcgcccacccaagacctctccgggaagtccccgtctacagcagggagcagggctggaatccccgcaagggcagcctgaacctggtgcggcatccccccagaggcagcaggatcttcacctggaatcgccccagagacaacccgagtactcccctgaatccccacgttgtcagcccaagccttccgaggaggccccaaaatgcagtcaagatcagggcgttttggcttctgaactagcacagaacaaagaggaactaacccccggagctccccagcaccagctgccccctgtgcctggttcccccgagccctacccagggcagcaagccccagggccagagccctcccagccattgttagagctgaccccgcgagcaccaggaagtcccagaggacagcacgaaccctctaaaccaccaccagctggcgagaccgtgaccggaggatttggagctaaaaaaagaaagggttcctcctctcaagctccggcttcaaaaaaacttaacaaggaggaactgcccgtcatccctaaaggaaaaccgaaatcaggacgagtctggaaggaccggagtaagaaacgcttttctcagatgttgcaagataaaccattaaggacatcctggcagcgcaaaatgaaagagagacaggagcggaaactggccaaagattttgccaggcacctcgaggaggaaaaggaaagacgcagacaggagaaaaagcagcgtcgagctgagaacctgaaacgtagactagagaacgaacgcaaggccgaggtggtccaggtcatccggaacccagcaaagctcaaaagagctaaaaaaaagcagctaaggtctatcgagaaaagggataccctggctcttctgcaaaaacaacctccgcagcagcctgccgctaaaatttag

SEQ ID NO: 237389 - DNA, 1095 bp, synthetic construct
  misc_feature 1..1095: note = Description of Artificial Sequence: Synthetic coding sequence
  source 1..1095: mol_type = other DNA
atgtcacttgctgacgaactgctggcagacttagaggaggcggcagaagaagaggagggcggttcctacggagaggaggaagaggagccagctattgaagacgttcaggaagagactcagctggacctgtcaggggattccgttaagaccatcgcaaagttatgggactctaaaatgttcgcagaaattatgatgaagatcgaggaatacataagcaaacaggctaaggctagcgaagtgatgggccctgtggaggctgcacccgaatatagagtgatcgttgacgctaacaacttaactgtggagatcgaaaatgaactgaacatcattcataagttcattagagataaatactctaaacgcttccctgagctggagagccttgtgcccaacgccctggattatatcagaactgttaaggaactgggaaattccctcgataagtgtaagaacaacgaaaaccttcaacagatcctcacgaacgctacgatcatggtagtgagtgtgaccgcttccacaacacaggggcagcagctgagcgaggaagagctggaacgactggaagaagcctgtgacatggccttagagctcaatgcatccaagcatcggatctacgaatatgtcgagagccgaatgagctttatagcgcctaacctctccataatcataggggctagcactgctgctaagatcatgggtgtagcaggagggctcacaaatctgtccaagatgccggcatgcaatatcatgcttctgggcgctcaacgaaagacactttctggcttttccagcacttctgtcctaccgcataccgggtatatctatcattccgatattgtgcagtctctgccccctgatctacgccgaaaagccgctagactggtagccgctaagtgtaccttggctgctagagtcgattcttttcatgagtccactgagggaaaagtgggctacgagttgaaggacgaaatcgagagaaagtttgataaatggcagaggcgcaggtggttgcgcccaaccagatcaatttcacccgcttggttgagtagctccaggtctcgggcaagaagagtcgctctatgcccacctgagtag

SEQ ID NO: 237390 - DNA, 1500 bp, synthetic construct
  misc_feature 1..1500: note = Description of Artificial Sequence: Synthetic coding sequence
  source 1..1500: mol_type = other DNA
atgagtctcgctgacgaactgctcgctgacctcgaagaagcggctgaagaggaagaaggaggctcctacggcgaggaagaggaagagcctgccattgaagacgtccaggaggagacccagcttgacctgagcggagatagcgtcaaaaccattgcaaaactgtgggattctaagatgtttgccgaaattatgatgaaaatcgaggaatatatcagtaagcaagctaaggcgtctgaagtgatgggccctgtggaagccgcacccgagtaccgagtaatagttgacgctaacaacctgaccgtcgagattgaaaacgagctgaacataatccacaaatttattcgtgacaagtattcaaagagatttcccgagctggagagtctggtacctaacgcccttgattacattaggaccgtgaaggagctcggaaactctttagacaaatgcaagaacaacgaaaatctacagcaaatactgacgaacgcaaccataatggtggtgagcgttacagcctctaccactcaagggcagcagttaagcgaggaggagctggaaaggctggaggaggcatgcgacatggctctcgaactaaatgcctccaagcacagaatctatgagtatgtagagtccagaatgtcctttattgcccctaatctaagtattatcatcggcgctagtacggctgccaagattatgggggttgcaggcggtctaacaaacttgtctaaaatgcccgcatgtaatatcatgttgctgggtgcgcagaggaaaacccttagcggcttttcctctacttccgtgctgccccataccggatatatatatcacagcgacatagtccagtccctcccacctgacctaagaagaaaggcggcacgtctggtcgcagccaaatgcaccctggctgccagagtcgactccttccatgagagcaccgagggaaaagtgggctacgagctgaaggatgagatcgagaggaaattcgataagtggcaggagccccctcctgtgaagcaggtcaagcctctccctgcacccctggacggtcagcgaaagaaacgcggaggacgaagataccggaagatgaaagaacgattgggcttaaccgaaatcaggaagcaagcaaatcgaatgagctttggagaaattgaagaggacgcctaccaggaagatctcggcttttccctaggacacctgggaaagagcggttctgggagggtgaggcagacgcaggtgaacgaggccacgaaggcgagaatctctaagaccctccaacgtactctgcagaaacagtctgtcgtttacgggggaaaatccacgattcgggatcgctcctctggtaccgcgtcctctgtcgcctttacacctctgcaggggctcgagatcgtcaatcctcaggctgccgagaaaaaagttgctgaggcgaaccagaagtactttagcagcatggctgagtttctgaaggtgaaaggcgagaagtctggactgatgagtacctag

SEQ ID NO: 237391 - DNA, 1353 bp, synthetic construct
  misc_feature 1..1353: note = Description of Artificial Sequence: Synthetic coding sequence
  source 1..1353: mol_type = other DNA
atgagcctcgcggacgagctgctagccgacctggaggaggccgctgaggaagaagaaggaggctcctacggagaggaggaggaggagcccgcaatcgaggatgttcaagaggaaacacagctggacctgagcggcgatagtgtaaagacaatcgccaagctgtgggactcaaaaatgttcgccgaaatcatgatgaagatcgaggagtatatctcaaaacaggcaaaggcctctgaggtgatgggcccagtggaggccgctcccgaatacagagtgatcgtggatgcaaacaacctgacggtcgagatcgaaaatgagctgaatatcatccacaaattcattcgagataagtactccaagaggtttccagaacttgagtctttggtgcccaacgcgctagattacatcagaacagtaaaggaactggggaattccctagacaaatgcaagaacaacgagaatctgcagcagattctgactaatgctactatcatggttgtcagcgtgaccgcaagtacaacacagggacaacagctgtccgaggaagaactggaaagactcgaggaggcatgtgatatggcgctagagctcaacgcctctaaacatcggatttatgagtacgtagagtctcgaatgagcttcatagcccctaatttgtctatcatcattggggcaagtaccgctgccaagattatgggagttgctggaggcctcactaatctgagcaagatgcccgcttgcaacattatgttgctgggcgcacagagaaagaccttgtctggatttagcagcacatctgtgctgccacacaccggatacatttatcactcagacattgtccagtcactgccacctgacctgcggcgaaaggcagcacgacttgtggccgcaaagtgcacgttggccgctcgggttgactccttccacgagtctaccgaaggaaaggtcggctatgagctaaaagatgagatcgagcgcaaatttgacaagtggcaagagccaccccctgtcaagcaggtgaagcccctgcccgcacccctggacggacaaaggaagaagcgcggtgggagacgctaccggaaaatgaaggaacggctggggctgacagagatcaggaaacaagccaatcgaatgagttttggagagattgaagaggatgcctaccaggaggatctgggtttctcactcgggcatctcgatgccgcagccgaccccgctgaagccgagcgccgtatatggagagaggtccaccatcccagacctctgctgggtcacggcctgcaacgaggcctccacccaaccccagggcctggggactgtgagcctactggtggcagggaggagggtgggtag

SEQ ID NO: 237392 - DNA, 831 bp, synthetic construct
  misc_feature 1..831: note = Description of Artificial Sequence: Synthetic coding sequence
  source 1..831: mol_type = other DNA
atgagtctggctgatgagttgcttgctgacctcgaggaggcggcagaagaagaagagggcggttcctatggagaggaggaggaggaacccgcaatagaggatgtgcaggaagaaacgcagcttgacctaagtggtgacagcgtcaaaactattgccaaactttgggatagtaaaatgtttgccgagattatgatgaagattgaagaatacatttcaaaacaggctaaagcttccgaggtcatgggtcccgtggaggctgcaccagagtacagggtcatagtagacgccaacaacctaacagtcgagatcgagaatgagctcaacatcattcataagttcatcagggataagtacagtaagcgattcccggaactcgagtcacttgtacctaatgccctggactacatccggacggttaaagagcttggcaattcattggacaaatgtaaaaacaacgaaaatctgcagcagatccttactaatgctaccatcatggttgttagcgtgactgcctcaactacccaaggacaacagctgtccgaggaggagctcgagagacttgaggaagcatgtgacatggccctcgagctcaacgcatctaagcacaggatttatgaatatgtagaatctcgcatgagctttatagcccctaatctgtctatcatcattggagcaagcaccgctgcgaagatcatgggagtggccggaggactaaccaacctgtcaaagatgcccgcatgcaacattatgctgttaggggcacagcgcaaaaccctctccggattctctagtacctccgttcttccacacaccggatatatctatcattag

SEQ ID NO: 237393 - DNA, 855 bp, synthetic construct
  misc_feature 1..855: note = Description of Artificial Sequence: Synthetic coding sequence
  source 1..855: mol_type = other DNA
atgtctctggccgatgaacttctggccgatctcgaggaagccgctgaggaagaagaaggtggctcttacggagaggaagaggaggagccggctatcgaggatgttcaagaggagactcaactcgatctgtccggggactccgtgaagaccattgctaaattgtgggatagcaagatgtttgccgagattatgatgaagatagaagaatatatcagtaagcaagcaaaggcctccgaggttatgggtccagttgaagcagcccctgagtaccgtgtcatcgtggatgcaaataatctcaccgttgagatcgaaaacgaacttaacatcatccacaaattcatcagagataaatattctaagcgattccctgagctggagtctctggtgcctaatgccctcgactacattaggactgttaaggaactcggaaattctctggacaagtgcaagaataacgagaacttgcagcagattctgaccaatgctaccattatggttgtttccgtcaccgcttcgactacccagggtcagcagctcagcgaagaggaactggagagattagaggaagcatgtgacatggccctggagttgaacgcctctaagcaccggatttatgagtacgtagaaagcagaatgagctttatagcaccaaacctgagcattataatcggcgctagcactgcagccaagatcatgggagtggcaggcggactgacgaacctctctaaaatgcccgcatgcaatatcatgttgcttggggctcagcgaaagaccctgtcaggcttttcttcaacaagcgtgctgccccacactgggtatatctaccactcggacatagtacagagtctgccttag

SEQ ID NO: 237394 - DNA, 786 bp, synthetic construct
  misc_feature 1..786: note = Description of Artificial Sequence: Synthetic coding sequence
  source 1..786: mol_type = other DNA
atgtccctagccgacgaactgttggccgatctggaggaggctgcagaagaggaggaaggcggttcttatggcgaggaggaggaagaacccgcaatagaagacgtacaggaggagacccagttagatcttagtggcgacagcgttaagaccatcgcaaagctgtgggatagtaagatgtttgctgagatcatgatgaagattgaagaatatatctccaagcaggccaaggcatcagaggtcatgggaccggtagaagcagcccctgaatatcgggttatcgtagacgcgaataatttgacagtcgaaattgagaatgagctaaacattatccacaagttcattcgggataaatattccaaacggttccccgagctcgagagtctggtgccaaatgcccttgactacatccggaccgttaaagaattgggcaactccctcgataagtgcaagaacaacgagaatctccagcagattttgaccaacgctaccatcatggtggtgtcagtcaccgcgtccactacgcagggacagcagctttcagaggaggaactcgaacgcctggaggaagcatgcgacatggcgctggagctgaatgcaagcaagcaccggatttacgagtatgtggagtcacgaatgtccttcattgctccgaacctatcaatcattataggggcatccacggcagctaaaatcatgggtgtggccggaggactgacaaacctgtcgaaaatgcccgcatgcaatatcatgctcctcggggcacaacggaagactttatccgggtag

SEQ ID NO: 237395 - DNA, 1569 bp, synthetic construct
  misc_feature 1..1569: note = Description of Artificial Sequence: Synthetic coding sequence
  source 1..1569: mol_type = other DNA
atggccagtagtagggcctcatccacccaggcgaccaagactaaggcccctgacgatctggtggcgccagtggttaagaaaccacacatctattatggcagcttggaggaaaaggagagagaacgtctggcgaaaggtgagtctggtatactgggaaaagacggtctcaaagctggaattgaagctggaaatattaatatcaccagtggcgaagtgttcgaaatagaggagcatattagtgaacgccaggcagaggtgctggcagagtttgagagacggaagagggccaggcagattaatgtgagtaccgatgacagcgaggtaaaagcatgcctaagagccttgggggaacccatcactctcttcggcgaggggccagcagaacgcagagaaaggctgaggaacatcctttccgttgttggaactgatgctcttaaaaaaacaaaaaaggatgatgaaaaaagtaaaaagtccaaagaggagtaccaacagacctggtaccacgaaggcccaaatagcttaaaggtagccaggctctggatcgctaactattctttgcccagggcgatgaaacggctcgaggaagcaaggctacacaaagagattcctgaaaccacacgaacctcacaaatgcaggaacttcataaaagtctgcggagcttgaacaatttctgtagtcaaatcggtgacgataggcccattagttattgtcatttcagtccaaactccaagatgctcgctactgcctgctggagtggcctctgtaaactctggagcgtccctgattgtaatttgctccacactctgagagggcataacaccaatgtcggggcaattgtgttccaccccaaatcaaccgtaagcctggacccaaaggacgtgaacttggcttcctgtgcagccgatggatcagtcaaactgtggagcttagattccgacgagcctgtggcagatatagagggtcacacggtgcgtgttgcacgagtcatgtggcatccttccggccgattcctcggtacaacttgctacgacaggtcctggcggctgtgggatctggaggcccaggaagaaatcctgcaccaggaaggtcactcaatgggggtgtacgatatagcctttcatcaggatggcagtctcgccggaacgggagggcttgacgcctttggtagggtgtgggacctgagaaccggacggtgtatcatgtttctcgagggccacctcaaagaaatctacggaattaacttctcccccaatggatatcacatcgcgaccggctcaggcgataatacatgtaaggtgtgggacctacgccagaggaggtgtgtgtacaccatccctgcccaccagaacctagtcacaggagtgaagttcgaaccaattcacggcaacttcttgctcacgggcgcttacgacaatacagccaaaatatggacccacccaggatggtcaccgcttaaaactttggccggacatgagggcaaggtcatgggactggatatctcatccgatggacagctgatagctacatgtagctacgaccgaacatttaagctgtggatggcagaatag

SEQ ID NO: 237396 - DNA, 1566 bp, synthetic construct
  misc_feature 1..1566: note = Description of Artificial Sequence: Synthetic coding sequence
  source 1..1566: mol_type = other DNA
atggctagcagccgggcatcaagcactgcaacaaagaccaaggccccagatgatcttgtcgctcccgtagtcaagaaaccccacatctactatggatccctggaagaaaaggagagagagcgcctggcgaagggtgagagtggcatccttggaaaggatggattgaaggcgggaatcgaagcagggaacatcaatatcaccagcggagaagtgttcgagatcgaagaacacatttcagagcgacaagccgaagtcctcgccgaattcgagagacggaagcgtgctcgccaaatcaacgtgtccaccgacgattcagaagtgaaggcctgcctacgagcacttggcgaaccaatcacactgtttggcgagggcccagcggagcggcgtgaacggctcagaaacattctgtcagtggttggtacagacgccctgaagaaaaccaagaaggacgacgagaaaagcaaaaaaagcaaagaggaataccagcagacatggtaccacgagggcccaaattctctgaaagtggccaggctgtggattgccaactattcattaccaagggccatgaaacgcctggaggaggccagactacataaggaaattcccgaaaccacccggacctcccagatgcaggaactccacaagtcattgcgatccctgaacaacttctgttctcagatcggggatgataggcctatttcttactgccacttctcccccaattccaaaatgcttgccacagcttgttggagtgggctgtgcaagctgtggtcagtgcccgattgcaacttattgcatacactgcgcggacacaacacaaacgttggcgcaatcgtcttccacccaaaatccaccgtgtctttagaccctaaggatgtgaatttggccagttgcgccgctgacggctctgtcaaactgtggtccttggattcggacgagcctgtcgcagatatagagggtcatactgtgagagtggccagagtgatgtggcacccgtcggggaggtttctaggtactacatgctatgataggagttggcggctgtgggacctagaagcccaggaagagatactgcaccaggagggacatagcatgggggtctatgatattgcattccatcaggacggtagcctggccggtacaggcggactcgatgcctttggcagagtgtgggacctgcggactgggcgatgcatcatgtttctcgagggtcacctgaaggagatctatgggatcaatttctcccctaatggctatcacattgcaacaggctcgggtgataacacatgcaaggtatgggacctgagacaacgcaggtgcgtctacacaattccagctcatcaaaacctggtcaccggagtgaaatttgagccgattcatggaaattttctattgactggggcatacgacaatacggccaagatctggactcaccctggatggtccccactgaaaaccctggccggacacgagggcaaagtgatggggctggatatttccagcgacggtcagttgatcgcaacctgctcctacgatagaacctttaagttgtggatggcagaatag

SEQ ID NO: 237397 - DNA, 3024 bp, synthetic construct
  misc_feature 1..3024: note = Description of Artificial Sequence: Synthetic coding sequence
  source 1..3024: mol_type = other DNA
atggcagctgcggagactcagtctctacgcgaacaacctgaaatggaggatgctaactctgagaagtccattaatgaggagaatggcgaagtttccgaagaccagagtcagaataagcattccaggcataaaaaaaaaaagcataaacacagatccaagcataagaagcataagcattcatcagaggaagataaggacaaaaaacataaacacaagcacaagcataagaagcacaagagaaaagagattatcgatgcatccgacaaagaaggaatgtcacccgctaaacggacaaagctggatgatctggccctactggaggacctggaaaagcagcgtgctcttattaaggccgagctggacaatgaactgatggagggaaaggtgcagagtggcatgggtctgatcctgcagggctacgagagtgggtctgaggaagaaggcgagattcacgagaaggcacgtaatgggaatagatcaagcacaaggagcagctcgacaaaggggaagctggagctggtggataacaagatcacaactaaaaagcgtagcaaatctcgaagcaaggaaaggactcggcaccgcagtgacaagaagaaaagcaagggcggtattgagatcgtcaaagaaaaaacaacccgctcgaagagtaaagaaaggaagaaaagcaaatccccatccaagagatcgaagtctcaggaccaggccagaaaatctaaatcccccacgctgaggcggcgttcccaggagaaaatcggtaaagccagatctcctactgatgacaaggtcaaaatagaggataagagcaagtctaaagaccgcaaaaaaagtccaattatcaatgaaagtaggagcagagaccggggtaagaagtcccggagccccgtggatttgcggggtaaaagtaaagaccggaggtctcgaagtaaagaacgcaaaagtaagcggagcgaaactgataaggaaaaaaagcctatcaagagcccatcaaaagatgcctccagtggaaaagagaatcgatccccttctagacgccctggcagatctcccaaacgccgatctttgtcaccaaaacctagagacaagtcccgtaggtcaaggagtcccctgttgaatgacaggcggtctaagcaaagcaagtctcccagccgcaccttaagccccggacggagagctaagtcacggagtttggagcgaaagagacgggagcccgaacggaggagactctcttcacctaggacccgtccccgagatgatatcttgtccagacgagagaggtccaaggacgcttcacctatcaacaggtggtccccgactcgcagacggtctaggtcacccatccggaggagaagtcggtcacccctgcggagatctcggagccctaggagaaggtccagatccccacgccgacgagataggggtagaaggtcacgctcccggcttcggaggcgctctcgatcaagaggaggacgccgtcggagatcccgatcaaaagtgaaggaggacaagttcaagggtagcctgtccgaaggcatgaaggtggagcaggaatccagttctgatgacaacctcgaagattttgatgtagaagaggaggacgaggaggccttgatcgagcaaaggagaatccagcgccaagccattgtacaaaagtataagtacctggccgaagattctaatatgtcagtacctagcgagccctcctccccacaaagctcgacacggacccggagtccatctccggacgatatcctggagagggtcgctgcagatgttaaggagtatgaacgcgagaacgtggacacctttgaggcttccgttaaagccaaacataaccttatgactgtggaacagaataacgggagttcacaaaagaagctcctggcgccagatatgtttactgagagcgatgatatgttcgccgcatattttgatagtgcgagactgcgggctgctggcatcggaaaggacttcaaagagaatcctaacctaagagataactggacagatgctgagggatactacagagtcaatatcggggaggtcctggataaacgctataatgtctacggctataccggccagggcgtgttcagcaacgtggtgcgggcacgagacaacgctcgcgcaaatcaggaggttgcggtgaaaatcatccgcaataatgagctgatgcagaaaacaggccttaaagagcttgagttcctgaaaaagctgaacgacgccgacccagatgacaaatttcactgcctccggctgtttaggcacttctaccataagcagcacctgtgtttagtgtttgaaccactttcgatgaatctgcgcgaggttctaaaaaaatatggaaaggacgtgggtctacacatcaaggccgttcgaagctattcccagcagttgttcctggcactgaagctgttaaagcggtgtaatatccttcacgcggacatcaagcccgacaacatactggttaatgaaagcaagacaatcctgaaactgtgcgatttcgggtctgcttcccatgtagcagataatgatatcaccccgtatctcgtttcgcggttctatcgagcgccagaaatcattatcggtaaaagctacgactacgggattgacatgtggagcgtggggtgtaccctctacgaactgtacaccggcaaaatattattccctgggaagactaataaccatatgcttaaattggccatggacctcaaggggaaaatgcccaataagatgatcaggaagggggtcttcaaggaccagcacttcgaccaaaacttgaatttcatgtatattgaggtcgataaagtaaccgagcgcgagaaggtcaccgtcatgagtaccatcaacccaacaaaggacctgcttgctgaccttatcgggtgtcagcgcctcccggaagatcagaggaaaaaagtgcaccagctcaaagacctattggaccaaattctgatgttagaccccgcaaagcgaatatctatcaatcaggcccttcagcacgcctttatacaggagaaaatatag

SEQ ID NO: 237398 - DNA, 3024 bp, synthetic construct
  misc_feature 1..3024: note = Description of Artificial Sequence: Synthetic coding sequence
  source 1..3024: mol_type = other DNA
atggccgcagccgagacccagagcttgcgggagcagcccgaaatggaagacgccaattcagagaagtcaattaacgaagaaaatggcgaagtgtctgaagaccagtcgcaaaacaagcattccaggcacaaaaagaaaaaacacaagcatcgtagtaaacacaagaagcataagcattctagcgaggaagataaagataaaaagcataaacacaagcacaagcacaagaagcacaaacggaaagagatcatcgatgcatccgacaaagaaggcatgtcacccgctaagagaactaagctggacgatctggccctgctcgaggatttggaaaaacagagggcactgattaaagccgagctggataatgagctgatggagggaaaggtccagtccggaatggggctgattctacaggggtacgaatctgggtctgaagaggagggagagattcacgagaaagctcggaatgggaaccggagttccactaggagctcttccaccaagggaaagcttgaattagttgacaataagataaccacgaagaagcgaagcaaatccagaagtaaagaacggactcggcaccgcagtgacaagaagaaatctaaaggaggcattgaaatagtcaaagagaagacaacacgatccaagagcaaagagaggaagaagagtaagtccccctcaaagagaagcaagagtcaggaccaggcgcgtaaaagcaagagtccgaccctgcggagacgttcccaagaaaagatcgggaaggccaggagccctactgatgataaggtgaagattgaagataagagtaagagtaaggacaggaaaaagtcccccataattaatgagtcccggtcccgcgaccgcggtaagaaaagccgttctcccgttgacctgcgcggtaaaagtaaggatagaaggtcgaggtctaaagaacgaaaatcaaaacgttctgaaaccgataaagagaagaaacctatcaaatcacctagcaaggatgctagcagtgggaaggaaaatcggtctccttccagaaggccaggaagatctccgaagagaagaagcctgagccctaaacccagggacaaaagtagaaggagccggtccccactgcttaacgatagacgttcaaagcagtccaagtctccttccagaacgctgtccccgggaaggagagcaaagagcaggtcccttgaaagaaaacgaagggaaccggaacgcaggcggctgagcagtcctcggacacgtcccagggacgacattttgtctcggagagaacggagcaaagatgcttcccccattaaccggtggagtcctacccgccgtcgaagcagaagcccgatcaggcgccgatcacgatcccctcttcgaagatcaaggagtccacggaggaggagccgatctcccagacgaagagacaggggaagacgaagccgatccagattaaggagacggtcaagatcccgcggtggcagacggcgtagaagcagatcaaaggtgaaggaggataagtttaaaggaagcttgtctgaggggatgaaagttgagcaagaaagctctagtgacgacaatttggaggattttgacgtggaggaggaggatgaggaagctctgatcgagcagcgccgtatccagcgccaggctatagtccagaagtacaagtacctcgccgaagactccaacatgagcgttccctcagagccaagtagcccccagtcatcaacaaggaccagaagtccctctcccgacgacattcttgaaagggtggcagctgacgtgaaggaatacgagagagaaaatgtggacacctttgaggcatcggtgaaggcgaaacataatctgatgacagtggagcaaaacaacgggagttcacagaaaaagctgctcgcaccggacatgttcaccgaatctgacgacatgtttgccgcttacttcgacagcgctagactacgggcagccggtattgggaaggactttaaggaaaatcctaatttgcgcgataattggaccgatgcagaaggatactatcgagtaaacatcggagaggtgcttgataagcggtataacgtgtacgggtacacgggacaaggcgtgttttcgaacgtggtcagggcccgtgacaacgcaagggctaatcaagaggtcgccgtcaaaattattagaaacaacgaacttatgcagaagacggggttgaaggaattggaattcctaaaaaagttgaacgacgcagatccagacgataaattccactgtttgcggttgttcaggcatttctatcacaagcagcatctgtgtctggtatttgagcccctcagcatgaatctccgggaagtgctgaagaaatatgggaaggacgtcggcttgcacattaaggctgttagatcttactctcagcagctctttctggccctgaagctgctgaagagatgcaacatcctgcatgcagacataaagccagataatatcctcgtcaacgaatcgaagactatcctcaagctgtgcgacttcggcagcgcttcgcatgtggctgataacgatatcacgccctacctggtgagccggttttatagggcccctgagatcattatcggtaagtcgtacgattatggcatcgatatgtggtctgtgggctgtactctgtacgaactgtacaccggaaagatcctgtttcctggtaaaacaaataaccacatgctgaaacttgctatggacctgaaggggaagatgccaaacaaaatgatccgcaaaggggtgtttaaggatcagcactttgatcagaatctaaatttcatgtatatcgaggttgataaggtgacagagagagaaaaagtgacagtcatgtctacgatcaatccaactaaggacctcctggccgaccttatcgggtgtcaaaggcttccagaggaccagcgcaagaaagtgcaccagctgaaggatctgctggatcagatcctgatgctcgatcctgccaaaagaatctccattaaccaggccctgcagcacgccttcatccaggagaaaatctag

SEQ ID NO: 237399 - DNA, 2982 bp, synthetic construct
  misc_feature 1..2982: note = Description of Artificial Sequence: Synthetic coding sequence
  source 1..2982: mol_type = other DNA
atggaagatgcaaatagcgaaaagagcattaacgaggaaaacggtgaggtgagtgaagaccaatctcagaacaaacacagtaggcacaagaagaaaaagcacaagcatagatcgaaacataaaaaacacaagcattcgagtgaggaggacaaagacaagaaacataagcacaagcacaagcataagaagcacaaaaggaaagagattatcgacgcttcagataaggaaggaatgtcacctgccaagcgaaccaagctggatgatctagcactgcttgaagatctcgaaaagcagagagccttaataaaagccgagctcgacaatgaactgatggaggggaaagttcaaagcggcatgggacttatccttcaaggctatgagtccggtagcgaagaagaaggggagatccacgaaaaagctaggaatggcaatcggagtagcacccgcagttcttcaacgaagggaaaactcgagctggtcgataacaagatcacgacaaaaaagcgttcgaagagtagaagcaaagagcggacaagacataggagcgacaaaaagaaatcgaaaggtgggatcgaaatcgtcaaagagaagaccactcgcagcaagtcaaaagagcgcaaaaaatctaagtcacctagtaaaagatctaaatcccaggatcaggctagaaaatccaagtccccaaccttaaggagacggtcacaggaaaagataggcaaagccagatcccctaccgacgacaaggtgaagatcgaagacaagtcaaaatctaaggaccgaaagaaaagcccaatcataaacgagagtcgctcacgggaccggggaaagaaaagcagaagccctgtggatctgcgaggcaagagtaaagatcgcaggagcaggtccaaggagcggaaatcaaaacgtagcgagactgacaaagaaaaaaagccgataaagagcccttccaaagacgcaagctcagggaaagaaaaccgatccccttcccggagaccaggacggagccccaagcgcaggagcctcagtcctaagcccagagacaagtcacgccgaagccggtctccgctgcttaacgatagaaggagcaagcaatctaagagtccgtcacgtactctgtcccctggccgaagggccaaatcacggtctcttgaaagaaaacgacgggaacccgaacgacgcagactgtccagcccccgtactcggccacgggatgatattctctcgcggcgtgagcgcagcaaggacgccagcccaatcaaccggtggtcccccactcgacgccgtagtagatcccccattcggaggcgctctaggtcaccactccggaggtcccggtcccccagaagacgctctcgcagccctcggcgacgcgatcggggtcgaaggtcacgatcaaggcttcgcaggcgttctcgatcccggggaggtcgcaggcggagatcacgatcgaaggtaaaagaagacaagttcaagggctcattgtcagaaggtatgaaagtggagcaagaatcctccagtgacgataacctggaggactttgacgtggaggaggaagatgaggaagcactgatcgaacaacgtcgtattcaacggcaggcaatagtgcagaagtacaaatatctcgcagaggattccaatatgagtgtcccatctgagccaagctcaccacagtcgagtacacggaccagatctccaagtcctgacgatatccttgaaagggtcgctgcagacgtgaaggaatacgaaagagagaacgtggacacctttgaggctagcgtgaaagctaaacacaatctgatgaccgttgaacaaaataatggctcctcccagaaaaagctgctcgctcccgacatgttcaccgaatcagatgatatgttcgctgcttactttgactccgccagattgagagccgcaggtattggtaaggacttcaaggaaaaccccaaccttcgcgataactggaccgatgctgagggttactaccgggttaacattggcgaagtcctcgacaagcgttataacgtgtacgggtacacagggcagggagtcttttcaaacgtggtaagagccagggataatgccagagctaaccaagaggtggctgttaaaataattagaaacaacgagttaatgcagaaaactggcttaaaggagctggagttcctgaagaagctgaacgatgccgatcccgacgataaattccactgccttcgcctatttaggcacttttatcacaaacagcatctgtgcttagtgtttgaacccctgagcatgaatctacgagaggtgctgaagaagtacggtaaggacgttggcctgcacattaaagctgttcgtagctattctcagcaattgtttctcgccctcaagctgctaaagcggtgtaatattttgcacgctgacatcaaacctgataacatcttggtaaatgagagcaaaaccatactgaaactctgcgacttcggtagtgcctcacacgtggccgataatgatattacaccctatttagtctctcggttctatagagccccagaaatcatcatcgggaaaagctacgactacggaattgatatgtggtctgttggatgtactttgtatgagctttatacaggcaaaattctcttccctggaaaaaccaataatcatatgcttaagcttgccatggatttgaagggcaaaatgcccaacaagatgattagaaaaggagtctttaaagaccagcacttcgaccagaacttaaatttcatgtatatcgaagtggacaaagttaccgagagggaaaaagttacagtcatgtcaaccattaaccctacaaaagaccttttggcggacctcatcggatgccagcggcttcctgaggatcaacggaaaaaggtgcaccaactgaaggacctgctggaccagatcctgatgctggaccccgctaaaagaattagcatcaaccaggcactccagcacgcatttattcaggagaagatttag

SEQ ID NO: 237400 - DNA, 2820 bp, synthetic construct
  misc_feature 1..2820: note = Description of Artificial Sequence: Synthetic coding sequence
  source 1..2820: mol_type = other DNA
atgcgaccaggaaccggtgcagaacgcggaggattgatggttagtgagatggagtcacatcccccatcccagggccctggagacggagaaaggagactgtctgggtcatccctgtgcagtgggtcctgggtgtctgctgacgggttccttcgacgcaggccaagtatgggacacccgggaatgcactatgcaccgatggggatgcaccccatgggtcaacgagccaacatgccaccagtccctcacggtatgatgccccagatgatgcctcctatgggcggacctccaatgggacagatgcctggcatgatgagctccgtcatgcccggtatgatgatgtcccacatgtctcaagcctcaatgcagcccgcactgcccccaggtgtaaatagcatggacgtggccgcaggcacctacactctgtacaagtctatgtggactgagcataagtctcctgatggtcgcacatactactacaacacagagacaaaacagtctacctgggaaaaacctgacgacttaaaaacacctgcagagcagctcctcagcaaatgtccgtggaaggagtacaagtctgactccggaaaaccatattactacaattcacaaacaaaggagtccagatgggctaaacccaaagagctcgaagatcttgagggaaaaatgggcaagataaaatactctaaacaggaggagtgcactaccacttctaccgcccctgtgccaacgacagagatccctactacgatgtcaacgatggcggctgctgaagcagccgctgccgtcgtcgcagctgcagctgcagccgcagcagccgcagccgctgcaaacgccaacgcttctacttcagcttccaataccgtaagcgggaccgtgcctgtggtgcctgaaccagaggtcacttctattgtcgcaacagtggttgataacgaaaacacagtaacaatatctaccgaagaacaggcccagctcacttctacaccagcaattcaggaccagagcgtggaagtctcatccaacactggtgaagaaacatcaaaacaggagactgtcgcggacttcaccccgaagaaggaggaggaggagtcacaaccggctaaaaaaacatacacttggaatacgaaggaggaggcaaagcaggcattcaaagagctgttaaaggagaaacgtgtgccctctaacgcgtcttgggagcaggccatgaaaatgattatcaatgatcctaggtactctgccttggctaagctgtctgagaagaaacaggccttcaacgcctacaaggtacagaccgagaaggaggaaaaagaagaggctaggagcaaatacaaggaagcgaaggagtcttttcaaagattcttagagaatcatgaaaagatgactagtaccacccgatacaagaaagctgagcagatgtttggggaaatggaagtatggaacgccatctctgagcgtgataggctggagatttacgaagacgtactgttctttctatccaagaaggaaaaggaacaggctaagcagctgaggaaacgtaactgggaggccctcaaaaacatcctggataacatggcaaacgtgacttactctacaacgtggagcgaggcgcagcaatacctgatggacaacccgacctttgccgaggacgaggagctccagaacatggacaaggaggacgccctgatctgttttgaggagcacattcgggctctcgagaaagaggaggaagaagaaaaacagaaatccctgttgcgagaacggagacgccagcgaaagaatcgcgagtcttttcagatttttctcgatgagttgcatgagcatggacaactccattccatgtcaagctggatggagctgtaccctacaatctctagcgatattaggttcaccaatatgctgggccaacctggatctactgcattagatctatttaagttttatgtggaagacctgaaggcacggtaccacgacgaaaagaagatcattaaagacattctcaaggataagggttttgtagtagaggtcaatacgacctttgaggattttgtggcgatcattagcagcacaaaacgaagcaccaccttagacgcaggtaacattaaactggcttttaatagcctcctagaaaaagccgaggcgagggagcgcgagcgggagaaggaagaagcacggaagatgaaaaggaaagaaagcgcgtttaaaagcatgctaaagcaggccgctccccctatcgaattagatgccgtgtgggaagatatccgggagcggttcgtgaaagagcccgctttcgaggatataacacttgagagtgaacgcaaacgtatttttaaggattttatgcacgtgctggagcatgaatgtcagcatcatcacagcaagaacaagaagcacagcaagaagtcgaaaaaacatcatcgcaagagatcacggtccagatccggttcagacagcgatgatgatgacagtcattctaaaaaaaagaggcagcggtctgagtcaagatcggcatctgaacatagcagctccgctgaatctgaacggtcctacaaaaaaagcaagaagcacaaaaagaagtctaagaagcggcgacacaagtctgacagccccgagtcggatgccgaaagggaaaaagacaaaaaggagaaggatagagagtcagagaaggacagaacacggcagcgctccgaatccaagcataaatcgccaaaaaaaaagaccggcaaagactcgggcaattgggataccagtggcagcgaactatctgagggggaacttgagaagcggagaagaacattgttagaacagctggacgacgatcaatag

SEQ ID NO: 237401 - DNA, 2451 bp, synthetic construct
  misc_feature 1..2451: note = Description of Artificial Sequence: Synthetic coding sequence
  source 1..2451: mol_type = other DNA
atgtgcagtggaagtgggaggcggagaagtagtctttctcctaccatgaggccgggtaccggcgctgaaagaggaggcctcatgatgggtcatcctgggatgcactacgccccaatgggcatgcacccaatgggtcagcgagctaacatgccaccagtgcctcatggcatgatgccgcaaatgatgccacccatgggaggcccaccgatgggtcagatgccgggaatgatgagttccgttatgcccggaatgatgatgagtcatatgtcacaggcttcaatgcagcccgctctgccccagcttctcagtaaatgcccctggaaggagtataagtctgactccggaaagccatattattataattcacagaccaaggaatcccgatgggccaaaccgaaagagctcgaagatttagaagggtaccaaaatacaattgttgctggttccttgatcacaaaatctaacctccacggtatgcttactgagttgaaatacagtaagcaggaagagtgcacgacgacctcaaccgcgcctgttcctaccacagaaatccccaccaccatgtccactatggctgccgctgaagccgcagccgcagtcgtggcggctgccgctgctgcggcagccgctgcagctgcagcaaacgctaacgcaagcacgtctgcatccaacaccgtgtccgggaccgtacccgtcgtgcctgaacccgaagtgacatcaatcgtcgcgactgtggttgataatgaaaatacagtcacaatctcaaccgaagaacaagctcaattaaccagcacgccagctattcaggatcagagtgttgaagtatcctccaacactggggaggagacctcaaaacaagagactgtggccgatttcactccaaagaaggaggaagaagagagccagcctgctaaaaagacctacacttggaatacaaaggaggaagctaaacaggcgtttaaggagttgctgaaggagaagagggtaccttcaaatgctagctgggaacaggccatgaaaatgatcatcaacgacccacggtactctgcattggctaaactgtccgagaagaagcaagccttcaatgcttacaaagtccaaacagagaaggaagaaaaagaggaagctagaagcaaatataaggaggccaaagagtcctttcagcgcttccttgagaatcacgagaagatgaccagcactacacgatacaaaaaggcagagcagatgttcggtgagatggaggtatggaatgcaatctctgagcgcgaccggcttgagatttatgaggatgtcctctttttcctcagtaagaaagaaaaagaacaggccaagcagttaaggaaacggaactgggaggccctcaaaaacatcctcgataacatggctaatgtgacttactcaaccacgtggagtgaggcacagcagtacttgatggacaatccgacgttcgccgaagacgaggaactgcagaatatggacaaagaagacgcgcttatctgctttgaagagcacattagagcgctcgagaaagaagaagaggaagaaaagcagaagagcctgttacgcgagcgaagacgccagcggaagaacagagagtcctttcagattttcctggacgaactgcatgagcatggccagctacactccatgtcaagctggatggaattataccccaccatcagcagcgatattagattcacaaacatgttggggcagcctgtgttctcactgggctctactgcgctggatctgtttaagttctatgtggaagatctaaaagccagataccatgacgagaaaaaaattattaaggatatactgaaagacaaaggcttcgtggtcgaggtgaatacaacctttgaggattttgtggccatcatctcctcaaccaagcgaagtaccacattggacgcaggcaatattaagctggcctttaatagcctgctggaaaaagccgaggcacgagagcgtgagcgtgagaaagaggaggcgcgaaagatgaaaagaaaggagtcggcttttaaaagcatgctgaagcaggccgcacctcctatcgaattggacgctgtgtgggaggatatccgtgagcggtttgttaaagagcccgcattcgaggatatcacgctagaaagtgagagaaaacgcatattcaaagattttatgcacgttctcgagcacgaatgccagcaccaccactccaaaaataagaagcatagcaagaaaagtaagaagcaccataggaaacgctcacggagcagatctggctccgacagcgacgatgacgatagccactcaaagaagaaaagacagcggagcgaaagtcggagtgcctccgagcactcttcctcagcagaatcagagcgctcatacaaaaagtctaagaagcacaagaaaaagtccaagaagagacggcacaaatccgactccccagagagcgacgctgaacgctag

SEQ ID NO: 237402 - DNA, 2793 bp, synthetic construct
  misc_feature 1..2793: note = Description of Artificial Sequence: Synthetic coding sequence
  source 1..2793: mol_type = other DNA
atgtgttcaggttcaggtcgcaggaggagttccctgagcccgacaatgcgcccaggtacgggagcagagaggggcggactgatgatgggccacccgggaatgcattatgctccaatggggatgcaccctatgggtcagcgtgccaacatgcctcccgttccgcacggtatgatgcctcagatgatgccaccaatggggggacctcccatgggtcagatgcccggaatgatgtcttcggtgatgcccggtatgatgatgtcgcatatgagccaggcttccatgcagcctgccctccctcccggagttaactctatggacgtggctgccggtaccgcatctggcgcaaaatccatgtggaccgagcacaagtcacccgatggaaggacatattactacaataccgagaccaaacagagcacatgggagaagccagacgacttgaaaacaccagctgaacagctgttgtccaaatgcccgtggaaagaatacaagagcgacagcgggaagccctattattacaacagccagaccaaagaatcacggtgggcaaagcctaaagagctggaagacctcgagggctatcagaatactatcgtggctgggagtttgatcacaaagtccaaccttcacgctatgattaaagccgaagagagttctaaacaagaggaatgcacaacgacatctactgcgccagtgcccacaacagaaattccaaccactatgagtacaatggcggctgctgaagccgcagctgccgtcgtagcagccgcagccgctgccgctgcagcagcagccgctgccaatgccaacgctagtaccagcgcttccaataccgtgagtggcaccgtgccggtggtgcccgagcccgaagtgacctcgatcgtggctaccgtggtagataatgaaaatactgttacaatctctactgaggagcaggcccagcttactagcaccccagctattcaggaccagagcgtcgaagtctcctctaacactggcgaggagacctcaaagcaggaaactgtggccgactttacccctaaaaaagaggaagaggaaagtcagccagcaaagaaaacatacacctggaataccaaagaggaagcaaagcaggcgttcaaagagctgctgaaagaaaaacgcgtgccatccaatgcgtcctgggagcaggcaatgaaaatgatcatcaacgacccaagatactcagcattggcaaaactctcagagaaaaaacaggcctttaacgcatacaaggtgcagacagaaaaggaggaaaaggaagaagcacgcagtaagtataaagaggccaaagagtcattccagcgctttttagaaaaccacgagaagatgacaagcacgactcgatataagaaggctgaacagatgtttggcgagatggaagtgtggaatgcaatctctgaacgggatagacttgaaatatatgaagacgtgctatttttcctgagcaagaaggagaaggaacaagccaagcaactgcggaaacggaactgggaagcattgaaaaatatcctggacaacatggctaatgtaacctacagcacaacatggtctgaagctcagcaatacctgatggataacccaacctttgctgaagatgaggagctacagaatatggataaagaggacgctctaatctgctttgaggaacacatcagagctctggagaaagaggaggaagaggagaagcagaagtctttgctacgagaaagacgcaggcagaggaagaaccgggagtccttccagatctttctggacgagctccatgaacatggacagcttcacagcatgtcttcatggatggagctctacccaacaatctcttccgacatacgcttcacgaatatgttaggtcagcccggatctactgcactcgacctattcaagttctacgtagaagatctgaaagctaggtaccacgacgaaaaaaaaattattaaggacatcctgaaggacaaagggttcgtcgtggaggtgaacaccactttcgaggacttcgtagcgatcatttcgtctacaaagaggtctactaccctcgatgccggaaatatcaaactggcttttaacagcctgctggaaaaagccgaagccagagagagggagcgcgagaaagaagaagcgaggaaaatgaaacggaaggagagtgcttttaaatcaatgctaaagcaagccgctccacctattgaactggacgcggtttgggaggatatccgcgaaagatttgtcaaagagcccgctttcgaagatatcaccttggaatcagagaggaagcgcatcttcaaagactttatgcacgttctggagcacgaatgtcagcaccaccattccaagaacaagaagcatagtaaaaaatctaaaaaacaccaccgaaaacgaagtcgcagccggtcgggttctgacagtgatgacgatgatagccactctaaaaagaaacggcagcggtccgaatctcgaagtgcgagcgaacattcgtccagcgccgaatctgagagaagttacaagaagtctaaaaagcacaagaagaagagcaagaaacggcgtcacaagagcgacagcccagagagtgacgctgagcgggagaaggataaaaaagagaaggatcgcgagtcagagaaagaccggactaggcagaggtctgagtcgaaacacaagtctccaaagaaaaagactgggaaagactcagggaactgggataccagcggaagcgagctctctgagggcgagctggagaaacgccgacgcaccctcctcgagcagctcgatgacgaccagtag

SEQ ID NO: 237403 - DNA, 2481 bp, synthetic construct
  misc_feature 1..2481: note = Description of Artificial Sequence: Synthetic coding sequence
  source 1..2481: mol_type = other DNA
atggatgtggcagctggtactgcatccggtgcaaaatctatgtggacggaacacaagtcacccgacggccgaacctactactacaacacagagaccaagcagagcacttgggagaaaccagacgatctgaagactccagccgaacaactgcttagtaaatgcccatggaaagagtataaatctgacagtggcaagccctactattacaactcccagacaaaggagtctagatgggctaagcctaaggagctggaggatctagaaggctaccagaatacgatagtcgctggaagcttaattactaaatccaatcttcatggaatgctgaccgagttgaagtacagcaaacaggaggaatgcacgaccaccagtactgccccagtgccaacaacagagattcctaccaccatgtcaaccatggccgctgccgaggccgcagccgcagtagttgccgcagccgcagcagctgcagcagccgcagccgcagccaatgccaatgcaagtacgagcgcttctaacaccgtcagcgggaccgttccagtggtccccgagccggaagttactagcatagtggccaccgtagtcgacaacgagaataccgtaaccatctccacagaggagcaagcccaactgacgtccacgcctgcaattcaagaccagagcgtggaagtttcttctaacacaggagaggaaacttccaaacaggagacagtggctgacttcacacctaagaaagaggaggaagagtcacagccggcaaagaaaacatacacgtggaataccaaggaggaggctaaacaggctttcaaggagttgctgaaagagaagagggtgccttctaacgcgtcttgggagcaagcaatgaagatgattatcaacgaccccagatactcagcattagcgaaactctccgagaagaaacaagcgtttaacgcttacaaagtacagactgagaaggaggaaaaagaagaggcacggagcaagtataaagaggcgaaggagagtttccagagatttttggagaaccatgagaagatgacgtctactacaagatataaaaaggcagaacaaatgtttggagagatggaggtgtggaatgctatctccgaacgcgatcgcttggagatttacgaggatgtgctgttttttttgtcaaaaaaagaaaaagagcaggctaaacagctccgcaaaagaaattgggaagctctgaaaaatatcttggacaacatggccaatgttacctactcgactacatggtctgaggctcagcagtacttaatggacaatcccacttttgcggaggatgaagagcttcagaatatggataaggaggatgctctgatttgttttgaggagcacatcagagcactcgaaaaagaggaggaagaagagaaacagaagtctcttttacgagaacggaggaggcaacgtaagaacagagaatccttccaaatttttctggacgagctgcacgagcacggacagctgcactccatgtcttcatggatggaactctacccaaccatcagctctgacattcgtttcacaaatatgttagggcagccgggatctaccgcgctcgatctctttaaattttacgtcgaggacctgaaagcgagatatcatgatgaaaagaagatcatcaaggacatcctgaaggacaaagggttcgtagttgaggtgaatacaacatttgaggactttgtggccatcatcagcagtaccaagaggagcacaacccttgatgcaggaaacatcaagcttgccttcaactctctcctggagaaagcagaagcaagagagcgggaacgcgagaaggaggaagccaggaaaatgaaacgcaaagaaagtgctttcaagagtatgttgaaacaggccgctcctccaatcgagctggacgcagtttgggaagacatccgagagcggtttgttaaagaaccggcatttgaggacatcacacttgaatcagagagaaagcgcatctttaaggatttcatgcatgtgctcgagcatgaatgccagcaccatcacagcaaaaacaagaaacatagtaagaagtcaaagaagcaccaccgcaaaaggtctagaagtcggtcaggatcagacagcgacgatgacgacagccactccaagaagaaacgccagcggtccgagagtcggagcgcatcagagcacagttcctccgctgaaagcgaaaggtcctataagaaatcaaagaaacataagaaaaaatcaaagaagagacggcacaagtcagattccccggaatccgatgccgaaagggagaaggacaagaaggagaaagatcgtgaatcagaaaaggacaggacccgccagcgctctgagtcaaagcacaagagccccaagaaaaaaacagggaaggacagcgggaactgggataccagcggaagcgaactcagcgaaggagagttagaaaaacggcgacgcactcttctggagcagttggacgacgaccaatag

SEQ ID NO: 237404 - DNA, 1347 bp, synthetic construct
  misc_feature 1..1347: note = Description of Artificial Sequence: Synthetic coding sequence
  source 1..1347: mol_type = other DNA
atgcggccagggactggtgccgagcggggaggccttatggtctcagaaatggaatcccatcccccaagtcagggcccaggcgatggtgaaagacgcctgtccggcagtagtctgtgctctggcagttgggtatctgctgatggatttctacgtaggagacccagcatggggcatcctggtatgcactatgctccaatgggtatgcacccgatgggtcaacgtgcgaatatgcccccagtcccccatggtatgatgccgcagatgatgccccctatgggaggaccccctatgggccagatgcccggaatgatgtcgagcgtgatgcccggtatgatgatgtctcacatgtcacaggcgagtatgcaacctgccctgcctcctggggtcaactctatggatgtggcggctggaaccgcctctggtgcaaagtcaatgtggaccgagcataaatcacccgatggcaggacttactactataacacagaaactaagcagtccacatgggaaaagcccgacgacctcaaaacaccagcagaacagcttctttcaaagtgcccctggaaagaatataagtctgatagtgggaaaccgtactattataattcacaaaccaaagagtcgaggtgggccaaacccaaggagctggaggaccttgaaggctatcagaatacaatcgtggccggatccctgataaccaaatctaacctccacgccatgataaaggcggaggaaagctcaaaacaggaggaatgcacaaccacaagcactgccccagtcccgactacagaaattcccacaacaatgagtaccatggctgcggcagaagcagccgctgcagtcgtggccgctgctgctgccgctgcggcagccgcagcagcagctaacgcgaacgccagcacttcagccagcaatactgtgtccggcacggtcccagtggtgcccgagccagaggtcacaagcatcgtggcaacagttgttgacaacgaaaataccgtaacaataagtacagaagagcaggctcagcttacctcaaccccggctatccaggatcagagtgtcgaggtgtcctctaataccggcgaagaaacgagcaagcaggagacggtcgccgatttcacgcccaagaaagaggaggaagaaagtcagccagccaagaagacatacacttggaatacaaaggaggaagcaaagcaagcctttaaagagctgttaaaggagaagcgtgtgccaagcaacgcttcttgggagcaagccatgaagatgattatcaatgacccacggtactctgccctagccaagctgagcgaaaaaaaacaggcttttaatgcgtacaaggttcagacgtag

SEQ ID NO: 237405 - DNA, 2826 bp, synthetic construct
  misc_feature 1..2826: note = Description of Artificial Sequence: Synthetic coding sequence
  source 1..2826: mol_type = other DNA
atgaacaagaaaaagaaaccctttttgggcatgcccgctccattggggtatgttccgggattgggcagaggtgctaccggcttcacaacaagaagtgacattggcccagctagagatgctaacgatccagtggacgatcggcacgcgccaccgggaaaaaggaccgtgggcgaccagatgaagaaaaatcaggccgcagatgatgatgacgaagatctgaatgacaccaactacgacgaatttaacggttacgcagggagtctgttcagttcaggtccttatgagaaggatgacgaggaggccgatgccatatacgccgctctcgacaagcggatggatgagcgcagaaaggaacgtagagagcagcgcgaaaaggaagagatcgagaagtacagaatggagcgccctaagatacagcagcagttttccgatctgaaaaggaaactggcagaggtgacagaggaagagtggctgtccatcccagaagtgggagatgcccgtaataaacggcagcgcaacccgagatatgaaaagttgacgccagtccctgatagcttctttgccaaacatttgcaaactggtgagaaccacaccagtgttgatcccagacagacccagttcggaggcttaaatactccctacccgggtggcttaaatacaccttaccctggcggtatgaccccaggcctgatgactccaggaaccggtgagttggacatgcgcaaaattggacaggcgcgaaacactcttatggatatgaggctgagccaggtgagtgacagcgtttccggccagacagtggtggaccccaagggatacctcacagacctgaattctatgattcctacgcatgggggtgacatcaacgatatcaaaaaagcaaggcttttgttgaaaagcgttagggaaacaaaccctcatcaccccccagcctggatcgctagcgcaaggttagaagaggtgacaggtaagctgcaggtcgccagaaatttaatcatgaaggggaccgaaatgtgcccgaagtctgaggacgtctggcttgaggctgccaggctccaaccgggagacaccgctaaagcagtggtggctcaggcagtcagacacctgccccaaagcgtcagaatctatattcgagccgcagaactggagaccgatatacgggcaaagaagcgagtgctgcggaaagctctggagcacgtacccaactcagttcggctgtggaaagctgccgtggagctagaggaacccgaggatgcacggataatgctgagcagggcagtagagtgctgtcccacatcagtagagttatggttggctcttgcaagacttgagacttacgagaatgccagaaaggtgctgaataaggccagagagaatattccaacagatagacatatatggattactgctgctaagttggaggaggccaatggtaacactcagatggtggagaagattattgaccgcgcaattaccagcttgagggccaatggagtggagatcaatcgggagcaatggatccaggacgccgaagagtgtgatcgagccggatctgtagcgacctgccaggcagtgatgcgcgcagtgataggcatcggaatagaggaagaagatagaaaacacacttggatggaagacgctgacagctgcgtcgctcacaatgccctggaatgtgcccgagccatctacgcctacgccctccaagtgtttccttctaagaagagcgtctggctgcgggcagcctattttgagaagaaccacggtacaagagagtcccttgaagcactgctgcagcgcgcagttgctcactgccccaaggctgaggttctgtggctcatgggtgccaagtctaaatggctggctggcgatgtgcctgccgctcggagtatattggcgctagccttccaggcaaatcctaacagcgaagagatatggctcgctgctgtcaagctggagtccgaaaacgacgagtacgagagggcccgacgcctgttggccaaagctcgctcaagtgcaccaacagctagagtcttcatgaaatccgttaaattagaatgggtgcaagataacatcagagcggcacaagatctgtgcgaggaagccctgcgccattatgaggatttccctaagctgtggatgatgaaaggccaaatcgaagagcagaaagaaatgatggagaaggccagggaagcttacaatcaagggcttaaaaagtgtcctcatagcacacctctctggctgctgctgtcccgcctggaagagaagattggacagttgactagagccagagctattctcgagaaatctcggctgaagaatccaaagaacccgggactctggttggagagtgtccgtttggagtatagagcgggtttaaagaacatcgctaataccctcatggccaaggcacttcaggagtgtcctaacagcgggattctgtggtccgaggctatcttcctcgaagctagaccgcagcggagaacaaagtccgtcgacgctctcaaaaaatgtgagcacgatccccacgtgctgctggcggtcgctaaactcttctggtcccagaggaagatcactaaggccagggaatggttccaccggacggtcaaaattgatagcgacttgggcgacgcctgggccttcttttacaaattcgaattgcaacacgggaccgaggagcagcaggaggaggtacgcaaacggtgtgaaagcgccgagccaagacacggtgaattgtggtgcgccgtctctaaagatatcgcaaattggcagaaaaagatcggcgacatcttacgtctggtcgcgggacggatcaagaatacattttag

SEQ ID NO: 237406 - DNA, 2706 bp, synthetic construct
  misc_feature 1..2706: note = Description of Artificial Sequence: Synthetic coding sequence
  source 1..2706: mol_type = other DNA
atgaataaaaaaaagaaaccctttctgggtatgccagcccctcttggctacgtacccggactaggcaggggtgccacaggtttcactaccagaagtgacatcgggcctgctcgtgacgccaatgacccagtcgacgaccggcacgcccctccgggaaagcggaccgttggcgaccagatgaaaaaaaatcaggccgctgacgacgacgatgaagacctcaatgatactaattatgacgagtttaacggttatgcgggaagtctgtttagctctggaccctacgagaaagacgatgaggaagcagatgcaatttacgctgcactggacaagaggatggatgaaagaagaaaggaacgacgtgagcagcgtgagaaagaagaaatcgagaagtacagaatggagagacctaaaatacagcagcagttttctgatctgaagcgtaagcttgctgaggtgactgaggaggaatggctgtccattcctgaagtgggcgacgcaagaaacaaacggcagcgtaatccacggtatgaaaagctgacgcctgtgccggacagtttctttgctaaacatctccagaccggcgagaaccatacatctgttgaccccaggcagacacagtttgggggtctcaatacaccataccccggaggattgaataccccttacccaggaggtatgacccctgggcttatgacccccggaaccggagagctggatatgaggaagatcggccaggccaggaataccttgatggatatgcgactatctcaggttagcgactctgtgagcggccagactgtggtcgatcccaagggttaccttaccgacctgaactcgatgatccccacccacggtggggacataaacgacattaagaaagccagactgttactcaagagcgttagagagactaacccacaccatccccctgcctggatcgccagtgctagactggaggaagttactggaaaactgcaagtggccaggaatctgataatgaagggcaccgagatgtgtccaaaatctgaagacgtctggttagaggccgcacgcctacagcccggtgacacggccaaagctgtagtcgcgcaggccgtcagacatcttccccagtctgtccgtatatatattagggccgcagagcttgagaccgatatcagggccaaaaagcgggtgctgcgaaaggcactcgagcacgtgcccaactcagtgagactttggaaagccgcagtggagctcgaagagccggaagacgctagaatcatgctgagtcgtgccgtagagtgttgtccaaccagtgtggagctgtggctggccctggctaggctggaaacctatgagaacgccagaaaagttctcaataaggctagagagaacatcccgacggatagacatatttggattacggccgcaaagctggaggaagccaacgggaatactcagatggtcgaaaagatcatcgaccgcgctatcacctctctaagggctaacggtgtcgagatcaaccgcgaacaatggatccaggatgcggaggaatgcgatcgtgctggtagcgtcgctacctgtcaggctgtcatgcgggctgtaattggcattggcattgaggaggaggatagaaaacacacctggatggaggatgcagatagctgcgttgcccacaacgccctcgagtgtgcacgcgcaatatatgcgtacgctcttcaagtcttcccctcaaagaagagtgtctggctgcgagctgcctatttcgaaaaaaaccatggcacccgcgagtcactggaggctctactgcagcgcgctgtggcacactgccctaaggcggaggtcttgtggttgatgggcgcaaagagcaagtggcttgctggtgacgttcctgccgcacgaagtatacttgccttggcttttcaagtatttatgaagtccgtgaaactggagtgggtgcaagataacatcagagctgcgcaggacttgtgtgaggaggcactccgccactacgaagattttccaaagttatggatgatgaagggacagattgaagaacagaaggagatgatggaaaaagcaagggaggcctataaccagggcctgaaaaagtgcccccattcgactcctctgtggctgttgctgtcacggctagaggaaaaaatcggccagctcacaagagccagggccatcctggagaagtctaggctaaaaaacccaaagaaccccggtctgtggctcgaatcggtcagattggaatatcgggctggccttaagaacattgcaaacacacttatggctaaagcgctgcaggagtgccccaattccggtattttatggtctgaagccatcttcctcgaggctcggcctcagcggagaaccaagagtgtggatgctttgaaaaagtgcgagcacgaccctcacgtgctgcttgctgtggctaaattgttctggtctcagagaaaaatcacaaaggcccgtgagtggtttcatcgcacggtaaagatagattccgatctgggtgacgcatgggcattcttttacaagttcgagctccagcacggcactgaggaacaacaagaagaggtgcggaagcgatgcgagtccgcggaacctagacatggggaattatggtgcgcagtgagcaaggacatcgctaattggcagaaaaagattggggacatcttaaggctggtggccggacggatcaaaaataccttctag

SEQ ID NO: 237407 - DNA, 7007 bp, synthetic construct
  misc_feature 1..7007: note = Description of Artificial Sequence: Synthetic coding sequence
  source 1..7007: mol_type = other DNA
atggcaggggtgttcccctatagaggcccagggaaccctgtgcctggccctctggcccctctgcccgactacatgagtgaagaaaagctgcaagagaaggctcgcaaatggcagcaattgcaggctaaaagatatgccgaaaagcgtaaattcggctttgtcgacgcgcagaaggaagacatgcccccagagcacgtacgcaaaatcattagagatcacggggatatgactaaccggaaatttcgccatgataagcgagtttacctcggggcactgaaatacatgcctcacgccgtgcttaagctgctggaaaatatgccaatgccctgggagcagattcgtgacgtgcctgtcttataccatattacaggcgctattagttttgtgaatgaaataccctgggtcatcgaacccgtgtatattagccagtggggatccatgtggattatgatgaggcgggagaaaagggatagaaggcacttcaagcggatgcgatttcctcctttcgacgatgaggagccccctctggattatgcagataatatcttagacgtcgaacctctcgaagctatccagttggagctggatcctgaggaggacgcccctgtccttgattggttttacgatcatcaaccccttagggatagtcgcaaatatgttaatggatcgacttaccagcgctggcaatttaccctccccatgatgtcaaccttgtacaggttggccaaccagctgctgaccgacctggtagacgacaactatttctacctgtttgatctgaaagctttctttacttccaaagcactgaatatggctatccccggtggtccgaaatttgagccattggtgagagatataaatttgcaggacgaggattggaacgagtttaacgacatcaataagatcatcattcggcaaccaattagaaccgagtataagatagcgttcccttatttatacaataatctgcctcaccacgtgcatttgacctggtaccacacacccaatgtcgtgtttattaagaccgaggacccagatctgcctgcattttatttcgatccactcattaaccccattagtcaccgtcattccgtgaagtctcaagaaccgttgcctgacgatgatgaggaattcgagctgcccgagtttgtggagccgttcttgaaagatactccgctctatactgacaacaccgccaatggcatcgccctcctgtgggcacctcgacccttcaacctaagaagcgggagaacccgacgtgctctggacattcctttagtgaagaattggtatcgtgagcactgcccggcaggacaaccagttaaggtgcgggtttcttaccagaagctgttgaaatattacgtgctgaacgcccttaaacatcggccacctaaggcccaaaaaaagagatatcttttccgctccttcaaagccacaaaatttttccaatcgaccaaactggactgggtggaggtaggactccaagtgtgtcgacagggatataatatgctcaacctgctgatccaccggaaaaacctaaactatcttcacctggactataactttaatctcaagcccgtgaagacgctcactaccaaagagaggaagaagagccgttttggcaacgcttttcatttatgccgcgaggttttaagactaactaaactcgttgtggactcacacgtacagtatagacttgggaacgtggatgccttccagttggcagatggactgcaatatatatttgcacacgtagggcagctcacaggcatgtataggtataagtacaagctgatgaggcagataagaatgtgcaaagacctcaaacacctcatatattaccgtttcaacactggccctgtggggaagggcccaggatgcggattctgggcagcaggttggagggtgtggctattcttcatgcgaggcattacaccgctgcttgagcggtggttaggaaaccttctggctcggcagtttgagggcagacactccaaaggggtcgccaaaacagtgaccaagcagagggtcgagtcccatttcgacctggagttacgggctgctgtgatgcatgatattctggatatgatgcccgaggggatcaaacagaataaggcccgtacaattctacagcatctgtcagaggcttggcggtgctggaaagccaacatcccatggaaagtgccgggtttacctacaccaatagagaacatgattcttcgatatgttaaagcgaaggctgattggtggactaacactgcccactacaacagagagcgcatccgcaggggcgctaccgttgacaaaactgtgtgcaagaaaaaccttggaaggctgacccggttatacctcaaagccgagcaagagcgccagcacaattacctgaaagacgggccatacattactgctgaggaggcggtggcggtgtatacaaccactgtgcactggctcgaatcacggcgtttcagtccaattccgttccctccactgtcctacaaacatgataccaagcttctcatcctggccctggaacgtctgaaggaagcttacagtgtgaagagtaggctgaatcagagccagagagaggagttgggcttgatcgaacaggcatatgacaacccccacgaagccctgtctcgaattaagcgacacctactgactcagagagcttttaaagaagtgggaatcgaattcatggatctgtactcgcatctggtacccgtctatgacgtggagccgctggagaaaatcactgatgcctacctcgatcagtacctgtggtacgaggcagacaagcgcaggctgtttccgccttggattaagcccgctgacaccgaacctcccccactgctcgtgtataagtggtgccaggggattaataacctgcaggacgtatgggaaacatctgagggcgagtgtaacgtgatgcttgagtcacgatttgagaaaatgtacgagaagatcgacttgacactgctgaaccggctgttgcgtctcatagtggaccacaacattgccgactatatgacagcaaagaacaacgtcgtgatcaattacaaggacatgaaccatacaaactcctacgggatcatcagaggccttcagttcgcatcattcatagtgcagtattacggactggtgatggatctgttggtcctaggcctacatcgcgcatcagaaatggccggacctccacaaatgccgaatgactttctgtccttccaggatattgctacagaggctgctcatccgattcgactgttttgtcggtatatcgaccggatacacattttttttaggttcaccgccgacgaggcgagggacctgattcagaggtacttgaccgaacaccccgatccaaacaatgagaatatcgtgggctataacaacaagaaatgctggcccagggatgcaagaatgcggctgatgaagcacgacgtgaatctcggcagggccgtgttctgggacattaagaaccgcctgcctaggtcggtgaccactgtgcaatgggagaatagcttcgtcagcgtttattcgaaagataatcctaacctcctttttaatatgtgtggatttgagtgcagaatcctccccaagtgcagaacaagctatgaggaattcacgcacaaggatggcgtgtggaacttacagaacgaggtcaccaaggagcgtacggcccagtgttttttgcgagtcgacgacgaaagcatgcagcgctttcataatcgcgtcaggcagatacttatggctagcggaagtactacgttcaccaaaatcgtcaacaaatggaatactgccctgatcgggctcatgacctactttcgtgaagccgtcgtcaacacccaagaacttctcgacctgcttgtgaagtgtgagaataagatccagacccggattaagatcggactgaattctaaaatgcccagccggtttccccctgtagtcttttacacccccaaggagctgggtgggcttggtatgcttagtatggggcacgtgctgattccacagtcagacctcaggtggagcaaacaaaccgacgttggaataactcatttccgtagcggtatgtcacacgaggaggatcagctaatccccaatctgtacaggtacattcagccatgggaatccgagtttattgattctcagagagtgtgggctgagtatgcgctgaaaagacaggaagctatcgctcagaaccgcagattgaccctggaagacctggaagactcttgggacaggggtatccccaggattaacaccctgttccagaaagacaggcacaccttggcctacgacaaggggtggcgggtgcgcacagatttcaaacagtaccaggtcctgaagcagaaccctttttggtggactcatcagcgtcacgacggaaagctctggaatctcaataactataggactgacatgatccaggccctgggtggggttgagggcatcctggagcatactctcttcaagggcacatattttcccacctgggagggcctattctgggaaaaggctagtggctttgaggaaagcatgaaatggaaaaagttgactaacgcacagcgctccggactcaaccaaatccctaataggcgtttcacactttggtggtcccccactataaacagggcaaatgtttatgtcggttttcaggttcagctcgatctgacaggaatctttatgcatggcaagatcccaactctgaagataagtcttattcagattttcagggcacatctttggcagaagatccacgaaagcattgttatggatctatgccaggtcttcgatcaagaactcgatgcacttgagatagaaaccgtccagaaagagaccatacatcccagaaagtcctacaaaatgaactcttcttgtgccgatattctgctgtttgcctcatataagtggaacgtctcaaggccctcactccttgcagattctaaagacgtaatggattctactaccacgcagaaatactggatcgatatccagctgcggtggggggactatgattcacacgacatcgagcgctatgctagggccaagttcctggactacacaaccgacaacatgtcgatctaccctagccccactggggttctgattgccattgatttggcttataacctccattcggcctacggtaattggtttcctggctccaagcccctaatacagcaggcaatggctaaaattatgaaggcaaatccagctctatacgtgttgcgtgagaggatcagaaaagggcttcagctgtactcatctgaacctactgagccatacctgagtagccaaaactatggagagctcttttcaaaccaaattatttggttcgtggatgacacgaacgtatatagggttacgatacataaaacctttgaaggcaatttgaccactaagcctatcaatggagctatttttatcttcaatccacgcacaggccagctgtttctgaagattatccatactagcgtttgggccggtcagaagcgtctgggtcagttagctaagtggaaaactgcggaagaggtagcagccctcattagatccctgcccgtcgaagaacagcccaaacagattattgtaacccggaagggaatgctagacccacttgaggtgcaccttctagactttcccaacatcgtgataaaaggcagcgaactgcagttgccctttcaggcgtgtctgaaagtggagaaatttggagacctgattttgaaggcgactgagcctcaaatggttttgtttaacctctacgatgattggctcaagacgatctctagttatacagccttctccagactcatcctcatcctgagagcccttcatgtgaacaacgaccgcgctaaggtaattctaaagccggacaaaactacaatcacagagccacatcatatctggccaacgttgaccgacgaggagtggatcaaagtcgaagtgcagctgaaggacctaatattggcggactacggaaagaaaaacaacgtgaacgtagctagtctcactcagtctgagatccgtgacatcatcctgggtatggagatctctgccccatctcaacaacgccaacagatcgccgaaatcgaaaaacagaccaaagaacaaagtcagctgactgccacccagacccgtaccgtgaacaaacatggcgacgagatcatcaccagtaccacttccaactatgaaacacaaaccttctcttccaagacagagtggcgcgtgagagcaattagcgcagctaatttgcacctgaggaccaatcacatctatgtgagtagcgatgacataaaggagacaggctatacttatatcctgcccaagaatgtgttgaagaagtttatttgcattagcgacctgcgagcacagattgcaggctacctgtacggagtctctccaccggacaacccacaggttaaagagatccggtgtatcgtgatggtcccacagtggggaactcaccagacagtacacctgccaggacaactgcctcagcatgaatacctaaaggaaatggagcctctgggttggattcatacccagcctaacgaaagccctcagctgtccccccaagacgtgactactcacgctaaaatcatggctgataatccctcttgggatggagaaaaaaccattataatcacctgctcattcacccccggatcgtgcaccctgaccgcctacaagctgacaccttcagggtacgaatggggacgccagaataccgacaaaggcaacaatcctaaggggtatctcccatcacattacgaaagggtacagatgctgctaagcgaccgattcctgggcttcttcatggtgccggctcagtcaagttggaactacaattttatgggcgtacgacacgaccctaatatgaagtatgaactccagctcgccaacccaaaggaattttaccacgaagtgcacaggcccagccactttttaaatttcgccctcttgcaggagggcgaggtgtacagtgctgacagggaggatctgtatgcgta

SEQ ID NO: 237408 - DNA, 1392 bp, synthetic construct
  misc_feature 1..1392: note = Description of Artificial Sequence: Synthetic coding sequence
  source 1..1392: mol_type = other DNA
atgatccaagcgctggggggagtagagggaatcttggaacacacactgtttaaaggcacatatttccccacctgggagggcctcttctgggaaaaagccagtggcttcgaggaatcaatgaaatggaaaaagctcacaaatgcacagaggtcaggcctgaatcagattcctaatcggagatttacgctctggtggtccccaactattaaccgtgccaatgtctatgttgggttccaggtgcagctcgacctcacaggaattttcatgcatggaaagattccaacccttaaaatctcacttatacaaatcttcagagctcacttgtggcagaagattcacgagagcatcgtgatggacctctgtcaagtgtttgaccaggagctggatgctctcgagatagaaactgtccagaaggaaacaatccatccgagaaagagttataagatgaattccagctgtgcagatattctgctctttgcaagctacaagtggaacgtaagccgccctagccttttagccgacagcaaggatgtaatggactccacgactacgcaaaagtactggatagatatccagctgaggtggggcgactatgacagccatgatatcgagaggtacgccagagccaaattcctcgattatactactgacaacatgtccatctacccaagccctaccggggtgctgatagcaatcgacttggcgtataatctgcattcatacagcgaggtgggtagcctccaacaagcttctcataccaccggtgccaagatcatgaaggcgaatccggcactatacgttctcagggaacgtattagaaaaggcttgcagctgtattcgtctgaacccaccgagccatatctgtcgagccagaactacggagaactgtttagcaaccagattatatggtttgtagatgatactaacgtctatcgtgtgaccatccacaagacgtttgagggcaacctgaccaccaagcctattaatggtgcaatctttatttttaatccaagaaccggacagttatttcttaagatcatacacacgtcagtctgggccggacaaaagcgattaggacagctcgccaagtggaaaaccgcagaggaggtcgccgcactcatcaggtcactgcccgtagaggaacaaccaaaacaaattattgtgactcggaagggtatgctggatcctctcgaggttcatctgctggacttcccaaacatagtgatcaaagggagcgagttgcaactgccatttcaggcctgccttaaagtggagaagtttggggatctgattttaaaagctacggaacctcaaatggtcctgttcaacctgtacgacgactggcttaagactatttcaagttatactgccttctcacgcctcattctgtag

SEQ ID NO: 237409 - DNA, 2727 bp, synthetic construct
  misc_feature 1..2727: note = Description of Artificial Sequence: Synthetic coding sequence
  source 1..2727: mol_type = other DNA
atggcggacgggggaggacccaaggatgcgcctagcttgcgatcctcacccggaccagccccacgtgtgccgagggccgtaggtccttcaggaggaggtggtgagacaccacgcactgctgcactggcccttaggtttgataagcccataaaacaggctttttacaatacgggggctgtattgttcgtttgcctgtgctgcggcgctgccgttttggtatactttatcttggaggcttttctcagacccctcctgtgggccgttctctgcgggaccttcctgcacccctttaagtcatccctgaccaggctgggcaggcattggctccagaggctccatagggcccacacccctatagtacttgcagcactactccttcccctctgtttcgtcgactatggcgttgaggctttaggtgaacaggccctgcggaggaggcgcttgctgcttcttctgggcgcagggggacccctgttatatggcttatactgtctgggttcataccttggcgttcaggtgctgctggtgcacgctgccaccctgatctgcagagggttagattacttctcctcactctggatctggactctggtagtcggctatgtacttacggtgtcattcaagtggaacgcatctacagaacgctacctacgagcggtgagtatccccgtgtggataatcttattgttccatctcgcctccctagcgggatcttggcgcatccctgtttttctggttattgtcttcctgatgtcagtgggtacgctgtacgaaaagcagaatggcaaggagtcgtctggggcagagctccccggtcaggtcatcagtatggccgcttccacacttgcaaaccttgccatttctatcacaggctacgaaagcagctcagaggatcagccttctactcaacctgctgaagcggtggatcggggtgagagcgcaccaacactgtccacatctccctctccatcttccccgtcgcctaccagccctagtcccacacttggccgacgaaggcctgagatcggcacatttctgcgaaagaaaaagacgtctgatatctacttcgtctctttagtatgggcaattgtcgttatgcaaatttggctcaacctctggatagtgcagctgctgccagtcccaatcgctgtgtggatcctgaagaagctagtgattcattttggcgtggtggattttttggagaaaaggtaccatgtgtggtggggcatcatcgagagcttcctcaaagagaggcaaggtgctctggcgccatggccaattgtcggtctggggaaattccttctgaaggtggattcaaaactctggcattggctgaataaaaaaatgataatttggctggaaaagatgctggacaaaatcatctcgatttttataatttttctgctggtcatcggaacacttctgctggctctgctgctcacagctaaagtacaccaggagtctgtgcatatgatagaagtgacttctaacctcatcaatgagaccttagctaatcatcctgaatgggcaaactggctcccagaggcccaggtggtccagcgggctctcaactccgcagccaacaacgtttaccagtacgggagagaatggattacccacaagctgcataaaattctaggagataaggtgaacaacaccgcagttattgagaagcaggtgctggagttgtgggataggctgtaccactcgtggttcgtgaagaatgtgacacactctggacgacacaagggacaaaagctgcatgttagccgccagaatagttggctgggcgacatattggactggcaagatattgtgtcgtttgtgcatgagaacatcgaaactttcttgagtatactggagagcctgtggatagtgatgagccgcaatgtgtctcttctattcacaactgtcactacactgttgaccatcctgttttattccggaaccgcactgcttaactttgtcctgtccctaataattttccttaccacactgttctatttgttgagcagtagcgatgagtactataagcccgtaaaatgggtgatctcactaacaccactgagccagcccggaccctccagcaatatcatcggccagtccgttgaagaagcgatcagaggcgtttttgatgcgtcacttaaaatggcgggattctacggtttgtacacctggcttacacacaccatgtttggcataaatatcgttttcatcccatcagcacttgcagcaattttgggggctgtaccgtttttgggaacatattgggccgctgtccccgctgtgctggacttgtggcttacgcaggggcttgggtgtaaggcgatattgctcctcattttccatttgttgccaacttattttgtcgatacggcaatctacagtgatatctctggaggtgggcacccgtatctgaccggactggcagtggccggaggagcttattacctcggactggagggtgctattatcggcccaatcctcttatgcatcctagtggtggctagcaacatctattccgcaatgctcgtgtcccccacaaactccgtgcccactccaaaccaaaccccctggcccgctcagccacagcgcacattccgggacatctcacgcagtgaaatcttttctgtggacgtggtatcttcagctgttatcttccggaaatttaagttcgatagcgaattcagctccgctgtggccttgtgtcccagtagttgcgcctag

SEQ ID NO: 237410 - DNA, 1062 bp, synthetic construct
  misc_feature 1..1062: note = Description of Artificial Sequence: Synthetic coding sequence
  source 1..1062: mol_type = other DNA
atgctaaagagctgttctagggcctccttcagtccttctgtccgcaaaccgcctctgattctgcgccgacttttgagtgaagacgttggcatggatattccattcgaggagggggtgctgagcccttcagctgcggatatgaggcccgagcccccaaactccctagaccttaacgacacccatccccgtcgaattaaactgactgccccaaacatcaatctttcactggaccagtctgaggggagtatactgtccgacgataatcttgatagtcccgatgaaatagatataaatgtggacgaactggataccccagacgaagcagacagtttcgagtacacaggacatgaggatcccaccgccaataaggacagtggtcaggagagcgaaagcataccagagtacacagccgaggaggagagggaggataacaggctgtggcgaacagtggtgatcggagagcaggagcagcggatcgacatgaaagtaattgagccctaccgccgtgtgatctctcacggagggtactatggagacggactcaatgctattatagttttcgctgcctgcttcctccccgactcttcccgagcggactaccactatgtgatggagaacctgttcctgtacgttatctccaccctggaactgatggttgccgaagactatatgattgtctatttgaacggggcaacaccacgtcgtcgtatgccgggtcttggttggatgaagaagtgctaccaaatgattgatcgaagattaagaaagaacctgaagagctttattattgtacacccatcatggtttatcaggactattctggccgtaaccagacccttcatttctagtaaattctcaagcaagataaaatatgtgaactctctgtctgaactgagcgggttgattcctatggattgcattcacatacctgaatctatcattaaactggatgaagagctcagagaggctagtgaagcagccaaaacctcctgtctctacaatgatcccgagatgagctcaatggagaaagacatcgaccttaaactcaaggagaaaccttag

SEQ ID NO: 237411 - DNA, 9266 bp, synthetic construct
  misc_feature 1..9266: note = Description of Artificial Sequence: Synthetic coding sequence
  source 1..9266: mol_type = other DNA
atggaggagttcttacagcgggctaaaagtaagctgaatcggtccaagcggcttgagaaggtgcacgtcgtgatcggccctaaatcctgcgatctcgattccctaatttcaacgtttacatacgcctattttctggataaggtctcccccccaggagtgctgtgtctgcctgttctcaacatcccgaggacggaatttaattatttcactgagacgcggtttatcctagaggagctgaatattagcgagagttttcatatttttagagacgagataaatttgcatcaactcaatgatgagggaaaactaagcattacacttgtagggtcctccgtgttggcgagcgaggacaagactctcgagagtgccgtggtgaaagttattaacccagtggagcagtctgacgctaatgtggagttccgggaatccagctcatctcttgtactgaaggaaatcttacaagaagccccagaactcattacagaacagttggcgcacaggctccgcggatccatcctatttaaatggatgaccatggagagtgagaaaatttccgagaagcaagaggagatcctgagtatcctcgaagagaaattcccaaatctgcctccaagggaggacattattaatgtattgcaggaaacccagtttagcgcgcagggcctgtccattgagcagactatgttaaaggacctgaaggaactctcagacggggaaatcaaggtggcgatcagtaccgtctctatgaatctcgaaaactgtctgttccactctaacattacgagcgacttaaaggccttcaccgacaaattcgggttcgatgtgttgatccttttcagctcctacctttccgaagagcagcagccccgtagacagattgccgtgtattccgagaatatggagctgtgctcccaaatctgctgcgagttagaggagtgccagaacccatgtctcgaattggagccattcgactgcgggtgcgatgagatcctcgtgtatcagcaagaggacccaagcgtgacctgtgaccaggtggtgcttgtggtgaaggaggtaattaacagacggtgtcccgagatggtctctaattcccgaacaagctctacagaggccgtggctggaagcgccccactgtcacaggggtcatcaggcattatggagctctacgggagcgacatcgagccccaaccctcttccgtgaacttcatcgagaatcccccagatctgaacgattccaatcaggctcaggtcgacgccaatgtagatctggtgagtccggactctggccttgctacaatacgaagcagtcgttcatcaaaggagagttctgtgttcctgtccgatgatagccctgtgggggaaggcgcaggacctcatcataccctgctgcccggacttgatagctatagtcctatccctgagggggcagtcgccgaggagcacgcctggagtggggaacacggagagcactttgacctgttcaattttgaccctgcccctatggcaagtgggcagtctcagcaaagctcccactccgccgattactcccccgcagacgacttctttccgaacagtgatctcagcgaggggcagctgcctgccggtccagaaggactcgacgggatgggcactaatatgagtaactatagctcctccagtctgctgagcggagctggcaaggactcactggtggaacacgatgaagaatttgtccagcggcaagatagccctagagacaatagcgaacgcaatctcagtcttaccgactttgtcggggacgaatctccaagccctgaacgccttaaaaataccgggaaaaggattccgccaacgccaatgaattccctggtcgagtcctcaccatccacagaggagccagcttcgctctacacagaggatatgacccagaaggcaactgacacgggccacatgggtccgccacagacacatgcacggtgtagttcttggtggggtggtttggagatagattccaagaacatcgcagatgcttggagcagttcagagcaggagagtgtgtttcagtcccccgagtcctggaaggagcacaaacccagctccattgatcgccgtgcatcggactccgtgtttcagcccaaaagtctggagttcaccaaatctggcccatgggagtccgaattcggccagcccgaactggggtctaatgatattcaggacaagaatgaggaatctttgccctttcagaatctgccgatggaaaagagccctctgcccaacacaagtccccagggcacaaaccacctgatcgaggattttgcttctctctggcattccgggaggtcccctaccgctatgccggagccgtgggggaatcccactgacgacggcgagcctgccgctgtcgctccctttcccgcttggtcagcttttggcaaggaggaccacgacgaggctcttaaaaacacatggaacctgcatcctaccagcagcaagacaccctcggtaagagacccaaatgagtgggcaatggctaagtcggggttcgctttcagtagttcagagttgctcgacaactcgccatccgagatcaataatgaggctgcacccgagatctggggaaaaaagaataacgattcaagagatcatatcttcgcacctggcaacccctcatctgatttggatcatacctggacaaattcaaagccaccaaaggaggatcagaacggcctggtggatcctaaaactagaggcaaggtttacgaaaaggtggactcatggaacctcttcgaagaaaacatgaagaagggtggcagcgatgtgctagtcccctgggaggatagttttctatcctataaatgctctgattacagtgcctcaaatctgggagaggatagcgtaccttctccactggataccaattactcgactagcgacagctacacttccccaactttcgccggtgacgaaaaggaaacagaacacaaaccatttgctaaggaagaaggcttcgaaagcaaggacgggaattctaccgctgaagagaccgatatccccccacagtctttgcagcagagcagtcgcaatcggatttcatccgggccaggtaatctggacatgtgggcctcaccccatactgacaattccagcgagatcaacacaacccacaatcttgacgaaaacgagctcaagacagagcataccgacggcaagaatatcagtatggaggatgacgtcggagagtcctcacagtcctcctacgatgacccaagcatgatgcagctctacaacgaaaccaaccgtcagctgaccctgctgcatagcagcaccaatagccggcagaccgcccctgatagcctggatctgtggaatcgggtcatcctcgaagatacccagtccaccgccactataagcgatatggacaacgatctcgactgggacgactgtagcggaggtgctgctattcccagcgatgggcaaaccgaagggtatatggcagaaggctccgaacctgaaactcgcttcacagtgcggcagctggagccctggggcctggagtatcaggaagccaaccaggtcgattgggagctaccagccagcgacgagcacacaaaagacagtgccccaagcgaacaccacacactgaatgagaagtccggtcaactcattgcgaacagcatctgggattcggtcatgcgcgataaggacatgtcatcgttcatgctccccggaagcagccacatcaccgattcagagcaacgcgaactgccccctgagatccccagccacagcgcaaacgttaaggatacccatagtccggatgcccctgccgcaagtggaacttctgaatccgaagcgctgatctctcacctagataagcaagacactgaacgcgagacgctccagagcgatgcagcatcgttagctacccgcctggaaaatcctggctactttcctcacccagacccatggaaagggcacggggacggacaatctgaatccgagaaagaagctcagggtgccaccgatcggggacatttggatgaagaggaggtcattgcgtcgggcgtggaaaacgcctcaggaatttctgaaaaagggcagtcagaccaggaactgagctcattggttgcgagtgaacatcaagagatctgtattaagtctggcaagatctcatcactagccgtcacatttagtccacagacagaggagcccgaggaggtgttggaatatgaagagggctcgtacaacctcgattctagggacgtccagactggaatgagtgctgataacctgcagccgaaagatacccatgagaagcacttgatgtcccagcgcaacagcggggaaaccacagaaacatccgacgggatgaattttacgaagtacgttagtgtgccagaaaaggacctggagaagaccgaggagtgcaacttcctggagccagaaaatgttgggggagggccacctcaccgtgtcccgcgttcactggacttcggagacgtcccaattgattccgacgtgcacgtgagctccacttgtagtgagatcacgaagaatctggacgtgaaaggatcggaaaatagtcttccaggcgctggcagctctggaaactttgaccgcgatacaatctcaagtgagtacacacacagctctgcttcctcaccggaactgaatgactcctccgtggctttgagttcatggggccagcagccatcgagtggatatcaggaggagaaccaggggaactggtcagaacaaaaccatcaggaatccgaactcattacaacagatggacaggtcgagattgttacaaaggtcaaggacctggagaaaaataggataaatgagttcgaaaaatcatttgatcgtaaaacaccaactttcttagaaatatggaacgattccgtagatggcgacagcttcagctccctgagtagccccgagactggcaagtatagcgagcattccggaacccaccaggaaagcaaccttattgctagctatcaagaaaagaatgaacacgacatcagtgcaactgtgcagccagaagacgctcgagtgattagtacatcatccggcagtgacgacgatagtgtaggaggcgaggagtcgatcgaagaggaaatccaggtggctaactgccacgtggctgaggatgagagtagggcttgggactctctcaacgagagcaataaatttcttgtgaccgccgatcccaagtccgagaacatttacgattacctggatagctcagagcccgcagagaacgagaacaaatcaaacccgttctgtgacaaccagcagagttctccagacccatggacattttcccctctgactgaaaccgaaatgcaaattaccgccgtggaaaaggagaaacgaagttctccagagaccggcacaacgggagacgtagcctggcagatctcccctaaagcaagttttcccaagaatgaagataattctcagctggaaatgctgggattttctgcagatagcaccgaatggtggaaggcttcgccccaagaaggtcggcttatcgagagtcccttcgaacgggaactgtctgattcatcaggcgtgctggaaattaattcttcggttcatcagaacgcctctccatggggggttcccgtgcagggggatatcgagcccgtggagacccactatacgaacccattcagtgacaatcatcaatctcctttcttggagggcaatgggaaaaattcccacgaacagctgtggaacattcagccacgacagcctgacccggacgcagacaagttttcacaactagtgaaactggatcagataaaagagaaggactctcgggagcagacctttgtgtccgcggcaggggatgagctgacaccggagacccccactcaggagcaatgccaggatactatgctcccggtttgcgaccacccagatacggcttttactcatgccgaggagaactcttgcgtgactagcaatgtaagtactaacgagggccaggagaccaaccaatgggagcaggaaaagtcttacctgggcgaaatgacaaacagttctatcgccactgaaaacttccccgctgtctctagccccacacaactgattatgaaacccggaagcgagtgggacggaagtactccatctgaggattctcgcggtaccttcgtgcccgacatacttcacggaaattttcaagagggagggcaactcgccagcgcagcacccgacctgtggattgatgccaagaagccattttctttgaaggcagacggcgagaaccctgacatcctcacacactgcgagcatgatagcaatagtcaggcctcggattctccagacatctgtcatgactcggaggccaaacaggaaactgagaagcatttaagcgcttgcatgggtcctgaagtcgagtcatctgagctgtgtctgacagagcctgaaatcgatgaagaacctatttacgaaccgggacgggagtttgtgcctagtaacgcggagttagactcagagaacgccaccgtgcttccccctatcggctaccaggccgacatcaagggttcatcgcagcccgcttcccacaagggatcacccgaaccgagcgagataaacggagataatagtacaggactgcaggtgtctgaaaaaggggcatctccagacatggccccaattttagagcctgtggaccggcgtattcctcggatcgagaatgtggccacatcaatatttgtgacccaccaggagcccacacccgagggtgacgggtcatggatctccgatagtttctcccctgagtcccagccaggcgctagggcgttgttcgacggagacccccacctaagtactgagaacccggctctggttcccgatgccctgttggcatccgatacatgcctcgacatatcagaagccgcatttgaccactcgttttccgatgcatccggtctcaatacctctaccggaaccatcgatgacatgagcaagctgacactgtctgagggtcacccggagactcccgtggatggagacttgggtaagcaggacatttgcagcagcgaagcatcctggggcgacttcgagtacgacgtcatgggacagaacattgatgaggacctcctacgtgagcccgaacatttcctctatggaggcgaccccccattagaggaagactcccttaaacaaagtctcgcaccatatacgcccccttttgacctgtcgtatctgactgagcccgctcagagcgccgaaacaatcgaagaggctggatcaccagaggatgaatcattgggttgtcgcgcagccgagatcgtactttctgctctcccagatcggcgatcagaaggcaatcaggccgagacaaagaacagactgcccggaagccagctggcggtgctgcacatccgggaagatccagaaagtgtgtacctgcccgttggtgccggatccaacatcctttccccaagcaacgttgactgggaggttgaaacagataatagtgacctgcctgccggaggtgacattggaccaccgaacggcgcaagcaaggagatctcagagctggaggaagaaaaaacaatcccgactaaggaaccagaacaaataaaaagcgaatataaagaggagaggtgtaccgagaaaaacgaagataggcacgcactccatatggattacatcctggtaaatagagaagagaacagccactctaagccagaaacttgcgaagaacgggagtccatcgcggaactggagttgtacgtgggaagcaaggagactggcctgcaggggacccaactggcatccttcccagacacgtgtcagcccgcttccctgaatgaaagaaaaggtttgagcgccgaaaagatgtcctctaagagtgacacgcgaagctctttcgagagtccagcccaagaccagtcctggatgtttctggggcatagcgaggtgggcgacccttccctggacgctcgggactccggaccaggatggtctggtaaaacagtagaacccttctcagagcttggcctgggcgagggccctcagctgcagattcttgaagagatgaagccccttgagtctctggctttggaagaggcaagtggtccggtctctcagagtcaaaagagcaagagccggggtcgcgctgggccagatgcggtcacgctccaggctgtgacccatgacaacgagtgggagatgttgtcgccgcaacccgtgcagaaaaacatgattcctgataccgagatggaggaggagaccgaattcctggaactggggaccagaatctcccgacctaatggcctattaagcgaggatgtgggcatggacatccccttcgaggaaggagttctgagcccctccgctgctgacatgagacctgagcctcccaatagcctagacctgaatgatacccatcccaggcgtatcaagcttaccgctcccaacattaatttatctctagatcaaagcgaggggtccattctctcagacgacaatcttgattcacctgatgagatcgacatcaatgtggacgagctggatacacccgatgaagccgacagcttcgagtacaccggtcacgacccgactgctaataaggactctggacaagaaagtgagtcaattccggaatatactgctgaggaagaacgggaagacaatagattgtggaggacagtggtgatcggagagcaggagcagcgaatcgacatgaaggttatcgaaccttatcggcgagtgatttctcatgggggatactacggcgatggcttgaacgccatcatagtctttgcagcctgttttttgccggactctagccgggctgactatcactacgtgatggagaacttgtttctgtacgtcatctccacactggagttaatggtcgccgaggattatatgattgtgtatctgaatggcgctacaccgcgacgacggatgccaggtcttggctggatgaagaagtgttatcagatgattgaccgtaggctgcggaagaatctgaagagcttcatcatagttcatccaagttggtttatccgaaccattctggcagtgaccaggccgtttatatcctccaagttttcctccaagatcaaatatgtaaatagcttgtcggagttgtccggactgattccaatggactgcatccacatcccagaatccattatcaaactggatgaggaacttcgtgaagcctctgaagctgctaagacatcttgcctttacaacgatcccgagatgtcctccatggagaaagacatcgatttaaagctcaaagaaaagcctta

SEQ ID NO: 237412 - DNA, 9164 bp, synthetic construct
  misc_feature 1..9164: note = Description of Artificial Sequence: Synthetic coding sequence
  source 1..9164: mol_type = other DNA
cggaatttgatgcacagaatgaaggagtctgaaaaccggtcaaaaagacttgagaaagtgcacgttgtgatcgggccaaagtcgtgtgatctggacagcctgatatctaccttcacctatgcctacttcttggataaggtgagcccgcctggcgtgctttgcctgccagtgttaaatatacctcgcacagagtttaattacttcactgaaactcggtttattttagaggaactgaatatcagtgagtcctttcacatattcagggacgagatcaacttgcatcagctgaatgacgaagggaagttgtctatcacactcgttggtagcagtgtcctggcctcagaggacaagacccttgagtcagccgtggtgaaggtgattaaccccgtggagcagagcgacgcaaatgtggaatttagggagagcagcagcagcctggttcttaaagaaatacttcaggaagcacccgaactcattacagagcagctagcacacagactgagaggctcaattctgtttaagtggatgactatggagagcgaaaaaatttcagagaagcaggaggaaatcctctctattctcgaggagaaatttcccaacctgccacctcgggaggatatcataaatgtgctgcaagagacacagttcagcgcacaggggctgtctatcgagcaaaccatgctgaaagacctgaaggaactgtctgacggagagattaaagtcgctataagtacagtcagcatgaaccttgagaattgtttgtttcacagcaatatcacctcagacctgaaagcctttaccgataaatttggttttgacgttctgatcttattttcctcatatctttccgaggagcagcaacctcggagacagatagcagtctacagtgagaacatggaactgtgtagtcagatttgctgtgaacttgaggagtgtcaaaacccatgcctggagctcgaaccattcgattgcggatgcgatgaaattctggtgtaccagcaagaagaccccagcgtgacttgtgaccaggtcgtcctggtagtgaaggaggtaattaaccgaaggtgcccagagatggtgtctaacagcaggacctcctctacagaggccgtggccggtagtgctcccctcagtcagggtagcagtggcatcatggagctctacggatcagacatagagccacagcccagctccgtcaacttcatcgagaatccacctgatcttaacgattctaaccaggctcaggtggacgccaatgtggatttggtatcgcctgactctgggctggctaccatccggtctagtcgaagcagtaaggaatcctccgtgttcttatctgacgacagtcccgttggagagggcgcagggcctcaccacactctcttacccggattagactcctacagtccgatccctgagggagccgttgccgaagagcacgcctggagtggcgagcatggagaacattttgaccttttcaattttgacccagcaccaatggcaagcggccaaagccagcagtcctctcattccgcggattattctccagctgacgatttcttccctaattctgatctgtccgaagggcagctgcccgctgggcctgagggccttgatggaatgggtaccaacatgtcaaattattcatcttcatccctgctgtccggcgctggcaaagactccttggtggagcacgacgaagagtttgtgcagcggcaggatagtcctagggacaactccgaaagaaaccttagcttaaccgattttgtgggggacgaaagcccgtccccggagcgcttaaaaaatacaggaaagaggatccctccaaccccaatgaattccctggtggagtcctccccttcaaccgaagaaccggctagtctgtatactgaggatatgacacagaaagccaccgacactggccacatggggcctcctcagactcatgcccgttgctcatcctggtggggtggtctggagatcgactctaagaacattgcagatgcctggagctcttccgagcaggaatccgtttttcagtctcctgaatcctggaaggagcacaagccgtcttccatagatcggagggcaagcgactcagtattccaaccaaaaagtctcgagtttaccaaatccgggccttgggaatccgaatttggtcagcctgagctgggcagcaatgatatacaggacaaaaatgaggagtctctccccttccagaacctgcccatggaaaaatcacctcttcctaacacatcacctcagggaactaatcatctgatcgaagatttcgccagtctctggcattcagggaggagcccgacagccatgccagaaccctgggggaaccccaccgacgacggtgaaccggctgctgtcgctccattccccgcttggtccgcatttggcaaagaggaccatgacgaagccctcaaaaacacctggaacctgcatcccactagcagcaagacgccatccgtcagagaccccaatgagtgggccatggctaaatctggcttcgcattctcaagcagcgagctgctggacaacagccccagcgagattaacaacgaggcggctcctgaaatctgggggaagaagaacaatgactctcgtgaccacatcttcgctccgggaaatccgtcctccgacctggaccacacctggaccaacagtaagccgcctaaagaggatcaaaacggtctggtggaccctaagaccagaggaaaggtttacgaaaaggtcgactcctggaatctgttcgaagagaatatgaaaaagggcggttccgacgtgctggtgccttgggaggactcattcctgtcctacaagtgcagtgactactccgcctctaacctaggcgaggatagcgtgcccagccctctggacaccaactactctacgtctgattcctacacctctcccacgtttgccggtgatgagaaggaaacagagcacaagccatttgccaaggaagaaggtttcgaaagcaaagatggcaacagcacagccgaggagactgacatcccccctcagtcacttcagcagtctagccgcaaccgcatttcctccggcccaggaaacctggacatgtgggcctcaccgcatacagacaattccagtgaaattaatacgacccataacctggacgagaacgagcttaagacagaacatacggacggtaaaaacatctctatggaggacgacgtcggtgaaagtagccagagctcgtacgatgacccttccatgatgcagctctataacgagacgaaccgccagctgactctgctgcacagctccaccaactcacggcaaaccgctcctgacagccttgacctgtggaatcgtgtgatcctcgaggatacacaaagcaccgccacgatcagtgatatggataatgatttggattgggacgattgctcaggcggtgcagcaattccttccgacgggcagactgaggggtacatggcggaaggatctgagcctgagactcgtttcaccgtccggcagttagaaccatgggggctcgaataccaagaagctaaccaggtggactgggaactcccagccagtgacgaacacaccaaggattccgccccatcagaacaccacactctgaacgaaaaatccgggcagctgatcgctaattccatttgggactcagtcatgcgcgataaggacatgagtagctttatgttaccgggttcaagtcatatcaccgactcagagcaacgagagctgcccccagaaattcccagccatagcgccaacgtgaaggacactcactcccccgacgcaccagccgcaagcggcacatccgagtccgaagccctgattagtcatttggacaagcaggacactgagagagagacattacaatcagatgccgcatctcttgccacaagattggaaaaccccggatacttcccacaccctgacccctggaaggggcacggagacggccaatcagaatcagagaaagaagctcagggcgctaccgaccgcggacaccttgatgaggaagaggtaattgcctccggcgtcgaaaatgcctccgggataagtgaaaagggtcagtccgaccaggaattgtcctctctggtggctagcgagcatcaggagatttgtatcaagtccggcaagatcagttccctcgcagtcaccttttcgccgcagaccgaggagcctgaagaggtcctggagtacgaggagggatcctataatctggacagtagggacgtgcagacgggcatgtctgccgataacttgcagccaaaagatacacatgagaaacacttgatgtctcagcgcaactccggagaaacaactgaaacatccgacggcatgaacttcaccaagtacgtcagtgtgcctgaaaaggacctggaaaaaactgaggaatgcaatttcctcgaacctgaaaacgttggcggaggaccaccccaccgtgtcccaagatccttagattttggcgacgtgcctatcgactctgacgtgcacgtgagctccacttgcagcgagataaccaaaaacctggacgtgaagggcagcgagaatagtctgccaggtgccggaagttctggcaatttcgatagagataccatttcctcagaatatacacatagcagtgcttctagtcccgaactgaacgatagttccgtcgctctttctagttggggacagcaacctagctcagggtatcaggaggagaaccaggggaattggagcgagcagaaccaccaggagtctgagctgatcacgactgatggacaggtggaaatcgtcacgaaggtgaaagatctcgagaagaataggatcaacgaatttgaaaagagtttcgatcgcaagacacccaccttcctggagatctggaacgattcagtcgacggtgactctttctcctccctctcatcaccagagaccgggaagtacagcgagcactctggcacccaccaggaaagcaacctgattgcttcctaccaggagaagaatgaacacgacattagcgcaacggttcagcccgaagatgctcgcgtgatcagcacctcttcaggctcagacgacgatagcgttggcggagaggaatcgatcgaagaggagatccaggttgctaactgtcatgtcgcggaagacgagagtcgggcttgggattcccttaatgagagcaacaagttcttggttacggcagatcccaagtcggaaaatatctacgactacctggacagttcagagcctgccgagaacgagaataaaagcaatcccttttgtgacaatcagcagtcatcacccgacccttggaccttctccccattgactgagactgagatgcagataactgcggtggagaaggagaaaaggagtagtcccgaaaccggcactaccggcgacgtggcctggcagatttccccaaaagccagctttcccaagaacgaggacaattctcagctcgaaatgttagggtttagcgccgatagcaccgaatggtggaaggctagtccacaggagggtagactgattgagtcaccctttgagagggagttgtctgatagcagcggtgtactggaaattaactcctcggtgcatcaaaacgcaagtccttggggagttccggtgcagggagacatagagcccgttgaaactcattacaccaatcccttttcagacaaccaccagtcacccttcttggagggcaacggcaaaaattcccatgagcagctctggaatattcagcccaggcagccagaccctgacgcggacaagttctctcagctagtgaagttggaccaaatcaaggaaaaagactcacgagagcagaccttcgtgtctgctgccggagacgagctgactccagaaactccgacgcaggaacaatgccaagacacgatgttgccggtttgtgaccatcctgatactgcatttacacatgccgaggagaattcctgtgtgacatcaaacgtatcaacaaacgagggccaagagaccaaccagtgggagcaggagaagagctatctgggggagatgactaactcaagcatcgccaccgaaaactttcccgctgtgtccagtcctacacagctcatcatgaaaccgggaagtgagtgggatggatctacgcccagcgaagattcccgcggaactttcgtgcccgacatcctacacggaaattttcaggagggtggccagttagcttctgcagctccggacctgtggattgacgctaaaaagccattctctctaaaagcagatggcgaaaatcccgacattctcacgcactgtgaacatgactctaattcccaagcatctgactcacccgacatctgccatgacagtgaggccaagcaagaaactgagaagcatctgtccgcgtgtatgggtccggaagtggaaagctccgagctttgcctaacagaaccagagattgacgaggagccaatttatgagccgggtagggagtttgtgccctcaaacgcagagttggattcggagaatgctaccgtgcttccgcctatcggctaccaggccgacatcaaaggttccagtcaacctgcttcgcacaagggcagccccgaaccatcagagatcaatggcgacaactccacaggcttacaggtgtccgaaaaaggggcttcccctgacatggccccaatcctagagccagtcgatagacgcattcccaggatcgaaaatgtggccactagtatcttcgtgactcatcaagagcccacgcccgaaggcgatggctcatggatatctgacagtttctcccctgaatcccaacctggggcacgcgctttattcgatggagaccctcatctgagcactgagaacccagctctggtcccggatgctttattggcaagcgatacatgtttggatataagcgaggccgcttttgatcattcattctctgacgccagcggcttgaatacatctacagggacaatagacgacatgtcgaagttgacactctctgagggccacccagagacgcctgtggatggagatttggggaagcaagacatttgctcttcagaggcgtcgtggggggacttcgagtatgacgtaatgggacaaaacattgacgaagacttactgagggagcccgaacactttctgtacggcggtgatccaccccttgaggaggactccctgaagcagtccttagccccttatacaccacctttcgatctgagttatttaactgagccggcacagtccgccgaaaccatcgaggaagcaggctcacctgaagacgagagcctgggatgccgcgctgctgaaattgtcttgtcagcgctgcctgaccgaaggtctgagggaaatcaggccgaaactaagaacagactccctggcagtcagctggctgtactccacatccgcgaggacccagaatccgtgtatctgcctgtaggagccggttcaaatatcttatcccctagcaacgtggattgggaggtggagaccgataacagcgacttgcctgctggcggagatattggccctcccaatggcgcttcgaaagaaattagcgagttagaggaagagaagacaatacccactaaagaaccggaacagatcaaaagcgaatacaaagaagagaggtgtaccgagaagaacgaagatcgccatgccctgcacatggactatatcctggtgaatcgagaggagaactctcattccaaacccgaaacctgtgaggaacgagagtcaatcgcagagctggagctgtatgtcggaagcaaggaaactggattgcaaggcacccagctagccagcttccccgatacctgtcagcccgcttctctaaatgagcggaagggtctgtctgccgagaagatgagttcaaaaagtgacacccgtagcagcttcgaaagtccagcccaggatcagtcctggatgtttctggggcacagcgaagttggagatcccagcctagatgccagagacagtgggccaggttggtccggaaaaacggtagagccattttctgagctcggattgggcgagggtcctcagctccagattttggaggagatgaagccattggaaagcctggccctggaggaagcttccggccctgtgtctcagtctcaaaaatccaagagcaggggcagagccggacccgacgcggtgacactgcaagcggtgacccacgacaatgagtgggagatgctgtctcctcaaccagtgcaaaagaacatgattcctgatacggagatggaggaggagaccgaattcctggaactgggcactcgcatctcccggccaaacggactgctctcagaggacgtgggaatggacatcccctttgaagaaggcgtgctgagcccatctgccgctgacatgagaccagagcctccaaattctctggatctgaacgatacacacccaagacggattaaactgactgctcctaatatcaatctgtcattggaccagtccgaaggcagcatcctatctgacgacaatctggatagtcctgatgaaatcgatatcaacgtggatgagctggacacccctgatgaagcagacagttttgagtacaccggccatgaggatcccaccgccaataaagattccggacaggagtccgagtccattccagaatacacagcagaagaagaaagggaagacaatcgattgtggcggaccgtcgtcatcggggaacaggagcaacgaatcgacatgaaggttattgagccctatagacgcgtaatcagtcacggtggcagcagaggatattacggcgacggtctgaacgctattattgttttcgcagcatgtttcctaccggatagctcccgagcggactaccattatgtaatggagaatctattcctttatgtgatttctacactggaactgatggtagcggaggactatatgatagtttacctgaacggcgctactcctcggagaagaatgccaggcctcgggtggatgaaaaagtgttaccaaatgattgacagacgcctgcgaaaaaaccttaagtcttttatcatcgtgcatccgtcctggttcatccggacgattttggcggttacccgacctttcatctcctccaaattctcttctaagatcaaatatgtcaactcactgagtgagctcagcggactgatccctatggactgcatccatatcccggagtctataatcaactacta

SEQ ID NO: 237413 - DNA, 783 bp, synthetic construct
  misc_feature 1..783: note = Description of Artificial Sequence: Synthetic coding sequence
  source 1..783: mol_type = other DNA
atagatatcaacgtggatgaactggacactcctgatgaggccgatagtttcgaatacacaggccacgacccaactgccaacaaggactccgggcaagagtccgaaagcatcccggaatacacagccgaagaggaaagggaagataacaggctgtggcggaccgtcgtgattggcgagcaggagcagcggatcgacatgaaggtgattgaaccctaccggagagtgatttcccatggcggtgactccgggtactacggcgacggacttaacgccattattgttttcgctgcttgcttcctgcctgattcgtcccgcgcagattaccattatgtgatggagaatctgtttttgtacgtcatcagcactcttgaactcatggtggcagaggactatatgatagtctaccttaatggagccacccctaggcgacggatgccagggttagggtggatgaagaagtgttatcaaatgatcgacagacggctgcgaaaaaatctgaagagctttattattgtgcatcccagctggttcattcgcactattctcgctgttacgcgccctttcatctcttctaagtttagcagcaagataaagtatgtcaacagtctatctgagctcagcggactcataccaatggactgtattcacattcctgagagcattattaaatacgatgaagagagatcttacaagagaagcgtcagaacaagttgcctctataatgacccagaaatgtcctctatggaaaaggacatagacctgaagctcaaagagaaaccatag

SEQ ID NO: 237414 - DNA, 7154 bp, synthetic construct
  misc_feature 1..7154: note = Description of Artificial Sequence: Synthetic coding sequence
  source 1..7154: mol_type = other DNA
tagttccagtctccagaaagctggaaagagcataagccaagttccattgaccgccgtgcgtcagacagcgtgtttcagcctaagtcattggagttcactaagtcaggaccatgggagtctgagttcggacaacccgaactcgggtcaaatgatatccaagataaaaatgaagaaagcctgcctttccagaatctccctatggagaaatcaccactgccaaatacctcaccgcagggaactaatcacctgatcgaggattttgcttctctgtggcactccggcagaagcccgacagcaatgccggagccttggggtaatccgacagacgacggggaacctgccgcagtagcccctttccctgcgtggtcagcattcggaaaggaagaccacgatgaagccctgaagaacacttggaatttacatcctacatcctcgaagaccccttccgtgcgggatcctaatgaatgggccatggccaaatccgggtttgccttctcctcaagcgaacttcttgataatagccccagtgagataaacaacgaggccgctcccgagatctggggtaagaagaacaatgactccagggaccatattttcgcacccggaaacccctctagtgatctcgaccatacctggactaatagtaaaccccctaaggaagatcagaacgggttggtggatccaaagacccgagggaaggtttatgagaaggtggatagctggaacctcttcgaagagaacatgaaaaaggggggttctgatgtcctggtcccgtgggaggactcctttctgtcctataagtgttcagattacagcgccagtaatctgggcgaagatagcgtcccctcccccttggacactaattactcgacatctgactcctacactagccccacattcgcaggggacgagaaagaaacggaacacaaacccttcgcaaaagaggagggattcgaatctaaggatggcaatagcactgccgaggagactgatatacctccacagtctctacagcagagctcccggaataggataagcagcggccctggcaacttggatatgtgggcaagtccccacactgacaattcctctgaaatcaatacaacccacaatcttgatgagaacgagctaaaaaccgaacacacagatggtaaaaacatctccatggaagatgacgttggcgagagctcgcagagctcctacgatgatccaagcatgatgcagctctataacgaaacaaacaggcagctcacccttctgcactcttccactaatagccgacaaactgcgcctgacagcctcgatctgtggaacagggttattttggaggatacccagtcaaccgctacaatttctgacatggacaatgacctcgactgggatgattgctccggcggagcagcaatccccagcgatggacaaacagaggggtacatggcggagggatctgaaccagagactcgcttcacagtgaggcagttggaaccctggggattggaataccaagaggccaaccaggttgattgggagctgccagcctctgatgaacataccaaagattctgccccttccgagcaccatacactgaacgagaagagcggacagctgatcgccaactctatctgggacagcgtgatgcgcgacaaggatatgtcttccttcatgttacccggtagctcgcatatcacagatagtgaacaaagggaacttcctcctgaaattccatctcatagtgcaaatgtaaaggatactcatagtcccgatgcaccagcagcatctgggacttcggaatctgaagctctgatcagccacctggacaagcaggataccgagcgcgagacactccagagtgacgccgctagcttggctacacggctggaaaatcccggatatttccctcatccagacccctggaagggacacggggacggtcagagtgaatcagaaaaggaggcacagggagcgaccgaccgcggtcacttagatgaagaagaggtgattgctagtggcgtggagaatgcctccgggatatctgaaaaaggacagtctgatcaagaactttctagtctggtggcatcagaacatcaggaaatttgtatcaagtccggaaagattagctcgctggcagtcactttctcacctcagaccgaggagccggaagaggtgctggagtacgaggaaggtagttacaatctggacagccgcgatgtccagacaggtatgtccgccgacaacctgcagccaaaggacacacacgagaagcacctaatgagccagcggaactctggtgaaaccaccgagaccagcgacggtatgaattttacaaaatacgtgagcgtgcctgagaaagatttagagaagactgaagaatgtaactttctagaaccagaaaacgtggggggtggcccacctcaccgcgtccctaggtctctcgacttcggagatgtaccaattgatagcgacgtccacgttagttccacctgctcagagattactaagaatttggacgtcaagggcagtgagaattcgctcccaggagcgggttctagcggaaactttgatcgggatacaattagctccgaatacactcacagttccgccagttctcccgagctaaacgactcaagtgtggccctttcttcctggggacaacagcccagctccggataccaagaggagaaccaaggcaattggtcggaacagaaccaccaggaaagtgaactgatcacaacagatgggcaggtggaaattgtcaccaaggttaaggatctggaaaagaatcggatcaatgaatttgagaaatctttcgacagaaagacccccacattcttggagatttggaatgattccgtggatggagattctttttccagtctgtcatctcccgagactgggaagtactccgaacattcagggacacaccaagagtctaatcttatcgcaagctatcaggaaaagaatgaacacgatattagtgccacagttcagcccgaggatgctagggtgatcagtaccagctcgggaagtgacgacgacagtgtaggcggagaagagtcaattgaagaagagattcaagttgctaactgtcatgtcgccgaagacgagtcccgagcatgggacagtctaaacgagagcaataagtttctggtcacagccgacccgaaatcagaaaacatttacgactatctggactcttccgaacctgctgaaaatgagaacaagagcaaccctttttgcgacaatcagcagtctagcccggacccctggacatttagcccccttacagaaaccgagatgcagataaccgctgtagagaaagagaaacgcagttctcccgagacaggcacaaccggcgacgttgcatggcagatttctcctaaagccagtttccccaagaacgaggacaatagccaactggagatgctcgggttctcagcggactctaccgaatggtggaaagcatcccctcaggaaggacggctcatcgagagcccctttgaacgggaactgagcgactcttctggcgtgctagagatcaactccagcgtccaccagaacgcatccccttggggggtgcctgtgcagggagacatcgaacctgttgagacacattacacaaatcctttttctgacaaccatcaatccccatttttagagggaaacggcaaaaatagtcatgagcagctatggaacattcagccacggcagcctgatcccgatgccgacaagttttcccagctcgtcaagttggatcagatcaaagaaaaggatagcagagagcagacattcgttagcgccgcaggagacgagctgactcccgaaacccccactcaggagcagtgccaggacacaatgctgcctgtatgtgatcaccccgacaccgcattcacccacgccgaagagaactcctgtgtgactagcaatgtgtccaccaatgaggggcaggagactaaccaatgggaacaagaaaaatcttatttaggggagatgacaaattcttccatcgctactgaaaatttccctgccgtgtcgtcccctacccaactaattatgaagccaggatccgagtgggatggctctactccatccgaggatagcagagggacatttgtgcccgacatccttcatgggaatttccaggaggggggacagcttgccagcgctgcacctgacctgtggattgatgcaaagaagcctttctcacttaaggcagacggggaaaatcctgatatcctaacccactgcgagcacgacagtaactctcaggcttcagatagtccagacatatgtcatgacagtgaggccaagcaggagacagaaaagcatctgtcggcctgtatgggacctgaagtggaatcaagtgagttgtgtctcaccgaacctgagatcgacgaggagccgatttacgagccgggacgggagtttgtgcccagcaacgccgaactcgactccgaaaatgcaacagtactccctccgatcgggtaccaggcagatataaagggaagtagccagccagcctcacataagggatccccagagcccagcgagatcaatggcgataatagcacgggccttcaggtttcagagaaaggggcatcaccagatatggcccctatcctggagcctgttgaccggagaatccctcgcatcgagaacgtcgccaccagcattttcgtcacgcaccaggagccaacaccagagggcgacgggagttggatctccgactcattttctcctgagtcccagccaggagccagggcactctttgatggagacccacatctgtccactgagaacccggctctcgttccagatgccctgttagcctccgacacatgcctggacatctcagaggcggcttttgaccattcctttagcgatgcctctggcctgaacacttcgaccggaactatcgacgatatgtcgaagctaactctgtccgaaggtcacccagagaccccggtcgatggcgatctcgggaaacaagacatatgctcgtcagaagcaagttggggggatttcgagtatgacgtcatgggccagaatattgatgaagacctgctgcgcgagcctgagcattttctctatggcggagatcctcccctggaggaggattctttgaaacagtctcttgctccttatacacccccttttgacctgtcttatctcaccgagcccgcacagtccgccgagacaattgaggaggccggatctcccgaagacgaatcactgggatgccgagccgctgagattgtgcttagcgcgctgcccgaccgaaggagcgagggtaatcaggccgagactaaaaaccgcctgccgggaagccagcttgccgttctgcacattagggaggaccccgagtcagtgtatctgcctgttggcgcaggtagtaacattctcagcccatccaatgttgactgggaggtcgagaccgataattcggatttgcctgccggtggcgatatcggaccacctaatggggcttccaaagaaatctccgagctggaagaggagaaaacgattcccacaaaggagcctgagcagatcaagtcagagtacaaagaggagcggtgcaccgagaagaacgaggatcgtcacgcacttcatatggactatatcctggtaaatcgagaggaaaattctcattctaagccagagacttgtgaagagagagaatccatcgcagagctcgaactgtacgtcggatcaaaagagaccgggctacagggaactcagttagcttcctttcccgacacgtgccaaccagctagcctgaatgaacgcaagggattgtctgcagaaaagatgagttctaaatccgatacccgaagctccttcgagtctcctgcacaggatcagtcctggatgtttctcggccactcagaggttggggatcctagtttggacgcaagggacagcggacctggatggagcgggaaaacggtcgaaccgttcagtgaactcgggctgggggaaggccctcagctgcagattcttgaggaaatgaaacctctcgagagtctggccctcgaggaggctagcggaccagtctcacagtcccagaagtccaagtcacgagggcgtgccggaccggatgccgttaccctgcaggctgtcactcacgacaacgagtgggaaatgctttcaccacagcccgttcagaagaatatgatcccagacaccgagatggaggaggaaactgagttcctcgagctaggcactcgaatctccaggcctaacgggctcctgagcgaggacgttgggatggacattcctttcgaggagggggtcttaagcccttcggccgctgacatgcgcccagaacctccaaattctctggaccttaatgacactcaccctaggaggataaagctcaccgccccaaacattaacttgagcctagaccagtctgaggggtccatcctgagcgacgataatttggactcccctgatgagatcgacatcaacgtagacgagcttgacacccccgacgaagccgactcatttgagtatacgggccatgacccaacggccaacaaagattcaggtcaggaatcagagagcatccctgaatacactgcggaggaggaacgggaagataatcggctgtggcgtacggtggtgatcggggagcaagagcaacggatagatatgaaagtgatcgaaccttatcgcagagtgatatcgcacggcggtgatagcggctattatggcgacggcctgaacgccataattgtcttcgccgcatgtttcctccccgattccagcagagcagactaccactacgttatggagaatttgttcttgtatgtgatctccacactagaattgatggtggccgaagactatatgatcgtgtatttgaatggagccactcctcgccgacggatgcccggattgggctggatgaaaaaatgttaccagatgatcgacagacgactgcgaaagaatttgaagagctttattatcgttcatccttcatggttcataaggaccatactggccgttaccaggccgtttatctcctctaagtttagttcgaagataaagtatgtaaatagtctatcagaattatcaggtcttattccaatggactgcatacatattcccgagtctattattaatatcgatctgaagctcaaggaaaagcctta

SEQ ID NO: 237415 - DNA, 8192 bp, synthetic construct
  misc_feature 1..8192: note = Description of Artificial Sequence: Synthetic coding sequence
  source 1..8192: mol_type = other DNA
atggtgagcaattcccgaaccagttcgactgaggcggtggcaggatctgctcccctgtcacagggatcatccggaatcatggagctgtacgggtccgacatcgaacctcagcccagcagtgttaatttcatagaaaaccctccagacttgaacgactcaaaccaggcgcaggttgatgcaaacgtggatctggtcagtcccgattcgggtttagccacaattaggtccagccgatcctccaaggagagtagcgttttcctgtccgacgactctccagtgggtgaaggtgccggtcctcaccacaccctgttgccaggattggactcctactccccaataccggagggcgctgtcgccgaagagcatgcttggagcggagagcatggcgagcattttgacttattcaatttcgatcccgcacccatggcctccggccagtcgcagcagagttctcatagcgctgactattctcctgccgacgatttttttcctaactctgatctcagcgagggccagctgcctgcaggaccggaaggactcgacggcatgggcacaaacatgagtaattacagtagtagctccctactttccggggctgggaaggacagtctggttgaacacgatgaggaatttgtgcagaggcaggattcacctcgtgataactccgagcgaaacttatctttgacggacttcgtgggtgacgagtccccatcccctgaacgtctgaaaaatacggggaagcggatcccccctacccctatgaactccctggtggaaagtagcccgagcacagaggaaccagcgtctctgtatactgaggacatgactcaaaaggccacagacacggggcacatgggtcctccccagacccacgccaggtgttccagttggtgggggggactggagattgatagcaaaaacattgcggacgcgtggtcatcatcagagcaggaatcagtgtttcagagtcctgagagttggaaagaacataaaccatcttcaatcgataggcgggcatccgatagtgtgtttcagccaaaaagcctcgaatttacaaaaagcggaccttgggaatctgaatttggtcagcctgaactcggctctaatgacattcaggataaaaacgaagaaagcttgccttttcagaacctgcctatggagaaaagcccactgccaaacacctcgccacagggaactaaccacctcatcgaggatttcgcctcattgtggcattctggacggagcccaaccgcaatgccagagccttggggcaaccctacagatgacggtgagcccgctgccgtggcaccatttcctgcctggtcagctttcggaaaagaggaccatgacgaagctctcaagaatacgtggaaccttcaccccacgagtagtaagaccccaagtgtaagagaccctaacgaatgggctatggctaaaagcggcttcgccttttcttcgtctgagttgctggacaatagcccgtctgagatcaataacgaggcagcaccagaaatctggggcaagaagaacaatgatagccgtgaccacatttttgcgccagggaacccctcctctgatttggaccacacatggaccaacagcaagccacccaaagaggaccaaaatggcctggtggatcctaagacacggggtaaggtatatgagaaggtcgacagctggaacctcttcgaggaaaatatgaagaaaggcggttctgatgtgctggttccctgggaggactcattcctgagttataaatgctcggattattccgcgagtaacttgggggaagacagcgtgccctctccgctggacactaattacagcacatccgattcctatactagtccaacatttgccggtgatgagaaggagacagaacataaaccattcgccaaggaggaaggtttcgaatccaaggatggcaatagtacagctgaggaaacagatattcctcctcagtcactacagcaatccagccggaatcggatcagtagtgggccaggcaacctggatatgtgggcgtccccacatactgacaactcctctgaaattaacacgacccataatcttgatgagaatgaacttaaaaccgaacatacagatggaaaaaacatcagcatggaggacgatgttggcgagtctagtcagtcatcctatgacgacccctccatgatgcaactatacaacgagaccaataggcagctcaccctcttgcactccagtactaattcacgccagaccgctcctgacagcctggatctgtggaatagagtcattctagaggacacacagtctaccgctaccatttcggacatggacaacgaccttgactgggacgattgtagtgggggagccgcaatcccttcagacggacaaactgagggctatatggctgaaggttcagagccagagactaggtttaccgtgagacagctggagccatggggactggagtaccaagaggcaaatcaagtcgactgggagttgccagctagcgatgagcacacaaaggacagtgcaccctcggagcaccacaccttgaatgaaaaatcaggacagctcatcgcaaactccatttgggactccgtgatgcgcgataaggacatgagtagtttcatgcttccagggtcttctcatatcacagacagtgagcagcgggagttaccccctgagataccctctcattcagctaacgtcaaggacacccactcccccgatgctccagccgcttcagggacatctgaatctgaggccctgatcagtcatctcgataaacaggatacagagagagaaacgttgcagagcgacgccgcttccctcgccactcgtctcgaaaaccctggttatttcccacatcccgatccttggaaaggccacggcgacggacagtctgagagcgaaaaggaagcccagggagcgaccgatcggggacatctcgatgaggaagaagtcatagcctctggagttgagaacgctagcggcatcagtgagaagggtcagtcagatcaggaactctcctcgctggttgcctcagagcatcaagagatttgcattaagagcggcaaaatttctagtctggctgtgacattctcaccccagacagaggaaccagaagaggttctggaatacgaagaggggtcatataatctggactctcgcgacgtccagacgggcatgtctgccgataacttacaacctaaggacacgcacgagaagcaccttatgtcacagaggaattccggggagactacagaaacatctgacggaatgaatttcacaaaatacgtttctgtgccagaaaaggacctagagaaaaccgaagagtgtaatttccttgaaccggaaaatgttggcggagggccacctcaccgagtgccgaggagcctggatttcggtgatgtgcccatcgattcagacgttcacgtatcttcgacgtgttctgagataacgaagaatctcgatgttaagggaagtgagaacagtctgccgggagctggaagcagtggaaactttgatcgcgacacaatctccagtgaatacactcattcctctgcgtcaagccctgaactcaacgactccagcgttgcactgtcaagttggggccagcagccaagttcaggataccaggaggaaaatcagggaaattggagtgagcagaaccaccaagaatctgaactgatcactactgatggacaggtggagatcgttactaaggtgaaggacctcgagaagaatcgaatcaacgaattcgagaagagttttgatcggaaaaccccaacattcctggaaatttggaatgactctgtggacggggactcctttagctccttgagtagtccagagaccggcaagtacagcgaacattcgggtacgcaccaggagtcaaacttgatcgcaagttatcaggaaaaaaacgagcacgatataagtgccactgtccagccggaagatgccagggtgatctcgacctcctcaggaagcgacgacgacagtgtgggcggagaggaatctatcgaagaggaaattcaggtggctaactgtcacgtcgcggaagacgaaagtagggcctgggactcgctgaacgagagcaataagttcctcgtgacagccgatccaaagtccgaaaatatatacgattatttagatagttcagagcctgccgaaaacgaaaataaaagcaatccattttgcgacaaccaacagtcatcgcctgatccctggaccttcagcccacttacagagactgaaatgcaaatcacagccgtcgagaaagagaaaaggagttcacccgagaccgggaccacaggggatgttgcctggcagatatctcccaaggcaagtttcccaaagaacgaagataattctcaacttgagatgctggggttcagtgctgactccacagaatggtggaaggcttctccccaggaggggaggttgatagaatcacccttcgaaagggaactatcagactccagtggcgtactggagataaactcttccgtgcaccagaacgcatctccttggggggtccccgtgcagggcgacatcgagcctgtcgagacgcactacactaacccatttagcgataaccaccagagccctttcctagaagggaatggcaaaaacagccatgagcaactgtggaatatacagccacggcaaccggatccagatgccgataagttttcacaactggtcaaactggatcaaatcaaggaaaaggattctagagaacaaacattcgtgtccgctgctggggacgagctgacccccgagacaccgacccaggaacagtgtcaagatacaatgcttcccgtgtgcgaccacccagataccgcattcactcacgccgaggagaattcatgcgtaacaagtaatgtgagtacgaatgagggacaagagaccaatcagtgggaacaagagaagagctacctgggagaaatgacaaacagttccattgccactgaaaatttccccgcagtgtccagcccaacgcaactgataatgaaacctggctcagagtgggacggaagcacgccgtcagaggatagccggggaacatttgtacccgacatcctccatggtaactttcaggagggaggacaacttgcaagcgctgccccagatctctggattgacgccaaaaagccctttagcctgaaagcagatggagaaaaccccgacatactgacccactgtgagcacgacagcaacagccaagcatcggacagccccgatatctgccacgatagcgaagccaagcaagagacagagaagcacctttccgcctgcatggggccagaagtggagagttccgagctgtgcttgaccgagcctgaaattgacgaggagccaatttacgaaccgggaagagaatttgtgccgtcaaacgctgagttggactctgagaacgccaccgtgctgcccccaatcggctaccaggcagatattaaaggctccagccagccagctagtcacaaggggtcaccagagccaagtgaaatcaatggtgacaatagcaccggactgcaggttagcgaaaagggggcaagccccgacatggcaccaatcttagagcctgtggatagaagaatccccaggatagaaaacgtcgctacatccatcttcgtgacacaccaggaacccacccctgagggtgacgggagctggatttctgattcctttagtccagagtcccaacctggcgcacgcgctttattcgacggagacccacaccttagcacagagaatcccgctttggtgcctgacgccttgttagcatccgatacctgtctggatatcagtgaggctgccttcgatcactccttctcagatgctagcggactcaacacatcgacaggaaccatcgacgacatgtcaaagctcaccctgagtgagggccatccagagacccctgtcgacggagacttaggaaaacaggacatctgctccagcgaagctagttggggagacttcgagtacgacgtgatgggtcagaacattgatgaagatttgctccgggagccggagcatttcttgtatggcggtgatcctcccctggaggaggatagtctgaagcaatcgctcgccccttacaccccaccctttgacctaagttacctgactgagcctgctcagtccgccgagacaattgaagaggctggctctcccgaggatgagtcactgggctgtcgggcagccgagattgtgctcagcgccctccccgatagacgtagcgaaggcaatcaagcagaaaccaagaaccgcctccccggatctcagctcgccgtacttcacatccgggaggatccagaatccgtttacctccccgtcggtgctggctccaatattctgagcccctcaaacgtggactgggaggtggagaccgataatagcgacctgcctgccggtggggatatcggacccccaaacggcgcttctaaggaaatctctgaactggaggaagaaaagactattccaacaaaggaacctgaacagatcaaatcagaatataaggaggaaagatgcacagaaaagaacgaggatcggcatgccctccatatggactatatattagttaatagggaagagaactcacactctaagcctgagacatgcgaggagagagaaagtatcgctgagttggagctttacgtgggcagtaaagagacggggctgcaaggaactcagctagctagcttccctgacacttgtcagcccgcatcacttaatgagcggaaggggctgtcggcggagaaaatgagctctaagagcgacaccaggtcgagcttcgagtctccagctcaggatcagagctggatgtttttagggcatagcgaggtcggtgacccatccctagacgctcgagacagcggaccagggtggagcggcaagacagtggagcctttttctgagcttgggttgggcgaaggtccccagctccagatcctcgaagaaatgaagcctctggagtcattggcactcgaggaggccagcggcccagtgtcacagagccagaagagcaaaagcagaggacgagccggacctgatgccgtcactctgcaggctgtcacccatgacaatgaatgggagatgctgagcccccagccagtgcaaaaaaacatgattcccgacaccgaaatggaagaggaaaccgagttcctggagctcggaaccagaatcagccggccaaacggccttctaagcgaagatgtcggaatggatatcccgttcgaggagggcgttctgagtccctccgctgccgacatgagacctgaacccccaaattcccttgatttgaatgacacgcaccccaggcgcattaaactcacagctcccaatattaacctgtctctggaccagtccgaggggagcatactcagtgacgacaacctggacagtcctgatgagattgacattaacgtggatgagctggacacaccagatgaggccgattcttttgagtatacgggacatgaagatcctaccgcgaacaaagacagcggccaagagtccgagtctatccctgaatatactgctgaagaagaacgtgaagataacagactttggcggacagtggtgatcggcgagcaggaacaaagaatcgacatgaaggtgatcgaaccctaccgcagggtcatttcacacggagggtactacggcgatggcctcaatgccattatagtgttcgccgcatgctttctacctgactccagtagggcagactatcactacgtcatggaaaatctgttcctgtatgtaatttcaaccctcgagttaatggtggccgaggattacatgatcgtttacctgaatggagcaactccaagacggagaatgcctggattgggctggatgaagaagtgctatcagatgattgaccgccgtttaaggaaaaatctgaaaagttttattatcgtccacccaagctggttcatcaggactatccttgcggtcactcggccattcatcagctcaaagttttcatccaaaattaagtacgtcaattccctgagcgagctgtccggactgatcccaatggattgtatccacattccggagagcattatcaagctcgacgaggagctgagagaggcgtctgaggccgctaagacatcttgtttatacaacgatcccgagatgagtagtatggaaaaggacatcgacctcaagttaaaggagaaacccta

SEQ ID NO: 237416 - DNA, 927 bp, synthetic construct
  misc_feature 1..927: note = Description of Artificial Sequence: Synthetic coding sequence
  source 1..927: mol_type = other DNA
atgcggcctgaaccccctaactctttagatctcaacgacactcaccccagaagaatcaaactgacggcgccaaatattaatctgtccctggaccagagcgaaggcagtattctctctgatgacaatttagactcaccagatgagatcgacatcaatgtggacgaactggatacacctgacgaagcagattctttcgagtacaccggacatgacccaacggcaaataaggattccgggcaggagtcggagtctatcccagagtacactgctgaggaagagcgcgaagataaccgcctgtggaggacagtagtaattggggagcaggaacagcggattgacatgaaagtaattgaaccatatagacgggttatctcgcacggcggtaaattaagatactatggagacggtctgaatgcaattatcgtcttcgcagcctgcttccttcccgatagttctcgggcagattatcactatgtcatggaaaatctttttctgtacgttatatcgaccctcgaactcatggtggccgaggactacatgattgtctatctaaatggggctaccccacgcaggagaatgccagggttaggctggatgaagaagtgctaccagatgatcgatagaaggcttagaaaaaatctaaagtccttcattattgtgcacccttcctggttcattcggaccatattggctgtcactcgtcccttcatctcgtctaagttttcttcaaagataaagtacgttaactccctttctgagctgtctgggctaatccctatggactgcattcacatacctgagagtattatcaaatatgacgaagaacgctcctataaaagatccgtcagaaccagctgcttatacaacgatcctgagatgtcatcgatggagaaagacattgatctcaagttgaaagaaaagccttag

SEQ ID NO: 237417 - DNA, 1014 bp, synthetic construct
  misc_feature 1..1014: note = Description of Artificial Sequence: Synthetic coding sequence
  source 1..1014: mol_type = other DNA
atgaatggtctgcgtaataaacaactgctcagcgaagatgttggtatggatatcccctttgaggaaggcgtcctgtcgccttctgccgcagatatgagacccgaaccccctaactcacttgacttgaacgacacccacccacgacgaatcaaactaaccgcccctaatatcaatctttcattagatcagtctgagggatcaatcttgtctgacgacaacctggattcacctgacgaaattgatatcaacgtagatgaacttgacactccagacgaggccgattcattcgagtacacgggacacgacccaaccgccaacaaggacagtgggcaggagtctgagtctatccccgagtatactgccgaggaagaacgggaagacaatagactatggaggaccgtagtaattggcgagcaagaacagcggattgatatgaaagtgatcgagccttacaggagagtcatctctcatggtggatactatggcgacggactgaatgccattattgtgttcgctgcatgctttttacctgactcctccagagccgattaccactatgttatggaaaatctgtttctgtatgtgatcagcaccctggagctgatggtggctgaggactacatgattgtgtacttgaacggggctacccccagaaggcgaatgcccggacttggatggatgaaaaagtgttatcagatgattgaccgcaggttaaggaaaaaccttaaatccttcattatcgtgcacccatcgtggttcatacgtaccatcctggccgttacccggcctttcatctcctcaaagttctcttccaaaattaaatatgtcaatagcctatcagagctctcaggtctcatacccatggattgcatccacatcccagagtctattataaagctagacgaagaactaagggaggcttccgaggccgctaagacatcctgtttatacaatgatcccgagatgtcatcaatggaaaaggacatcgacctgaaactaaaggaaaaaccgtag

SEQ ID NO: 237418 - DNA, 1155 bp, synthetic construct
  misc_feature 1..1155: note = Description of Artificial Sequence: Synthetic coding sequence
  source 1..1155: mol_type = other DNA
atggccggtaacgctgagccgccaccagccggtgcagcctgtccccaggaccggcgatcttgcagcggtcgagccggtggagaccgagtgtgggaagatggtgagcatcccgctaagaaattaaaatccggcggagatgaagagagacgggagaaaccgcctaaaaggaagatcgttctcttaatggcttacagcgggaagggatatcatggaatgcagcgaaacgtgggcagctcccaatttaagacaatcgaagatgatcttgtcagcgcgctagttcgaagcggatgcatcccagagaatcatggggaagacatgaggaagatgtcttttcagcggtgtgcaagaaccgacaagggtgtgtccgctgctgggcaagttgtgtcactcaaggtgtggctgatcgacgacatcctggagaagataaactcgcacctgccatctcatatccgcatcctggggcttaagcgcgtcacgggcggatttaactccaagaaccggtgtgatgctcggacttattgctaccttctacctaccttcgcctttgctcacaaggaccgagatgttcaggacgagacttaccggctgtccgcagaaactcttcagcaggtcaacaggctcctagcgtgttataaaggtacacataactttcacaattttactagtcaaaaagggccacaagacccctccgcctgcagatatatcttagaaatgtattgtgaagaaccctttgtgcgcgagggccttgagttcgccgtgataagagtgaagggccaatctttcatgatgcaccagattcgaaaaatggtcggccttgtagttgcaatcgttaagggatatgcccctgaatctgtgttagaacggtcatggggcactgaaaaagtagatgtcccgaaggctcccggattggggctggtgctggaacgcgtgcactttgagaaatacaaccagcggttcggtaacgacggtctacacgagccactggattgggcccaggaagagggcaaagtcgcagccttcaaagaagagcacatttaccctactattattggaaccgaaagggatgaaagaagcatggcccagtggctctctacgcttccaattcataacttcagtgccaccgcactgacagcaggcggaactggcgctaaatag

SEQ ID NO: 237419 - DNA, 1284 bp, synthetic construct
  misc_feature 1..1284: note = Description of Artificial Sequence: Synthetic coding sequence
  source 1..1284: mol_type = other DNA
atgggtctccagttacgcgcattgttaggcgcttttggccgatggactctgcgattagggccacgcccatcttgtagcccaaggatggccggaaacgcagagccacctcctgctggcgctgcctgtccccaggaccgcaggtcttgttccggccgtgcaggcggtgacagggtctgggaagatggtgagcatcccgcaaagaagctcaagtctggcggtgatgaagaacggagggagaaacccccaaagagaaaaatcgtgctgctgatggcatatagcgggaaggggtaccacggaatgcagcgcaatgtgggaagctcacagttcaagactattgaggacgacttagtgagcgccttggtgcgtagcggatgcatccctgagaaccacggagaagatatgcgcaaaatgagttttcagcgatgtgccaggacagataagggcgtatccgcagcgggtcaggtcgtctctttgaaggtatggctgatcgacgacattcttgaaaagatcaactcccatctgccatcacacataaggatcttggggctcaaacgggttacaggcggatttaacagcaaaaataggtgcgatgcacgaacatactgttatctcttaccaacgttcgcttttgcacacaaagatagagatgtgcaagatgagacataccgcttatcagccgagacactccagcaagtgaaccggctgttagcttgctataagggtacccacaattttcacaactttacctctcagaaagggccacaagacccatcagcctgcagatacatcctggaaatgtattgcgaggagccctttgtcagagaaggcctagagttcgccgtcatccgcgtcaagggtcagagctttatgatgcatcagattaggaagatggttggactcgtcgtcgcaattgtgaaaggctatgcgccagaaagcgtcttggaacggtcctggggcaccgaaaaggtagatgtgcctaaagctcctggactcggcttagtactggagcgggtgcactttgagaaatacaatcagaggtttgggaacgatgggctgcatgagcctctggactgggctcaggaagagggaaaggtggccgctttcaaagaggagcatatctaccccaccattattggaacagagagggacgaacgttcaatggcacagtggctcagcacactgcctatccataacttttctgccactgctttgacagctggtggcacaggcgcaaaggtgccttcccccttggagggatctgagggggatggcgatacagactag

SEQ ID NO: 237420 - DNA, 1200 bp, synthetic construct
  misc_feature 1..1200: note = Description of Artificial Sequence: Synthetic coding sequence
  source 1..1200: mol_type = other DNA
atggctggcaatgcagagcctcctcctgccggtgccgcatgcccccaagataggcggagctgttctggaagagccggaggcgatcgcgtgtgggaagacggtgaacaccctgctaaaaaacttaaatcggggggtgatgaagagaggagagagaaacccccaaagagaaagatcgtactgctgatggcttacagcggtaagggataccacggaatgcagcgaaacgttgggagttctcagttcaaaaccattgaagacgacctggtgtccgccctcgtacgcagcggttgcatccccgagaatcacggggaagacatgcgcaagatgtcatttcagaggtgcgcccgaaccgataagggagtgtcagcagccggacaagtcgtcagtcttaaggtgtggctcatagatgacatcctggagaagattaatagtcatctccctagccatattcgaatactgggactgaagcgcgtgaccggcggattcaattctaaaaatcgatgtgacgccaggacctactgttacctgctccccactttcgcatttgctcataaggaccgggatgtacaagatgaaacttaccgactgagcgccgaaactcttcaacaggtcaatcgcctgttggcctgctataagggtacacacaattttcataactttaccagtcagaagggccctcaagacccctccgcctgtagatacattctcgaaatgtattgcgaggagccgtttgttagagaggggctggagtttgcagtgatccgcgtaaaagggcagagcttcatgatgcaccaaataagaaagatggttggactcgttgttgcaatagttaagggatatgcccctgagagcgtgctggagagaagctggggtactgaaaaagttgatgtgcctaaggcccctggactcgggctcgttttggaaagggtccacttcgaaaaatacaaccagagatttgggaatgatggcctccacgaacctttggattgggcacaggaagagggcaaggtggcggctttcaaagaggagcatatatacccaacgattatcggtacagagagagatgagagatctatggctcagtggctcagcactcttcccatacataacttttccgccacagctcttactgcgggagggacgggcgctaaagtgcccagtcccctggaaggttcagaaggggacggtgacacggactag

SEQ ID NO: 237421 - DNA, 1200 bp, synthetic construct
  misc_feature 1..1200: note = Description of Artificial Sequence: Synthetic coding sequence
  source 1..1200: mol_type = other DNA
atggccggtaacgccgaaccgccacctgcgggagctgcatgtcctcaggaccgcaggtcctgtagtggcagggctgggggtgatagagtatgggaagatggcgagcacccagccaagaaattaaaaagcggaggtgatgaggagcgcagagaaaagccaccaaagcggaagatagtccttcttatggcgtactccggcaagggctatcatggtatgcagaggaatgtcggatcctcccagttcaagacgatcgaggacgatctcgtaagtgcccttgtaagatcaggctgcatccccgagaaccacggggaggacatgcgaaaaatgtccttccagagatgcgctcgaaccgataagggagtgtctgctgcaggacaggtggtgagtctaaaggtgtggcttattgacgacatcctcgagaagatcaactctcacctgcctagccacatacgcatcctcgggttaaaaagagtgactggcggatttaatagtaagaacaggtgtgatgctaggacatattgttacctgctgcctaccttcgcttttgctcacaaagaccgggatgtgcaagatgagacctatagattgagtgcagaaaccctgcaacaggttaataggctgctcgcctgttacaaaggaacccacaactttcataacttcacttcacagaagggaccacaggacccttcggcttgcagatacatcctggaaatgtattgcgaggaaccatttgtccgtgaaggactggagtttgcggtgattcgcgtcaaagggcaatcattcatgatgcatcaaatacgtaaaatggtgggactggtggtcgccatagtgaagggatacgctccagaaagcgtgctggaacgatcatggggaacagaaaaggttgatgttccaaaagccccaggcctcggtctggtgcttgagcgggtgcatttcgaaaagtataatcagagattcggaaatgatggactgcatgagccactcgactgggcccaggaagaagggaaagtggcagcttttaaagaggagcacatctaccccaccattatcgggaccgagcgtgacgagagaagcatggctcaatggctgtcaactctgcctattcataatttttccgccactgctctcactgctggtggcaccggcgctaaagtccccagccctctagaaggatcagagggtgatggcgacacggactag

SEQ ID NO: 237422 - DNA, 465 bp, synthetic construct
  misc_feature 1..465: note = Description of Artificial Sequence: Synthetic coding sequence
  source 1..465: mol_type = other DNA
atggctggcaatgctgagcccccaccagcaggagccgcatgcccccaggatcgcagatcatgcagtggacgcgcaggaggcgatcgcgtttgggaggatggtgagcacccagccaagaaattaaagagcggtggcgacgaggaaagacgcgagaagcctccaaagcggaagatagtcttgctgatggcgtacagtgggaaaggctatcacggcatgcagcggaatgttggctcgtctcagtttaagactatcgaagatgacctggtgagcgcccttgttagatccggttgcatacccgagaatcatggcgaggatatgcgtaagatgagctttcaacgctgcgcgagaacagacaagggcgtcagcgctgccggtcaggtggtaagcctgaaagtctggctaatcgacgatatcctcgagaagattaattcccatctgcccagccatatcagaatcctggggtag

SEQ ID NO: 237423 - DNA, 618 bp, synthetic construct
  misc_feature 1..618: note = Description of Artificial Sequence: Synthetic coding sequence
  source 1..618: mol_type = other DNA
atgtctaagggacgggctgaggccgctgcgggagcggcaggcatcctgctgcgctatctgcaggaacagaacagaccatattcctcccaagacgtctttgggaatctgcaaagagagcacggactcggtaaggccgtcgtcgtgaagacgttggagcagctcgctcagcaagggaagatcaaggaaaagatgtacggtaaacagaagatttattttgccgatcaggatcagtttgacatggtgtctgacgcagatttgcaggtactcgatggcaagattgtggctttgacagccaaggtgcagagtctgcagcagtcctgcaggtacatggaggctgagatgcagaaggagatccaggagctcaaaaaggagtgcgcaggctatagagagcggctcaagaacattaaggctgccacaaaccacgtaacccccgaggaaaaggagcaggtgtatcgtgaaaggcagaagtattgtaaagagtggcgcaaaagaaaaagaatggcaactgagttgtctgatgccattctggagggataccccaaaagcaagaagcagttctttgaggaagtgggcatcgaaacggacgaggactataatgtaacattgcccgacccgtag

SEQ ID NO: 237424 - DNA, 654 bp, synthetic construct
  misc_feature 1..654: note = Description of Artificial Sequence: Synthetic coding sequence
  source 1..654: mol_type = other DNA
atgtccaagggtagagctgaagcggcagccggtgccgctggcatccttctgcgctacctccaagagcagaacagaccctatagtagccaagacgtgttcggtaatctgcagcgagaacatgggctcggaaaggccgtcgtggtgaagaccttagagcaattggcacagcaggggaaaataaaagaaaaaatgtacgggaagcagaagatctacttcgcagatcaggaccagtttgacatggtctcagatgctgatcttcaggtgctggacggcaagatcgtggcgttgacagctaaggtccagtcattacagcagtcgtgtagatacatggaggctgagctgaaagagctttcctccgcactgactactccagaaatgcaaaaagaaatccaggaattgaagaaggagtgcgccggttatagggagcggctgaaaaatattaaggcagccaccaatcatgtgacacctgaggagaaagaacaggtctatcgggagagacagaagtattgcaaagagtggcgtaaaaggaagcggatggcaaccgaactctccgacgcaatcctcgagggttaccccaagtcgaagaagcaatttttcgaggaggtgggtattgagacagatgaggattacaacgtcacacttcccgacccgtag

SEQ ID NO: 237425 - DNA, 465 bp, synthetic construct
  misc_feature 1..465: note = Description of Artificial Sequence: Synthetic coding sequence
  source 1..465: mol_type = other DNA
atgtatggaaagcagaagatatattttgcagatcaggaccaattcgatatggtgagtgatgctgatttgcaggtgttagatggcaagatcgttgctctgacagccaaagtgcagagcctccagcaatcttgccgctatatggaagccgaactgaaggagttgtctagtgcactgaccacaccagagatgcagaaggagatccaggagctgaagaaggagtgcgctggatatcgggaacgcctcaaaaacataaaggccgcaaccaatcacgtgactcctgaggaaaaggagcaggtctatagggagagacagaaatactgtaaggagtggaggaagcgcaagcgaatggctaccgagctcagtgacgctatcttggaggggtatccaaaatctaaaaaacaatttttcgaagaggttgggattgagaccgacgaagattataatgtcacattacctgatccatag

SEQ ID NO: 237426 - DNA, 915 bp, synthetic construct
  misc_feature 1..915: note = Description of Artificial Sequence: Synthetic coding sequence
  source 1..915: mol_type = other DNA
atgtttagtgtgttaagctacggccgtcttgtagccagagcagtgctggggggtctgtcccagactgacccacgcgctggtgggggaggcggtggggactacggcttagtgacggctggctgtggcttcggtaaggattttagaaagggcctgttgaagaagggggcttgttacggtgacgacgcgtgctttgttgcccgacacaggtctgccgatgtacttggcgtggccgatggagtgggcggttggcgagattatggcgttgatccatcacaattctcaggcactctgatgcgaacgtgcgagcggctggtcaaggagggtagattcgttccgagcaatccaattggcattctgacgacatcctattgtgaactgcttcaaaataaggtaccactgctcggatcttccaccgcctgcatcgtcgtgctggacaggaccagtcaccgactgcacaccgccaacctaggagactcaggttttctagtggtaagggggggtgaggtggtccatcgctccgacgagcagcagcactatttcaacactccattccagttatcaatcgccccaccagaagctgagggcgttgttctctcagactctcctgacgccgctgattctaccagtttcgacgtccagctaggggacatcattctcaccgcaactgacggcctgtttgataatatgcccgattacatgatcttacaggaactaaaaaagctgaagaatagtaattatgaatccatccaacagaccgctagatcaattgctgaacaggcacatgaactggcttatgaccctaattatatgtcccccttcgcccagtttgcctgcgacaacggccttaatgttcgcggtggcaagcccgacgacatcacagtgctcctgagcatcgtggcggagtacacggattag

SEQ ID NO: 237427 - DNA, 1746 bp, synthetic construct
  misc_feature 1..1746: note = Description of Artificial Sequence: Synthetic coding sequence
  source 1..1746: mol_type = other DNA
atggctgttaggcaggcactgggacggggtctccagttagggcgtgcacttctgctaagatttactggcaaaccgggaagggcatatggtctcggccgtccaggacctgccgcaggctgcgttagaggcgaacgtccaggttgggccgcagggccaggcgcagagcccagacgggtaggtctgggcttgccgaacaggctgcggttctttaggcaatccgtagccggactcgccgctaggctgcaaaggcagtttgtcgttagagcttgggggtgcgctggaccatgtggcagagcagtttttctcgcattcggcctaggcctggggcttatcgaagagaaacaagccgagtccaggcgcgcagtttctgcctgtcaagagattcaggcgatttttacacaaaaatcgaaaccaggtccggatccactcgacacacggagactgcagggttttagactggaagaatacctgatcggtcagtctatcggaaaagggtgttctgccgcagtttacgaagctactatgccgacactcccacagaacctcgaggtcacaaagagtaccgggctgctgccgggaaggggccctggaacaagtgccccaggcgaaggacaggagagggcaccaggagcaccggctttcccacttgccattaagatgatgtggaacatctctgctgggtcgagttccgaagccatccttaataccatgagtcaggagctggtgcctgcatccagagtcgccctagcgggtgagtacggggctgtgacttataggaaaagtaagagggggccaaagcagctagcccctcatcctaacatcatacgagtattgcgagcattcactagctcagttccactgctccccggtgccctggtagattatcctgatgtcctgccgtccagactccatcctgaaggactgggccatggacggacgctttttttagtgatgaagaactatccctgcaccctgaggcagtatctgtgtgtcaatactccaagtcctcgcctggcggcaatgatgttgctgcaactgttagagggtgtggaccatctggtacaacaaggaatagcacatcgggacttaaagtctgacaatattctggtcgagctggacccggacgggtgtccttggctcgtgatcgccgacttcggatgttgcttggccgacgaatcgataggcctacaactgcccttttcgagctggtacgtggacagagggggtaatggctgtttaatggcaccggaagtctccaccgccagacccggtccgagagccgtgatcgattatagtaaggctgatgcctgggccgttggagcgatcgcctacgagatatttgggttagtcaatccattctacggccaaggtaaagcccatctcgagtcccgctcttaccaggaggctcaattgcccgcactcccggaatctgtgcctcctgacgttcgccagctagtgcgggctttgctgcaacgagaggcgtccaaacgcccttccgccagagtcgcggctaatgtattgcatctcagtctgtggggggagcatattctcgcccttaagaacctgaaactggacaaaatggtcggctggctgttgcagcagtccgcagctacgctgctggcaaacagactgaccgagaagtgctgtgtcgaaactaagatgaagatgttatttctggcgaacttagaatgtgagacactgtgtcaggccgcactgctgctgtgctcttggcgcgcagccctctag

SEQ ID NO: 237428 - DNA, 393 bp, synthetic construct
  misc_feature 1..393: note = Description of Artificial Sequence: Synthetic coding sequence
  source 1..393: mol_type = other DNA
atggctgctgtgctgggcgctttaggggcaacacgtcgattgctggcagcgcttcggggacagtctctcggtctggcagctatgagcagtggaacgcatcgactaaccgctgaggagcgcaatcaagccatcctagatctcaaggcagccggatggagcgaactctccgaacgcgacgcaatctacaaggagttctccttccacaacttcaatcaggcattcggcttcatgtccagagtcgcacttcaggcagagaaaatgaaccatcaccctgagtggtttaacgtctacaataaggtccagattacacttaccagtcacgattgtggcgagctaacaaaaaaagatgttaaactagctaagtttattgaaaaagctgccgcttctgtgtag

SEQ ID NO: 237429 - DNA, 393 bp, synthetic construct
  misc_feature 1..393: note = Description of Artificial Sequence: Synthetic coding sequence
  source 1..393: mol_type = other DNA
atggctgccgtccttggggctttgggcgctaccaggcgactgctggctgcactgcgaggtcaatctctgggcctcgcagctatgtccagcggtacccatcggctgacggctgaggagcgaaaccaagcgatcctggacctgaaggctgctggctggtcggagttatctgaacgggacgccatctacaaggaattctcttttcataattttaaccaggcattcggattcatgtcgcgagtggccctacaggccgagaaaatgaaccaccaccccgagtggttcaatgtttacaataaagtgcagataactttgactagccatgactgtggtgaactgacaaagaaagacgtaaaactggcgaagtttatagaaaaagctgcggcaagtgtgtag

SEQ ID NO: 237430 - DNA, 1041 bp, synthetic construct
  misc_feature 1..1041: note = Description of Artificial Sequence: Synthetic coding sequence
  source 1..1041: mol_type = other DNA
atggcacttctcaaggtaaagttcgatcaaaagaagagggtgaaactggcccagggcctatggctgatgaactggttttctgtactcgccggaatcattatatttagcctggggttgtttctgaagatcgagttgcgaaagcgcagtgacgttatgaataactcagaaagccatttcgttcccaacagcctgattggcatgggcgtcttgagctgtgtattcaactctctcgcaggaaaaatctgctatgacgcacttgatccggctaagtatgcgaggtggaagccatggctgaagccataccttgcaatctgtgtcctgttcaatattattttattcctggtcgccttgtgttgcttcctgctgaggggcagtttagagaatacactggggcagggactgaaaaacggaatgaaatactatcgggatacagatacacctggcagatgtttcatgaagaaaacaatcgacatgttgcagattgagtttaagtgctgtggcaataacggtttcagagactggttcgagatccaatggatatccaaccgttacttggatttctcctccaaggaggtgaaggatagaattaagtcaaatgtcgacggccgatacctggtggatggcgtgcctttctcctgttgtaatccatcatccccacgcccttgcattcagtaccagattacgaacaactctgctcattactcttatgatcaccagactgaggaattgaatctctgggtgagagggtgcagggccgctctgcttagttattactcctccctcatgaactctatgggtgtagtgacgctgctgatttggctgtttgaggttacaatcactatcggtctccgttaccttcagacctctcttgatggagtcagcaaccccgaagaatctgagtctgagtctcagggctggcttctggagagatccgtccctgaaacctggaaggctttcctcgagtcagtaaagaaattggggaaaggcaatcaagttgaggcagaaggtgccgatgccggacaggctcccgaggcaggctag

SEQ ID NO: 237431 - DNA, 1191 bp, synthetic construct
  misc_feature 1..1191: note = Description of Artificial Sequence: Synthetic coding sequence
  source 1..1191: mol_type = other DNA
atgccactctttgagccccgagtattcaccgccggatcagaagaaagggttacatgtctgcctcctaaggggctgcccgaacctagcgtctggtgggaacatgcaggcgtgaggctgcctacacatggcagggtctatcaaaagggtcatgaactcgtactagcgaatatcgctgaatcagacgccggagtgtacacttgccatgctgcaaacctggccggtcagcgaaggcaggatgtcaatataacggtagccactgtgccttcatggcttaaaaaaccccaggattctcagctagaggaaggcaagcctgggtacttggattgcctgacgcaggcgacgcccaagccaactgtggtctggtacaggaatcagatgctgatctccgaggatagtcgttttgaagtattccttgctaaggcgcagggcctggaagaaggcgtggccgagaccctagttctggtcaagtccctccagagcaaggacgaacagcaacagttggactttagaagggagctggagatgtttggcaagttgaatcatgcaaatgtggtacggttgctcggactttgtagagaggccgagccccattacatggtgctggagtacgtggacctaggggacctcaagcagtttctacgcatctccaagagtaaagatgaaaagctcaaaagccagcctctgtctacaaaacagaaggttgccctctgcacgcaggtggcccttggcatggaacacctctccaataaccggttcgtgcataaagacctcgctgctcgcaactgtttggtgtcagcccaacggcaggtgaaagtctcagctttgggcttgagtaaagacgtttataacagcgagtattaccattttcggcaggcgtgggtgccactccggtggatgtctccagaagccattctggagggtgattttagtactaaatcagacgtttgggcatttggggtccttatgtgggaagtgtttacacacggagagatgccccatggcggacaagccgatgatgaggtgcttgccgaccttcaggcgggtaaagcccgattgccgcagcccgaaggctgtccgagtaagctgtacagactcatgcaacggtgctgggccctgtcaccaaaggatagaccgagctttagtgagatcgcctccgccctcggggattctaccgtggattccaaaccatag

SEQ ID NO: 237432 - DNA, 3093 bp, synthetic construct
  misc_feature 1..3093: note = Description of Artificial Sequence: Synthetic coding sequence
  source 1..3093: mol_type = other DNA
atgggagccgctcgcggatcacccgctagaccacgcaggctacctttgttgtcagttttgctgctccctctgttagggggtacccagacagccatagttttcataaagcagccttctagccaggacgctttacaggggaggcgagccctcctccgctgcgaggtggaggcacccggacccgtgcatgtgtactggctgttagacggggctccagttcaggacacagagcgacgcttcgctcaagggtccagtctttcttttgccgctgtagataggttgcaagattccggcacatttcagtgtgtcgctcgagacgacgtgaccggggaggaagctcggtcagcgaacgctagttttaatataaaatggatagaggctgggcctgtcgttctaaaacatcctgcctcagaggcagagatccagcctcagactcaggtcaccctgaggtgccatatcgatgggcatccgagaccaacgtatcagtggtttagggatgggacacctcttagcgatggtcagtcgaatcataccgtcagctctaaggaacgcaatttgaccttacgcccagctggtcctgagcattcaggactctacagttgttgtgcacacagcgcctttggacaggcttgttcttctcagaacttcaccctgtctatagctgatgagtcttttgccagagtcgtgcttgcaccccaggatgtcgtcgtcgcacggtatgaggaagccatgtttcactgccagttcagcgcccaacctcctccgagtctccagtggcttttcgaggatgagacacccattacaaatcgtagtcggccaccccatctgaggcgggctacggtgttcgctaatggttccctgctgctgacacaagttagacccaggaacgctggtatctatcgatgtatcggccaggggcagcgcggaccaccgattatactggaggctaccttgcacctggctgaaatagaggatatgcccctgttcgagcccagggttttcacagcaggctcagaggaaagagttacctgcctgccacccaagggccttccagaaccttctgtttggtgggagcatgccggagtgaggcttcccactcacggaagggtctaccaaaaggggcacgaactggtgctggccaatatagcggagtctgatgctggggtgtatacatgtcacgcagctaaccttgccggacagagaaggcaggacgtcaatataacagtggcaacggtcccatcatggctgaaaaagccccaagatagtcagttagaggagggcaagccaggttatctggattgtttaacccaagccacccccaagcccaccgtggtgtggtacagaaaccagatgctcatttccgaggactctcggtttgaagtattcaagaacggaactctgagaattaactctgtcgaggtgtacgacggtacatggtaccgttgcatgtcctctactcctgctggcagcattgaagctcaggctcgagttcaggtgctagacggttcctccctgcccgaatgggtcactgataacgctgggacactccattttgcacgggttactagagatgatgcaggcaactacacttgcatagcgagcaacggtccacaaggacagattagagcacacgtccagctcaccgtcgccgtatttataacattcaaggtagaaccagaacgtacaaccgtgtaccagggtcatacagctcttctgcaatgtgaagcgcagggggaccccaaaccacttatacagtggaagggtaaagaccgcattcttgacccaaccaaattgggccctagaatgcacatttttcagaacggctccttggtcatccacgacgttgctccagaggatagcggtcggtatacatgcattgctggcaatagctgtaacataaaacacaccgaagctcccttatatgttgtggataaacctgtccccgaagagtcagaggggcctggaagcccacccccatacaaaatgatccagactatcggactttcagtgggggctgccgtggcttacatcatcgctgtcctaggactcatgttctactgtaaaaaacggtgcaaggccaagcgactccagaagcaaccagaaggcgaggagccagagatggaatgccttaacggcggtcccctgcagaatggccaaccctccgctgagatacaggaagaagtagccctcactagcttgggcagtgggccagcagccacaaataagcgccactctactagcgataaaatgcattttccacgcagctctcttcagcctattacgaccctcggcaagtctgaatttggagaagttttcctcgcaaaggcccaaggtttagaagagggagttgctgagactctagtgctagtcaagtctttgcagtccaaggacgaacagcaacagctggattttcgtcgcgagttggagatgtttggaaaattaaaccacgccaacgtagttaggctgctggggctgtgtcgtgaggcagaaccacattacatggtgcttgagtacgttgacctgggagatctgaagcagtttctccgaatctccaagagtaaggacgagaagctcaaatcccagccactatctactaagcagaaggtagctctctgcacacaggtggcgctcggtatggaacacttgtccaataaccggttcgtgcacaaagacttagccgctcgcaactgtctggtttctgcccagcggcaggtgaaggtgtctgctctaggactgtctaaggatgtgtacaacagtgagtactaccactttcgccaggcttgggtgccattacggtggatgagtccggaagctatactggagggcgatttttccaccaaatcggacgtctgggctttcggggtcctcatgtgggaggtcttcactcatggggagatgccccatgggggtcaggccgacgatgaggttcttgccgatctgcaggccggtaaggcacgactgccccagccagagggctgcccctccaaactttatcggttgatgcagcgttgttgggccttgagtccaaaggataggccaagtttctccgagatcgccagtgccctcggcgatagcactgtagacagcaagccttag

SEQ ID NO: 237433 - DNA, 2823 bp, synthetic construct
  misc_feature 1..2823: note = Description of Artificial Sequence: Synthetic coding sequence
  source 1..2823: mol_type = other DNA
atgggtgcagcaagaggcagtcctgcccgtccaagaaggctccctttgctcagtgtcctgctgttgcccctcctggggggtacacaaaccgcaattgtgtttatcaaacaaccttcatcacaggacgcactacagggccgtagagccctattgcgctgcgaggtggaggcccctggccctgtgcacgtgtactggctgttggatggcgctcctgtgcaggacactgaaagaaggtttgcgcaaggatcctccttgtcttttgctgccgtggacagactgcaggactccggcacattccagtgtgtggcccgtgatgacgtcacgggggaagaagctcgatcggcgaatgcttccttcaatattaagtggatcgaagctggccctgtggtgctcaaacaccctgcttccgaggccgaaatccaaccacaaacacaggtgactctgcgctgccacatagatgggcatcctagacccacgtaccagtggttcagggacggcacccccttgagcgatgggcagtctaaccatacagttagctcaaaggagcggaacctgacactgcggccagccggaccggagcactccgggctctacagctgttgtgcgcattctgctttcggtcaggcttgctcttcacagaattttacactgagtatcgccgatgaatccttcgccagggttgtactggccccacaggacgttgtcgtcgcaagatacgaggaggctatgttccattgtcaattcagcgcccagccacctccctccctgcagtggctgttcgaagacgagactccaataacaaaccgatcccggccaccacacctgcgcagggcaacagtgttcgcaaacggcagtctccttctcactcaggtgaggccgcgtaacgctggcatatacaggtgcatcggacaggggcaacgcggtccccctatcattctcgaggccacgctccacctcgctgagatcgaggatatgccactttttgaacccagggtattcaccgccggatctgaggagagggtgacgtgcctgcccccaaaaggtctccccgaaccctcagtctggtgggaacatgccggtgtgcgcttaccgacacacggaagggtttaccagaaagggcacgagcttgtcctcgccaatatcgcagaatctgatgccggtgtgtacacatgtcatgcagccaacctagctggccaacgtaggcaagatgttaatatcaccgttgcgaacgggagttccctgcctgaatgggttacagacaatgctgggaccctgcactttgcaagggtcacgcgagatgatgcaggaaattatacgtgtatcgcctcgaatggaccacaggggcagatccgcgctcacgtacagctcaccgtggccgtcttcattacattcaaagtggaacctgagcgaaccacagtttaccaggggcatacggcgttgctgcaatgcgaggctcagggtgatcctaaacctctaatccaatggaagggcaaagaccgaatccttgatcccactaagctgggaccccgaatgcacattttccagaacgggagcctggtcattcatgatgtggcaccagaggatagcggaaggtacacttgcattgcaggcaactcttgcaatattaaacacactgaggcacctttatacgtggtggacaaacctgtgcctgaggagagcgaagggccagggtccccccctccatataagatgatacaaaccattggcctctctgtcggcgctgccgtggcgtatataatagccgtgttgggcctgatgttctactgtaagaagcgatgcaaggccaaacgattacaaaaacagccagagggagaagagcccgagatggagtgcctgaatggaggaccccttcagaatggccagccatctgccgaaattcaggaagaggtcgctttgaccagtctgggcagcgggcctgccgctactaataagcgtcacagtactagcgacaagatgcactttccacgctcttcacttcagcccatcactactctcggcaaatctgaattcggagaagtcttcctggccaaggcacagggcctggaagagggggtggcagagacgctggtgctggtgaagtcgcttcagagcaaagacgagcaacagcagttagacttccgacgagagcttgaaatgttcgggaaactgaatcacgccaacgttgtgcgccttctaggcttgtgcagggaggcggagcctcactacatggtcctggagtatgtcgacctgggtgatcttaaacagttcctgcggataagcaagtctaaggacgaaaagctgaagagtcaacccctgagcactaagcagaaagtggccctgtgtacccaggtggccctcggcatggagcatttatccaataacagattcgtccataaagacctggctgcaaggaattgtctcgtgtccgcacagagacaggttaaggttagcgccctgggtctctccaaagacgtgtacaactccgaatattaccatttcaggcaggcctgggtccctctgcgctggatgtctcctgaagctatcctagagggggacttctccacaaagagcgatgtatgggcctttggtgtcttaatgtgggaagtttttactcatggagaaatgccacacggcggtcaggccgatgatgaggtcctggcagatctgcaagccggtaaggccaggctgcctcaaccagagggctgtccttccaaactctataggttgatgcagagatgctgggctctgtctccgaaagatcggccaagcttttcagaaattgcctctgccctgggcgattctacggtggattcgaagccttag

SEQ ID NO: 237434 - DNA, 3045 bp, synthetic construct
  misc_feature 1..3045: note = Description of Artificial Sequence: Synthetic coding sequence
  source 1..3045: mol_type = other DNA
atgggcgcagccaggggaagccctgccaggccccgacgcctcccactactcagcgttctcctgctaccgctgctggggggaactcaaaccgcaatagttttcatcaagcagccttcttctcaggatgctctgcagggtagacgggcattgctacggtgtgaggtggaggccccaggtcccgtccacgtctactggctgctggacggagcacccgtacaagacacagagaggcggtttgcccagggttcctccctctctttcgctgctgtagataggctccaggactccgggacatttcagtgcgttgcgagagacgacgttactggcgaggaagctagatcagcgaacgcttcattcaatataaagtggatagaagctgggcctgtggtcctgaaacaccccgcatccgaagccgaaattcagccccagactcaggtgacgctgcggtgccatattgacggtcacccccgacctacgtaccagtggttcagggacggaacacccctgtctgacgggcagtccaatcacacagtatcctcaaaggagcggaacctgaccctgcggcctgctggaccagagcattcaggattatatagttgttgtgcccattccgctttcggacaggcctgctcttcgcagaacttcactctgtcaatagctgatgagagcttcgcaagggtggtgcttgcaccccaagacgtagtggtggcacggtacgaagaggccatgtttcactgccagttttccgcccagccaccaccgtcgctccagtggctcttcgaagatgagacgcccatcactaaccgatcccgcccaccacatctcaggagggctacggtttttgccaatggtagcctactactaacgcaggtccgcccacggaatgctggcatatatcgctgtatcggacagggtcagcgcggtcctccgattattcttgaagctactttacacctcgcagagattgaagatatgcccctctttgaaccgcgtgtcttcacagctggcagcgaagaacgggtcacgtgtctcccgcctaaaggtctccctgagccctcggtttggtgggagcacgcgggagtgcgtttgccgacacatggaagagtttaccagaaggggcacgagctggtgctggctaacattgctgagagcgacgccggagtgtacacatgtcatgcagcaaacctggctgggcagaggcgccaggatgtgaacattactgttgctactgtgccttcttggctgaaaaagccacaggactcccagctcgaagagggtaagccaggatacctggattgcctgacacaggccacaccaaaacccacagtggtctggtaccgcaatcagatgctaatcagtgaggactcacgcttcgaggtgtttaagaatgggaccctgaggataaactctgtcgaggtatatgacggcacgtggtacagatgcatgagctctactcccgctgggagcattgaagctcaggccagggtgcaggtgttagagaaactcaaatttacacccccaccacagccccaacagtgtatggagttcgacaaagaggctaccgttccctgctctgctacagggagagaaaagccaaccattaagtgggagagggcagatgggtccagtctcccagagtgggttaccgacaatgcaggcacccttcactttgccagagtgactagagatgatgctgggaattacacgtgtatagcaagtaatgggcctcagggacaaatacgcgctcacgtccaactcactgtggcggtattcattacatttaaggtcgaaccagagcgaacaaccgtgtatcaggggcacactgccttgctgcagtgcgaggcccagggcgaccccaaacctctgattcagtggaaggacaagccagtgccagaagagtctgaaggccctgggagtccccctccgtacaaaatgattcagactatcggtctttctgtgggggcagcagtggcttatatcatagcagtcttgggactcatgttttactgcaaaaagcgttgtaaggctaagcgcttgcagaaacagccagagggggaagagcccgagatggagtgtcttaacggcggacccttgcagaacggacagcctagcgctgaaattcaggaggaagtcgcacttacctcgttgggaagcggcccagccgctacaaacaaacggcactctacaagtgacaagatgcattttcctcggagtagcctgcagcccattacaaccctgggaaagtcggaatttggggaagtattcctcgccaaagctcaaggactggaggagggcgtggccgagacccttgtcctggtcaagagcctacaaagcaaagacgaacaacagcagctggactttcgacgagagctggaaatgtttggaaagctgaatcatgccaacgtggtccgtcttctcggcctgtgcagggaagcagaaccacactacatggtgcttgaatacgtcgatctgggcgacttaaagcagtttcttagaatcagtaaatccaaggacgagaagctgaagagccagcctctatccactaaacagaaggtggctctgtgtactcaggtggctctcggaatggagcatttgtctaacaataggtttgtccacaaagacctagcagcacgaaactgtttggtctccgctcagagacaagtcaaagtgagtgccctcggcctgtctaaagacgtgtacaactctgagtattaccatttcagacaggcatgggtccctttacggtggatgtctccagaagcaattctcgaaggcgatttttccacaaagtccgacgtgtgggcttttggagtgctgatgtgggaggtgttcacccacggcgaaatgccccacgggggacaagccgacgatgaggtgctggcggatttgcaggctggcaaagcccgattgcctcagcctgagggatgcccttcaaagttgtatagattgatgcagcggtgctgggccctttcaccgaaggataggccaagtttcagcgaaatcgccagtgcacttggtgatagcaccgttgattctaagccatag

SEQ ID NO: 237435 - DNA, 1212 bp, synthetic construct
  misc_feature 1..1212: note = Description of Artificial Sequence: Synthetic coding sequence
  source 1..1212: mol_type = other DNA
atgggctcattcctcagcggcgaaaaaagaccatccgcccctaccgtcggttccgccatggaaaaaaaggagttccctaccccaccagggagagtgggtccaggtacacagaccgccattgtcttcattaagcagcctagctcacaggacgccctccaggggaggcgtgctctcctgaggtgcgaggtggaagcacccggacccgtccatgtgtactggctgctggacggcgctccagtgcaagacacagaaaggaggtttgcccagggcagctccctgtcattcgccgctgttgaccggcttcaggattccggcaccttccagtgcgtggcccgagacgacgttactggagaggaggccaggtctgccaacgcgtcatttaacattaaatggatcgaagccggaccagtcgtgctcaagcaccctgctagcgaggctgaaatccagccacaaacgcaggtgacactgcgctgtcatatcgacggacatcccagacctacctatcagtggttccgggacggaaccccactatccgacgggcagtcgaaccacacggtatcatccaaagagcggaacctcactttacggcctgcaggtcccgaacactcaggactgtactcatgctgtgcgcactccgcctttggacaggcctgcagttcacaaaactttaccctatccatcgcagatgagtcatttgcaagagtggtgttggcaccacaggacgtcgtagtggctagatacgaggaggctatgtttcactgtcagttctccgctcagccacccccatctctgcaatggctatttgaggacgagacccccatcactaaccgctccaggcctccacatcttagacgggcaaccgttttcgccaatggatctctactgctgacacaagtgaggcctaggaacgccggaatctatcgatgcatcgggcaagggcagcgtggccctccaatcattctagaagctactctgcatttggctgagatagaagacatgcccctgttcgagccccgtgtatttacagccggatccgaggagagagtgacctgtttgccgcctatggccggaagtacaagaagagccacaagttggtgctggccgatcctgctgaaggtgatgctggtttcgaccccagcaaccagaccaacctggctggtgagtggcgaccgaatgagtacaagcctgtggcctctgtgtccccctggatag

SEQ ID NO: 237436 - DNA, 810 bp, synthetic construct
  misc_feature 1..810: note = Description of Artificial Sequence: Synthetic coding sequence
  source 1..810: mol_type = other DNA
tttagcgctcagcctcctccttcattacaatggctgtttgaggacgagactccaattaccaaccgttcccgccctccccacctgaggagagcaacagtgtttgcaaatggatcattgttattgacacaggttcgccctagaaatgcgggtatctaccgctgtataggccaaggccagcgaggcccacctatcatcctggaggcaacgttgcatctcgcggaaattgaagacatgcccctgtttgaacctagggttttcactgcaggcagcgaggagcgagtgacctgtctcccgcctaaggggctacccgaacccagcgtgtggtgggagcacgctggagtgcgtttaccaacccatggacgggtctaccagaagggccacgagcttgtgctggcgaatattgccgagtccgacgccggagtgtatacttgccacgccgctaacctggcagggcaaagaaggcaggacgtcaacattaccgttgcgagtgagcatttgtgcccagagggccagggtgaggtggagggtaacacaggcctgggtgtgatggatagggggttcccagccgtcccaagctggctgaagaaaccacaagattcccaactggaggaaggcaaacccggatatctggattgcctcactcaggcaacaccaaagcccactgtggtgtggtaccggaaccagatgctgattagcgaggattcaaggttcgaagtctttaagaacggcactctcaggatcaacagcgtggaggtgtacgatggaacatggtatcgatgtatgtcctcaactcctgctggtagcatctag

SEQ ID NO: 237437 - DNA, 444 bp, synthetic construct
  misc_feature 1..444: note = Description of Artificial Sequence: Synthetic coding sequence
  source 1..444: mol_type = other DNA
atgggagccaccgggctggggtttctgctgtcctggcggcaggataacctaaatgggaccgattgccagggctgtaacatcctgtatttttcagaaaccactgggagcatgtgctcggagctgtccctcaacagaggactcgaggcgaggaggaaaaaagatttgaaggatagtttcttatggcggtacggaaaggtcggctgtattagcctacctctgcgagagatgaccgcctggatcaacccaccacagatctccgagatatttcagggctatcaccagcgtgttcatggggcagacgctctttcattacagacaaatagcctgcgatctagactgtcatctcaatgcctgggacagagcttcctgctgagaacactggagcgcggtagagggtttagggccttgggggatatttgtggtcatgtccatgaggaggattag

SEQ ID NO: 237438 - DNA, 216 bp, synthetic construct
  misc_feature 1..216: note = Description of Artificial Sequence: Synthetic coding sequence
  source 1..216: mol_type = other DNA
atgggggcaaccggcctaggcttcctgttgtcctggcgccaggataacctcaatggcacagattgtcagggatgtaacatcttatatttttccgaaactacaggcagcatgtgtagtgaactcagcctgaaccgtggattggaggctcgcagaaaaaaagacttgaaagactccttcctgtggcgcgacggggtttccccatgtctgccttgttag

SEQ ID NO: 237439 - DNA, 444 bp, synthetic construct
  misc_feature 1..444: note = Description of Artificial Sequence: Synthetic coding sequence
  source 1..444: mol_type = other DNA
atgggggcaacaggcctgggcttcctcttgtcttggcgacaggataaccttaatgggacagattgtcagggctgcaacatcttgtatttctctgagaccaccgggagtatgtgttcagaactgagcctgaatcgtggcttggaagccaggagaaaaaaagacttaaaggattccttcctgtggaggtacggtaaggtgggatgtatctctctgcctctccgcgaaatgaccgcctggattaatcccccacagatctcagagatattccaggggtaccaccaacgcgttcatggggcagatgccttatcattacagacaaatagtcttaggagtaggctgagctctcagtgtctcggccagtcatttctgctacgtactcttgagcgagggcgaggttttcgggcactcggggatatttgcggccacgtccatgaggaggattag

SEQ ID NO: 237440 - DNA, 216 bp, synthetic construct
  misc_feature 1..216: note = Description of Artificial Sequence: Synthetic coding sequence
  source 1..216: mol_type = other DNA
atgggggcaaccggactgggatttctcctcagctggagacaggataatctgaacggtaccgactgtcagggatgcaatatcctatacttcagcgaaaccacagggtccatgtgtagcgagctatccctaaatagaggcttagaagctcgcagaaaaaaggaccttaaggactcctttctatggcgcgatggggtttctccttgtcttccttgttag

SEQ ID NO: 237441 - DNA, 3561 bp, synthetic construct
  misc_feature 1..3561: note = Description of Artificial Sequence: Synthetic coding sequence
  source 1..3561: mol_type = other DNA
atgtctgtagcctgtgtgctgaaaaggaaggctgtgctgtggcaggattccttcagtccccatttaaagcaccatcctcaggaacccgctaatcctaacatgccagttgtgctgacctccggcacaggttcccaagcacagccacagcctgcagccaaccaggccctggccgctgggacgcactcatctcccgtgccgggatcaattggagtggccggtaggagtcaggacgacgccatggtggattatttctttcagaggcaacacggggagcagttaggtggaggtggttccggtggaggcggatacaacaatagcaagcatagatggcccactggcgacaatattcacgctgaacaccaggtgcgatcaatggatgagttgaatcatgattttcaagctctcgccttggaggggagggccatgggtgagcagttgctcccgggaaaaaagttctgggagaccgatgagagctccaaggatggcccaaagggcatcttcctgggggaccagtggcgtgactcagcttggggcacaagtgatcactcagtctcccaacctattatggtacagcgccgacctggccagtcctttcacgttaatagtgaagtgaattccgttttatccccccgaagtgaatctgggggtttaggtgtctctatggttgagtacgtactgtccagttccccaggcgactcttgtttgcgcaagggtggtttcgggcctcgggacgccgactctgacgagaacgataaaggggaaaagaaaaataaggggacgttcgacggtgataagttgggtgacttaaaggaagaaggggacgtgatggataaaacgaatggtcttccggtacagaacgggattgatgccgatgtcaaggatttcagtcgcacccccggaaattgccaaaacagcgcaaacgaagtggatctcttgggcccaaaccaaaatgggtccgagggcctcgcgcaactcacaagcactaacggggcaaaacccgtcgaagacttctctaacatggagtcacagtcagtccctctcgatcccatggagcacgtcgggatggagcctctgcagtttgactactctggcactcaggtccccgtagatagcgctgctgccacagtgggcctcttcgattacaacagccagcaacagctctttcagcgtccaaatgcgctggcagtacagcagcttaccgctgcacagcagcagcagtacgctctcgctgcagctcaccagccacacatcggcttggcccctgctgcttttgtccccaatccatatatcatcagtgcagctccaccgggtacagatccttacactgccggactcgccgcagctgccaccctgggacctgcagtcgtgcctcatcagtactatggagtaaccccctggggagtttatcccgcttcactgtttcagcagcaagctgccgctgccgctgccgcaacaaactcagccaatcaacagactactcctcaagcacagcagggtcagcaacaggtcctgcgcggaggggcaagtcaacgcccactgacaccaaaccagaatcaacagggacagcagacggaccccctcgtcgcagcagccgcagttaacagtgctctagcgtttggccagggtttagctgctgggatgcctgggtaccccgtgctggccccagcggcatactatgaccaaactggcgcactggtcgtgaacgctggcgcaaggaatggcctgggagcacctgttagactcgtggcccctgctcctgtgatcatctcgtcaagtgctgcccaggcagccgtcgccgcagcagccgctagcgcaaacggcgcagcgggaggtctggctggcaccaccaatgggccattccgaccgctgggaactcagcaacctcagcctcagccgcaacagcaacctaataacaatctggcatctagtagcttttacggcaataattcattgaacagcaactcccagagtagttccctgtttagtcagggctctgcccagcctgcgaatacctccctggggtttgggagctcaagctctctcggagccaccctcggcagcgctctcgggggatttggtacagccgtcgccaattcgaataccggctctggcagtaggcgcgatagtctcacaggaagctccgatctgtataagcggacatcatcctcactcacccccatcggccacagtttctacaatgggctgtctttcagctcctcccctgggccagtggggatgccactgcccagtcagggcccaggacatagtcaaacaccacctccttctctctctagccatggctcatcctcatcactaaatctcggaggcttgaccaatggaagtgggcgatatatatcggctgctcctggtgcagaggccaagtatcgtagtgccagtagtgcttctagcctctttagcccttctagcaccctcttctctagcagtaggttgcgttatggaatgtccgacgtgatgccaagcggcagaagcagacttttagaagatttcaggaacaatcggtatcccaacctgcagctaagggagatcgcgggtcatatcatggaattttctcaagaccagcacgggagtagattcattcagctcaaacttgagagagctactccagcagagaggcagttggtattcaatgaaatactacaggcagcttatcagctgatggttgatgtctttgggaattacgtaatacagaaattctttgaattcggaagcctggaacagaagctagctctggcagagcgtattcgtgggcacgtactaagccttgcgttacagatgtatggatgtcgcgtcatccaaaaggcgctcgagttcatacctagtgaccagcagaatgaaatggttcgggagttggatggacatgtcttgaaatgcgttaaggatcagaatggcaatcacgttgtccagaagtgcatcgaatgtgttcaacctcagtcactccagtttatcatcgatgcatttaaaggccaagtgtttgccctgagcacacacccttacggatgtcgcgtcatccaaaggatcttggagcactgcttaccagatcagaccctccctatccttgaagagcttcatcaacacaccgaacaattggtgcaagatcagtacgggaattatgttatccaacatgtgcttgaacacggcagaccagaggacaagtctaagatagtagctgaaatccgcggaaatgtgctcgtcttgtcacaacataagttcgcttcaaatgtggtagagaagtgcgttactcatgcgtccaggacagagagggccgtcctaattgatgaagtgtgtaccatgaatgatggcccacacagtgccctctacactatgatgaaggaccagtacgcaaactacgtggttcagaaaatgatagatgtggccgaaccgggtcagcgtaagatcgttatgcataagatacgccctcatatcgccactctgagaaaatacacctacgggaagcatatcttagctaaactcgagaaatattatatgaagaacggggtggatttggggccaatatgcgggcctcccaatggcatcatctag

SEQ ID NO: 237442 - DNA, 2781 bp, synthetic construct
  misc_feature 1..2781: note = Description of Artificial Sequence: Synthetic coding sequence
  source 1..2781: mol_type = other DNA
atgagcgtggcgtgcgtcctcaagaggaaagcagtgctgtggcaggattcctttagccctcacctaaagcaccatcctcaagaacccgctaaccctaatatgccagtggtgctgacatcaggcactggcagccaggcgcagccacagccagctgcaaaccaggctcttgcagctgggactcacagtagccctgtgcccggatcaattggagttgccggacggtctcaggacgacgcaatggtggactattttttccagcgccagcatggcgagcagctgggaggcggtggaagtggagggggaggctacaataattcaaaacatcgttggcccaccacagttgggttgttcgactacaattcacaacagcaactctttcagaggccaaatgccttggccgtgcaacagcttactgctgcccagcagcaacagtacgctctggccgctgcacaccaaccccatataggtctggccccagccgctttcgtgcctaatccctatataatttcagcagccccacccggaaccgacccttatacagccggtctggctgctgccgcaaccttggggccagctgttgtccctcatcaatactacggcgtcaccccttggggagtatatccggcttccctgtttcaacagcaggctgccgcagctgctgccgcaacaaactctgccaatcagcaaaccacacctcaggctcagcaggggcagcagcaagtgctgaggggtggcgcttcacaacggcctttgacccctaaccaaaatcagcaggggcagcagacggatccactcgtggctgccgcagccgtgaacagtgcgttggccttcggccagggactcgccgcaggtatgccgggatatcctgtactggcccctgcagcctattacgatcaaacaggcgctttggttgtgaatgccggtgccagaaacggactcggggcacctgttcgtctcgtagccccagcccctgtgataatctccagcagtgcggcacaggccgcagtggcagcggcagcagccagtgccaatggagcggctggagggttggctggaactacgaacggtccatttagacccctgggcacccaacaaccgcagccccagcctcagcaacaaccaaataataatctggcatcatcaagtttttacgggaataattctttaaactctaactcccagagtagttccctcttttcccagggctccgcccagcccgctaacaccagcctggggtttgggtccagctcttctctgggcgcaacactcggatctgccctgggaggtttcggcaccgcggtggcaaatagcaataccggcagcggcagtaggagagacagtctcactggttcctccgacctatataagcgtacaagcagttccttaactcccattggccatagtttttacaacggacttagttttagttcaagccccggtccagtgggcatgccactacccagccagggtcccggtcactcccagacccccccaccctctctgtcatcacatggatcatcatcctcactcaatctgggcggacttaccaacgggtcaggcaggtatatctctgctgctcccggagccgaggccaaatacaggtctgcctcatctgccagtagtctcttctcgccgtcttcaacccttttctcttctagtcgactccgatacggaatgagcgacgtgatgccatccgggcgaagcagactcctcgaagatttcagaaacaacaggtatcctaacctccagctgcgcgaaattgctgggcatatcatggaattctctcaggaccagcacggcagtagattcattcaactcaagctggagcgagctacacccgcagaacgccaactagtctttaacgaaatattacaggccgcataccagctgatggtcgacgtgtttggtaactacgtgatccagaagttctttgaattcggctctcttgaacagaagttagcacttgcagagcgcatacgtggacacgtgctttctctcgccctgcagatgtacgggtgcagggttatccagaaagccctagagttcatacccagtgaccagcaagtgattaatgagatggtacgagaactggatggtcacgtcttgaagtgcgttaaggaccagaacgggaaccacgttgttcaaaagtgtatagaatgcgtgcagcctcagtctcttcagttcatcattgatgcatttaagggccaagtttttgcccttagcactcacccctacggatgtcgtgtaattcagcggatactggagcattgccttcccgatcagaccctgccaatcctggaagagctgcatcagcatacagagcaactcgttcaagatcagtatgggaactatgtcatccagcacgttctggagcacggtcggccagaggacaagtcaaaaattgtggccgaaatccggggtaacgtattagtactatcacagcataaatttgcatctaacgtagtcgagaagtgcgtcacacacgcgtcacggactgagcgcgcagtgcttattgatgaggtgtgtaccatgaatgatggcccacactccgcattgtacacgatgatgaaagatcaatacgccaactacgtcgttcagaaaatgattgacgtggccgagcccggacaacgtaaaatcgtcatgcacaaaatccgaccccatattgcaacgctgcggaaatacacatacgggaaacacatacttgcgaaattggagaaatattatatgaaaaatggcgtagacctggggccaatctgcggaccacctaatgggatcatctag

SEQ ID NO: 237443 - DNA, 3135 bp, synthetic construct
  misc_feature 1..3135: note = Description of Artificial Sequence: Synthetic coding sequence
  source 1..3135: mol_type = other DNA
atgtcggtggcttgtgtcctgaaacgaaaggctgtcctatggcaagacagcttttctcctcatcttaagcaccacccacaagagcctgctaatcctaatatgccggttgtgctcacaagtggtacagggagtcaggcccaacctcagccagcagcaaaccaggccctggctgctggaacacactcttctcccgtcccagggtccatcggcgtagctggtcgctcccaggacgacgctatggtggattattttttccaaaggcagcatggcgagcagctcggaggtgggggatccgggggaggtgggtataacaatagtaaacataggtggcctaccggcgacaacattcacgccgaacatcaggtgcgcagcatggatgaattgaaccacgacttccaggccctcgcactggaaggtcgagccatgggagaggggcctagggatgctgattccgacgaaaacgacaagggtgaaaaaaagaataagggcacctttgacggagacaaattaggtgacttgaaagaggagggagacgtgatggacaaaacaaatggtctgcctgtgcagaacggtatcgacgcagacgtgaaagatttctcacggacacccggaaattgccagaattctgccaacgaagtggaccttctgggtcctaaccaaaacgggagtgagggcttagctcagctgacatcaactaatggagcaaaacctgtggaggattttagcaacatggaatctcaatctgtcccgttggatccaatggagcacgttggaatggagcccctgcagtttgattactctggcacgcaggttccggtcgacagcgccgctgctactgtgggcctgtttgattataacagtcagcagcagctgtttcagagaccaaatgccctggccgtgcagcagttgaccgcggcacagcagcagcagtacgcgttggccgctgcacaccagccccacattggtcttgctccagccgctttcgtgcctaacccatacatcatatctgcagccccacccggaaccgatccttacacggctggcctggctgccgctgccaccctgggtcccgcagttgttccccaccaatattacggcgttaccccttggggcgtctatccagcatccctgttccagcagcaggctgcggcagcagccgctgccaccaacagtgcaaaccagcagaccaccccccaggcgcagcagggccaacagcaggttcttcggggaggcgcttcacaaagacccctcacacccaatcaaaatcagcagggacagcaaactgaccctctcgttgctgccgctgctgtgaacagtgccttggcattcggacaaggcttggccgcaggtatgcctgcagtcgcagctgctgccgcatctgctaacggcgcagcgggtggcctggcgggaaccactaacgggccattcaggccacttgggacccaacaacctcagccacagcctcaacagcagcctaataacaacctagcgtccagttcattttacggcaacaactccctgaactccaattctcagtcctcttcactctttagtcagggcagtgcacagcccgcaaatacctcactaggttttggaagctcctcaagcctgggagcgaccctggggagtgccctcggaggctttggtaccgcagttgccaactcaaacaccgggtctggaagtagacgggacagtctcaccggcagcagcgatctgtataagaggacatcatcctctttgacacctattggccacagtttctacaacggcctgagctttagcagttctccgggaccagtcggcatgccactgcccagccaggggcctggccactcacagacgccccctcctagtttaagtagccacgggtcgtcaagcagccttaatctaggcggattgacgaacggcagcggacggtacatttcggccgcaccaggggcagaggccaagtatcgtagcgcaagctcagcatctagcctgttctccccatcaagcacattgtttagtagtagtaggttaaggtacgggatgagcgacgtgatgcctagcggccgaagcagacttctagaagattttaggaacaacagatatcccaacctccagctgagagaaattgctggacacataatggaattctctcaggaccagcacgggagcaggttcattcagctgaagctggagcgggctacacccgctgagcggcagcttgtattcaacgagatactccaagcagcctatcagttaatggtcgacgtcttcggtaactacgtgattcagaaatttttcgagttcgggagcctcgagcagaagctcgcccttgccgaacgcattagggggcacgtgctgtctctggcccttcagatgtacgggtgtagggtgattcagaaagccctcgagttcattccttcagaccaacaggtgattaacgagatggtgcgggagctcgacggacatgtgttgaaatgcgtcaaggatcagaacgggaaccacgtcgtacagaaatgtattgagtgcgtccaacctcaatcccttcagttcatcattgatgctttcaagggccaggtgtttgccttgtctactcatccatacggctgcagagtgatccagagaatcttggaacactgccttcctgaccaaaccctacccattctggaggagctccaccaacatacggaacagctcgtccaggaccagtatggtaattacgtcatacaacacgtcctcgagcatgggagacccgaagataagtcaaaaattgtggccgaaattaggggaaatgtgctcgtgctgagtcaacacaaatttgctagcaacgtggtggagaaatgcgtgacccacgccagcagaactgagcgagctgtactgattgatgaagtctgtaccatgaacgatgggcctcactcagctctctataccatgatgaaagatcaatacgcaaactatgtagtccaaaaaatgatagatgtggctgagcctgggcaaaggaagattgtgatgcataaaatacgcccacacatcgctacccttaggaagtatacctatggcaagcacatcctcgccaagctcgagaagtattacatgaagaatggtgttgacctgggaccaatctgcggccctcctaacggaatcatctag

SEQ ID NO: 237444 - DNA, 3567 bp, synthetic construct
  misc_feature 1..3567: note = Description of Artificial Sequence: Synthetic coding sequence
  source 1..3567: mol_type = other DNA
atgtccgtggcttgtgtgttgaagaggaaggccgtgttgtggcaagacagcttctctccccacctgaaacatcacccccaagaacccgctaaccctaatatgcccgtagtgctcacatccggcactggttcccaggcacaaccccaacctgcagctaatcaggccctcgctgccggaactcactcatcccccgtgcctggctccataggagtggccggtaggtctcaggacgacgccatggtcgattattttttccagaggcagcacggagaacagctaggcggtggcggatccgggggtgggggatacaataattccaaacacagatggccaactggtgataatattcatgccgaacaccaggtgaggagtatggatgagctgaaccacgactttcaggcgcttgctctggaagggagagcgatgggcgaacaactgttgcccggtaagaagttctgggagactgatgagagcagcaaagacgggcctaaaggtattttcctgggagatcagtggcgggattcagcctggggcacaagcgaccatagcgtgtcccagcccatcatggtgcagagacgacctggccagtcctttcacgtcaattccgaagttaattccgtgctgagcccgcgttcagagtcagggggactgggcgtttctatggtagagtatgtcctcagctcctctcctggggatagctgtctgagaaaaggcggatttggtccacgcgatgctgactctgatgagaatgataaaggggagaagaagaataagggcacgtttgatggcgataagctgggggacctaaaagaagagggcgacgtgatggacaagaccaacggcctgcccgttcaaaatggtattgacgctgatgtcaaagattttagccggacccccggaaactgccagaactctgccaatgaagtagatctgttaggcccaaaccagaatgggagtgaaggacttgctcagcttacctctaccaatggtgcaaaacccgtggaagatttctccaatatggaatcccagtcagtgcccctggatccaatggagcacgtcggcatggaacccctgcaattcgattattcaggtacccaggtcccagtcgatagtgccgctgctactgtggggctcttcgattacaactcccagcagcaactattccagaggccgaacgctcttgccgttcaacagctcacagccgcacagcagcagcagtatgcactggccgcagctcaccagccccatatcggacttgctcccgcagcctttgttccgaatccttacatcatatcagctgcacccccaggcaccgacccgtacacagccggattggcggctgccgcaactcttggacctgctgtagtgccccaccaatactacggggtaactccttggggcgtatatcccgcttctttgttccagcaacaggccgctgcggctgcggcagctacgaatagcgccaaccagcagactaccccccaagcacagcagggacaacaacaggttctgcgaggcggagcttcccaaagaccactcaccccaaaccagaatcagcaggggcagcagacagatcctttggtagccgcagcggctgtgaattcagccctggcattcgggcagggcttggccgctggcatgcctggttacccagtcttggcccctgccgcatattacgaccaaacgggggcactagtggtcaacgcaggcgcacgcaatggcctcggtgcccctgttcgcctcgtggctccggcaccggtgattatatctagctcggctgcacaggctgctgtggccgctgccgcagcctctgctaatggcgcagcagggggtctcgcgggaaccacaaatggccctttccggccactcggaactcaacagccccagccccagcctcagcagcagcctaacaataatctggccagtagcagtttctacgggaacaatagtcttaactctaacagtcagagctcatctctattctctcagggctcggcccagcccgctaatacgtcactgggctttggtagcagctccagcctcggtgcaaccctgggatctgcccttgggggattcggaacggcggtggctaattccaatacaggaagtgggtcacggcgagattcactgaccggcagtagcgatctctataagcgcacctctagctcactgacccccatcggccacagcttttacaatggccttagcttctcctcgtcccctgggcctgtggggatgcccctgcctagccaaggccctggacatagccagactcccccaccatctctgtctagtcacggcagtagctcctcccttaacttgggcggacttaccaatggaagtggtaggtatatttccgcggctcctggcgctgaggcgaaataccgctcagcgtcctctgcctcaagcctctttagcccctctagtacccttttttcaagtagcagactgagatacggcatgtccgacgtgatgccaagcggaagatccagactgttggaggactttcggaacaacaggtatcccaatctccaactgcgagagattgcagggcacattatggagttttcccaggaccagcatgggtcacggtttatccagttgaagctcgagcgggctactcccgctgaacgacagttggtattcaacgaaatcctacaagcagcgtaccagctaatggtggatgtgttcggaaactatgtgattcagaaatttttcgaattcgggtccctcgaacagaaactggctctggccgagcggataagggggcatgtcctctccctagccctccaaatgtatggctgccgggtgatccagaaggcacttgaatttatcccctccgaccagcaggtgattaacgaaatggtgagagaactcgatgggcacgtccttaaatgcgtcaaagaccagaacggcaatcacgttgtgcagaagtgcatcgaatgcgtccaacctcagagcttacagttcatcatcgacgctttcaagggccaagtttttgcgttgtctacacacccctacgggtgcagggtcatacagcggattctcgaacattgcctccccgatcagaccctgcctatcttggaggagttgcaccagcatactgagcagctggtgcaggaccagtacggaaactatgttatacagcacgtgcttgagcatggtcgccctgaggacaaaagtaaaatagtggccgagatcaggggaaacgtactcgtgttaagccagcataaattcgccagcaacgtggttgagaagtgcgtgacacacgcctcgcgaactgaacgcgcagtactgatcgacgaggtctgtactatgaacgacggcccacatagtgccctctacactatgatgaaggatcagtacgcaaattacgtcgtgcagaaaatgatcgatgtggcagagcccggtcagaggaaaatcgtgatgcataagatcagaccccacatagcaacgctgcgcaagtatacatacggtaagcacattcttgcaaaactagagaaatactacatgaagaatggggttgatctcggtcctatttgtgggccacctaacgggatcatctag

SEQ ID NO: 237445 - DNA, 3489 bp, synthetic construct
  misc_feature 1..3489: note = Description of Artificial Sequence: Synthetic coding sequence
  source 1..3489: mol_type = other DNA
atgagcgtggcctgtgtcttgaagcggaaggcagtgctttggcaggattcattttcccctcacctgaaacatcaccctcaagagccagccaaccccaacatgcctgtggtgctgacgtcggggactgggtcacaggcacagccgcagcctgccgctaatcaggcgctggcggctggtactcattccagccccgtccctggaagtatcggggttgccggacgtagtcaggacgacgctatggtggattatttcttccagcgacagcacggcgagcagctgggcggtggcggttctggcggaggtggctataataactcgaagcataggtggcctacaggcgataatattcacgctgaacaccaggtaagatctatggatgagctcaatcacgactttcaggcactggctctggaggggcgtgcaatgggagagcagctgctgccgggaaaaaagttttgggaaaccgacgaatcttcaaaagatggcccaaagggtattttcctgggggatcagtggcgggactccgcatggggtacctcagaccattcagtgtctcagcctatcatggttcaacgcagaccgggacagtctttccacgtgaactccgaagtgaactctgtgctttcgcccaggtcagaaagcggtggcttgggtgtgtccatggttgagtatgtcctgtctagttcgcccggagatagctgtctccgcaagggtggttttgggccacgggacgccgactcagacgaaaacgataagggcgaaaagaagaataagggtactttcgacggagataaactgggcgatctcaaagaggagggtgatgttatggacaaaaccaacgggctgcccgtccagaacggtattgacgcggatgtaaaggacttttcccggacccccggtaactgccagaattcagccaacgaggtggacttgctcgggccaaaccagaatgggtccgaggggcttgcacaactcacgtctacaaacggcgctaaaccagtggaggatttctctaacatggaaagtcagtctgtgcctctggacccaatggaacacgtgggcatggagcccctgcaatttgattactcaggaacgcaagtgcctgtggattctgcggcagcaacggttgggttgtttgactacaactcacaacagcagctttttcaaagacctaacgccctcgccgtgcagcagctgacagctgcacagcagcagcagtacgcgctggcagctgcccaccaacctcacattgccggtcttgccccagcagctttcgtgcctaacccctatattataagcgcagcccctcccggaaccgacccttacaccgctggtttggccgctgctgccacactgggtccagcagtggtcccccaccagtattatggggtcacaccttggggtgtctatcctgcttccttattccagcagcaggccgcagccgcagcagctgccactaactctgcaaatcaacagacaaccccccaggcccaacagggccaacagcaggtcctgagaggtggcgctagtcagcggccactgactccaaaccagaatcagcaaggacagcagacagacccactggtggctgctgccgctgttaactccgccctggcattcgggcagggactggccgctggtatgcccggttatccggttctggcccctgctgcctattacgaccagacgggcgcactggtcgttaacgctggggcacggaatggattgggggcacccgttagactcgtggccccagcccctgttatcatctccagctcggccgcacaggctggcacacagcaaccccagcctcagccccagcagcagccaaacaataatttggcatcttcatcattttacggaaacaacagcttaaactcaaattcgcaatcatcatccctgttctcacagggatcagctcaacctgccaataccagcttggggtttggctcatctagttcattaggagcgactctaggctccgcactagggggttttgggacggcagtggccaactccaacacagggagcgggagccgtagggattcgcttacagggtcctctgacctctacaagcgcacaagctctagcctcactccaatcggccacagcttttacaatgggttaagtttcagttcttcccctgggcctgttggcatgccacttccttcacagggcccaggccactcacagacccctccaccttccctctccagtcacggctcctcctctagtctgaatctgggcggacttactaacggctcgggcagatatatctccgcagcgcctggggcagaggctaaatatagaagcgccagctctgcatcctcacttttctccccaagtagcacactgttttcttcgtcaaggcttcgctatggtatgtccgatgtcatgccttccggtcgtagtagactcctggaagacttcaggaataaccgttaccctaatctgcagttgagggaaatagccggacacataatggagttttcacaggaccagcatggctcccggtttatccaactgaaactagaaagagcaactccggcagaacgccagcttgtgtttaacgagattcttcaggcggcatatcagttaatggtggacgtgtttggaaactatgtgattcaaaagttctttgaatttggcagccttgagcagaagctggccctggctgagcgcattcgcggacacgttttgtctctggccttacaaatgtatggctgccgggtgatccagaaggccttggagttcatcccttctgatcagcaggtgataaacgagatggttagagagctggatggccacgtgttaaagtgtgtgaaagaccagaacggcaatcacgtggtgcagaaatgcatcgagtgcgttcaacctcagagtctacagttcatcattgatgcctttaagggccaggtgttcgcgctaagtacacacccatatgggtgccgcgttatccagcgtatcctggagcactgcctaccagatcagaccttaccgatcttggaggaactgcaccagcacactgaacaattggtacaagatcaatatgggaattatgtcatacagcacgttctcgagcatggtaggccggaagataagtccaagatcgtggctgagattagggggaacgtgctggttctgtctcagcacaagtttgcctctaatgtggtggagaagtgcgtgacgcatgcctcaagaacggagcgggctgtgctcatcgacgaagtgtgtaccatgaacgatggaccccattccgccttgtataccatgatgaaggatcagtatgctaactacgtagtgcagaaaatgatagacgtggcggagcctggccagaggaaaatcgtgatgcataagatccggcctcacattgctaccctccggaagtatacatatggcaaacacatcttagctaaactggagaagtactacatgaagaatggggtggatttagggcctatatgcgggccaccaaatggcattatatag

SEQ ID NO: 237446 - DNA, 291 bp, synthetic construct
  misc_feature 1..291: note = Description of Artificial Sequence: Synthetic coding sequence
  source 1..291: mol_type = other DNA
atgagtgtcgcttgtgtattgaaaagaaaggccgtcctgtggcaggacagcttcagcccacacctcaaacatcacccccaagagcctgccaacccaaacatgcccgtggttttgaccagtggcacgggctctcaggcacagccccagcccgctgccaaccaagccctagcagcgggaacccatagcagccctgttcccggatctataggtgtggccggacggagtcaagatgatgccatggtggactactttttccaacgccagcatggggaacaattgggcggaggatag

SEQ ID NO: 237447 - DNA, 1551 bp, synthetic construct
  misc_feature 1..1551: note = Description of Artificial Sequence: Synthetic coding sequence
  source 1..1551: mol_type = other DNA
atgagcgtcgcctgcgtgctcaagaggaaagccgtgctctggcaggattcctttagtccacaccttaaacaccacccacaggagcctgccaatcctaatatgccggtggtccttacatccggcactggcagccaggcccaacctcagccagcagcaaaccaggcgttggccgctggcactcattcctcacccgttccagggtccatcggtgtcgccggaaggtctcaggacgatgcgatggtggattacttctttcagaggcagcatggagaacaactcgggggtggcggttccggcggagggggatacaacaacagcaagcataggtggccaactggagataacattcacgcagagcatcaggtgcggagcatggacgagctaaaccacgactttcaggccctagcactcgaaggtagagctatgggagagcagctgctgccgggaaagaagttctgggagactgacgaaagcagcaaagacgggccaaaaggcatatttcttggcgaccaatggagagactccgcttggggaacttccgatcactcagtgagccagccaattatggtgcaaaggagaccaggccagtcctttcacgtgaacagcgaagtaaactcggtcctgtccccacggtcagagagcggcggactaggcgtgagcatggtggagtacgtcctgtcttctagtccaggagatagctgcttacgtaaggggggttttggacccagagacgccgactcagatgagaatgataagggcgaaaagaagaacaagggaacctttgacggtgacaaactcggggatctgaaggaagaaggtgacgtcatggataaaaccaacggcctgccggttcagaatggtatcgacgccgacgtcaaggattttagcaggacacccggaaactgccagaatagtgccaatgaggtcgatcttcttggcccaaaccagaatggatcggaggggttggcccaactgacgagcactaatggggctaagcctgtggaggacttttccaatatggagagccagtccgtgcctcttgacccaatggaacacgtaggcatggagccacttcaattcgattactcaggaacgcaagtgcctgtcgactcagctgccgcaactgtagggttattcgactacaactctcagcagcagctcttccagaggcctaatgcccttgctgtgcagcagttgactgccgcacagcagcagcagtatgcattggctgctgctcatcagccacacattgggctggccccagcagccttcgtcccaaatccatatattatttctgcggctcctccagggactgacccatacaccgccggattagctgcagcagcgactctggggccagctgtcgtacctcatcaatattatggagtgactccctggggtgtgtaccccgcaagcttgttccagcagcaggctgccgctgcagccgctgccaccaattccgcaaatcagcagacgacaccacaggcccagcaggggcagcagcaaaccgagttttgtttctgctgtcctggctggtccgctatggtgtag

SEQ ID NO: 237448 - DNA, 2964 bp, synthetic construct
  misc_feature 1..2964: note = Description of Artificial Sequence: Synthetic coding sequence
  source 1..2964: mol_type = other DNA
atgaatcatgactttcaggcactggcattggagagtagaggcatgggagagttgctgcctactaaaaagttttgggagccggatgatagcactaaggacggccagaaaggtatttttcttggagatgatgaatggagagagactgcttggggggctagccaccacagcatgtcgcagcccatcatggtgcagcggcgttctgggcaagggttccacggaaactccgaagttaatgccattctgtctcctaggtccgagtctgggggactcggtgtgagtatggtagagtacgttttatcgtcatctccagctgataagctggacagccggttcagaaaaggtaattttgggacaagggatgcggagacagacgggcctgagaagggcgaccagaaggggaaagcctctccattcgaagaggatcagaacagagatttgaagcagggcgacgacgacgactccaagattaatgggcgaggtctccctaacggcatggatgccgattgcaaggatttcaaccgcacacccggtagtcggcaagctagtccaacagaggtcgtggagagactcggaccgaatacaaatccatccgaaggccttggtccactccccaaccctaccgccaataaaccactggttgaggagttttccaatcccgagactcaaaatctggatgctatggagcaggttggtctagaatcactgcagtttgattaccctggaaaccaagtccccatggatagttcaggcgctacagtagggttgtttgattacaattcacagcaacagctgttccagcgtaccaacgccctgaccgttcagcaattgacagctgcccagcagcaacagtatgcgctggccgcagctcagcagccacacattgcgggtgttttttctgccggtttagctcccgctgctttcgtccctaatccatatattatatcagcagcaccgccagggactgacccttacaccgccgctggacttgctgcagccgcaacacttgctggacctgccgtcgtgcctccacagtactatggggttccatggggcgtgtatccagccaatctctttcagcagcaggcagccgctgccgcaaataacacagcgtcgcagcaagcagccagtcaggcccaaccaggccagcagcaggtgcttcgcgcaggagctggacagcggccactgacccctaaccagggccagcaggggcagcaagctgaatctcttgccgcagctgctgctgcaaaccccaccctggcatttggtcaaggtttagcaacagggatgcccggttaccaggtcttggctcctacggcttattacgaccaaacgggggcactggtggtgggtcccggagcccgaaccggcctgggcgctcccgtgcggttaatggcaccgactcccgtgctcatcagctcagcagccgctcaggccgcagccgcagctgctgctggcggtacagcaagttcccttacgggctctactaacggacttttccggcctattggtacccagccgccacagcagcagcagcagcagccgagcaccaatttacaaagtaacagcttctatggcagcagtagtctaaccaattcgtcacagtcgagcagcctgttctcacacggcccaggtcagccaggaagtactagcttgggattcggtagtgggaattcactgggtgctgctattggttccgccctaagcggctttggttctagcggtggtcttactaacggcagcggtcgttatatctccgccgcaccaggtgccgaagccaagtaccggagtgccagctccacttcttccctgtttagctccagttcgcaactgtttcccccttctagactccgttataaccgctctgatatcatgccgtccggacgctccaggctgctggaggacttccggaataatcggtttcccaatcttcagcttcgagatctgattggtcacatcgtagaattttctcaggatcaacacggctcgagatttatccagcagaagctagagagggccacacccgcagaaaggcagatggtttttaacgagattctccaggcagcatatcagctcatgacggacgtgtttgggaactatgtcattcagaagttcttcgagttcgggagtctcgatcagaaactggctctggctacccgaattaggggccatgttctacctctggctcttcagatgtatggttgtcgggtcatccagaaggcactggagagtattagttcagatcagcaggtgatttcggaaatggtgaaagaactggacgggcacgttctcaagtgcgtgaaagaccagaatggaaatcatgttgttcagaaatgtatcgagtgcgtgcagcctcaaagcctgcaatttatcattgacgccttcaagggacaggttttcgtgttaagcactcatccatacggctgccgggttatccaacgcatcctcgaacattgcaccgcagaacagacgctgccaatcttggaggaacttcaccagcataccgagcagttggtccaagatcaatatgggaattatgtgatccaacacgtgctggagcatggtcgtcccgaggacaaatcgaaaatagtaagcgaaatccggggtaaggtgcttgctctctctcagcataagtttgcttcaaacgttgttgagaagtgtgtcacccacgccagccgggcagaacgcgcactgctgatcgacgaggtatgttgccagaatgatggaccacacagtgcactgtacactatgatgaaggaccagtatgccaactatgtggtgcagaaaatgatagacatggccgagcccgcacagcgcaagatcattatgcataagatcagaccccacatcaccacgctgagaaaatatacgtatgggaagcacatcctcgctaaactggaaaaatactatctgaagaactcgcccgacttgggcccaatcggcggtccacctaatgggatgctttag

SEQ ID NO: 237449 - DNA, 3195 bp, synthetic construct
  misc_feature 1..3195: note = Description of Artificial Sequence: Synthetic coding sequence
  source 1..3195: mol_type = other DNA
atgaaccacgacttccaagctctggccttggagtctcgcggtatgggcgagctcttgccaaccaaaaagttctgggaaccggatgattcgaccaaggatggacaaaaggggatttttctgggcgatgatgagtggcgggaaaccgcctggggcgcttctcatcatagcatgtcacagcccatcatggtccagcgcaggagcggtcaaggatttcatggaaattctgaggttaatgccattttgtccccgagatccgagagcggaggtctgggagttagtatggtggagtacgtactttccagctcgccagcggataaattggattcacggttccgaaaggggaatttcggcacaagagacgcagagaccgacggacctgagaagggtgatcagaaagggaaggcgtccccttttgaggaagaccagaaccgcgacttaaagcagggcgacgacgacgatagtaaaatcaatggcaggggcctgcctaacggaatggacgccgactgtaaagattttaacaggacacctgggtccagacaggcgtcccctacagaggtggtcgaacggttggggcctaacacgaacccatccgaaggacttggacccctgcctaatcccacagcgaacaagcctctcgtcgaagagttctctaaccctgagacccaaaatctggatgcaatggaacaagtcggactagagtccctgcagttcgattaccctggtaaccaagtgcctatggactcttccggagctaccgtggggctgtttgattacaactcacagcagcaactgtttcagagaacaaacgcgctgaccgtgcagcaacttacagccgctcagcaacagcaatacgcgctcgcagccgcacaacagccccatatcgctggcgtcttctccgcagggttagctccagccgcattcgtgcccaacccatacataatctctgccgcacctcccggtaccgacccttatacggccgctggtctggcagcagcagccactctggcaggtccagctgtggtcccaccacagtattacggtgttccttggggggtctaccctgccaatctgttccaacagcaagctgccgctgccgcaaataataccgcctcgcaacaagctgcctctcaggctcaacctggccagcagcaggtgctgagagcaggagctggacagagacctctcactccgaaccagggccagcaaggccaacaggcagagtcgctggctgctgccgcagctgccaaccccacactggcctttggacagggcctcgccacagggatgccagggtaccaagtgctggcaccaaccgcttattacgaccagacaggtgcactggttgtagggccaggggctagaactggcctgggtgcccctgtgcgactgatggcaccaactcccgtcttgatatcttctgccgcagctcaggccgctgctgctgcagctgcagggggaacggcttcctctttaaccgggtcaactaacggtcttttccggccaatcggcacccagccccctcagcagcagcagcaacagccttccactaacctgcagagtaactctttttatgggagttcaagcctgacgaactcgtcgcaatcatcttccctgttttctcatggcccaggccaacctggtagcaccagtctgggcttcggtagcggcaattctcttggcgcagctatcggcagcgccctgtctggattcggatctagcgtgggcagctctgccagctcatctgccacccggcgagaatccctgtccactagctctgacttgtataagcgatcctcctcctcactggcgcctattggacaaccattctacaactctctggggttcagctcatcaccaagccccataggaatgcctctgccatctcagacaccaggacactctctcacgcctccaccctcattaagttcacatggttcctctagctcactgcatctgggtggattgactaacggcagcgggcgttatataagtgccgctccaggcgctgaagccaagtatcggtcagcttcctctacttctagtctgttctcctcctcctctcagttgttcccgccaagccgactgcgttataaccggagtgacattatgcccagcggtcggtcacgtctgctggaagacttccgcaacaatcgctttcctaacctgcagctccgagacctgattggccacatcgttgagttttcccaggatcagcacggctccaggttcatccaacagaagctcgagcgagccacccccgcagagaggcagatggtctttaacgaaatacttcaggccgcttatcaactcatgaccgacgtcttcgggaactacgtgattcagaagtttttcgagttcggcagtcttgatcagaaactggctcttgctactaggattcgcggacatgtgttgccactggccctgcagatgtacggctgtcgagtcattcagaaagccctggaatctattagttcagaccaacagtcagagatggtgaaagagctcgacggacacgtgctgaaatgtgtgaaggaccaaaatggaaatcacgtggtgcagaagtgcattgagtgcgtgcagccccaaagcctgcagttcatcattgatgcatttaaggggcaagtcttcgtcctcagcacgcatccgtacggctgcagagtcattcagcgaatactggaacactgcacagccgaacagaccctgcctatcctggaagagctgcaccagcataccgaacagctggtacaagaccagtacggcaactacgtcattcagcacgtgctcgagcatggtcgaccggaagacaagtccaagatcgtgtctgaaatcaggggcaaagtcctggccctcagtcagcataaatttgcctcaaatgtcgtggagaaatgtgtgacacacgcctcccgagctgaacgcgcactgctcatcgacgaggtgtgttgccagaatgatggaccacacagtgcgctctatactatgatgaaggatcaatacgctaactacgtggtgcagaagatgattgacatggcagagcccgctcaacgtaagatcataatgcacaagattaggccccatatcaccaccttgcggaagtacacttatggaaaacacattttggccaagttagaaaaatactacctgaagaatagccccgatctgggaccaatcgggggtcccccaaatggaatgctgtag

SEQ ID NO: 237450 - DNA, 3201 bp, synthetic construct
  misc_feature 1..3201: note = Description of Artificial Sequence: Synthetic coding sequence
  source 1..3201: mol_type = other DNA
atgaatcacgacttccaggccctagcgctagagtcaaggggcatgggcgagcttctacccaccaagaagttctgggaaccagacgattcaaccaaagacggtcagaaggggatatttctgggagatgacgagtggagggagacagcctggggggcatctcaccacagtatgtcacagcccattatggtgcaacgaaggagtggtcagggattccacgggaatagtgaagtgaatgcaattttgtcgccccgatctgaatctggcggacttggagtgtcgatggtggaatacgtgctctcttctagccctgcggataaattagattcgagattccggaagggaaacttcggcacaagggacgcagaaactgatggtccggagaagggcgatcagaaggggaaggcctcgcccttcgaagaggatcaaaaccgtgaccttaaacagggtgacgacgacgatagcaagattaatggcaggggccttcctaacggtatggacgccgattgtaaagacttcaataggacccctggctcaagacaggcctctccgacagaagtggtggagcggctgggaccgaatacgaatccctcagaaggtctggggcctctgcctaatcctaccgctaacaagcccttggtggaagaattttcaaatccggagacacagaatctggatgccatggaacaggtcggactggaatctttgcaattcgactatccagggaaccaggtccctatggacagctctggggctactgtgggcctgttcgactataactctcagcagcagctgttccagcgcactaacgccctgacagtccagcaactgaccgccgctcaacaacagcagtacgctttggctgcagctcagcagccgcatatcgccggtgtgttctcagcaggacttgcccctgccgcttttgtgcccaacccatatataatttccgccgcacccccaggtactgatccatacaccgctgcgggactggcagccgcagctacacttgccggtccagcagtcgtgccacctcagtactatggtgttccttggggggtctacccggcaaatcttttccagcagcaggccgcagccgctgccaataacaccgctagtcagcaggcagctagccaagcccagcccggtcagcagcaggttctaagggctggagccggtcagcgcccattgactcccaatcaagggcagcaaggccagcaagcagaatctctggccgcagcagctgcggcaaaccccacgttggctttcggacagggcctcgccactggcatgcctggataccaagtgctcgcacccaccgcctactatgatcagaccggagcccttgtggtgggaccaggtgcacggaccggactgggcgcaccggtgcgactgatggcccctaccccggtgcttatttcttcagctgccgcacaggctgctgcagccgctgctgcagggggaacagcctcttcacttactggctctaccaacggtctttttcgccctattggaacacagccccctcaacaacaacagcaacaaccctccactaacctgcagtcaaattctttttatggcagctcgagtctgaccaacagcagccagagtagttcactttttagtcacgggcctgggcaaccagggtctacctcattgggatttggatccggtaactcactaggcgctgcaataggctctgcgctgtcaggattcgggtcctctgtggggtcaagtgctagctcaagcgctacccggagagagagcctcagcacttcaagcgatctctataaaagaagttctagcagtttggcccctatcggacagcctttctacaacagtctaggattctcctcctccccgtccccgataggcatgcccctcccatcgcagacacccggtcattcactgactcctcctccatcgctgtcctcccacggctcatctagtagtctgcatcttggtggcttgacgaatgggtctgggaggtatatttcggctgcacctggggcagaggccaagtatagaagtgcaagcagcacctctagcctgttctcaagcagttctcagctctttccgccttccaggctccgctataaccggtccgacatcatgcctagcgggagaagccgactgttagaggattttaggaataaccgattccccaatctgcagctgagagatctcattgggcacattgttgaattctctcaggaccagcacgggagtagattcatccagcaaaagctcgagcgagccaccccagcggaacggcagatggtgttcaatgagatcctgcaggcagcataccagctgatgaccgatgtcttcggcaactacgtaattcagaagttttttgagtttgggtccctggatcagaagctggctttggcaacccgcatccggggacatgtgctgccattggctctgcagatgtacggttgccgggttattcagaaagctcttgagtcgatatcgagcgaccaacaggttatatcagaaatggtcaaagaactagacgggcacgtgcttaagtgtgttaaagatcagaatgggaatcacgtcgtgcagaagtgcattgaatgtgtccaacctcagtccctgcagttcattattgatgcattcaagggacaggtgtttgtcctgtcaacccatccatacggatgtcgagtgatccagcgtatcctggagcattgcacagcggaacagactctgccgatcctcgaagaattacaccaacatacagagcagcttgtgcaggatcagtacggtaattacgtgattcagcatgtactggaacacggacgcccagaggacaaatctaagattgtctccgaaattcggggtaaggtattggcattatcacagcataagttcgcttcgaacgtagttgagaaatgcgtgacacatgcttcacgcgctgaaagagcactgttgatcgatgaggtatgttgccagaatgatggcccacactccgcactgtataccatgatgaaggaccagtacgctaactatgtcgtgcaaaaaatgatcgacatggccgagcctgcccagagaaagattatcatgcataagatacgccctcacattactactctgcgcaaatatacctatggtaaacacattctcgccaagctcgagaagtattacttgaaaaattcacccgacctgggaccaattggaggtcctccaaacggaatgctctag

SEQ ID NO: 237451 - DNA, 3195 bp, synthetic construct
  misc_feature 1..3195: note = Description of Artificial Sequence: Synthetic coding sequence
  source 1..3195: mol_type = other DNA
atgaatcatgattttcaggctttagccctggagagtcgtggtatgggggagctgctcccaactaagaagttttgggagcccgatgactccaccaaggacgggcaaaagggcatattcctgggggatgacgaatggcgggaaaccgcatggggggcaagccaccactcgatgtcccagcccataatggttcagcggagaagcggccagggctttcatgggaacagtgaggttaatgcaattctgagtcccagaagcgaatctgggggtcttggagtgagtatggtggaatatgttttgtcttcgagccccgcagacaagctggactcaagattccgcaaaggtaactttgggaccagagacgcagagaccgacggccctgaaaaaggcgaccagaaggggaaagcaagtccctttgaagaagaccagaatcgggatctgaaacagggtgatgatgacgactccaaaattaacggacgaggtcttcctaacggcatggacgctgattgcaaggacttcaatagaacccccggatcccggcaggcttcaccaactgaggttgtggaaaggctcggcccaaatactaatcctagtgaggggctggggccactgcccaatccaacagcaaacaaaccattggttgaggagtttagcaatcctgagactcagaatcttgacgcaatggagcaggttggactggagtcacttcagtttgattatccaggtaaccaggtccctatggactcaagcggcgctacagtgggactgttcgactacaactcacagcaacagctcttccaaaggactaatgctctcaccgtccagcagttaacggccgctcagcaacagcagtatgcactggccgcagctcagcagcctcacatcgccggagtcttcagtgccggacttgctccggctgcctttgtgcctaatccatacatcatcagtgctgctcccccagggacggatccctatacagctgcagggttggcagccgcagccacgctggccggacccgctgtagtccccccacagtattacggggtcccctggggggtctatccagctaacctgtttcaacaacaggcggcagccgcagctaataataccgcatcacaacaggctgcatcacaggcccagcctgggcagcagcaggtgcttagagcgggtgccggtcagcggccactgacgccaaaccaggggcagcagggacaacaggcagagtccctagccgctgcagccgctgctaaccctaccctcgcgtttggccagggcctggccaccggcatgcccggatatcaggttctcgctcccactgcttattacgatcagaccggagcccttgtggtgggtccaggtgcacggaccggactgggtgcccctgttaggctgatggcccctacccctgttcttatctcatcggcagccgctcaggcagcagccgcagcagcagccggaggaactgccagcagccttactggaagtaccaatggtctctttagacctataggaacccagccaccccagcagcagcagcagcaaccaagtactaatctgcaaagcaatagcttctacggctcaagttcactgaccaactcgtcacagtcttcaagcctcttctcgcacggtccaggacagcccggatcaaccagcttgggcttcggctcaggtaattccctgggagcagctatcggttctgctcttagtgggttcgggtcctcagtggggtcctctgcgtctagttctgcaaccaggagggaatctctgtccacgtcctcagacttatacaagaggtcttccagcagcctggcacccatcggccagcctttttacaattccttgggctttagttcaagcccttcccctatcggaatgccattaccaagtcagacacccggtcactctctcactccaccaccaagcctgtcctcccatgggtcttctagctcactgcatcttggcggactgactaacggatccggacgttatatatccgcagctcccggtgcagaagccaaatatcgctccgccagctctaccagcagcctttttagctcttcctctcagttatttccaccatcaaggctgcgctacaaccgatcagatataatgccatctggccgaagtagactcctggaagactttagaaataatcggttccccaatctgcagctgcgcgatttgatcggccacattgtagagttcagccaggaccagcatggctcccgatttattcaacagaaactcgaaagagccacccccgctgaacgccagatggtgttcaatgagatacttcaggctgcctatcagctgatgaccgacgtattcgggaactatgtgatacaaaagtttttcgagttcggatctctagaccaaaaattagctctggcaactcgcatacgcggacacgtgttgcctttagcgttacaaatgtacgggtgccgggtcattcaaaaagccttggaaagcatcagcagcgaccagcagtccgagatggttaaggagctggacggtcacgttttaaaatgcgtgaaggaccagaacgggaaccacgtcgtgcaaaaatgcatcgagtgcgtgcagccccaatcgctgcaattcatcattgatgcctttaaggggcaggtcttcgtattatccacccacccatacggctgtagggttatccagcggattctcgagcattgtaccgcagaacagacattaccaatcctggaagagctccatcagcataccgaacagttggtccaggatcagtatggcaactatgtgatacagcatgtccttgaacacgggcgaccggaggataagtcaaagattgtgtctgagatccggggaaaggtcttggctttgtcccagcacaaattcgcgtcgaacgtcgtggaaaaatgtgtcacacacgcatcccgcgcagaacgggctctactgatcgacgaagtatgttgtcagaatgacggacctcattccgcactgtacaccatgatgaaggaccaatatgcaaactatgtcgttcaaaagatgatcgatatggcggaacctgcacagcggaaaattattatgcataagatccgaccccacatcacgacacttaggaagtatacttatgggaagcacatcctggcaaaactcgagaagtattaccttaaaaactcacctgacctgggccctattggcggtccgcctaacggaatgctgtag

SEQ ID NO: 237452 - DNA, 105 bp, synthetic construct
  misc_feature 1..105: note = Description of Artificial Sequence: Synthetic coding sequence
  source 1..105: mol_type = other DNA
atgaatcacgacttccaagccctggctttggagtccaggggcatgggcgagctgttgcctactaaaaaattctgggagcctgatgactcaaccaaagacgggtag

SEQ ID NO: 237453 - DNA, 882 bp, synthetic construct
  misc_feature 1..882: note = Description of Artificial Sequence: Synthetic coding sequence
  source 1..882: mol_type = other DNA
atgaatcacgatttccaggctctcgccctggagtccaggggcatgggcgaactcttaccaaccaaaaagttttgggaacctgatgattcgacaaaggacggtcagaagggcattttccttggcgatgacgaatggcgcgagacagcttggggagcttctcaccacagcatgtcccagcctatcatggtccaaaggcggagcggtcagggattccatggaaacagcgaggtgaatgctattctgagtccccgaagcgagtcaggtggcttgggcgtatccatggttgaatacgtacttagcagtagccccgcagataagctagattccaggttccggaaggggaacttcggtaccagagatgctgagacggacggacccgagaagggcgatcagaaagggaaggcaagtcctttcgaggaggaccagaatagagacctcaagcagggagatgatgacgattccaagatcaatggtagaggcctgcccaatggtatggacgcagactgtaaagatttcaataggacacctggatccagacaggccagcccgaccgaggtcgtggagaggcttggccctaataccaatccgagtgaggggctgggaccccttccaaaccctacagccaacaagcccctggtggaggagttttcaaatcccgaaacacagaacctagacgctatggaacaagtaggacttgagtccctgcaatttgactatcctggcaatcaagttcccatggactccagtggtgccacagtgggcctgttcgactataactcccagcagcaattgttccagcggaccaatgcacttaccgtgcagcagctgaccgctgcccagcagcagcagtacgcactcgccgctgcccagcagccacattag

SEQ ID NO: 237454 - DNA, 3027 bp, synthetic construct
  misc_feature 1..3027: note = Description of Artificial Sequence: Synthetic coding sequence
  source 1..3027: mol_type = other DNA
atgtcacaaccgataatggtgcaaagacgcagcggccaaggattccatggtaattccgaagttaacgcgatcctgtctccgaggagtgaatcaggaggactcggggtatcgatggtggagtacgtgctctcaagcagtcccgcagacaagctggattcacgatttcgaaagggcaactttggtacccgggatgccgagaccgacggcccagagaagggcgaccagaaaggcaaggcaagcccattcgaggaagatcagaacagagatcttaaacagggtgacgacgacgacagcaaaattaacggacgtggcctcccgaatggtatggatgctgactgtaaggattttaacaggacaccaggatcacgccaagcatctccaaccgaagttgtagagagactgggacccaacacaaacccctccgaagggctcggccctctccccaatcctacggccaataaaccactagttgaggaattcagcaatccagaaacacaaaacctcgatgcgatggagcaggtcggactggagtccctccagttcgactatcctggcaaccaagtgccgatggactcatcaggtgcaactgttggtctgttcgattacaatagtcagcaacaacttttccaacgcacaaacgcactcacggtgcagcaactcacagccgctcaacaacagcagtacgctctcgccgctgcccagcagccccatattgctggggtctttagtgccggattagcacccgctgcgtttgtgccaaacccctacataatctcggcggctcctcccggaactgacccttatacagctgcgggactggcggctgctgccacacttgctggcccagccgtggtacccccacagtattacggcgtcccctggggggtgtatcccgcaaacctctttcagcagcaagctgcggctgcagccaacaacaccgcctcacagcaagccgcaagtcaggcgcagcccggtcaacagcaggtcctgcgggctggcgcaggacagagacccctaacccctaaccaaggacagcagggtcaacaggctgagagcttggccgctgctgctgcggctaacccgaccttagcttttggtcaagggcttgcaaccgggatgcccggttaccaggtgctggcacctacagcctactacgatcaaactggggcactggttgtgggccctggcgcaaggacgggtctcggagcccctgtcagactgatggcacccactcccgttttaatatcctccgctgcagcccaggcagcagccgctgcggctgcgggagggacggcctcctctctgaccgggagtacaaatgggttgttccgcccaattggtactcagcctcctcagcagcagcagcagcagccctctacaaacctccaatccaacagcttttatgggagcagtagtctgactaactctagccaaagcagctcacttttttcacatgggcctgggcagccgggaagcaccagtctgggattcggctccggtaatagcctcggcgcagcgatcgggtctgctttgagtggctttggtagctcagtgggtagcagcgcttcctctagcgctacccgaagggaaagtctgtcaacatctagcgacctgtataagagatcgtcttcaagcctcgcgccaattgggcagccgttctataacagtctcggtttttcctcatctccttctcccattgggatgcctttgccctcacagacccctgggcattcactgacgcctccccctagtctgagtagtcacggatctagttccagtctgcacctagggggtttaactaatggctcaggccgatacatctccgctgctcccggagccgaggcaaaatatcgtagcgcctcttcaacctcttccctattttcaagctcatcacagctcttcccgccatctaggctgaggtacaaccggtccgatatcatgccttcaggtcgaagccgccttctggaagacttcaggaataacagattccctaacctgcagctccgggatctgatagggcacatcgtggaattctcccaggatcagcacggatcgcgtttcatacagcagaaattagaaagggccactccagcagaacggcaaatggtctttaatgagatcttgcaagcagcctatcagctgatgaccgatgtgttcggaaactacgtgatccagaaattttttgaattcggctcgctggatcagaaactggctttggctaccaggatccggggacacgtgctgccactagcgttgcagatgtacgggtgcagggttatccagaaggcactggagagtatctccagcgatcagcagtccgaaatggttaaagaactggatggacacgtgctcaaatgcgtgaaggatcagaacggcaaccacgttgtccaaaagtgtatcgagtgtgttcagccacagtccctacagtttataatcgatgcctttaagggtcaggtgttcgttctctcaactcacccatatgggtgccgcgtgatccagcgaattttggagcactgcacagctgaacagacactgccgatcctggaggagctgcaccaacacacagaacagctggtgcaagaccagtatggtaactatgtgatccagcacgtgttggaacacggcagacccgaagataaatcaaaaattgtctcggaaatacggggtaaggtgcttgcattaagccagcacaaatttgccagcaacgtggttgagaagtgtgtcacacacgcctctagggcagagagggcccttctgatcgatgaagtgtgctgtcagaacgacggccctcacagtgcgctgtatacaatgatgaaagatcagtacgctaactacgttgtacagaagatgattgacatggccgaacccgctcagaggaaaatcataatgcacaaaattagacctcatatcacgaccctgcgcaagtatacgtacggcaagcatatcttggctaagcttgagaagtattacctcaaaaactctccagatctcggcccaataggaggaccccctaatggcatgctgtag

SEQ ID NO: 237455 - DNA, 870 bp, synthetic construct
  misc_feature 1..870: note = Description of Artificial Sequence: Synthetic coding sequence
  source 1..870: mol_type = other DNA
atggagaacggctacacgtacgaagactataagaacaccgccgagtggttgctgtcccataccaaacacagacctcaggtggcaatcatctgcggaagcggcctgggtggcctgaccgacaagctgacgcaggcacaaatatttgattacggggagatccctaattttccacgctctacagtcccaggccatgctggccgattagttttcggtttcctgaacggccgtgcctgtgtaatgatgcaggggcgttttcatatgtatgaaggatatcctctctggaaggtgaccttccctgtgcgggtctttcacctcctcggggtcgacacccttgtggtcaccaacgcagccggagggctgaatcctaaattcgaggtgggagatatcatgctgatacgtgatcacattaacctgccagggttttccgggcagaatcctttgaggggcccaaacgacgagcgatttggagacaggttccctgccatgagcgacgcttacgatcgcactatgagacagagggctttgtcaacgtggaagcagatgggagaacaacgagagctgcaagagggaacatatgttatggtggccggaccctccttcgagaccgtggccgaatgtagggtgctgcagaagctaggagcggatgccgtaggtatgtccacagttcccgaagtgatcgtcgccaggcattgcgggctcagagtctttggcttttccttaattaccaataaggtgattatggactatgaatcccttgagaaggcgaatcatgaggaagttctggccgcaggaaaacaagcagcacagaaattggagcagttcgtgtccatactaatggcctccattccactgcccgacaaggcaagctag

SEQ ID NO: 237456 - DNA, 282 bp, synthetic construct
  misc_feature 1..282: note = Description of Artificial Sequence: Synthetic coding sequence
  source 1..282: mol_type = other DNA
atggaaaacggctacacctatgaagattataaaaatacagccgaatggctgctgtcccatacaaagcacagacctcaagtggcaatcatttgcgggtccggactgggaggacttacggacaagctgacccaggctcagattttcgattatggggagattcctaatttccctcggagcaccgtgcccggacatgcgggtcgcttagttttcgggttcctgaacggacgagcatgtgtaatgatgcagggcagattccacatgtacgaaggatatccactctag

SEQ ID NO: 237457 - DNA, 375 bp, synthetic construct
  misc_feature 1..375: note = Description of Artificial Sequence: Synthetic coding sequence
  source 1..375: mol_type = other DNA
atgagctatataccaggccagccagtcacagccgtcgtgcagcgagtcgagattcataaactgcggcagggcgaaaacctgatcttaggtttttctattggagggggtattgatcaagaccctagccaaaaccctttcagtgaagataaaactgataaaggtatctatgtgacccgggtttcagagggcggtccagcagaaatcgctggactgcaaatcggagacaaaatcatgcaggtgaatggatgggacatgacaatggtcacacacgatcaggctaggaagcgcctgactaaaaggagtgaggaggtggttcgtctgttggtcacacggcaaagtctgcagaaggccgttcaacagagcatgctgtcctag

SEQ ID NO: 237458 - DNA, 1194 bp, synthetic construct
  misc_feature 1..1194: note = Description of Artificial Sequence: Synthetic coding sequence
  source 1..1194: mol_type = other DNA
atgaattgcattagtgacttctttacatacgaaacaactaagtccgtcgtggtcaaatcctggacaatcggtatcatcaacagagtggtacagctcctgatcatctcttatttcgtggggtgggtctttcttcacgaaaaagcataccaggttcgcgatacagcgatcgagagttctgtagtgacaaaggtcaaaggttccgggttatatgccaatagagttatggatgtgtctgattacgtgacaccaccacaaggtaccagtgttttcgtgattataaccaagatgattgtgactgaaaaccagatgcaaggtttttgccccgagtcagaagagaagtatagatgcgtctcggactcacagtgtggaccagaaagacttcccggaggaggaattctcaccggcagatgtgtcaattatagctctgttctgcggacttgcgaaattcagggttggtgtccaacagaggtggacactgtcgaaaccccaataatgatggaggccgaaaattttactatcttcatcaaaaactcgattagattccccctattcaattttgagaagggcaacctgctgccaaacttgacagcaagagacatgaaaacgtgtcgatttcaccccgataaagaccctttctgcccgattctgagggtgggcgacgttgtgaagtttgcaggtcaggatttcgcaaaactggcgagaactgggggagtcctgggaatcaaaatcgggtgggtgtgcgatctcgataaggcatgggaccagtgtatacctaagtatagttttacaaggctcgatagcgtttcagagaagtcttctgtcagtccaggctacaatttcaggtttgcgaaatattacaagatggagaatggcagcgagtaccgtacgcttctgaaagcctttgggatcaggtttgacgtgcttgtctacggcaacgcagggaagttcaacatcataccaacgataatttctagtgtcgctgcattcacctctgtcggggttggcacagtgttatgcgatatcatcctcctgaatttccttaaaggagctgaccagtacaaggccaagaagttcgaggaggtgaatgagaccacactgaaaattgcagcccttaccaaccccgtctatccttccgaccaaaccaccgcagagaaacagtctaccgatagcggagccttttcaatcggccattag

SEQ ID NO: 237459 - DNA, 1191 bp, synthetic construct
  misc_feature 1..1191: note = Description of Artificial Sequence: Synthetic coding sequence
  source 1..1191: mol_type = other DNA
atgaactgtatatcagatttcttcacttatgaaaccaccaaatctgtggtggtcaagtcctggaccattgggataatcaacagagttgtacagctcctgattatttcatacttcgtgggatgggtcttcctccacgaaaaagcctaccaggtgagagacaccgccattgagtctagcgtcgttaccaaagtgaaaggctccggcttgtacgctaatagggtcatggatgtgtcagactatgttacgccaccccagggcacttctgttttcgttattattaccaagatgatcgtcacagagaatcagatgcaaggcttctgccctgaatctgaagagaagtaccggtgcgtctcagacagtcagtgtggacccgaacgcctaccaggaggtggcatcttaaccgggaggtgtgttaactacagcagcgttctgcgtacgtgcgagatacaaggttggtgccctaccgaggtggacacggtagaaacacctattatgatggaggctgaaaacttcaccatttttatcaagaattctatccgctttcccctgtttaactttgagaaaggcaatttactccccaacctgactgcaagagacatgaaaacatgtaggtttcatcctgataaggaccccttctgtcccattctgcgagttggggacgtcgtgaagttcgccggacaggatttcgctaagctggccaggaccggaggggtactgggaatcaagattggttgggtatgtgacctggataaggcctgggaccaatgtattcctaagtactccttcactcgcttggatagcgtgtccgagaaaagctccgtgagccctgggtacaactttaggttcgcgaaatattataaaatggagaatgggagtgaatatagaacgctgttgaaggctttcgggatcaggttcgatgtcctctataccggcgctggcaaattcaatataatccctactatcatctcaagcgtcgcagctttcacttccgtgggcgtcggcacagtgctgtgcgacatcatcctcttgaacttcctcaagggggctgaccagtacaaggcaaagaaattcgaggaggtgaacgagaccactcttaagatcgcagccctgactaaccctgtgtacccctccgaccagacaacagccgagaaacaaagcacagattccggggcattcagcatcgggcattag

SEQ ID NO: 237460 - DNA, 1167 bp, synthetic construct
  misc_feature 1..1167: note = Description of Artificial Sequence: Synthetic coding sequence
  source 1..1167: mol_type = other DNA
atggcagggtgctgcgcagcactggccgcatttctcttcgagtacgatacgccacgcatagtgcttattaggtctcgaaaagtgggcctcatgaacagggccgtgcaactcctaattctggcgtatgtaatcggctgggtgtttgtgtgggagaagggttatcaggaaaccgacagcgtcgtgtcctcggtcacaaccaaagtgaagggggtggccgtcaccaatacctccaagctcggctttcgtatctgggacgtagccgactacgtcatccccgcacaggaagagaacagcctatttgtcatgactaatgtgatcttgacaatgaatcagacacaaggtctgtgcccagaaattcctgatgcgacaaccgtatgcaagagtgatgctagctgcactgccggatctgcaggcactcattctaacggggttagcactggtcggtgtgttgcatttaatggttccgtcaagacatgcgaagtcgccgcttggtgtccagtcgaggacgatacgcatgtcccccagcctgcatttcttaaggccgcagaaaatttcaccctgcttgtaaagaacaacatctggtatcctaaatttaacttttccaaaagaaacatcctcccaaatattacaaccacctatctcaaatcctgcatctatgacgccaagactgatcctttttgtccaatattcagattgggcaaaatcgttgaaaacgctggccattcctttcaggatatggcagttgagggcggtataatggggatccaggtgaattgggactgcaacctcgaccgcgcagcctctctgtgcctccctcggtattcctttagaagactcgatactcgggacgtggagcataatgtgagtcccggatacaatttccgttttgcaaagtactaccgggacctcgcaggaaatgagcagagaaccttaattaaagcctatggcatccgctttgatataatcgtatttggtaaagcgggtaaatttgatattatacctactatgattaacataggtagcggactagcactgctaggaatggccaccgtgctttgtgacatcattgtgctgtactgtatgaagaaacggctatattatcgtgagaaaaagtacaagtacgtcgaagactacgagcaaggcctggctagtgagctggaccagtag

SEQ ID NO: 237461 - DNA, 1215 bp, synthetic construct
  misc_feature 1..1215: note = Description of Artificial Sequence: Synthetic coding sequence
  source 1..1215: mol_type = other DNA
atggctggatgttgcgctgccctcgcagcattcctcttcgagtatgataccccacgaatagtccttatcagatctcgcaaggttggactaatgaaccgagctgttcagctgctgatactggcctacgtgatcggatgctatcatccccacctggccgaagtggagatggaatcgccacggcgatgggtgtttgtgtgggaaaagggataccaggagactgatagcgtagtcagcagtgtcacaacaaaggttaagggagtagccgtgactaacactagcaaactcggcttccgaatttgggacgtggcagactatgtaatcccggctcaggaggaaaactccttgtttgtgatgacaaacgtgattctgactatgaaccagacacagggcctgtgccccgagatccctgacgccacaaccgtttgcaagagcgacgcctcttgtaccgcgggtagcgcagggactcacagcaatggtgtgtcaacagggagatgcgttgccttcaatggatcggtcaagacttgtgaggttgccgcttggtgtccagtggaggatgacacccacgtgccacagcccgcattcctgaaagctgcagagaactttactctgcttgttaaaaacaatatttggtacccgaaattcaactttagtaagcgtaatattctgcctaacataaccactacatacctgaaaagttgtatttatgatgccaagaccgaccccttctgccccatttttagattgggcaagatcgtggagaacgcgggtcactcctttcaggacatggcggttgaaggtggaattatgggcattcaggtgaactgggactgcaacctagacagggccgcttccctgtgcttgcccaggtatagctttaggcggctagacaccagagatgtggagcataatgtgtcaccaggatacaacttcagattcgccaagtattaccgggacctcgcgggaaatgagcagcgaactctaatcaaggcttacgggattagattcgacattattgtctttggaaaagccggtaagtttgatattattcctacaatgattaacatcggaagcgggctggcacttctggggatggcaactgttttatgcgacataattgtgctgtactgcatgaagaagcgcctgtattaccgcgaaaagaaatacaaatacgtggaggactacgagcagggcctggcttctgaactcgatcagtag

SEQ ID NO: 237462 - DNA, 441 bp, synthetic construct
  misc_feature 1..441: note = Description of Artificial Sequence: Synthetic coding sequence
  source 1..441: mol_type = other DNA
atggctggatgctgtgccgctttggccgctttcttgtttgagtacgacacacctcggatcgtgctcatccgatcgagaaaggtcggcctaatgaacagggctgtgcagctgcttattctggcttacgtgattggatgggtgtttgtctgggaaaaaggttatcaggagacagattctgtcgtctctagcgtaaccaccaaagtgaagggcgtcgcagtaaccaataccagcaagctcggattccgcatctgggacgtggccgattacgtcattcccgcacaggaagaaaatagcctgttcgtgatgactaacgtcattctgacaatgaaccagacacaggggctttgcccggaaattccagatgccactaccgtgtgcaaatccgacgcatcctgtactgcgggaagcgctggaacacactctaatgatctgctgttttag

SEQ ID NO: 237463 - DNA, 1086 bp, synthetic construct
  misc_feature 1..1086: note = Description of Artificial Sequence: Synthetic coding sequence
  source 1..1086: mol_type = other DNA
atggctgggtgttgcgcagcgcttgcagccttcctgtttgagtatgataccccaagaattgtgctaatcagaagccgcaaagtgggccttatgaaccgggctgtacaacttctcatccttgcttatgtaatcggttgggtctttgtgtgggagaaaggttaccaggaaacagactcagtcgtatcgagcgtgaccactaaggttaagggtgtggcggtgaccaacacttcaaaactgggtttccgaatctgggatgtagccgactatgtaatcccagctcaagaggagaattccttatttgtgatgacaaacgtgatattaaccatgaaccagacacagggcctctgtcccgaaattcctgacgccactacagtgtgcaaaagcgatgcctcatgtacagcaggctctgccggaacgcatagtaatggggtcagcacaggtcggccagcgtttctgaaggctgccgagaactttacattacttgttaaaaataatatttggtatcccaagtttaatttcagcaagaggaatatcctgccaaacatcactactacgtatctgaaaagttgtatttatgacgccaagacagatccattctgtccgatcttccgtcttggaaagattgttgaaaacgccggtcattccttccaggacatggcagttgaggggggtattatgggcattcaggttaactgggattgtaatttagacagggctgcctccctgtgcctgccgcgttatagctttcggcgtctcgatactcgtgacgtggagcataacgtctcccccggatacaactttcgatttgccaaatactatcgggatcttgccggtaacgaacagaggaccctgatcaaggcctacgggatccgatttgacattatcgtgtttgggaaggcaggaaaattcgacatcatccctactatgatcaatatcggctccggcctggcactactaggtatggcgaccgttctgtgcgacataatagtcctgtactgtatgaaaaagaggctatactatcgtgaaaagaagtataagtatgtggaggactacgaacaggggttggcgagcgagctcgaccagtag

SEQ ID NO: 237464 - DNA, 864 bp, synthetic construct
  misc_feature 1..864: note = Description of Artificial Sequence: Synthetic coding sequence
  source 1..864: mol_type = other DNA
atgactaatgtcatcctgaccatgaatcagacccaaggactgtgcccggaaattcccgatgccaccaccgtgtgcaaaagtgatgcgtcttgtacagcaggcagtgccggtactcactcaaatggcgtctccacagggcgatgcgtggccttcaacggctcagtaaagacatgcgaggtggcagcctggtgtcccgttgaggatgacacacatgtgccccagcccgcatttctgaaagccgctgaaaatttcaccctgctcgtcaagaacaacatctggtaccccaagttcaacttcagcaagcgaaatatactgccgaacattacaacgacctaccttaaaagttgcatttacgacgcaaagaccgacccattttgcccaattttcaggctggggaagatcgtggagaacgctgggcattcttttcaggacatggcagtagagggcggtattatgggcatccaagtcaattgggactgtaacctggatagggccgcaagcttatgcttacccagatattccttcaggaggctcgatactagagatgtggagcataacgtgtcccctggctacaatttcagattcgccaaatactaccgcgatttggctgggaacgagcagcgcaccctcattaaggcatacggcatcaggtttgacattattgtgttcggaaaagctggaaaattcgatatcatccctacaatgatcaacattggtagcggactggcactcctgggcatggcaacagtgttgtgtgatattattgtgctgtactgtatgaagaagaggctgtactatcgggaaaagaagtataagtatgttgaagattatgagcagggcttggcaagtgagctggatcagtag

SEQ ID NO: 237465 - DNA, 1278 bp, synthetic construct
  misc_feature 1..1278: note = Description of Artificial Sequence: Synthetic coding sequence
  source 1..1278: mol_type = other DNA
atggatggtccagccgaacagagaccagcactgctgaactccgcagaaaacttcaccgttctcattaaaaataacattgattttcctggtcataactacaccactagaaatattcttcccggtctgaatattacctgcacgttccacaaaacacagaacccacagtgccccatctttagactgggcgacatttttcgcgagaccggggacaatttctcagatgtcgcaatccaaggagggattatgggcattgaaatttattgggattgcaacctagatcgctggttccaccattgcagacccaaatatagcttcaggcggctcgacgacaagaccactaacgttagcctgtacccaggctacaatttccgctacgctaaatactacaaagagaataacgtggagaagcggactttaattaaagtgtttggaattaggtttgatattcttgtgttcggaactggaggcaagttcgacattattcagctggtagtctacataggctccaccctcagctactttggactggcggcagtttttattgacttcctgattgatacctactccagcaactgctgcagatctcacatttacccatggtgtaaatgctgccagccttgtgttgtaaacgagtactattaccggaagaagtgcgagtcaatcgtagagccgaagccaactctgaagtacgtttcatttgtcgatgagtcacacataaggatggtgaaccaacagctcctgggcaggagtctgcaggacgttaagggacaggaggtgccaaggccagctatggacttcacagacttgagtagactacctttagctctgcacgacacaccgccaatccccggacagccggaagagatacagctgttgcggaaggaggcaacacccagatccagagattcccctgtatggtgtcaatgtggctcctgcctcccaagccagctccctgagagtcacagatgtctcgaagaattgtgttgccggaagaaaccaggcgcatgtatcacaactagtgagctgttccggaaattggtgttatctcgacatgtcctgcagttccttcttctgtatcaagagccgctattggcattagatgtggatagtaccaatagccgcttgagacattgcgcctatcgctgctatgctacttggcggttcggttctcaagatatggctgactttgcaaatctcccctcctgttgccgctggcgcatccggaaagaattccctaagtcggagggtcagtattcgggtttcaaatccccttattag

SEQ ID NO: 237466 - DNA, 828 bp, synthetic construct
  misc_feature 1..828: note = Description of Artificial Sequence: Synthetic coding sequence
  source 1..828: mol_type = other DNA
atgcctgcctgttgttcttgctccgatgtatttcagtatgaaacaaacaaggtgactcgcatacagtcaatgaactatgggaccatcaagtggtttttccacgtgattatcttctcttatgtgtgtttcgctctggtctctgataagctgtatcagcgtaaggagcccgtgatttcttccgtgcatactaaggtcaagggcatcgctgaggtaaaggaggaaatagtggaaaacggggtcaagaaactcgtgcatagcgtattcgatactgcggattacacttttcctttgcaaggaaactcattcttcgtcatgactaatttcctcaagaccgaagggcaggagcagagattgtgccctgagtatccaactagacggaccctgtgttcaagcgatcgcggttgcaagaagggatggatggacccacagtccaaaggtatacaaacaggccgttgcgtcgtgtacgaaggaaaccagaagacgtgcgaagtgtccgcatggtgcccgatcgaagctgtagaggaggcccctcgaccagcactactgaattcggctgagaattttactgttctgatcaaaaataatattgattttccgggacataattacaccacttatgcaaagtattacaaagagaacaatgtggaaaaacggaccctaattaaggtattcggcatccgcttcgacatcctcgtgttcggtaccggcggaaaatttgatatcatccagttagtggtgtatattggctccaccctgagttatttcgggctggtacgtgattcactgtttcatgccctcgggaagtggttcggcgagggatcagactag

SEQ ID NO: 237467 - DNA, 1518 bp, synthetic construct
  misc_feature 1..1518: note = Description of Artificial Sequence: Synthetic coding sequence
  source 1..1518: mol_type = other DNA
atgactcctggggaccattcgtggggaaacagcttctttgtgatgactaatttcctgaaaacggagggtcaagaacagcggctatgccctgagtacccgactagaagaactctgtgttcatccgatcggggatgtaaaaaaggatggatggacccccagagcaaggggatccagacaggtagatgtgtcgtgtacgaagggaatcagaagacttgcgaggtatctgcttggtgccccatcgaggctgtcgaagaggctccccgacctgcgctgttgaattcagccgagaattttaccgtcttgatcaagaacaacatcgacttccctgggcataactacacgacacggaatattctacctggcctcaatattacatgcaccttccacaaaacccagaacccacagtgccccatctttcgcctgggggacatctttagggagaccggagataacttttctgatgtggcgattcagggagggattatgggcatcgagatctactgggattgcaatctagaccggtggttccaccactgtcggcctaagtattcatttcgccgtctggacgacaaaaccaccaacgtgtccctgtaccccggatataatttcagatacgcgaagtattacaaggaaaataatgttgagaaacgaactttaattaaggtttttgggattcgcttcgatatcctggtattcggtaccggaggaaaattcgatatcattcagctggtggtgtatatcggtagcactctgagctactttggcctcgccgcagtttttatcgacttcctgatcgacacatacagtagcaactgctgcagatctcacatctacccctggtgtaagtgctgccagccttgtgtggtgaacgagtactactacaggaaaaagtgcgagagtatagttgagccaaagcccaccttgaagtacgtttcttttgtggatgaatctcacatccggatggtgaatcagcagcttttgggcaggagtctccaagacgtaaaaggccaggaagtgccccgacccgcaatggatttcactgatctgtcacgcttgccactggccctccacgatacaccccctattccgggacaaccagaggaaattcagcttctcaggaaggaggccaccccaagatcacgggatagccctgtatggtgccagtgtggctcatgtctacccagccagttgcccgaatctcatcgttgcctcgaagagctgtgttgccggaagaaacccggtgcttgcatcacgacgtccgagctgttccgtaagctcgtactgagtaggcacgtgctgcagtttctcttgctctatcaggagcccctgctggctcttgacgtggactccaccaatagtcgcctgaggcactgcgcctaccggtgttatgccacttggagatttggatctcaagacatggctgattttgctaatctgcctagttgctgccgatggcgcatccgcaaagaattccccaaaagcgaaggtcagtactccggctttaagtcgccgtattag

SEQ ID NO: 237468 - DNA, 387 bp, synthetic construct
  misc_feature 1..387: note = Description of Artificial Sequence: Synthetic coding sequence
  source 1..387: mol_type = other DNA
atgccagcgtgctgctcctgttcagatgtctttcagtacgagactaataaggtgactcgcatccagtccatgaactacggcactatcaagtggtttttccatgttatcatattctcatatgtttgtttcgccctggtgagcgacaaactgtatcagcgaaaagaacccgtgatttcttctgtgcatacgaaggtcaagggaatagccgaagtgaaggaagagattgtggagaatggagttaagaaacttgtccattccgttttcgatacggccgattataccttcccgctgcagggcaattcattctttgtcatgacaaactttctgaagactgagggccaagagcagagattgtgcccagaggaattcagaccagagggcgtgtag

SEQ ID NO: 237469 - DNA, 921 bp, synthetic construct
  misc_feature 1..921: note = Description of Artificial Sequence: Synthetic coding sequence
  source 1..921: mol_type = other DNA
atgtggcagttccgatatgcgaagtactacaaagagaataacgtggaaaagaggaccttgatcaaagtattcggcatccggttcgatattcttgtgtttggcaccggtgggaagtttgatattatccagctggtcgtatacattggatctacactgagttactttggactggctgcggtattcatagattttttaatcgacacgtactccagcaattgctgtagaagccacatatacccctggtgcaagtgctgccagccgtgcgttgtcaacgagtactactacagaaaaaaatgtgagagcattgtggagcctaagcccacgttgaaatatgtcagcttcgtagatgagtctcacatccggatggttaaccagcagttactcgggaggtccctgcaggacgtaaaggggcaggaggtgcctcggccagccatggacttcactgatctgtcccgacttcccctcgctctccatgacactcccccaattcctggccagcccgaggagatacagcttctcagaaaggaagctacccccaggtctagggatagtccggtgtggtgccagtgtgggagttgcctgccttcccagttaccagagtcccatcgttgcctggaggaactgtgctgtcgcaaaaagcccggtgcttgcattacgacaagcgaattattccggaaactggttctttcacgtcatgtgctgcagttcctactgctataccaagaaccattgttagcactggacgtggattccaccaacagtagactgcgtcattgcgcataccgatgctacgcaacttggaggttcggtagccaggatatggcagattttgctaacctgcccagctgttgccgctggcgaattcgcaaggaatttcccaaatctgaggggcaatatagcggcttcaaaagtccctactag

SEQ ID NO: 237470 - DNA, 387 bp, synthetic construct
  misc_feature 1..387: note = Description of Artificial Sequence: Synthetic coding sequence
  source 1..387: mol_type = other DNA
atgcctgcttgctgttcttgctccgatgtgttccagtatgagactaataaggtgacaaggatccaatccatgaattacggaacaatcaagtggttctttcatgtgattatattctcttacgtctgttttgccctcgtttctgataagttatatcagcggaaggagcccgtgatctcctcagtgcataccaaagtcaagggtatcgccgaagtgaaggaggagattgtggaaaatggcgtgaaaaagctggtacacagtgtcttcgatactgccgactacacctttcctctgcagggcaattccttcttcgtgatgaccaatttccttaagacggagggccaagaacaaaggctgtgtcctgaggaattcaggcctgaaggcgtgtag

SEQ ID NO: 237471 - DNA, 1788 bp, synthetic construct
  misc_feature 1..1788: note = Description of Artificial Sequence: Synthetic coding sequence
  source 1..1788: mol_type = other DNA
atgcctgcttgttgcagctgcagcgatgtgtttcagtacgagaccaacaaagttacccgtatacagtccatgaactatggcacgatcaaatggttcttccacgtgatcatcttttcctacgtctgctttgccctggtgagtgataagctgtatcagaggaaggagccagttatctcaagcgtccacactaaagtcaaggggattgctgaagtcaaagaagaaatcgtggagaacggggtgaagaagctggttcacagcgtcttcgataccgcggactacacattccccctacagggcaattcgttctttgtaatgaccaatttcctgaagaccgagggccaggaacagaggttgtgtcctgagtaccccaccaggcgcaccctgtgttccagcgatcgcggatgcaaaaagggctggatggatccccaaagcaaagggattcaaacaggacgctgcgtcgtttacgagggtaaccaaaagacgtgtgaagtgtccgcttggtgccctatcgaagctgtcgaggaggcccctcgacctgccttgcttaactcggcagagaactttaccgtgctgatcaaaaacaatatcgattttccaggccacaattatactactagaaatatccttcctgggctcaatataacttgtacatttcacaaaacacagaaccctcagtgtcctatcttccgcttgggtgacattttccgagagactggggataatttttcagatgtggccatccagggcggtataatgggcattgagatttattgggattgtaacctggaccggtggttccaccattgtcgaccaaagtactcattccgcaggctcgatgacaaaaccaccaacgtatccctgtaccctggctataactttaggtatgccaagtattataaggagaataacgtggagaagcggaccctcattaaagtcttcggtataaggtttgatattctcgtattcgggacaggtgggaaatttgatatcatccagctggtagtctatattggaagcactctgagctactttggcctggccgcagtattcattgactttctgatcgacacttatagctctaattgttgccgctcccatatatatccctggtgtaagtgctgccagccctgcgtcgtgaatgaatactattataggaagaagtgtgaaagcatcgtcgaacccaagccgactctgaaatacgtcagcttcgttgacgagtctcacatcaggatggtgaaccaacagttattgggaagatcactgcaggacgtgaaaggtcaggaagtgcctcgccctgccatggattttacagacctgtcacgcttgccactagctttgcatgatactccacccataccagggcagccggaggagatccaacttctgcggaaggaagctactccacggagccgagattcaccagtgtggtgccagtgtggttcttgtctgccaagccagctacctgagagccaccggtgtctggaggagctatgctgcaggaaaaagcctggggcatgcatcaccacgtctgagctttttcgcaaactagtcctcagtcgccatgtgttacagtttttgctgctgtatcaggagcctttgttggcattggacgttgactccaccaactcacgcctaagacattgtgcttaccgctgctacgcgacttggaggttcggctctcaggacatggcagacttcgcaaatctgccgtcctgttgtagatggcgcataagaaaggagttccctaaatctgagggacagtattctgggtttaaatccccttactag

SEQ ID NO: 237472 - DNA, 1122 bp, synthetic construct
  misc_feature 1..1122: note = Description of Artificial Sequence: Synthetic coding sequence
  source 1..1122: mol_type = other DNA
atgacagaggttttatggcctgcagtgcctaacggtaccgacgcagctttcctggctggcccaggcagctcgtggggcaactccaccgtggccagcacagccgcagtgtcatcctcctttaagtgcgctctgaccaagacaggcttccagttctactatctgcctgctgtatatatccttgtttttatcattggtttcctgggaaactccgtagcaatctggatgttcgtcttccatatgaagccctggagcgggatatcagtgtacatgtttaacctcgccctcgctgatttcctttacgtgctgacattgcccgctctgatcttctactacttcaacaaaaccgactggatctttggggatgccatgtgtaaactgcaaaggttcatcttccacgtgaatctttatggcagtatcttgtttctgacgtgcatttcagcccacagatatagtggggtggtgtaccctctgaaaagtttgggaaggttgaaaaagaagaacgccatatgcatttctgtcttagtgtggctgattgtggtggtcgccatctctcccatactcttctatagtgggacgggtgtgcgcaagaataaaacgattacgtgctacgacactactagcgatgagtacctcaggagttacttcatctattctatgtgtaccaccgttgccatgttttgcgtgcctctcgtcctaattttgggctgctacggactgatagtcagagccctgatttacaaggatctggacaattcccctcttcgaagaaaaagcatctatttagtcatcatcgttctgactgtcttcgcagtgagctacatcccgttccatgtgatgaagaccatgaacctcagagctaggctggacttccagaccccagcgatgtgcgccttcaacgatcgcgtgtacgctacctaccaggtgacacgcggattggcctccttgaattcatgtgtagacccaatactgtatttcctggcaggggataccttcaggcgcagactaagtagggccaccagaaaggcttcgcggaggtctgaggcgaatttgcagagcaaatcggaggacatgacattgaacattcttcccgagttcaaacagaatggcgatacaagtctatag

SEQ ID NO: 237473 - DNA, 1125 bp, synthetic construct
  misc_feature 1..1125: note = Description of Artificial Sequence: Synthetic coding sequence
  source 1..1125: mol_type = other DNA
atggctgccaacgtgtccggagccaaaagctgtccggcaaacttccttgcagctgctgatgacaaattgtccgggtttcaaggggacttcctatggcctatccttgttgtggagttcctcgtagccgttgcatccaacggtcttgctctctatcggttttccattcggaagcagcgaccctggcacccggctgtcgtgttttcggtgcaattggcagtcagcgatttgctgtgtgcactgactctccctcccctggcagcatacctgtaccccccaaagcactggaggtacggagaagccgcatgccgcctggagcgatttctgtttacatgcaatctgctggggtccgtcatattcatcacatgtatttcactaaaccgctatctcgggatcgtgcatcccttctttgcgaggtctcatttgagacctaaacatgcctgggcggtatcagcggctggctgggtgttggccgctttgctagctatgccgaccttgagcttctcccacttgaaacggccacaacagggagccggaaattgcagcgtggcaagacccgaggcctgcatcaagtgtctgggaactgcggatcacggactcgctgcatatcgggcttatagcctggtgctggcgggactagggtgcggcctgcccctgttactgaccttggccgcatatggagcccttggtagagccgtgttgagaagccctgggatgaccgtcgcagaaaagctgcgagtggctgctcttgtcgcctcaggcgttgctctctacgccagttcttatgtgccctatcacatcatgagagttctgaatgtggatgcgcgtagaaggtggtcgactcgatgcccgtcattcgccgacatcgcacaggcaaccgcagccctggaactcggaccatacgttggttaccaggtgatgcgcggtctcatgccgttagctttttgtgttcaccccctgctgtatatggcagcggtcccttccctgggatgttgctgtcggcattgtccaggctatagagatagttggaatccagaggatgcaaagagtactggacaggcattgcctctcaatgccacggcagctcccaaacctagcgaacctcagtcgcgggagctgtcccagtag

SEQ ID NO: 237474 - DNA, 1029 bp, synthetic construct
  misc_feature 1..1029: note = Description of Artificial Sequence: Synthetic coding sequence
  source 1..1029: mol_type = other DNA
atgcaggcagtggacaacctgaccagtgctcctggtaatacgtccctctgtacccgcgattacaagattacacaagtgctgttccctctgttgtacaccgttctcttcttcgttgggctcattaccaatgggctggccatgagaatcttcttccagatccggtccaagtcgaacttcattatatttctaaagaacacagtcatctctgacctgctcatgatcctgacatttccctttaaaattctcagtgacgcaaagttgggaactgggcctttaaggacgtttgtgtgccaggttacctctgtgatcttttactttacaatgtacataagcatctcattcctgggtctgatcacaatcgatagataccagaagactactagaccgtttaaaacttcaaaccccaagaacctgttaggcgcaaagatcctgtccgtagtgatctgggcctttatgtttctgctgagtctgccgaacatgatcctgactaaccgtcagccccgagataagaatgtgaagaagtgttcgtttttgaaaagtgagtttggcttggtgtggcacgagatcgtcaactatatctgtcaggtcattttctggatcaactttctaatagtcattgtctgttatactctgatcacaaaagagttatacagatcttatgttcggacacgaggagtgggcaaggtgcctcgcaaaaaggtgaatgtcaaagtcttcataatcatcgccgttttcttcatctgtttcgtcccgttccacttcgcacggatcccgtacacactgagtcagacacgggatgtctttgactgcactgccgagaacacactgttctatgtgaaagagtctacactgtggttaacttccctgaatgcatgtctggatcctttcatctactttttcctttgtaagtctttcaggaacagcctaattagtatgctgaaatgccctaactctgccacttccctgtcgcaggacaacaggaaaaaggagcaggatggaggggacccaaacgaggaaacccccatgtag

SEQ ID NO: 237475 - DNA, 738 bp, synthetic construct
  misc_feature 1..738: note = Description of Artificial Sequence: Synthetic coding sequence
  source 1..738: mol_type = other DNA
atgcaggctgtcgacaatttgacaagcgctcctggtaacacatccctttgtactagagactacaaaattacccaggtgctcttcccgctcttgtataccgtgttgttctttgtggggctcattacaaatgggttagctatgaggatctttttccagattagaagtaaatctaactttataatatttttgaaaaacaccgtgatctctgatctgttgatgatcctgactttccccttcaagatcctttcggatgctaaacttggcacagggcctctgcgcaccttcgtctgccaggtcatcttttggattaatttcctgatcgtcattgtgtgctataccttgatcaccaaagaattgtatcggtcttacgtgcgtacaagaggagttggaaaagtgccaaggaaaaaggtgaacgtgaaagtcttcataattatcgccgttttttttatctgctttgtaccttttcacttcgccagaatcccatacaccctgagccaaacaagagacgtgtttgattgtaccgcggagaatactttattttatgttaaggaatccacattgtggctgacctcactgaacgcttgcctggatccttttatctatttcttcctgtgcaaatctttccgcaactctctcatctctatgctcaaatgccctaatagcgccaccagccttagccaggataatcggaaaaaagaacaggacggtggtgatcctaatgaggaaaccccaatgtag

SEQ ID NO: 237476 - DNA, 1134 bp, synthetic construct
  misc_feature 1..1134: note = Description of Artificial Sequence: Synthetic coding sequence
  source 1..1134: mol_type = other DNA
atggccgcagacctgggcccatggaatgatacaataaacggaacctgggacggagatgagctggggtatcgctgcagatttaacgaggacttcaaatacgttttattgcccgtgagctatggggtagtttgtgtgcccggtctgtgcctaaacgccgtggcactgtacatttttctgtgccgactcaaaacctggaatgcctctacaacatacatgttccacctggcagtttccgacgctctgtatgctgctagtcttcccctgctggtgtactattatgctcggggtgaccactggcctttcagcaccgtattgtgcaagctggttcgctttctcttctacaccaatttgtactgctccattctgtttctaacatgcatctctgtccatagatgcttaggggttctgcggcctctccggtccctgagatggggcagggctcggtacgcccgtcgggtggcgggagccgtttgggtgctggtgttggcttgtcaagcacctgtgctatattttgttactacgtcggctcggggtggtcgtgtgacatgccatgatacatcagcccctgagttgttctcgcgctttgtagcctatagcagcgtgatgctgggcctgttgttcgccgtgccgtttgctgtcatcttggtgtgttacgtgctgatggccagacgcttattgaagccggcatacggaacaagcggcggactccccagggcaaagagaaagtctgtgaggaccatcgcagtggtgttagccgtgttcgctctgtgttttctgccttttcatgttactcggaccctgtactattcattcaggtcactggacctaagctgccacaccctgaatgctatcaacatggcctacaaggtaacccggcctctggcctctgcaaattcatgtctggatccggtgctctattttctcgccggacagagactggtgcgcttcgccagagatgccaagccacccaccggaccctcacctgcgacccctgcaagaaggcggctgggccttcgcagatccgataggactgacatgcaacgaatagaagacgttttgggttcctctgaagacagtaggcgaaccgaaagtacaccggctgggagtgagaatacaaaagatatcagattgtag

SEQ ID NO: 237477 - DNA, 1134 bp, synthetic construct
  misc_feature 1..1134: note = Description of Artificial Sequence: Synthetic coding sequence
  source 1..1134: mol_type = other DNA
atggctgctgacctaggaccctggaacgataccatcaatgggacatgggacggagacgaactcggctaccggtgccgattcaatgaagacttcaaatacgtcctgcttccggtgagctacggcgtagtgtgcgttcctggcctgtgtctgaacgctgttgcactgtatatttttctctgccgactgaaaacttggaacgcaagtacaacttatatgtttcacttggccgtcagcgatgctctctacgcagccagcctgccgcttttggtctactactacgctaggggtgaccactggccattctcaaccgttctctgtaaactggtacggttcctcttttataccaatctgtactgctcaatactgtttttgacctgcattagcgtgcaccggtgtttaggggtcttaaggcctttgcggagtctgcgttggggcagggcgaggtacgcgaggcgagtagcgggagccgtgtgggtcctggtcctggcttgtcaggccccagtgctttactttgtcacaaccagcgctagggggggaagagtcacatgtcatgacacctctgctccagagctgttctctagattcgtggcatacagtagcgtgatgttaggcctgctctttgcagtgccgttcgccgtgattttggtctgttacgtccttatggctcggaggctcctgaaacccgcatatggaacatctggtggcctccctcgcgcaaagcgcaaatcggtgcgtaccatagctgtcgtgttagcagtgtttgcactgtgctttctgccatttcacgtgaccagaacactgtactactcctttcgaagcttagacttgagttgccacaccctgaacgccatcaacatggcttacaaggtcacccgcccactggcctctgcaaactcctgtctggaccctgtcctgtattttctcgccggtcagaggctagtgaggtttgccagggacgcaaagccccctaccggcccttcacctgccacccctgctcgccgtcgattaggacttcgcagaagcgatcgcacggacatgcagcgcattgaagacgtcctgggtagctctgaggattcccgacggaccgagagcacacctgccggatctgagaatacgaaagacatccggctgtag

SEQ ID NO: 237478 - DNA, 1134 bp, synthetic construct
  misc_feature 1..1134: note = Description of Artificial Sequence: Synthetic coding sequence
  source 1..1134: mol_type = other DNA
atggcagcagatctagggccatggaatgacaccattaacggaacatgggatggggacgagctgggctatcggtgccggttcaatgaggattttaagtacgttctcctgcccgtttcctacggcgtagtgtgtgtgccaggcctctgcttgaacgccgttgctctgtacattttcctttgcagactcaagacgtggaatgcttcgacgacgtatatgtttcacttagccgtatccgatgcactttacgcagcttctcttcccctcttagtctactactacgcacgcggagaccattggccgttttcaacagtactgtgtaaactcgtcagattcttattttacaccaacctgtactgttctatcctctttctgacatgcatctccgtgcatcggtgtctcggggttctgagacctttgcgatcgctgagatggggccgtgcacggtatgcccgtagggtcgcaggagccgtgtgggttctggtgctggcctgtcaggcaccagtgttatatttcgtcacgacaagcgcacgaggaggacgtgtgacttgccacgacacatccgcacccgaactgttctcacgcttcgtagcatattcctcagttatgttgggtcttctgtttgcagtgcctttcgccgtgatcttagtttgttacgtcctgatggctcggaggctcttaaagcctgcatacgggacttccggaggactgccaagggctaagagaaaaagtgtccgtacgattgccgttgtacttgccgtgtttgctctgtgctttcttccatttcatgtgacccgcaccctgtactacagttttaggtctctggacctgtcgtgccataccttgaatgcaattaacatggcgtacaaggtgactagaccactcgcttcagccaacagctgtctcgaccccgtgctgtatttccttgccggtcagagattggttcggttcgcaagagatgcgaaacctcctaccgggccttctcctgctacgcccgctcgacgccgtctaggattgaggcggtcagatcgaaccgatatgcagcggatcgaggatgttcttggctcctctgaggatagtagaagaacagaatctacgccagcgggatccgaaaacactaaggatatccgactgtag

SEQ ID NO: 237479 - DNA, 1080 bp, synthetic construct
  misc_feature 1..1080: note = Description of Artificial Sequence: Synthetic coding sequence
  source 1..1080: mol_type = other DNA
atgcaggtcccaaactctactgggccagacaacgccacactgcagatgttgcggaatccagccattgctgttgcccttcctgtagtatacagtttagtagccgcagtgagcattccgggaaatctgttttccctgtgggtgctctgtaggagaatgggtcctaggtcccccagcgttatcttcatgattaatctgtccgtcactgatctgatgctggcctccgttctgcccttccaaatttattaccactgcaaccggcatcactgggtgttcggtgtcttactatgcaatgtcgtaaccgtggccttttatgcaaatatgtacagctctattctcaccatgacatgtattagcgttgagcgatttttgggtgtgctgtacccactgtcctctaagcggtggcgcaggcggagatacgctgtggccgcttgcgcgggaacctggctgctgttgcttaccgcgctctctcctctcgcgcgtacagacctgacctatcctgtacatgccctgggcataattacatgcttcgacgttctcaagtggacgatgctgcccagtgttgcaatgtgggcggtgtttctctttaccatttttatcctgctcttcctcataccattcgtgattactgtggcttgctacacagccacgatcctgaaactgctcagaaccgaagaggctcacggaagggaacagagacggagggcagtaggtctggccgctgtggtactgctggcttttgtgacgtgctttgcaccaaataattttgtgctcctggctcacatcgtgtccaggctattttatggaaaatcctactatcatgtgtacaaactgactttatgtctgtcttgcctgaacaactgcctcgatcccttcgtgtactacttcgcatctcgagagtttcagctcaggttacgggagtatttgggatgcaggagagtcccccgtgacacccttgatacacggagggagtctttattctctgctcgtacaacatccgtgcgatccgaggcaggtgcccacccagagggcatggagggagcaaccaggcccggtctacaacgtcaagagtctgtattttag

SEQ ID NO: 237480 - DNA, 189 bp, synthetic construct
  misc_feature 1..189: note = Description of Artificial Sequence: Synthetic coding sequence
  source 1..189: mol_type = other DNA
atgagcgagagacagggagctggagcaaccaatggcaaagacaagacctccggagagaatgatgggcaaaagaaggtccaggaagagtttgatatcgacatggacgccccagagaccgagagagctgcagttgccatccagtcacaatttaggaagttccagaagaaaaaagccggttcccaatcatag

SEQ ID NO: 237481 - DNA, 1914 bp, synthetic construct
  misc_feature 1..1914: note = Description of Artificial Sequence: Synthetic coding sequence
  source 1..1914: mol_type = other DNA
atggcctcgaacgaaagggatgctatttcctggtatcagaaaaaaatcggtgcgtacgatcagcagatctgggagaagtctatagaacagacacagatcaagggcttaaagaacaaaccaaaaaagatggggcacattaaacctgacctcatcgatgtggacctgatccgtggttctaccttcgccaaggccaagcctgaaatcccttggacttctctaacacgaaaaggtttagtgagagtagtcttttttcccctattttcgaattggtggatccaagtgacaagtttacggatctttgtgtggctgcttctgctctacttcatgcaggtgattgccatcgtcctatatttaatgatgccgattgttaacattagcgaagtgctgggaccactttgcctcatgttgctgatgggaactgtgcactgtcagattgtttctacccagatcacccgcccatccggtaacaatggcaacaggcgtcgtaggaaactccgcaagaccgtgaatggggacggatcccgcgaaaacgggaacaacagcagcgataaagtcagggggattgagacactggagtctgtgcctatcattggaggcttttgggagacaatttttggcaacaggatcaaaagagtgaagctgatcagcaataaagggactgaaaccgacaacgacccttcatgcgttcacccgatcatcaaaagacggcaatgccgccctgaaatccggatgtggcagactagggaaaaagccaaattcagtgatggcgaaaagtgcagaagagaagccttccgaagactcgggaatggggtgagcgacgatctgtccagcgaagaagacggtgaagctaggacgcaaatgatcttactcagacggagcgtggaaggcgcaagctcagataacgggtgcgaagtgaaaaatcgcaagagtattctctccaggcaccttaactctcaggtgaaaaagaccaccacaagatggtgccacatcgtgagggatagcgatagcctcgctgaatctgagttcgagtccgcagcttttagtcagggatctcgcagcggcgtctcagggggttccaggagtcttaatatgtcccgaagagactctgagagcacccggcacgactctgaaactgaggacatgctttgggacgatctcttacatgggccagagtgccgaagttccgtcacttctgatagtgagggggcacatgtgaataccctccactctggtactaaacgggatcccaaagaagacgtgttccagcagaatcacctgttttggttgcagaacagtagtcctagctcggatcgggttagtgcgatcatctgggaaggtaatgagtgtaagaagatggatatgtccgtcctggagatttccggaattatcatgagcagggtgaatgcctaccagcagggtgtgggataccagatgctgggtaacgtggttaccatcggccttgctttctttccattcctgcaccgtctctttcgggagaaatcattggatcagctgaaatcaatatcggcagaggaaatcctgaccctattttgtggagcccctccagtgacccccattattgtcctgagcatcattaatttctttgagcggttgtgccttacctggatgttcttcttcatgatgtgtgtcgctgagcggacctataaacagagattcctctttgccaagttgttctcacacatcacctccgccagaaaagcaaggaaatatgagatccctcatttcaggctgaagaaagtggaaaacattaaaatctggctgagtctccgatcctatctcaagcgaagaggaccccagaggagcgtcgacgtagttgtatctagtgtatttcttttgacactcagcatcgcctttatctgctgcgcccaggtgaaggtatcccatctcctctag

SEQ ID NO: 237482 - DNA, 2130 bp, synthetic construct
  misc_feature 1..2130: note = Description of Artificial Sequence: Synthetic coding sequence
  source 1..2130: mol_type = other DNA
atggcttctaacgagagggacgctatctcttggtatcaaaagaaaataggcgcttatgaccagcagatctgggaaaaatccatcgaacaaacacagataaaaggcctgaaaaacaaaccaaagaaaatgggccacattaagcctgacctgatcgacgtggacttgattagggtgatcgccatcgtgctgtatctgatgatgcctatcgtgaatattagtgaagtcctaggcccactctgcctcatgctcctgatggggacggtgcactgtcaaatcgtttcgacacagatcacgaggccctcgggaaataatggtaatcggaggcgtcgcaagttgcgcaaaactgttaatggggacggttctagggagaacgggaataactcctccgacaaggtgaggggcatcgaaacattggaatctgtgcccatcatcggaggattctgggagaccatctttggcaaccgtatcaagagggtcaagctgatctcaaataaggggacagaaaccgataatgatccctcatgtgtccaccccatcattaagcgacgccaatgtcgaccagaaatccgcatgtggcaaaccagggaaaaggccaaattttcggacggggaaaagtgtcggcgtgaagcttttagaaggcttggaaacggggttagtgacgacctgagtagcgaagaggacggggaggctcgaacacagatgattctgctgcggcgatcagtcgaaggcgctagcagcgacaatgggtgtgaggtaaagaacaggaagtctatactatcccgacacctcaactcacaggtcaaaaagacgaccacaagatggtgccatatagtgcgagacagcgactcactcgccgagagtgagttcgagtccgccgctttctctcaaggctcacgttcaggagttagcggaggtagtcgttcacttaatatgtctaggcgggactctgagagtaccaggcatgattctgagaccgaagacatgctgtgggacgatcttctgcatggtcccgaatgtcggtcaagcgtaactagcgatagcgaaggggctcacgtgaacactctgcactctggaacaaaacgagaccccaaggaagatgtgtttcagcagaatcatttattttggttgcaaaattctagcccgtcaagtgatagagtctcagccatcatttgggagggaaatgaatgcaagaaaatggatatgagtgtccttgaaatttcaggcattattatgtctagggttaacgcctatcagcagggggtgggctatcagatgctgggtaacgtcgtcacaatcggcttggctttcttcccgtttcttcaccggctgtttcgggagaaatccttggatcagctgaagtccatcagtgccgaagaaatccttactctattctgtggagctccccctgtgacaccaatcattgtgcttagcatcatcaacttctttgagaggctctgcctcacgtggatgttttttttcatgatgtgcgtggctgagcgtacctacaaacaaagatttctgtttgctaaactgttctcccacatcacatctgctcgcaaggcaaggaagtatgagataccccacttccggttgaaaaaagtggaaaatatcaagatatggctttccctacggtcctaccttaaacgcaggggcccacaacgatcggtggatgtggtggtgtcttcagtgttcctgctgactctgtcaatagccttcatttgctgcgcgcaagtgctgcaaggccataagaccttcctgaatgacgcgtacaattgggaattcctgatttgggaaaccgctttgctgctgtttttactgcggttggcctccctgggaagtgagactaacaaaaagtacagcaacgtgagcattttgctgacagaacagatcaatctttacctgaagatggaaaagaagcccaacaaaaaagaacaacttacactcgtgaacaacgtgctgaagctatcaacgaagctgcttaaagaactggacacaccatttagactctacggcttaaccatgaatcctctcatctacaatatcacacgcgtggtaatcttgagcgctgtgtcaggtgttatttctgatcttctaggcttcaacataaggctgtggaaaatcaagtcgtag

SEQ ID NO: 237483 - DNA, 2154 bp, synthetic construct
  misc_feature 1..2154: note = Description of Artificial Sequence: Synthetic coding sequence
  source 1..2154: mol_type = other DNA
atggcctccaatgaacgggatgcaatctcttggtatcagaaaaagatcggggcttacgaccaacagatctgggagaaaagtattgaacagacccaaatcaagggtctgaaaaacaagcccaagaaaatgggccacatcaagcccgacctaatcgatgtggatctgattagaggctccacatttgctaaggctaagcctgaaatcccctggacctcattaacgcggaaaggcctggtgcgcgttgtattcttccccctgttctcaaactggtggatacaggtgaccagtctgaggatctttgtctggctgctccttctttatttcatgcaggttattgccattgtactctacctgatgatgcctattgtaaatattagcgaagttcttggtccgctctgcctgatgttgctgatgggcacagttcactgccagattgtgtctactcaaatcacccgcccatcaggtaacaatggcaatagacgaaggcgcataaagagggtcaaactgatctccaacaaaggcacggaaaccgacaacgatcccagttgtgtgcatcccattatcaagcgcagacagtgccgcccagagattcgcatgtggcaaacacgagagaaagccaaattcagcgacggggaaaagtgccgcagagaggcctttagacgcctgggcaatggggttagcgacgatttaagctcggaagaggatggagaggcacgaacccagatgatcctgctgagacgctccgtcgaaggcgctagcagtgataatgggtgtgaggttaagaatcgcaagtctatcctgtccagacacctgaattctcaggtgaaaaaaaccacaacacgttggtgtcacattgtaagagacagtgactctctcgcagaatccgaattcgagagtgcagccttctcccagggaagccgcagcggcgtatctggtggatcccgcagtttaaatatgtctcggagggatagcgaaagcacccgacacgacagcgaaactgaggacatgctgtgggacgatctgttgcacggccctgagtgcagaagttcagtaacgagcgactctgaaggtgcccacgtaaacaccctccacagtggtacaaagcgtgatcctaaggaggacgtcttccaacaaaatcatcttttctggttacaaaatagctccccttcctccgaccgggtatctgctattatttgggagggtaacgaatgtaagaaaatggatatgtccgtcctagagatctccgggataattatgtcgagggtgaacgcttaccaacagggggtcggttaccagatgttgggcaatgttgtcactattggactggcttttttcccatttctccaccgcctgtttcgggaaaagtcactggaccagctgaagtccatatccgcagaggaaattctcactctgttttgcggagctccacccgtgacccctataatagtcctctccataattaactttttcgaaaggctgtgtctgacttggatgttcttttttatgatgtgtgtggccgagagaacttataagcaacgattcttgttcgccaagctgttctcacacataacttctgccaggaaagctcgcaaatacgagatccctcacttcagactgaagaaggtggagaacatcaagatctggctcagcctgcgcagttacctgaagcggaggggaccacagaggtccgtggatgtcgtcgtttccagcgtttttcttctgacactcagcattgctttcatctgttgtgcgcaggtgctgcagggacacaagacttttttgaacgacgcttataattgggaattcctgatttgggagaccgccctgctgcttttcctgttgcgcttggccagccttggctctgagactaataaaaagtacagcaatgtgagcattctgttgacggagcagatcaacctatacctaaagatggagaaaaaaccaaacaaaaaagaacagttgacactggtgaacaacgtgctgaagctgtctaccaagctgctgaaagaattggacactcccttccggctgtacggcctaactatgaaccctctgatttataacattacacgggtggttatcctgtctgccgtaagcggagtcatcagcgacctgttgggcttcaacattcggatttggaagcactcctcttag

SEQ ID NO: 237484 - DNA, 2154 bp, synthetic construct
  misc_feature 1..2154: note = Description of Artificial Sequence: Synthetic coding sequence
  source 1..2154: mol_type = other DNA
atggcttcaaacgagcgtgacgctatctcctggtaccagaaaaagatcggagcctacgaccagcaaatatgggaaaagtccatcgagcaaacacaaatcaagggcctcaagaacaagccaaagaagatgggacacataaaacccgatctgatcgacgtggacctgatccggggaagcacatttgcaaaggccaagccagaaatcccatggacgagtttaacccggaaggggcttgtgcgcgtggtgttcttccccctgttctccaactggtggatacaagtgactagtttaagaatcttcgtctggctcctcttgttatatttcatgcaggtaatcgctatagttctttatctcatgatgccaatcgtaaacatttcagaagtactcgggcctttgtgcctgatgctgctgatgggaacagttcactgccagattgtttccacgcagattacacgcccttccggcaacaatggtaacagacggcgaagaatcaagcgggtcaagcttattagtaacaaagggacggaaacggataatgatccttcatgtgtgcacccaatcatcaaaagacgacagtgccgacctgagatcaggatgtggcagacacgcgagaaggcaaagttttctgatggagagaaatgtaggcgggaagccttccggcgactcggcaacggtgtcagtgatgacctgagctcggaagaagatggagaagcaaggacgcaaatgatcttgctgcgaaggtctgtcgaaggcgcatccagcgataacggttgtgaagtaaaaaatcgcaagtccatactcagtagacatctaaacagccaagtgaagaagaccaccactagatggtgtcatattgtgagagatagtgatagcctcgccgaaagcgaattcgagagcgctgccttctctcaaggctctagaagcggcgttagtggtggatcccgctcgctaaacatgagccgacgtgactctgagtccacacggcacgattcagagaccgaggatatgctctgggatgatctcctgcacgggccagagtgtcggagttcggtgacatctgactctgaaggcgctcatgtgaacacccttcattccggtacgaaacgcgaccccaaggaggacgtgtttcaacaaaatcatctcttttggttgcagaattcttcccccagtagtgaccgtgtctccgccattatttgggagggtaatgagtgtaagaagatggacatgtcagtgttggagatctccgggatcattatgtcacgtgttaatgcgtatcagcagggtgtcggctaccaaatgctgggaaatgttgtcaccataggactcgcttttttcccctttctgcacaggctgtttcgggaaaagagtctagatcagttgaagtctatcagcgccgaggaaattctaaccctcttctgcggagccccaccagtcaccccaattatagtgctgtccattataaacttctttgagcggctgtgtctcacttggatgttttttttcatgatgtgtgtagccgaaagaacctataagcagcgttttttatttgccaagctgttcagccacataacatcagccagaaaagcgaggaaatacgagattccgcacttccgactgaaaaaggtggagaatattaagatttggctttccctcaggtcgtacttaaagaggagaggcccacagcggtccgtcgatgtcgtggtgtcttccgtgttcctcctcaccctttctatcgcgttcatctgttgcgctcaggtgctgcaaggccacaaaacgtttttaaatgacgcatataattgggagttcttgatctgggagactgcactcctactgtttttgctgaggctcgcatcactaggctccgaaaccaataagaagtactctaacgtgagcatcctgctcacagaacagatcaacctctatctcaaaatggagaagaagccaaacaagaaagagcagttaacactcgtgaacaatgttctgaaactgtcaacaaaactcctaaaagaacttgataccccattcaggctttatgggctgactatgaacccactcatttacaatataacaagagttgtcatccttagcgccgtgtccggggtaatttcggatctgctcgggttcaacattcgtctgtggaagattaagagctag

SEQ ID NO: 237485 - DNA, 2130 bp, synthetic construct
  misc_feature 1..2130: note = Description of Artificial Sequence: Synthetic coding sequence
  source 1..2130: mol_type = other DNA
atggcatcaaacgagcgtgacgccatatcatggtatcagaagaagatcggggcatacgatcagcagatctgggaaaagagcatcgagcagactcagatcaagggactgaaaaacaagcccaagaaaatgggtcacatcaagcctgatttgatcgacgtggacctcatcagagtgatcgcaatcgtcctgtacttgatgatgcccattgtcaatatttcggaggtcctggggcctttgtgcttgatgcttcttatgggtacagtccactgccaaattgtatcaacgcaaatcacgagacccagcggtaataacggaaatcgacgacgcagaaagttgcggaaaaccgtgaacggggacggttcaagagagaacggaaataatagttccgacaaggtgcgaggcattgaaaccctagagagcgtccccatcattgggggattttgggaaaccatcttcggaaaccgtattaagagggtgaagctaatctcaaacaagggaaccgagactgataatgaccccagctgcgttcacccaatcattaaaaggagacagtgtcgaccagagattagaatgtggcagacaagggaaaaagccaaatttagcgatggcgagaagtgtagacgggaagcattcaggcgcctggggaatggcgtgtccgacgacctgtcctctgaggaggacggggaggcgagaacacagatgatcctcctgcgtcgatctgtggagggagctagtagcgataatggctgtgaggtgaagaatcggaaatcaattttatcgagacacttaaactcacaagttaagaagacaaccaccagatggtgccacatcgtgcgtgacagtgacagtctcgcagagtctgagtttgagtctgccgcattcagccagggctctcggagtggggtatcaggaggctcacggtcactgaacatgtcaaggagggatagcgaatctacgcgacacgactcagagacggaagatatgctctgggatgacctgctgcatggccctgaatgcaggagcagtgtgacctcggattccgaaggggctcacgtgaacaccctgcactcaggaacaaaaagagatccaaaagaggatgttttccaacagaaccatctcttctggcttcagaatagcagtccgtcaagtgatagagtgtctgccatcatctgggaggggaacgaatgtaagaagatggatatgtccgtcctggagatatcagggattattatgtctcgcgtgaatgcatatcagcagggtgtggggtatcagatgctaggtaacgtcgttaccattggcctcgccttttttccattcctgcaccgtttatttagggaaaagtccctagaccaactcaagtcaatctcagccgaagagatactcactttattttgtggggctcccccagttactcccattattgtcctcagcatcatcaatttctttgagcggctttgtctgacttggatgttttttttcatgatgtgtgtggccgaacgcacctacaagcagcgctttctgtttgccaagttgtttagccacatcacctccgctcggaaagctcggaagtatgagatccctcattttaggttgaagaaagtggagaatatcaagatctggctttcactgaggagttatctcaagcgccgaggaccacaacgcagcgtggatgttgtggtcagctcagtgtttctgttgacactgtcaattgccttcatctgctgtgcccaagtattgcaagggcacaagactttcctcaacgacgcctacaactgggaattcctaatatgggaaactgcattgttactgttcctcttacgcctcgccagcctggggtcagagacaaataaaaagtattctaacgtgtccatcctactgactgagcagatcaatctttatctcaaaatggaaaagaagcccaacaaaaaggaacagcttaccctcgtgaacaatgtccttaaactgagcaccaaacttctcaaagagctggacacccctttcagactctacggactgacaatgaaccccctcatctacaacataactcgagtcgtcatactcagcgcggtgtctggcgtgattagcgaccttcttggtttcaacatacgtctgtggaagattaagtcctag

SEQ ID NO: 237486 - DNA, 2289 bp, synthetic construct
  misc_feature 1..2289: note = Description of Artificial Sequence: Synthetic coding sequence
  source 1..2289: mol_type = other DNA
atggcctccaacgaaagagacgcaatatcatggtaccagaagaagattggtgcatacgaccagcagatttgggagaaatccattgaacaaacacagatcaaaggcctgaagaataagcccaaaaagatggggcatattaagccagatctcattgatgtggacctcatccgtggcagcactttcgcaaaggctaagcccgagattccctggacctcattaacaaggaagggcctggtgagagtggtgttcttccccttattcagcaattggtggattcaggtcacctccctccgcatcttcgtttggctgcttctcctgtatttcatgcaggtgattgctattgtgttgtatctgatgatgcctattgtgaacattagcgaagttctcggtccactttgcctcatgcttctgatgggaaccgtccattgtcagatagtttctacacagatcaccaggcccagcggcaacaatgggaacagaagaagaaggaaacttcgaaagactgtgaacggagatgggagcagagagaatggtaataactcttcagacaaagtgcgcggaatcgagactctcgaatcggtgcccattattggagggttttgggagacgatctttggaaaccggataaaacgggttaagttgatcagcaacaaaggcacagaaacagataacgatccctcatgtgttcacccaatcattaagcgcagacagtgtagaccagagataagaatgtggcagaccagggaaaaggctaaattcagcgacggagaaaaatgccgcagggaggcattccgaagactcggaaatggcgtcagcgatgatctgagctcagaggaagacggagaggccaggacccaaatgattttgctaagacggtccgtggaaggagcgtcatctgacaacggctgcgaggtaaaaaaccgcaagtcaattctctcccgacatctgaactcccaggtgaaaaagacaaccactcgctggtgccatatagtacgtgatagtgactccctggccgagagcgaatttgagtctgcagcattcagtcaggggtcgcgctcaggcgtgtcaggagggtccagatctctgaacatgagcagacgcgactccgagagcacgcgtcacgactcagaaacggaggacatgttatgggacgacttactgcatggccctgagtgccgcagttccgtgacttccgatagcgagggcgctcatgtcaacacgttgcactctggcacgaagcgggatccaaaagaggatgtttttcaacagaaccacctattctggcttcagaatagctcaccttcttccgaccgagtgagtgctatcatttgggaggggaacgaatgcaagaagatggatatgtccgtgctggaaatttccggcattatcatgagccgtgtcaacgcctatcagcaaggagttgggtaccagatgctgggtaatgtggtcactatcggactagcgttttttccgtttctgcatcggctcttccgtgagaagagcctcgaccaactaaagagtatctccgccgaagaaatcctcactttgttctgtggtgctcctcctgttaccccgatcattgtgttgagcattattaattttttcgaaagactgtgcctgacttggatgtttttcttcatgatgtgcgtggcggaacggacctacaaacagcgcttcctctttgccaagttgttttcacatattacgagtgctagaaaagcccgtaagtacgaaattccgcattttcggctgaagaaggtcgaaaatattaaaatttggctatctctgagatcctatcttaaaaggcgcggacctcagagaagtgtcgatgtcgttgtttcatcagtttttctgttaacactatcaatcgccttcatatgctgcgcacaggtgctgcagggccacaagacatttctcaacgacgcctataattgggagttcctcatctgggagactgcgctgctcctgtttctgctccggctggcttctcttggtagcgaaacgaacaagaagtactcaaatgtgtctatcttactcactgagcagatcaatttgtacttgaaaatggaaaagaagcctaataagaaggagcaactcaccctcgtcaacaacgtgcttaagctgtctacaaaattgctcaaagaacttgacacaccatttagactttacggcctcacgatgaaccctctgatttacaatattacacgagtcgttattttgtctgccgtgagtggagtcatctccgacctcctcggattcaatattcggttgtggaaaatcaaatcttag

SEQ ID NO: 237487 - DNA, 2289 bp, synthetic construct
  misc_feature 1..2289: note = Description of Artificial Sequence: Synthetic coding sequence
  source 1..2289: mol_type = other DNA
atggctagcaatgaacgcgatgcaatttcctggtatcagaagaagataggagcatatgatcagcagatttgggagaagtctattgaacaaacacagatcaagggcttgaagaacaaacccaagaaaatgggtcacatcaagccggacctgattgatgtggacctgatcagggggtctacgttcgccaaagccaagcctgaaatcccatggactagtctgactaggaagggattggtgagggttgtgttctttccactgttcagcaactggtggatccaggttacttcgcttaggatcttcgtgtggttgctgctcctatactttatgcaggtaatagcaattgtcctgtacttgatgatgccaattgtgaacattagcgaggttctcggaccactctgcctcatgctgctcatgggcaccgtgcattgccagattgtgtcgacacagattacacgtccctccgggaacaacggcaatcgcaggaggcggaaactcagaaaaaccgtaaatggagatggcagtcgcgagaacgggaataacagttccgacaaggtccgcggaattgaaacactggagtcggtgccaattataggcggattctgggagacaattttcgggaatcgcatcaagcgcgtgaaattaatttctaacaaaggaaccgagactgataatgacccttcttgtgtgcatcccatcatcaagaggcggcaatgccgacccgagatacgcatgtggcagacgagggagaaagcaaagttctcagacggagaaaagtgtaggagagaggcatttcgacgattaggtaacggggtgagcgacgatctcagctccgaagaagacggggaggccaggacccaaatgattctcctaagaagaagcgttgagggtgcctcgtctgacaacggctgtgaggtgaaaaaccgcaaaagtatcctgagcagacaccttaatagccaagtgaaaaaaactaccaccaggtggtgtcacattgtccgcgattccgattcacttgccgaaagtgagttcgaaagtgctgctttctcacagggcagtagatcgggcgtgagcggcggaagccgctcattgaatatgtcccgcagggatagcgaatcgacaaggcatgactctgagaccgaggacatgctgtgggacgatctcctccatgggcctgagtgtcggtccagtgtgacaagcgattccgagggtgcccacgtcaacaccctgcattcgggaaccaaaagggatcccaaggaagatgtgttccagcagaatcatctcttttggctccagaatagcagcccctcatccgatagggtctctgcaatcatctgggaaggtaacgagtgcaaaaaaatggacatgtctgtgttagaaattagtggaatcattatgagcagggttaacgcctaccagcagggagtaggttatcagatgttgggaaatgtcgtgacgatcggtcttgccttcttcccgttcctgcacaggctttttagagagaagtcgctcgaccagctgaagtcgattagtgcagaggaaatcttgaccctgttctgcggcgcacctccagtaacaccaataatagtgctctccattattaattttttcgaaaggctgtgcttgacctggatgttttttttcatgatgtgtgtagccgagcgcacatataagcagagatttcttttcgcaaaactgtttagtcacatcacatcagcccgtaaggctcggaagtatgagataccgcactttcgtctgaaaaaggttgaaaacattaaaatctggctgtcattgaggtcctatctgaagcgccgaggtcctcaaagatctgtggatgtagttgtaagctcagtatttctgctgacactgtcaatcgcctttatctgttgcgcacaggtactccagggccataagacttttctcaatgatgcatacaattgggaatttctgatttgggaaactgcgttattgctgtttctgctgcgcctggcatccctgggatctgagacaaataaaaaatattctaacgtctccattctgctcaccgagcagattaacctctacctgaagatggagaagaaacctaacaagaaagagcagctgacgctagtgaataacgtgcttaagctgtcaactaagctgctaaaggaattggacacacctttcagactttacggtctaactatgaatcccctcatttacaacattaccagggtggtgatcctgtccgctgtgagcggagtgatttcagatctgctcggctttaatattcggctgtggaagatcaaatcctag

SEQ ID NO: 237488 - DNA, 996 bp, synthetic construct
  misc_feature 1..996: note = Description of Artificial Sequence: Synthetic coding sequence
  source 1..996: mol_type = other DNA
taacagactcgtgagaaagccaagttttccgacggggaaaaatgtaggcgcgaagcctttagaagactgggcaacggtgtttctgacgacctctcctccgaagaggatggcgaggcccgtacacaaatgattctgctccggcgtagcgtcgagggtgcttcatctgataatgggtgcgaggtgaagaaccgcaaatctatccttagccgtcatctcaattctcaagtgaagaaaacgactacccgctggtgccacatcgtgagagactctgattctttggcggaatcagagtttgaatccgctgcctttagccaaggctcccggagtggcgttagcggcggatcacggtcccttaacatgtcacggagggattcggaatcaacacgacacgacagcgagactgaggatatgctgtgggacgacctgctgcatgggccagagtgccggagctcagtgacgtctgatagtgaaggagcacatgtgaacacactgcacagcgggactaaacgagatccaaaggaagatgtcttccagcagaaccacctattctggcttcagaatagctccccaagctccgatcgggtaagcgccattatctgggagggtaacgagtgtaagaagatggacatgtctgtgcttgagataagcgggattattatgagccgtgtaaacgcataccagcagggtgtgggatatcaaatgctcggtaatgttgtcacaatcggcctggccttttttccatttctacatagactgttccgggaaaagtccttggatcaattgaagtccatttccgctgaagaaatactcaccctgttctgcggagccccacctgttaccccgataatagtgctatcaatcatcaatttctttgagagactctgtctgacctggatgttcttttttatgatgtgtgtcgccgaaagaacctataaacaggtgagtggagaaatacgtaaaatattttacctgtttttgtatatgatcttccactag

SEQ ID NO: 237489 - DNA, 318 bp, synthetic construct
  misc_feature 1..318: note = Description of Artificial Sequence: Synthetic coding sequence
  source 1..318: mol_type = other DNA
atggcttctaatgaaagggacgccatttcttggtaccagaaaaaaatcggagcctacgatcagcagatctgggaaaagtccatcgagcagacccagatcaaggggctgaagaacaaacctaagaagatggggcacatcaagccagacctgattgatgtagacttgattagaggatcaacgtttgcaaaagccaaacctgagattccctggacctcccttacccgtaaaggactcgtgcgcgtcgtattctttccgcttttttctaattggtggatccaggtgacatccctgagaattttcgtgtggctgctgttgtag

SEQ ID NO: 237490 - DNA, 702 bp, synthetic construct
  misc_feature 1..702: note = Description of Artificial Sequence: Synthetic coding sequence
  source 1..702: mol_type = other DNA
atggcaagcaacgagagagacgcgatttcctggtaccagaaaaaaatcggcgcttacgaccaacaaatatgggagaaatccatcgaacaaacacaaataaaaggtctcaaaaataaacccaagaagatgggacatattaagcctgatctaatcgatgtggacctcatccgcggaagtacattcgccaaagccaagcccgaaattccatggacttcgctgactagaaaaggactggtgcgggtggttttcttccccctgttcagcaactggtggatacaggtgacctccttgagaattttcgtgtggttgttactgctgtacttcatgcaagtgatcgcaatcgttctctatctcatgatgcctatagtcaatatcagcgaagtcctgggccctctgtgtcttatgttattgatgggaaccgtgcactgccagatcgtgagtactcagattactcggcctagcggcaacaacgggaatcgaaggagaagaaaacttcgcaagaccgtgaatggtgacggctcccgcgaaaacggcaacaattcttcagataaagtgagaggtatcgagaccttggagtcggtcccgataattggtgggttttgggaaacgatatttggcaacaggcggttactcggagtgtgggttatgggctgtctgatgacctgtcaggtgaagaagatggtaaaacatgggcacaggtag

SEQ ID NO: 237491 - DNA, 2760 bp, synthetic construct
  misc_feature 1..2760: note = Description of Artificial Sequence: Synthetic coding sequence
  source 1..2760: mol_type = other DNA
atgaaattcgcatataggttttcaaacctgctagggacagtgtatcggaggggcaatctcaattttacctgcgacggaaatagcgtgattagccctgtggggaaccgagtaacggtatttgacctgaaaaataacaaatcggatacattgccgttggcaaccagatacaatgtgaaatgcgtgggtctctctcccgacggaagactggctatcattgttgatgagggtggggacgctctgctggtctctctggtctgtagaagtgtgctgcaccatttccattttaaagggagcgttcactctgtctctttcagtcccgacggcagaaaatttgttgtgactaaaggcaacatagcccagatgtatcacgctccagggaaaaagcgcgagtttaacgcattcgtcttggataaaacatactttggcccttacgacgagaccacctgcattgactggaccgacgattcccggtgttttgtcgttggttcaaaggacatgtcaacttgggtgttcggcgctgagcgatgggacaatttgatctattacgcattgggaggtcataaggacgccattgtcgcttgcttctttgaatccaattcacttgacctgtactccctctcccaggatggggtactgtgcatgtggcagtgcgatacccccccagaagggttgaggctcaagccgccagcaggatggaaggcggacttactgcagcgtgaagaagaagaagaggaggaagaagaccaagagggggacagagagaccacaattagggggaaagctacccccgcagaagaagagaaaaccgggaaggttaagtattcacggctggctaaatatttctttaacaaagagggggactttaataacctgacagcagcggcatttcataagaaaagtcatctcctcgtgacaggattcgcgagcgggattttccatctgcacgagctgccagaattcaatttgatccattccctctctatctccgatcagtccatcgcaagcgtcgcgataaacagttccggggattggatcgctttcggctgttcagggctcggccagttgttggtctgggagtggcaaagcgagtcctacgtcctcaagcaacagggtcacttcaactccatggtggcattagcatactcacccgatgggcagtatatcgtgaccgggggtgacgacggcaaagtcaaagtgtggaacactctctctggcttttgtttcgtgacattcactgagcattcttctggcgttactggcgtaacatttacagccactgggtatgtcgtggtgacctcctctatggatgggaccgtgagggcttttgaccttcaccgttatcgaaattttcggaccttcacatcgcccagacccacacagtttagctgcgtggccgtggacgccagcggagagattgtatctgccggagctcaggacagcttcgagatcttcgtttggtcaatgcagactggacggctcctggacgtgctgtcgggccacgagggccctatttctggactgtgcttcaatccaatgaagtcagtactcgcaagtgcttcctgggacaagactgtccgcctctgggatatgtttgattcttggcgcaccaaagagactctcgctttgactagcgatgcccttgctgtgacattccggccagacggggctgagctcgcagtcgccactctcaacagccagatcactttctgggatcccgagaacgccgtccaaacaggtagcatagagggaaggcacgatttgaagaccggtcgcaaggagctcgataagataacagccaaacatgctgccaaggggaaagcattcacagcactgtgctatagtgccgatgggcattcaattctggctgggggtatgtcaaagtttgtctgcatctaccacgtgcgcgagcagatcctgatgaaaaggttcgaaatctcctgtaacctgagcctcgatgccatggaagagttcctcaatcgccgaaaaatgacagaatttggtaatttggccttaatcgaccaggacgccggtcaagaggatggtgtcgccatccccctcccaggcgtgcgaaaaggggatatgtcttcccgacacttcaagccagagatcagagttacaagtctgcgatttagccccactggccgttgttgggctgccacgacgacagaaggactgctcatctactccctggacactcgggtgctgttcgatccctttgaactggatacatctgtgactccaggaagagtgcgggaggccctgcggcagcaggactttactagagcaatccttatggccttgcggctgaacgaaagtaaactggtccaagaggcccttgaggcggtaccaagaggggaaatagaggtagttacttcatcgttaccggagctttacgtcgaaaaggttctggaatttctggctagttcttttgaggtctctagacaccttgagttttacctcctgtggacacacaaacttctgatgctgcatggtcagaagctgaaatctcgtgccggaacattactgcctgtcatccagtttctccaaaagtctattcagagacatctcgacgacctgtcgaagttgtgttcttggaaccactacaatatgcagtatgccctcgcagtctcgaaacagagaggcaccaaacggagtctcgaccccctcgggtctgaggaagaggcagaggcctccgaggatgacagcctgcaccttctgggcggagggggtcgcgacagtgaagaggagatgctcgcctag

SEQ ID NO: 237492 - DNA, 1686 bp, synthetic construct
  misc_feature 1..1686: note = Description of Artificial Sequence: Synthetic coding sequence
  source 1..1686: mol_type = other DNA
atggcatttatggaaaagcctcccgcaggcaaggtgttgcttgatgatacagttcccttgaccgctgctatcgaggccagtcaatctttgcagagccatacaattgtcagaagatacagtgactttgacctgcttaataactctctccaaatcgcaggcctttccctccctctcccgccaaaaaaactcataggaaatatggatcgggagtttatagccgaacgccaaaagggactacagaactacctgaacgtgattactacaaaccacatcctatcgaactgcgaactcgtgaaaaagttcctcgaccccaacaactactccgcaaactacacagagatagctctccaacaggttagcatgttcttcagatccgagcccaagtgggaggtcgtcgaacctctgaaagatatcggatggcgaatcagaaagaagtatttccttatgaaaattaaaaatcagccgaaggaacggttagtgctttcatgggctgacctgggcccagataagtacctatctgataaggactttcagtgtctgatcaaacttctacctagctgtctgcacccttacatctaccgggtgacctttgcgaccgccaatgagagctccgccttgctgattcggatgtttaacgagaaggggactctaaaggatcttatttataaagctaagccaaaggatccatttttgaagaaatactgcaacccaaagaagatacagggattggaactgcagcaaatcaagacttatggtagacagattttagaggtcctgaaattcctgcacgacaaaggtttcccatacggacacctgcacgcaagcaatgtaatgctggatggagacacttgtcgactgctggatttggaaaatagtcttctagggctgccaagtttctaccggagctacttcagtcaattccggaaaatcaacaccttggaaagcgtcgatgttcattgctttgggcaccttttgtatgagatgacatatgggaggccccctgacagtgtccccgtcgatagttttccaccagcaccatcaatggccgtggttgcagtcctggaatccacactgtcgtgtgaggcctgtaagaatggtatgcctaccatcagtaggttattgcaaatgccactgttctcagacgtgctgctgacgacctccgaaaagcctcagtttaaaataccaaccaaattaaaggaagcccttaggattgctaaggagtgtatcgaaaaaaggctaattgaggagcaaaaacaaatacaccagcacaggcggctgacccgcgcacagtcccaccacggatctgaagaggaacgaaagaagaggaagatccttgcacgtaaaaagtcgaaacggtccgcccttgaaaatagcgaagaacacagcgcaaagtactctaacagcaacaatagcgcgggaagtggggcatcgagtcccttgacgagccccagcagccccactccgccttcaacttctggtatcagcgcactacctccgccaccaccgccaccccctcctccggcagctcccttaccacccgcttctaccgaagctcctgctcagctgagttctcaggccgttaacggaatgagccgcggtgccctgttgtcaagcatccagaattttcagaaaggcactctgcggaaggccaaaacatgtgaccacagcgctcctaagattggttag

SEQ ID NO: 237493 - DNA, 1737 bp, synthetic construct
  misc_feature 1..1737: note = Description of Artificial Sequence: Synthetic coding sequence
  source 1..1737: mol_type = other DNA
atggcattcatggagaaaccacccgcagggaaagtccttctggatgatacggttcccctaacagcagccattgaggctagtcaatccttgcaaagtcatacagaatatatcataagggtccagcgaggaatcagtgtggagaattcatggcagatagtgcgacgttatagtgatttcgatctgctaaacaacagcttgcaaattgctggtctcagtctgccgctgccgccaaagaaactgatcggcaatatggatagggaattcatcgcggagcggcaaaaaggtttgcagaattatctgaatgtgatcaccacgaatcacattctgagcaattgtgaactggttaagaaatttctggaccctaataactatagcgctaattacaccgaaatcgctctacaacaggtgtcgatgttcttccggtctgagcctaaatgggaggtagttgaacctctgaaggatattggatggcgtattcgaaagaaatacttcttaatgaaaatcaaaaatcagccgaaagagagactcgtactgtcttgggccgacctcggccctgataagtacctttctgataaagacttccaatgcttaattaagcttcttcccagctgtctgcacccctatatttatcgtgtgacctttgctaccgccaatgaaagctccgcactacttatcaggatgtttaacgagaagggtacacttaaggatctgatttataaagctaagcccaaggacccgttccttaaaaaatactgcaaccctaagaaaatccagggtctggagctgcagcaaattaagacatacggaagacagattctggaagtgctgaagtttctccacgataaaggatttccctacgggcacctccacgcttccaacgttatgctggacggcgacacctgccgactgctagacctggagaactcactgctggggcttccttctttctatagaagttacttctcccagttcaggaaaattaatacacttgaatctgttgatgtgcattgctttggtcatctgttgtatgaaatgacgtacggccgaccacccgactccgtgccggtagattcttttccacccgcacctagcatggctgtggtggctgttttggagtccaccctgtcttgcgaggcttgtaagaacggtatgcctactatctcgaggcttctacagatgcccctgttcagtgacgtgctgctgacaacgtcagagaagccacagttcaagattccaaccaagcttaaggaggcccttcggattgctaaggaatgcatcgaaaaaagactgattgaggaacaaaagcagatccatcagcacagaagacttacccgcgctcagagtcaccatggaagcgaggaggagcggaagaaaaggaagattcttgccaggaaaaagtccaaaaggtccgcccttgaaaactctgaagaacacagcgccaaatactctaattctaataactccgctggcagcggcgctagtagccccttgacgtcgccctcttcacctactccaccgtctacgtcaggcattagtgccctcccgcctccccctccacctccacccccaccagctgcccctctgccgccagcctccactgaggcccctgcccaactttcttcgcaggccgtgaacggaatgtctaggggggctttactgtcatctattcagaactttcaaaagggcacactgcggaaggctaaaacctgcgatcacagcgcgccaaaaatcggatag

SEQ ID NO: 237494 - DNA, 1638 bp, synthetic construct
  misc_feature 1..1638: note = Description of Artificial Sequence: Synthetic coding sequence
  source 1..1638: mol_type = other DNA
atggcctttatggagaaacctcccgctggcaaagtcctgctggatgacacagtacctctcaccgccgctatcgaggcttctcaatctctacagtctcacacgattgccggactgtccctccctcttcctcctaaaaagctgatcgggaatatggaccgggaatttattgccgagcgccagaagggacttcagaactatctgaatgtgattaccactaaccatatcctctccaactgcgaacttgtgaaaaagttcctggaccctaacaattattcagcgaactataccgagatcgccctgcagcaagtttctatgtttttcaggtccgagcctaagtgggaggtagtggaacctctgaaagatatcgggtggcgcattagaaaaaaatacttcttaatgaagattaagaatcagccaaaagagagattagtgttgagttgggctgacttgggaccagataaatatctctcagacaaagacttccagtgtctgattaagttactccctagttgtctccatccctatatctacagggttacttttgcaacagctaacgaatctagcgctttactgattcgcatgtttaacgaaaagggcaccctaaaagatctgatttataaagcaaaacccaaggacccttttctaaaaaaatattgcaaccccaagaaaattcagggcctcgaactgcagcaaatcaaaacctacgggaggcagatactcgaggtcctgaagttcctgcacgataagggttttccctacgggcatctgcacgcttcaaacgtgatgcttgacggcgatacttgcagactgcttgatctggagaactcactcctgggcctgccctcattctatagatcttacttttcccagtttaggaagataaacaccttagagtcagttgacgttcactgttttggacacctgttgtacgagatgacatatggccgtccaccggacagcgttcctgttgacagcttcccccctgccccatccatggcagtcgtagccgtcctggaatctactctgagttgtgaagcatgcaagaatggaatgccgaccatctctagactgctccagatgcccctgtttagcgatgtgctccttaccacatccgaaaagccacaatttaaaatccccacaaaacttaaggaagctctaagaatcgccaaagaatgcatcgaaaagcgcttgatcgaggagcagaaacagattcatcagcatcggcgactcacccgagcccagagtcatcacggttcagaggaagagcggaagaagaggaagatcctggcaaggaagaagagtaaacgcagtgcactggaaaacagcgaggaacattccgctaagtattctaactctaataatagtgccggaagcggagcttcctcccccctaacgtccccttcatctccgaccccgccaagcacatccgggatctcagccctgcctcccccaccacctcccccacccccacctgcggcacccctgccacctgcttccacagaagcccctgctcaattgtcgtctcaagcagtaaacgggatgtctcggggtgcacttcttagttccattcagaatttccaaaagggcactcttaggaaggccaagacatgcgaccatagcgctcctaaaattggctag

SEQ ID NO: 237495 - DNA, 1548 bp, synthetic construct
  misc_feature 1..1548: note = Description of Artificial Sequence: Synthetic coding sequence
  source 1..1548: mol_type = other DNA
atggctttcatggaaaagccccctgcagggaaggttctgctcgatgacactgtccctctgacagcggcaatcgaggcttcccagagtttgcagtctcatactgagtacatcatacgcgtgcagcggggaatcagcgtggagaactcctggcagatcgttagaagatatagtgactttgatctcctgaataattccctgcagattgctgggttgtctcttccgctccctcccaaaaagctcattggcaacatggaccgcgaattcatcgcggaacgccaaaagggtttacagaattatttgaacgttatcaccaccaaccatattctttcgaactgcgagctggtgaaaaagtttttagacccaaataactattctgcaaactacacagaaattgctctccagcaggtgagcatgtttttccgctctgagccaaaatgggaggtggtggagcccctaaaagacatcggatggcggatcaggaaaaagtacttcctaatgaaaatcaagaaccaacctaaggagcgcttagtcctctcctgggccgacctcggtcctgacaaatacttgagtgacaaagatttccaatgcttgatcaaactgttgcccagctgtctgcacccatacatttaccgcgtgacctttgccacggcaaacgagagctcagccctgctcatcaggatgttcaatgaaaagggcacactgaaggacctgatatacaaggccaaacccaaggacccattcctgaaaaagtattgtaatcccaagaaaattcagggcctggaactgcagcagatcaaaacttatggcaggcagatcctcgaagttctcaagttcttacatgacaagggctttccttacggccacctgcatgcaagcaatgtgatgctggacggagatacatgccggcttctcgaccttgagaatagcctgctgggtttgccaagcttctaccgaagctactttagccagtttcggaagatcaacaccttagaatcagtggacgtacactgcttcgggcacctgctttatgaaatgacctatgggagaccacccgacagtgtacccgtggattctttcccccctgccccatctatggctgtggtggctgtgttagagtccaccttaagttgcgaggcctgtaagaatggtatgccaacgatatccaggctcctgcaaatgccgctcttttccgatgtgctacttaccacgagtgaaaaaccccagttcaagattcctactaagctgaaggaggccctcaggattgccaaagagtgtatcgaaaaaagacttatcgaagaacaaaaacagattcaccagcacagaagactcacccgtgctcagagtcatcacggatcggaagaggagcgaaagaaacgcaagatcctggccagaaaaaagagtaaacgaagtgcgctggagaattccgaggagcattccgccaagtattcaaacagcaacaattccgccggaagcggtgcctcttcgcctcttacgagcccgtccagtccaaccccgccttccacctctgtggaacacgccccattctag

SEQ ID NO: 237496 - DNA, 1326 bp, synthetic construct
  misc_feature 1..1326: note = Description of Artificial Sequence: Synthetic coding sequence
  source 1..1326: mol_type = other DNA
atgttcttccgctctgagccgaagtgggaagtggtcgagcctctgaaggatattgggtggcgcatcaggaaaaagtacttcctgatgaaaatcaaaaaccagcccaaggagcgactggtcttgtcttgggccgatcttggcccagacaagtatctctcagataaggattttcagtgcttgatcaagctcctgcctagctgtctccatccttacatttatcgcgtaaccttcgccacagcgaacgaaagttcggccttgctcatcagaatgttcaacgagaagggaactctgaaggacctcatatataaagctaaaccaaaagatcccttcctgaaaaaatactgtaaccccaaaaagatacaaggtcttgagttgcagcagataaaaacctatggtcggcagattctggaggtactaaagtttctgcacgacaaaggctttccctacggtcatctgcacgcctccaacgtcatgttagatggagacacttgcaggctgctggacctggagaatagcttgctgggtctcccgagcttttatcggagttactttagtcagttccggaagatcaacactctggaaagcgtggacgtgcattgttttgggcacttgctgtacgagatgacctacggcagaccccctgacagcgtgccagtcgactcctttccaccagccccatccatggccgtcgttgccgtactcgagtctacattgtcttgcgaggcgtgtaaaaatggaatgccgactatctccagactgttgcagatgccgctgtttagtgacgtgctgttaaccacaagcgagaagccccaatttaagataccaacaaagctgaaagaggctctccgaattgcaaaagaatgcatcgagaagagactgattgaggaacaaaaacaaattcatcagcacaggcgcctgacacgcgcacagagccaccacggaagcgaggaggaacggaagaagagaaagatcctcgctaggaaaaagagcaagcgatcggcgctcgagaacagcgaagagcacagtgctaaatatagcaattctaataacagcgcaggatccggggcttcctccccactgacttccccatcttcaccaaccccaccatccacttctggtatctccgctctgccaccccctccgcctccgcctccgcctcctgcggctccgctgcctcccgcttcgacggaggcacccgctcagttgagcagccaggctgtcaatggaatgtcacggggagctctgttgtcttctatacagaattttcagaagggcacgctcaggaaggctaaaacgtgtgatcactccgcacctaaaattggctag

SEQ ID NO: 237497 - DNA, 1005 bp, synthetic construct
  misc_feature 1..1005: note = Description of Artificial Sequence: Synthetic coding sequence
  source 1..1005: mol_type = other DNA
atgttcttcagaagcgagccaaaatgggaggttgtggaacccttgaaagatatcggttggagaatacggaagaaatactttctgatgaagattaagaatcaacccaaagagcgcctcgttttgtcatgggccgatctcgggccagataagtacctgtctgataaagatttccaatgtctaatcaaactgctgccatcttgtttgcacccttatatttatagagtaactttcgcaaccgccaatgagtcatcggccttgctgataagaatgtttaatgaaaaaggcactttaaaggacttgatctataaagcaaagcctaaagatcccttcctgaagaaatactgtaatcccaagaagattcaaggcctcgaactgcagcagatcaaaacatatgggaggcagattttagaggtcctgaagtttttgcatgacaaggggtttccttacggccaccttcacgcatccaatgtcatgctcgatggagacacctgtaggctgcttgatttggagaactccctgttgggactacccagcttctatcgctcgtacttctctcagtttagaaaaatcaacaccctcgagagtgtagatgttcactgctttggacaccttctatacgagatgacctacgggaggcctccagactctgttcccgtggatagtttcccaccggctcctagtatggcggttgtggccgtgctcgagtcaacgctgagctgtgaagcttgcaagaacggaatgccgacaatctcccggctcctgcaaatgcccttattcagtgatgtcttgcttaccacgtcagagaagcctcagtttaaaataccaacaaagttaaaggaggctctccgaatagcaaaggagtgcatagagaagcggctgatcgaggaacagaagcagatccatcagcacaggcggttaactcgagcgcagtcccaccatggcagtgaggaggagcggaagaaaaaagatttttcatccaaggaggtgaagacaatctgctcctag

SEQ ID NO: 237498 - DNA, 1110 bp, synthetic construct
  misc_feature 1..1110: note = Description of Artificial Sequence: Synthetic coding sequence
  source 1..1110: mol_type = other DNA
atgaagtcgccagagaagaaaaggcggaaaagcaacacccaggggcctgcttattcccatctcaccgaatttgccccaccccctactcctatggtggatcacctggtggcgtcaaatccctttgaggacgatttcggagcgcctaaggtgggcgttgccgcacctccttttctggggtcgccagttccatttggtggcttccgtgtccagggcggtatggcagggcaggtgccccctgggtacagtaccggcggtggaggcggaccccagccactccgcaggcagcctccaccctttcccccaaatcctatggggcctgcttttaacatgccccctcagggtcccggatacccacctcccggaaacatgaactttccttctcagccgtttaaccagccactcggccaaaatttctcccccccatccggccaaatgatgcccggacccgtgggtggttttggcccaatgatcagccctactatgggtcaaccccctcgagctgagctaggacccccatccttgtcacaaagattcgcacaacccggtgccccatttggcccatcccctctgcagcggccaggccagggtctgccttcattacctccaaacacttcaccgtttccgggacctgaccccggttttcccggacctggaggagaagatgggggaaagcccctgaacccacctgcttctacagccttcccccaggaaccacattcaggcagcccagcagccgctgtcaatggcaaccagccaagttttcccccaaacagttccgggaggggaggaggcactccagacgcgaattccttagcccctccaggaaaagccggtggcggatccggacctcaaccaccaccgggactcgtttatccctgtggcgcttgccgttcagaggtcaatgatgatcaagacgcaatattatgtgaagccagctgtcaaaaatggtttcacagagagtgcactggcatgacagagtcagcatacggccttctaactacagaagcatcggccgtgtgggcgtgtgacttatgccttaaaacaaaggagattcagagtgtgtatatccgggaaggcatgggtcaactggtcgccgctaatgacggctag

SEQ ID NO: 237499 - DNA, 1221 bp, synthetic construct
  misc_feature 1..1221: note = Description of Artificial Sequence: Synthetic coding sequence
  source 1..1221: mol_type = other DNA
atggcagcttctgcccctcctccacccgataagctggaggggggagggggacccgctccccctcctgccccaccatctaccggaaggaaacaaggtaaagccggactccaaatgaaaagccctgaaaagaaacgaagaaagtccaacacacaggggcctgcctactctcatctcacggaatttgcacccccacctacacctatggtggatcatcttgtagcctcaaacccctttgaagatgactttggggcacctaaggtgggggtggccgcacccccttttctgggcagtccagtgccctttgggggttttcgggtccagggcggaatggctggccaagtcccgcctgggtacagtaccgggggtggaggtggacctcaacctctcagaagacagcctcctcctttcccaccgaacccaatgggtccggcttttaatatgcctccccagggcccaggatatcccccacccggaaacatgaatttcccatcccaaccgtttaatcagcctcttgggcaaaatttctcgccccctagtgggcagatgatgccagggccagttggtggcttcgggcctatgatttcaccaacaatgggtcaaccacccagagccgagctgggtccacctagtctgagccagcggttcgctcagcctggagcgccatttggaccatctcctctgcaaaggcccggacagggactcccctcgctaccccctaatacctctccctttcccggacccgatccaggttttccaggtcctggcggagaggacggcggaaagccgctcaaccctcccgcttcaaccgccttcccccaagagccccatagtggtagccctgctgcagctgtgaacggtaatcagccttcttttccacccaattccagtgggcgagggggtgggacccccgacgcaaactccctggcaccccctgggaaagcaggaggagggagtggaccccagcctccacccggactggtttacccttgtggcgcatgtcgatccgaagtgaatgacgaccaagacgccattctttgtgaggcctcctgccagaaatggtttcaccgcgagtgcacagggatgaccgaaagtgcctatggactattgaccaccgaggcgagcgccgtgtgggcctgcgacctatgtctgaagaccaaagagatccagtccgtgtacataagagagggcatgggccagctcgtagcagctaacgatggatag

SEQ ID NO: 237500 - DNA, 939 bp, synthetic construct
  misc_feature 1..939: note = Description of Artificial Sequence: Synthetic coding sequence
  source 1..939: mol_type = other DNA
atggaggaagaatgcagagtcttgagtattcagtcccatgtgatcagaggatacgtgggtaatcgtgcggctacttttcccctccaagtcctcggcttcgaaattgatgcagtgaacagcgtacagttttctaatcacacaggatacgcccactggaaaggccaggtcctgaattccgacgagttgcaggagctctacgaaggcttgcggctgaataacatgaacaagtatgattacgtactgacagggtacacaagggacaaatcgtttctggccatggtggtcgacatagtccaggaattaaaacagcagaacccgcgtctcgtctacgtctgcgatcccgtcctgggcgacaaatgggacggagaaggctcaatgtacgttcctgaggacttactccccgtgtataaggaaaaggtagtgccccttgccgatataatcacacctaatcagtttgaagcggagctgttgtccggaaggaaaatccactcgcaggaagaggccttgcgtgtcatggacatgctgcatagcatgggtccagacaccgtggtgattacctcctcagaccttccctcgcctcaaggtagcaactatctaattgtcctgggatcacagcggaggaggaacccagctgggagtgtggtaatggagagaattagaatggatatcaggaaggtggacgctgtttttgtgggcacaggggatctgttcgccgctatgctgctggcttggacccacaagcacccaaataacctgaaggtggcttgcgaaaagacagtctccacactgcaccacgtgctgcagcgcactatccagtgcgcgaaagcccaggcaggggagggagtgagacccagccctatgcagttagaactgcgaatggtgcagagtaaacgagatattgaagatccagaaattgtcgtccaggctacagttctctag

SEQ ID NO: 237501 - DNA, 855 bp, synthetic construct
  misc_feature 1..855: note = Description of Artificial Sequence: Synthetic coding sequence
  source 1..855: mol_type = other DNA
atggaggaggagtgtcgcgtactctcaatccagtcccacgtaatcagggggtacgttggaaacagagctgccacatttcccttacaggtgctgggattcgaaattgacgcggtgaactcagttcagtttagcaaccatacagggtacgcgcattggaagggccaagtgctgaatagcgatgagcttcaggagctctacgaaggtctgaggctcaacaacatgaacaaatacgattatgttctaaccgtgtgcgatcccgtcctgggcgacaaatgggacggtgaaggttccatgtatgttcccgaagacctgttacccgtgtacaaagagaaagtagtgccactggcagacattattacccccaatcaattcgaagccgaactattatcagggcgtaagatccattctcaggaagaggctctgcgggttatggacatgctacatagcatgggccctgacaccgtcgttataacctctagtgaccttccatctccacagggatcaaactatctgatagtcctgggttctcagcggcgtcgcaatcccgcaggatcagtcgtcatggagaggataaggatggatatcaggaaggtcgatgctgtttttgtgggaaccggcgacctgttcgcggctatgctgctcgcgtggactcacaagcaccccaataatctcaaggtggcttgcgagaaaaccgtaagcacactccaccatgttctgcagaggaccattcagtgtgccaaagcccaggccggagagggagtcaggccatccccaatgcagctggagctgagaatggtccaatcaaagcgtgacatcgaagaccctgaaatcgtggtacaggctacagtgctttag

SEQ ID NO: 237502 - DNA, 2322 bp, synthetic construct
  misc_feature 1..2322: note = Description of Artificial Sequence: Synthetic coding sequence
  source 1..2322: mol_type = other DNA
atgggcaagaacctgaaggaggccgttaagatgctggaggacagtcagcggcgtacagaggaggagaacgggaagaagctgatctctggtgatattccaggacccctgcagggcagcggccaggacatggtgagtatcctccagctggtgcagaacctcatgcatggtgacgaagatgaagaaccgcaatccccacgcatacagaatattggcgaacagggacatatggcgttgttaggccattcactcggcgcttatatctcgactctcgacaaagaaaaattgaggaagttaacgacacggatcctgagtgataccacgctttggctttgtcgaatcttcaggtacgaaaatgggtgtgcctactttcatgaggaggagcgagaaggtctagcaaagatctgccgcctcgcaattcactctcgctacgaggacttcgtggtagacggcttcaacgttttgtataataagaagccagttatctacttgtccgccgctgcccgtcctggcctcgggcagtatctgtgtaatcagttgggactgccctttccttgtctttgccgggtgccgtgtaatacagtgtttggcagccaacaccagatggacgttgcttttctggaaaagcttataaaagatgatatcgagcgcggtcggctccccctgcttctagtggcaaatgccggaactgcagccgtgggccacacggacaaaatcgggagactgaaagagctgtgcgaacagtacgggatctggctccacgtggagggtgtgaacctcgcaacccttgctcttggctacgtgagttcttcggtgctcgcagctgctaagtgtgactccatgacaatgaccccaggaccatggctgggccttcccgctgtgcccgctgtcactctgtacaagcatgacgaccctgccctgactctggtcgcgggactgacatcaaacaaacccacagataagctgcgtgccttacctctgtggctctctcttcagtacctggggttggatggctttgtagagcgaattaaacatgcttgtcagctcagtcagaggctgcaagagagtctcaagaaagtgaattatataaagatcctcgtggaagatgagctctccagtccagtggtcgtgttcagattctttcaggaactgcccggttccgatcccgtttttaaagccgtgcctgtcccgaacatgacccccagcggggttgggagggagcgccactcatgtgatgcgctgaaccggtggctgggggaacagctcaaacagcttgtccctgcttctggcctgactgtcatggacttagaggctgaggggacatgtttgagatttagccccctgatgaccgcggcagtgctcggcacaaggggtgaggacgtcgatcagctggtggcttgtatagagtcaaagctcccggtcctctgttgtacattgcaactgcgggaggagttcaagcaagaggtggaagccaccgcaggactgctctacgtggatgacccaaattggagcggtatcggggtagtgaggtacgaacatgccaacgacgataaaagtagcctgaagtccgatcctgagggagaaaacattcacgcaggcttgctgaagaagcttaacgagctggaatcggaccttacgtttaaaatcggccctgaatataaaagtatgaagagttgtctttatgtggggatggccagtgataacgttgatgccgctgaattagtggaaacgatcgccgctactgctcgcgagatagaagaaaacagtagactgctggaaaacatgaccgaggtggtgcgcaagggaatccaggaggctcaggttgaactccagaaggcaagcgaggaaagactgctcgaggaaggggtgctgaggcagatcccagtggtgggcagcgtgctgaactggttcagcccagtacaggccctgcagaagggaaggacattcaacctcacagcaggtagcttggagtctaccgagccaatctacgtttacaaggcacagggagccggagtgacacttccacccacgccctcaggaagccgaaccaagcagcgactccctggccagaaaccctttaagcgcagccttcgtggaagcgacgctctcagtgagacatcttccgtatctcatattgaggatctggaaaaggttgagcgattgagcagcggccctgaacagattactttggaggccagctccaccgaaggccacccgggtgcgccatctccgcaacacaccgaccagacagaagcattccagaagggggtcccacatcccgaggacgatcacagccaggtcgagggccctgagagtttgagatag

SEQ ID NO: 237503 - DNA, 2367 bp, synthetic construct
  misc_feature 1..2367: note = Description of Artificial Sequence: Synthetic coding sequence
  source 1..2367: mol_type = other DNA
atggacgcttccctggaaaaaatagcagacccaaccctcgctgagatgggaaagaacctgaaggaagcggttaagatgctagaggactcccagcgaaggactgaagaagagaatggaaagaagctgatctccggcgacatccctgggccactccagggctctggccaggatatggtttcgattctacagctggttcagaacctgatgcacggagatgaggatgaggaaccgcagagccccaggattcagaatattggagagcagggacatatggcgctgctgggacactccctgggtgcctacattagcaccctagataaagagaaactccggaaattgaccacaagaattttatcagacacaactctgtggctgtgtaggatcttcaggtacgaaaacggttgtgcctactttcatgaagaagaacgcgaaggtttggctaagatttgtcgtctggccatccactcacgatacgaagacttcgtggtcgacgggtttaacgtcctgtataataaaaagcccgttatctacctctcagccgctgccagacctgggctggggcagtacctgtgtaaccaactcgggctgcctttcccatgcctctgtcgtgtgccgtgcaatacagtgtttgggagccagcaccagatggacgtagccttcctggagaagctaataaaagatgacatagagcgcggtagactgccacttcttctggtcgcaaacgctgggactgccgctgttggacataccgacaaaatcggacggctgaaagagttgtgtgaacagtatggcatttggttgcacgtagaaggtgtaaacctggcaaccctcgccctaggctatgtgtcatctagcgtactggccgctgctaagtgcgactctatgacaatgacacctgggccatggctagggctgcccgcagtccctgcagtcacactgtacaaacacgatgaccctgccctcactctggtggctggcctcacatctaacaagccaaccgacaaactcagggcactcccactatggctgagtctgcagtatctcgggctggatggattcgtcgaaagaattaagcatgcctgtcagctctcccagcggctacaagagtctctgaagaaggtcaattatatcaagattctggtcgaagatgagttgagtagtccggtggtcgttttcaggttttttcaggaacttccaggctcagatcccgtattcaaggccgtgcccgtgcctaacatgacaccctcgggggtgggtcgggaaagacactcatgtgacgcacttaatcgctggctgggggagcagctaaagcagctggtaccggcatccggccttaccgttatggatctcgaggccgaaggtacatgtctgaggttttccccactcatgacggccgctgttttaggcacccgcggagaggatgtggaccaattagtggcttgcattgaatccaaattgccggtgctgtgctgcacactccagctgagagaggaatttaagcaggaggtcgaggctaccgctgggctcctgtatgttgatgaccccaactggtcaggcattggcgtggtgcgatacgagcacgccaatgacgacaagtccagtctcaaatctgaccctgagggagagaacatacacgcgggactgctcaagaaactgaacgagctggaatccgacctgacatttaaaataggcccagaatataaatcaatgaagagctgtttatacgtcggcatggccagtgacaatgttgacgccgcagagctcgtagagactatcgctgctactgcacgggaaattgaagaaaatagccgcctcctggagaacatgactgaagtggtcaggaaaggcattcaagaggcacaggtggagctccagaaagcgagcgaggagcgattactcgaagagggggtgcttcggcaaatcccggtcgtggggtctgtcctgaattggttctctccggtccaagccctgcaaaaagggcgtacattcaacctaactgctggatccctcgaatctaccgaacctatctatgtttataaggcccaaggggcaggcgtgacccttccacccaccccaagtggctcaagaactaagcagcggctgccgggacagaagccattcaagaggtctctgagaggctctgatgccctgagcgaaacttcatcagtgtcccacattgaggacctggagaaagtggaaaggttatcttcaggcccagagcagattacactcgaggcttctagcacagagggacatcccggtgctccatcaccgcaacacactgaccaaacagaagcgtttcaaaagggagttccacacccagaagatgaccatagtcaggtagaggggccagaaagcctaagatag

SEQ ID NO: 237504 - DNA, 2094 bp, synthetic construct
  misc_feature 1..2094: note = Description of Artificial Sequence: Synthetic coding sequence
  source 1..2094: mol_type = other DNA
atggggaagaacttgaaggaggctgtgaagatgctagaggactctcagagacggacggaggaggagaacgggaagaagttaatcagtggcgatattcccggaccgctacagggcagatacgaaaatggatgtgcttactttcacgaagaagaacgggaaggactcgccaaaatatgcaggttagcgatccacagcagatatgaggacttcgtggttgacgggttcaacgtgctttataacaaaaaacctgttatttatttatcagctgccgcacggccaggactcggccagtatttgtgtaatcagctgggactgcctttcccttgcctctgtcgtgtaccatgcaatacggtgttcggctcccaacaccagatggacgtagcctttttggagaagttaataaaggacgacattgagcgtgggcgtttgcccctcctgctggtagcaaatgcaggtaccgccgctgtcgggcacaccgataaaataggtcgcctaaaagagctgtgcgagcaatatggaatctggttacatgtggaaggcgttaatctggcgacactcgcattggggtatgtaagcagcagtgtgctggccgctgctaagtgtgattctatgacaatgacccctggtccctggcttggccttccggcagtaccagcggtcactctgtacaaacatgacgaccccgctctgaccttagttgctggactcaccagcaataaacctacagacaagttgcgggcactgcccctgtggctgtccctccagtacctcgggcttgacgggttcgtggagaggattaaacacgcctgtcagttgagccagcgcctgcaggaatctttgaagaaagtgaactatattaagatccttgtggaagatgaactcagttccccggtggtggtctttcgcttcttccaggagctgcctgggagtgatccagtgtttaaggctgtgccagtcccaaatatgacaccttccggtgtcggaagggagcgccattcctgtgacgccctgaataggtggctcggcgagcagcttaaacagctagtgcccgctagtgggttgactgtcatggatctggaggctgagggaacctgtttgcgattttcacccttaatgactgcagcagtgttggggacacggggtgaagacgtggatcagttggttgcttgcatcgagtccaaactccctgtactttgttgcaccctgcagctgagggaggagtttaagcaggaagtggaggctactgcgggattactgtacgttgatgatccaaactggtcaggaataggggtggtgaggtacgagcatgccaatgacgacaaatcatcactcaagagcgacccggaaggtgagaacattcacgcgggactccttaagaaactgaatgaattggagagtgacctcacttttaagattggacccgagtacaagagtatgaagtcatgcctgtatgtaggcatggcaagcgacaatgttgacgctgcagaactggttgagaccatcgccgctacagccagggaaattgaggagaatagtaggctgctggagaatatgacagaggtggttagaaaaggaattcaggaagctcaggtcgaactccagaaagctagcgaagagaggctgctcgaggagggagtgctgcgacagatcccggtggtggggagtgttctcaattggttcagtccagtccaggcactgcagaaaggacggaccttcaacctgactgccggaagcttggaaagtacggagcctatctacgtgtataaggcacagggagcaggggttaccctgccgccaactccctcaggctcacgcactaagcaacggttgcccggacagaagccttttaagcgcagtctccggggttctgacgccctctctgagaccagcagtgtctcgcatatcgaggatttggaaaaagtggagcgcttgtccagtggacctgaacagatcacccttgaagcaagctcaactgagggacatcctggagctccgagccctcagcacacagaccagacggaggcttttcagaagggtgtaccgcacccagaggacgaccactcccaagtcgaaggaccagaaagcttacgctag

SEQ ID NO: 237505 - DNA, 2283 bp, synthetic construct
  misc_feature 1..2283: note = Description of Artificial Sequence: Synthetic coding sequence
  source 1..2283: mol_type = other DNA
atggatgctagcttagagaagatagccgaccctactctggctgaaatggggaagaaccttaaagaagccgtgaaaatgctcgaggattctcagcgaacagaggaggagaacggcaagaagctgataagtggggatattcccggacccctgcaggggaggattcaaaatataggcgaacagggccacatggcgttgctgggacactcattaggcgcatacatctctacattggataaggagaaactccgcaaattgaccacacgaatccttagcgacacaacattgtggctctgtcgtatctttcgatacgagaatggctgcgcttacttccatgaggaggagcgcgaggggcttgccaaaatctgccgcctagccattcacagccgatatgaggacttcgttgtagacgggttcaacgtgctctacaacaagaaacccgtaatatatttgagcgctgcggctcgtccgggtctgggacagtatctctgcaatcagctcgggcttccatttccctgtctctgcagggtcccttgcaacaccgttttcggctctcagcatcagatggatgtagcctttttagagaagttaatcaaggacgatatcgagagaggtcggttgccactgctactggttgcaaatgctggcactgctgctgtcggccacacagataagattggaaggctcaaggagttgtgcgaacagtatggaatctggctgcacgtagaaggcgtcaacctggctaccctggcgttgggctacgtgagctcctcagtgctagcggcagccaaatgtgattccatgactatgacacctgggccttggttgggcttgcctgcagtcccggcagttaccctttataagcatgacgaccccgcactcacgctggtggccggtctgaccagtaacaagccaactgacaagctgcgggctctcccattgtggctgagtctgcagtatttggggctcgacggattcgtagagcggatcaaacatgcttgccagctcagccagagattgcaggaatctcttaagaaggttaattacattaagatactcgtggaggacgagctctcttcaccagtggtcgtctttcgatttttccaggaactgccaggtagtgatcctgtctttaaggccgttcccgtacccaatatgacacctagtggagttggaagggagcgacatagttgcgacgccctgaacaggtggctgggggaacaactgaagcagctcgtgcctgcatccgggctgactgtgatggatctcgaagcagagggaacctgtctgagattttctcccctcatgaccgccgcagtgctggggacaagaggagaggatgtggaccagcttgtggcatgcatcgagtcaaagttacccgtgctctgctgtaccctccaattgcgggaagagttcaaacaggaggtagaggctaccgcaggccttctctatgtggatgaccccaactggtctggaatcggagtggttaggtatgaacacgccaatgatgacaagtcgtcattgaagtccgaccctgaaggtgagaatatacatgcaggactgctgaagaaactcaatgagctcgagagcgatctcacattcaagatagggccagagtacaaatcaatgaaaagctgcctctatgtggggatggcctcagataatgtagacgcagctgaactggtcgaaaccattgctgccactgctcgggagatcgaagagaatagccgcctgctggagaatatgaccgaggtagttcggaaaggtatccaagaggctcaggtggaattgcagaaggcctcggaagaaaggctcctggaagagggagtgctccgtcaaatccctgttgtaggctccgtgttaaactggttcagtcccgtccaagccctccaaaagggccgaacgtttaatctgactgctggatctctcgaaagcactgagcctatctacgtgtataaggcgcagggagcaggggtgaccctcccacctactcccagtgggagcaggacgaagcaaagactgcctgggcagaaacccttcaagcgctctctaaggggatctgatgctctatccgaaacatccagtgtgagccacattgaggacctggagaaggtggaaaggcttagctctggacctgagcagatcacacttgaagcttcaagtacagagggtcatccgggagcgccatctccacagcacactgatcaaactgaagccttccaaaagggcgtccctcaccccgaggatgaccattcccaggtggagggccctgagtcccttagatag

SEQ ID NO: 237506 - DNA, 1290 bp, synthetic construct
  misc_feature 1..1290: note = Description of Artificial Sequence: Synthetic coding sequence
  source 1..1290: mol_type = other DNA
ctctccagcaccctgagacggattgctgacccaacactggcagaaatggggaagaacttgaaagaggccgtcaagatgctggaagacagtcaacggaggacagaggaggagaatggaaagaaactgatctccggcgatatacccggtcctctgcaggggtctggacaagatatggtttctattctacagctggttcagaatctgatgcacggtgatgaggacgaagagccgcagtcaccgaggattcagaatataggggagcagggtcacatggctctcctgggacactcactcggggcttacatcagcacactggacaaagaaaaacttcggaaattgaccaccagaatactttcggataccaccttgtggctctgtcgcatttttcgctacgaaaatgggtgtgcctattttcatgaagaggagcgcgagggcctggccaaaatctgccggctggcaatccacagccgatacgaggactttgtagtagatggctttaacgtgttatacaataagaaacccgtgatttatctaagtgctgcagcaagacctgggctcggacaatacttgtgcaaccaggatgtggctttcctggagaaactgatcaaggatgatattgagcggggaagactcccactgctcttggtcgctaacgccggaacagccgctgtgggacatacagacaagataggcagattgaaagagttgtgcgagcagtacggtatttggctgcacgtcgagggcgtgaatctagctacactcgctttgggatacgtcagcagttccgtgctggcagctgcgaagtgtgactcaatgaccatgactccaggcccttggctcggcttgcccgcagtcccggcagtcacactttataaacatgacgaccccgctctcacactggtcgccggactcaccagcaataaacccactgacaaactgcgcgcactgcccctctggctgagtctgcagtacttaggcctcgatggttttgtggagaggattaaacatgcttgtcagctaagtcaaagactgcaggaaagcttaaaaaaagttaattacataaagattctggtggaggacgagctgagtagtcccgttgtcgtgttcaggttcttccaggaacttccaggatcagatcctgtgttcaaggcagtgcccgtgcccaacatgaccccaagcggtgtggggagggaacggcattcgtgtgacgcactcaaccgctgggtgcgcatggcagttacaccgttgagcttccaggtcccagttcatcaccatcccacctgttggtag

SEQ ID NO: 237507 - DNA, 1497 bp, synthetic construct
  misc_feature 1..1497: note = Description of Artificial Sequence: Synthetic coding sequence
  source 1..1497: mol_type = other DNA
atggacgccagtctcgagaaaattgccgatccgaccttggctgaaatggggaaaaacctgaaggaggcagttaagatgttagaagactctcaacggaggacagaagaagaaaatggaaaaaaactgatttccggagacatacccggacctctgcaggggagcgggcaggacatggtttccattctccagttggttcagaacttaatgcacggtgatgaggatgaagaaccccagtctcccaggatccagaacatcggagaacaggggcacatggccctgctgggtcattccctgggagcatacatcagtacgctggacaaagaaaagttgagaaagcttacaacaaggattctttctgacacaactctgtggctatgcaggatctttcgctacgaaaacggatgtgcttacttccatgaggaagaacgggaaggcctggctaaaatctgcagactggccatccactcccgctacgaggatttcgtggttgatggcttcaatgtcttgtacaacaagaagccggtaatctatctgtccgcagccgctcgccctggacttggccaatatctttgtaatcagttgggcctgccattcccctgcttgtgtcgggtcccttgtaacaccgttttcggtagccagcaccagatggacgtcgcctttctggaaaaactgattaaagacgatattgaacgcggtcggctgccactgttactggttgccaatgcaggcacagctgccgtgggccacacggataagattgggagattgaaggaactgtgcgagcagtatgggatctggctgcatgtcgaaggtgtcaatctggctacccttgcgctgggatacgtgtcttcctccgttcttgccgctgccaagtgcgattcgatgaccatgacacctggcccatggctcgggctgccggcagttcctgcagtgactttgtacaagcatgacgatccagccctcactctggtggctggtctgacctccaataaaccaaccgacaagcttcgtgctttaccactgtggctgtctctgcagtatctgggattagacgggttcgtggaacggataaagcatgcatgccagctgagccagcggctgcaggaaagtctgaaaaaagttaattacatcaagatcctggtcgaagacgagctgtcctccccggtcgtggtgtttagattttttcaggagctgcccggaagcgacccagtgtttaaggctgttccagtccccaacatgacgccttccggagtgggtagggagcgtcacagttgtgacgccctgaaccgatggttgggcgaacaactgaagcagctggtgccggcatcgggacttacagtgatggacctggaggcagagggcacgtgcttacggttttcaccgttgatgaccgctgctggttggtctcattgtggaacaaccactaggtatgattgtgttaggtcacgcctgactacacgactgccagggagtactggcgagcaggctccaccatag

SEQ ID NO: 237508 - DNA, 615 bp, synthetic construct
  misc_feature 1..615: note = Description of Artificial Sequence: Synthetic coding sequence
  source 1..615: mol_type = other DNA
atgacaatgacccccggaccttggctgggcctgcccgctgtgcctgcagttacattgtataaacacgatgaccccgctctcacactcgtggcagggcttaccagtaataagcccacagataagcttagggcgctccccctgtggctctcgcttcagtacctcggcctcgacgggttcgtcgaacggattaaacacgcatgccagttgagccagaggctgcaggagtccctgaagaaagttaattatattaagattctggtcgaggacgagctgagttcgccagtggtggtgttcaggtttttccaagagttgcccggaagtgatcccgtgttcaaggctgtccctgtgcccaacatgactcctagtggcgtaggcagagaacggcactcgtgtgatgccctcaatcggtggctgggagagcagttgaaacaactggtgcctgcttctggattaactgtgatggacctggaggcggagggaacctgtttgcggtttagtcctctgatgactgcggcaggctggtcccactgtggcacaacaacccgatacgactgcgttagatccaggctcacaactcggttacctggaagcaccggcgagcaagctccaccttag

SEQ ID NO: 237509 - DNA, 642 bp, synthetic construct
  misc_feature 1..642: note = Description of Artificial Sequence: Synthetic coding sequence
  source 1..642: mol_type = other DNA
atggatcctctctttcaacaaacacacaagcaggttcacgagatccagagctgcatgggtcgactggaaactgcggacaaacagtcagtacatatcgtggaaaacgagatccaagcatctatcgaccaaatattctcacggttggagagattggagatcctgagctccaaggagccgccaaataaacggcagaacgctagattacgagtcgatcagctgaaatatgacgtccagcaccttcaaaccgcgctgaggaatttccagcaccggcgacacgccagagagcagcaagagagacagcgcgaggaactgctgtcccggacatttacaaccaatgattctgacactacgattcccatggatgaaagtttgcaattcaacagcagtctccagaaagtgcataatggcatggacgatctgatcttagacgggcacaatattctcgatggccttagaactcagcgcctcacactgaaggggactcaaaagaagatcttagacattgctaatatgctcggcctgtcaaacactgtcatgcgactgatcgaaaaacgagccttccaagacaaatacttcatgatcggaacccaggggtcctgtcagacggcccattttggtggcaggagtgctggctcatcctag

SEQ ID NO: 237510 - DNA, 657 bp, synthetic construct
  misc_feature 1..657: note = Description of Artificial Sequence: Synthetic coding sequence
  source 1..657: mol_type = other DNA
atgacctgttggttgcgaggtgtcactgctacattcggacggccagcagagtggcccggttatctatcacacctttgcggcagatccgctgccatggatttgggcccaatgagaaagtcttaccgcggagaccgtgaagctttcgaagaaactcatctgacatcgctcgacccggtgaaacaatttgcggcatggttcgaagaggctgtacagtgccctgacattggcgaggctaatgcaatgtgtctcgctacctgcactcgagatggaaaaccgtctgcccgtatgctgctcctgaagggctttgggaaggacggatttcggttcttcacaaattttgaatcaaggaaaggtaaagagctagattctaatccgttcgcgagtctggtcttctactgggagcccctgaatcggcaatacctgaggaaaaagaacgaggaattggaacagctgtaccaggatcaagaggtgcctaaacccaagagctgggggggatacgtgctctatccccaggtgatggagttctggcaaggccagaccaacaggcttcacgataggatcgtattccgcaggggtctccccaccggcgattctcctctggggcctatgactcatcgcggagaggaagactggctgtacgagcgactcgcgccttag

SEQ ID NO: 237511 - DNA, 501 bp, synthetic construct
  misc_feature 1..501: note = Description of Artificial Sequence: Synthetic coding sequence
  source 1..501: mol_type = other DNA
atgctgctgctgaagggattcggtaaggacgggtttagattcttcactaatttcgagtcccggaaaggaaaggagctggacagcaatccctttgcctcgctagtgttctactgggagccattgaataggcaggtaagagtggagggacctgttaagaaactccctgaggaggaggcagagtgttacttccactccaggcccaaatccagtcaaatcggggcagtggtctcacaccagtcttctgtgatacctgatagggaatacttaaggaagaaaaatgaagaactcgagcagctctaccaggaccaggaagtaccgaagcctaagtcttggggaggttacgtcttgtatccacaagttatggaattctggcaggggcaaaccaatagattgcatgaccgtattgttttcaggagagggctacccactggggactctccactggggcctatgacgcaccgcggagaggaggattggttatacgagcgactggcaccatag

SEQ ID NO: 237512 - DNA, 732 bp, synthetic construct
  misc_feature 1..732: note = Description of Artificial Sequence: Synthetic coding sequence
  source 1..732: mol_type = other DNA
atgacttgctggctgagaggcgtgaccgcaacattcgggagacctgccgaatggcccggttatctatcacatttgtgtggtagaagcgccgcaatggatttggggcctatgagaaaatcatacaggggagacagggaggcttttgaggaaacccatttaacctcccttgatccggttaaacaatttgctgcttggttcgaagaggcagtccagtgtccagacatcggcgaggccaatgctatgtgtctagcaacgtgcactcgcgacggcaagccctctgctaggatgttgctcctgaagggctttggaaaagatggattccggtttttcacaaacttcgagtcaagaaagggaaaggaactagttcgcgtggagggaccggtgaaaaaattacccgaagaggaggcagaatgttactttcacagcaggcctaaaagctcgcaaatcggtgctgtagttagccaccaatccagtgttattcccgatcgcgaatatcttcgaaaaaaaaacgaggagctcgagcaactctaccaggatcaggaggtaccgaagcccaaatcttggggagggtatgtgctgtatccgcaggtaatggaattttggcagggccagacaaatcggcttcacgacagaatagtatttaggagggggctcccaaccggagactcccctctgggcccaatgacccacaggggagaagaggactggctctacgaacgcctggcaccttag

SEQ ID NO: 237513 - DNA, 1098 bp, synthetic construct
  misc_feature 1..1098: note = Description of Artificial Sequence: Synthetic coding sequence
  source 1..1098: mol_type = other DNA
atggccagtactgaaagcagcctgttgaggtcccttggcctcagccccggacccggttcatctgaagtggaactggattgctggtttgacgaagatttcaagttcatcctgcttcctgtgagttacgcagtagttttcgtgttgggactgggcttgaacgccccaactctctggctgtttatttttagactgcgaccgtgggacgcaacagccacctatatgttccaccttgctctgtcggacaccctgtatgtcctgagcttgccaaccctgatctactattacgctgcccataatcactggccattcgggacggagatctgcaagttcgtgcggttcctgttctactggaacctctattgttcagtgctcttcctcacatgtatcagtgtccacaggtatcttggcatctgccaccccctacgggcactgagatggggcagacctcgtctggccggactcctctgcttagctgtttggctggtggtggctgggtgccttgtgcctaacctgttcttcgtgaccacatcgaataagggaacgactgtgctgtgtcatgataccaccagaccagaggagtttgatcactatgtgcatttttcgtctgccgtgatggggctgctcttcggagtgccctgcttagtgacactggtctgttacggtctgatggcgcgtcggttataccagcctctgcctggatccgctcaaagtagcagccgccttaggtccctccgaactattgctgtcgtgctcacagtttttgccgtctgcttcgtcccattccacataaccagaactatatactatctggccagactgcttgaagctgattgcagagtcctgaacattgtaaatgtggtgtataaggttactcggcctctcgcttctgccaacagctgcctggatcctgtcttatatcttttgaccggtgataagtaccgccgacaattgagacaactgtgtggcggtggtaagccgcagccaaggacggcagccagctccttggccctcgtcagtctgcctgaagacagcagctgtcgctgggctgcaacgccccaggacagctcgtgcagcacgccgcgagcagatcgcctgtag

SEQ ID NO: 237514 - DNA, 987 bp, synthetic construct
  misc_feature 1..987: note = Description of Artificial Sequence: Synthetic coding sequence
  source 1..987: mol_type = other DNA
atggaatgggataacgggaccggccaagcgttgggtttgcctccaaccacttgtgtgtaccgcgagaacttcaagcagctcttactacctccagtgtattctgcggtactggccgctgggcttcctctgaacatttgcgtcatcacccaaatctgtacatcccgtagagctctcacccgaacagcggtatatacactgaatctcgccctggcagaccttctttatgcttgctcgttgccactgctgatctacaactatgctcagggagatcattggccatttggcgacttcgcctgccgactggtgaggtttttgttctacgcaaatttgcatggcagtattctcttcttgacgtgcatttcatttcagaggtacctgggcatctgtcaccccctcgcaccatggcacaaaagagggggacggcgtgcagcttggctggtgtgtgtggccgtgtggctggccgtcactacacagtgcttaccaacagcaatcttcgcggcaaccgggatccagcgaaatcgaaccgtttgttatgacctgtccccacctgccttggctacccactacatgccatacggcatggccctgactgtcataggcttcctactgcccttcgctgcgctgttagcctgctattgcctgctcgcttgccgcctttgtcgtcaggatggccctgcagagcctgtcgcccaagagcgaagaggcaaggccgctagaatggccgttgtcgtggcggctgccttcgccatctcctttttgccattccacatcacaaaaaccgcctacctcgctgtacggagcacacccggagtcccatgcaccgtcctcgaggcttttgctgcagcctacaaaggaacacggccttttgcctctgccaattcagtgctggatccaatccttttctactttacacagaaaaaattcagaaggcgcccacatgagttgcttcagaaactgactgcgaaatggcagcggcagggacggtag

SEQ ID NO: 237515 - DNA, 987 bp, synthetic construct
  misc_feature 1..987: note = Description of Artificial Sequence: Synthetic coding sequence
  source 1..987: mol_type = other DNA
atggagtgggacaatggcactggtcaagctctcggactcccgccaaccacgtgtgtttacagagagaattttaaacagctgctgctgcctcctgtctatagcgcggtgctcgcagccggtctgccactcaacatttgcgttatcacccagatctgcacctctcgccgagccctgacaagaactgccgtgtacaccctgaaccttgcacttgcagacctcctgtatgcctgctcattgccactccttatctataattatgcccagggtgatcactggcccttcggcgattttgcttgccggctggtcaggttccttttctatgcaaacttgcatggttcaatccttttcctgacttgcatctccttccagcgttatttgggcatctgtcatcccctggccccatggcacaagcggggagggaggagagcggcatggctcgtttgcgtagcagtctggctggctgtcaccactcaatgcctgcccactgccatatttgccgcaaccgggattcagagaaatagaactgtgtgctacgatctgtcccctccagcccttgcgacgcattatatgccttacggaatggccttgactgtgatcgggttcctcttaccttttgccgcactgcttgcttgttactgtctactggcctgccgcctctgcaggcaggacgggccagcggagcccgtagcacaagagaggcgtggcaaagccgcaaggatggcagtcgtcgtagccgctgcattcgcgatttcttttctgcctttccacatcacgaagacagcttacctggccgtgcgctctaccccgggagtcccttgtaccgtactggaagccttcgccgctgcttataagggcacaaggccctttgccagcgcgaactctgtgctcgaccctatcctcttctactttactcagaagaagttccggcgacgaccgcacgagcttctccagaagcttactgcgaaatggcagcgacaagggcgatag

SEQ ID NO: 237516 - DNA, 987 bp, synthetic construct
  misc_feature 1..987: note = Description of Artificial Sequence: Synthetic coding sequence
  source 1..987: mol_type = other DNA
atggagtgggacaatggaacagggcaggccttgggattgccccctaccacctgtgtgtatagagagaattttaaacaactcctcctcccaccagtgtacagcgccgtgctggccgcaggcctgcctcttaatatatgcgttatcactcagatatgtacttctaggcgcgctctgactcgcaccgcagtttatacccttaacctggccctcgcagatctcctttacgcgtgtagcctcccgcttctgatctacaactatgcacagggagaccattggccatttggcgattttgcctgcagactggtgcgatttctcttttatgctaatcttcacggcagtattttgtttttaacttgtatctcattccagcggtaccttgggatctgccaccctcttgcaccttggcataagagaggaggccgaagggctgcctggctagtctgtgtggcggtatggttagctgtgactactcagtgtttgcccacggcgatattcgcggctaccggcatccagaggaatcgcactgtatgctatgacctgtcacccccagctcttgccacacattacatgccgtacggcatggccctcactgttatcgggtttttgttgcccttcgccgctctccttgcttgctactgccttttagcttgtagattgtgtcgccaggatgggccagcagagcccgtggcccaagagagacgtggaaaggccgctcggatggcagtggtagtggccgcagcattcgcaatctctttcctgcccttccatattacgaagaccgcttacctcgccgttcggtccacccctggcgtcccctgcacagttctagaggcctttgcggcagcctataaaggtacccgcccattcgcatcagccaactctgtgctggatcctatattgttttattttacccaaaagaaattccggagacgtcctcacgaactgcttcagaagctcactgctaaatggcaacgacaaggaaggtag

SEQ ID NO: 237517 - DNA, 987 bp, synthetic construct
  misc_feature 1..987: note = Description of Artificial Sequence: Synthetic coding sequence
  source 1..987: mol_type = other DNA
atggagtgggacaatggcacaggccaggcgctggggctgccccctacaacatgcgtataccgagaaaacttcaagcaactactcctgccgcctgtgtattccgctgtgctggcggctggcctacccctaaacatctgtgtaattacacagatctgtactagccggagagccctcacaagaaccgccgtgtacactctgaatctggccctcgccgacctgctttatgcttgttccctgcccctgctgatttacaattatgctcagggcgaccactggccatttggggacttcgcatgtcgcctagtgagattcctcttctatgccaacttacatggatccatcctgttcctaacctgcatctcattccagcgctatctgggcatctgccatccacttgcaccttggcacaagaggggcggaaggcgcgctgcctggcttgtgtgcgtcgctgtctggctcgcagtcacaacccaatgcctgcccaccgctatctttgccgctactggcattcaacggaatagaaccgtgtgctacgatttatccccgccagcccttgccactcactacatgccctacgggatggcgctgacagtgattggatttctgctgccgtttgcagcacttttggcctgctactgcctcctggcctgccggttatgcagacaggacggtcccgctgaaccggtagctcaggagaggagaggtaaagccgctcgcatggcagtggtggtggccgctgcattcgccatctcctttctaccatttcacatcactaagacagcctatctggcagtccggtctacccccggagtgccttgtacagtccttgaggccttcgccgctgcctataagggtacccgaccctttgcaagtgccaacagtgtcctggacccaatcctgttctattttacacaaaaaaagttcaggcggaggccacacgagttacttcagaagttaacagcaaagtggcaaaggcaggggagatag

SEQ ID NO: 237518 - DNA, 738 bp, synthetic construct
  misc_feature 1..738: note = Description of Artificial Sequence: Synthetic coding sequence
  source 1..738: mol_type = other DNA
atggagtgggataacggaaccgggcaggctctcggattacctcccacaacctgcgtgtaccgggaaaactttaaacagcttctattaccgcctgtgtacagcgccgtactggcggctggtttgcccctgaacatttgcgtgattacacagatatgcacctctaggcgagcactcaccaggacagcagtgtatacccttaatctcgcattagctgatctgctctacgcgtgttcgctgcctctgctaatctacaactatgctcagggagatcactggcccttcggcgacttcgcctgtagattagttcggttcctattctacgccaatttgcatggctccatcctcttcctgacgtgcataagcttccagcgctatctgggcatctgccacccactggcgccatggcataagcgcggaggaaggagagcagcatggctggtgtgcgtggccgtctggttagcagtcacgacgcagtgcctgcctacagctattttcgctgccaccggtatccagagaaacagaaccgtgtgctatgatctcagcccacctgccttggccacccactatatgccttacgggatggcactgactgttatagggttcctgttaccatttgccgctctcctggcatgctactgtctcctggcctgtaggctgtgccggcaggatggtccagccgaacccgtcgcacaggagaggcgcggaaaagctgcacggatggccgtggtggtcgcatag

SEQ ID NO: 237519 - DNA, 987 bp, synthetic construct
  misc_feature 1..987: note = Description of Artificial Sequence: Synthetic coding sequence
  source 1..987: mol_type = other DNA
atggaatgggacaatgggaccgggcaggcactcggtctcccacccacaacctgcgtataccgggagaacttcaagcagctactcctccccccagtgtactcagctgtgttagcggcaggacttcctttgaatatctgcgttatcacacagatatgtacgagccggcgagccctgactagaacagccgtctataccctgaacctggctctggctgacttgctttacgcctgcagcctccccctgctgatctacaattacgcccaaggtgatcattggcccttcggcgactttgcatgcagactcgtacggttcctcttttatgctaacctccacggctccattcttttcttaacttgtatctcctttcagagatatctgggcatatgtcatccattggctccatggcacaagcgaggaggcagacgcgcagcatggctggtgtgcgtcgcagtgtggctagccgtgacaacgcagtgtctgcccacagcaatcttcgcggctacaggcattcagcgaaatcggaccgtgtgctatgatctgtcccccccagctctggctacccactacatgccatacggcatggctcttacagtgattggctttcttttgccctttgccgctctgttggcgtgctattgcttactcgcatgccgcttgtgccggcaggacggccctgccgagcctgtggcccaggagaggcgcggtaaggcggctcgcatggcggtggtcgttgctgccgctttcgccatctcattcctgccctttcacattacaaaaacagcatacctcgccgtcagatctactcccggagtgccatgtaccgtgctcgaagcatttgcggctgcgtacaaaggcacaaggcctttcgctagcgctaactccgtcctcgatcccatcctattttattttacccagaagaagttccggcgacgacctcatgagcttctgcagaagctgaccgcaaagtggcagaggcagggcaggtag

SEQ ID NO: 237520 - DNA, 987 bp, synthetic construct
  misc_feature 1..987: note = Description of Artificial Sequence: Synthetic coding sequence
  source 1..987: mol_type = other DNA
atggaatgggacaatgggacaggccaggcacttggccttcctccaaccacttgtgtgtatcgagagaacttcaaacagctgttgcttccacccgtgtatagcgcagtgctggctgcgggtctcccgttgaatatatgtgtgatcactcagatctgcacatccagaagggccctgactcggacagcagtgtatactctcaacctagctctggcggatttactgtatgcatgcagcctgcctttactgatctataattacgctcagggcgatcactggccattcggtgactttgcatgcaggttggtgagattcctgttttacgcaaacctgcatggctctatcttattcctcacatgcatcagtttccagcggtaccttgggatttgccaccccctcgccccatggcataagcgcggaggcaggagggccgcttggctcgtgtgcgtagctgtgtggctcgccgtcactactcagtgcctccctacagcaatcttcgcagctactggcatccagagaaacagaactgtctgttacgatttgtcaccacccgcactggcgacacattatatgccctacggcatggctctaactgtcattgggttcctgctcccctttgctgctttgctggcctgttattgcctgttagcgtgtcgcctctgccgccaggacgggcctgccgaacccgtcgcccaagagagacggggaaaggctgcacgcatggcagtcgtggttgccgcagctttcgctatttctttccttccatttcatatcaccaaaactgcctatcttgcggtccgctccacaccaggagttccttgcactgtactagaggctttcgctgccgcttacaaaggaaccaggccattcgccagtgcaaattccgttctcgaccccatactgttttactttacccagaagaaatttagacggaggccccacgaacttctacagaaactaactgccaagtggcagaggcagggtaggtag

SEQ ID NO: 237521 - DNA, 987 bp, synthetic construct
  misc_feature 1..987: note = Description of Artificial Sequence: Synthetic coding sequence
  source 1..987: mol_type = other DNA
atggagtgggataatggtactgggcaagcattgggactacccccaacaacctgtgtgtaccgagagaattttaagcagttgctcttaccacccgtctacagcgccgttctagcagcagggttgcctctgaacatctgtgtcatcacacaaatatgcacctccagacgcgcactgacacgcacagccgtgtatacgctcaacctggctctagcggatctcttatatgcatgttccctccctctgttaatctacaactatgctcagggagatcattggccgtttggagacttcgcatgcaggttagtgaggttcctgttctatgccaacctgcatgggagcatattgttcctgacttgcatcagcttccagcggtatttgggtatctgtcatccgctggccccttggcataagcgcggaggcaggcgggcagcctggcttgtctgcgtggcagtttggctggccgtcactactcaatgtcttccaacagccattttcgcggctaccggaatccagcggaatcggactgtatgttatgacctcagtccccctgcactcgccacacactatatgccgtatggcatggctcttactgtaattggcttcttgctcccatttgcagcgttattggcctgctattgcttgttggcctgtagactgtgccgacaagatggaccagccgaacccgtagctcaagagcggcgagggaaagcagccagaatggcggtggtggtggctgcggcattcgctatcagcttcctgccatttcatatcaccaaaacagcgtatctggccgtgcgatctacaccaggcgttccttgcacggtcttggaggccttcgctgcggcatacaagggcacccgcccttttgcatccgctaactcagttttagaccccattttattctacttcacgcaaaaaaagttcagacgcagaccacatgagctgttacagaaactgacggccaaatggcagcggcagggcaggtag

SEQ ID NO: 237522 - DNA, 987 bp, synthetic construct
  misc_feature 1..987: note = Description of Artificial Sequence: Synthetic coding sequence
  source 1..987: mol_type = other DNA
atggagtgggacaacggaacagggcaagctctgggtctgcctcccactacttgtgtctacagggaaaacttcaagcagctcctcctgcctccagtttatagtgctgtgctcgctgccggtttacctttaaacatttgtgtgatcactcagatttgtacgagccggagagccctgacaaggactgctgtgtatactctaaatttggctcttgccgacctcctctacgcttgcagtctgcctctcctgatttataactatgcccagggtgaccactggccattcggggatttcgcctgccgacttgtccgctttctattttacgctaatctccacggatctatcctgttcttaacgtgcatctccttccagcgctacctagggatctgtcatcctttggccccttggcacaaacgcggaggcagacgcgctgcatggcttgtctgcgttgctgtttggttggcggtcacaacacagtgtctcccgacagccatattcgccgctactggaattcagcgaaacaggactgtctgctacgatctttctccacccgcactggctacacactatatgccctacggaatggcattaacagtgattgggttcctgctgccattcgccgctttactcgcatgctactgcctcctggcctgcaggctctgtcgacaggacggtccagccgagccggtcgcccaggagcggagaggcaaggctgcaaggatggctgtcgtcgtggctgcagcatttgccatctcgttccttccattccatatcactaagacagcctatttagctgtgaggtccactccaggcgtgccttgcacagttctggaggcatttgctgcagcatacaaaggaacccgaccctttgcctcggccaattctgtgctcgaccctattctgttctactttacgcagaagaagttccgcagaagacctcatgaattactccagaagttgacagctaaatggcagcggcagggaagatag

SEQ ID NO: 237523 - DNA, 387 bp, synthetic construct
  misc_feature 1..387: note = Description of Artificial Sequence: Synthetic coding sequence
  source 1..387: mol_type = other DNA
atggaatgggacaacgggacgggccaggctcttggtcttcccccaacaacatgcgtttacagggagaatttcaaacagctgctcctcccccctgtgtacagcgccgttttggcagctggcctgccacttaatatatgcgtgatcacccagatttgcaccagccgcagagccctgacaaggactgcagtgtacaccctgaacctggcattggccgacttgctctacgcttgcagcctcccattgctaatctataactatgcccagggcgaccattggccattcggtgacttcgcatgtaggctcgtgcggtttctgttctacgctaatctgcatggttctatattatttctgacctgtatttctttccagagatatctggggatatag

SEQ ID NO: 237524 - DNA, 738 bp, synthetic construct
  misc_feature 1..738: note = Description of Artificial Sequence: Synthetic coding sequence
  source 1..738: mol_type = other DNA
atggccaacaactataagaagatcgtgctcctcaagggattggaggttatcaacgattatcacttcagaatagtgaaatcgttgctctccaacgacttaaaactgaaccccaagatgaaagaagaatatgacaagatccagattgcagatctgatggaagaaaagtttcctggggatgccggactaggcaagctgatcgaattctttaaggaaatcccaacattaggagatcttgccgaaactctgaagcgcgagaagttaaaagtcgcaaataagatcgagtccattcccgttaaagggatcattccttcaaagaagacaaaacagaaagaagtgtacccagccactcccgcttgcacaccatctaatcggcttacagccaaaggcgcagaggagacacttggtccccagaaacgcaagaagccgtccgaagaagagacaggaacaaagcggagcaagatgagtaaagagcagacacggccttcttgttcggctggtgcatcaacctccaccgctatggggagaagcccgcctccccagaccagctctagtgctccccctaacacatcatcaactgaggcctatctgatgaatttgactctaagcctaaccgccggaagctttcttagttgcgcagtgtggggaagagatcgtgagctgagaaaccttgagctcagcgctacagatagcctgtcgacggcacccatctactatacacctattcctttcgcacattag

SEQ ID NO: 237525 - DNA, 1452 bp, synthetic construct
  misc_feature 1..1452: note = Description of Artificial Sequence: Synthetic coding sequence
  source 1..1452: mol_type = other DNA
atggctaataactacaagaagatagtcctgctgaaggggctcgaggttatcaacgattaccacttccgcatcgttaaatccttgctgagcaacgatctgaagctgaaccctaagatgaaagaggaatatgataagatccagatcgcggacctgatggaggagaaatttccaggagatgccggtctggggaagctcatagagttcttcaaagagatcccaaccttgggcgacctggccgaaacactgaagcgcgagaagctgaaggtcaaaggtattataccgagtaagaagactaaacagaaagaggtatatcccgcaacccctgcctgtacccctagtaatcggctcaccgccaaaggagccgaggaaactttggggccacaaaaaaggaagaaaccctccgaggaagaaactggcacaaagcggagcaaaatgagtaaagaacaaaccagaccaagctgttccgcaggagcttcaacttctaccgcaatgggcagatcccctccgcctcagaccagttccagcgcaccccctaacacgtcttccaccgagtcccttaaaccactggccaatcgccacgccaccgccagtaaaaacatttttcgtgaagaccctattattgcaatggttctcaatgcgaccaaagtcttcaagtacgagtccagtgagaacgagcagcgacgcatgttccatgccacagtcgccacacagactcagtttttccatgtgaaggtcctcaacatcaatctgaagcgaaaattcattaagaaacgcataattattatcagcaactactcgaagcggaatagtttgctcgaagttaacgaggccagttccgtctcggaagccggacccgaccagaccttcgaggtgcctaaagacattatccgaagagctaagaagatcccgaagataaatattttgcataagcagaccagcgggtatatcgtgtatggcttatttatgctgcatacgaagatcgtcaatcgcaagaccacaatatatgaaatacaggacaaaactgggtctatggccgtggtgggaaagggcgagtgccacaatatcccatgcgagaagggcgataagcttcgcctgttttgttttaggctgcggaagagagagaatatgtctaagcttatgtcggagatgcattcttttatccagatccagaaaaataccaaccaacgatctcatgatagtagatctatggcccttccacaggagcagtcccagcatccaaagccctccgaagccagcacgacactgcccgaaagtcaccttaagaccccacaaatgcccccaactactccctccagttctagctttaccaagaaagatgagacccatccaggcgcacagagctcccctgctaatttccgcattacatcacccactgtggcgccaccattgtcctctgacacctcaaccaatagacaccccgctgtgccatag

SEQ ID NO: 237526 - DNA, 1479 bp, synthetic construct
  misc_feature 1..1479: note = Description of Artificial Sequence: Synthetic coding sequence
  source 1..1479: mol_type = other DNA
atggcaaataattataaaaaaattgtgctcctgaaggggctggaagtcatcaatgactatcattttagaattgttaaatcacttttgagcaatgatttaaagctgaaccctaaaatgaaagaggagtacgataaaatccagattgccgacttaatggaggaaaagtttccgggagatgcaggcttaggcaaacttattgagtttttcaaagagatacccacactcggagaccttgcggagacgttgaagcgcgaaaaactgaaagtggccaacaagattgagtctatacccgtcaaaggcatcataccgagtaaaaagaccaaacaaaaagaggtctaccccgcaacgccagcctgtactccctcaaatagattaacagccaagggagccgaagagacactcggtccccagaagcgaaagaagccttcagaagaagaaaccggaacgaaacggagtaagatgtctaaggagcaaacaagacccagctgcagcgctggggcttccacaagcacagccatgggtaggagtccccctccacagaccagcagcagtgccccaccaaacacatccagcaccgagagtctaaaacccctggccaacagacacgcaacagcgagcaagaatattttccgcgaggatccaattatcgctatggtgctcaacgcgactaaggtgtttaaatatgaaagttccgagaacgagcagcggagaatgtttcacgccaccgtggctacccagacccaattcttccatgtgaaggtcctgaacatcaacttaaagcggaaattcataaagaaacgaatcattatcatcagtaattacagcaagcgtaactccctactcgaagtcaacgaagcttcctctgtgtccgaggcagggccagaccagacctttgaagtacctaaggacataattcgaagagcgaagaaaattcccaagattaacattctgcacaagcagacaagcgggtacatcgtgtatggccttttcatgctgcataccaaaatcgtgaacagaaagacaaccatttatgagattcaagataagacaggctctatggctgttgttgggaaaggggaatgccacaatatcccatgcgaaaaaggagacaagctgcggctgttttgtttccgcttgcggaagcgggagaatatgagtaagctcatgtcagaaatgcactcattcattcagatccagaaaaacactaatcagcgctcccatgactcccggagtatggctttgccacaggaacagtctcagcatccaaagccatctgaggccagcactaccttgccagagtcacatcttaagactccacagatgcctcctaccacccccagctccagttctttcacaaagaaagacgagacgcacccaggagctcagagcagcccggctaatttccggattacttctcccactgttgcgcctcctctgtcaagtgatacctccacaaataggcatccagctgtgccctag

SEQ ID NO: 237527 - DNA, 1359 bp, synthetic construct
  misc_feature 1..1359: note = Description of Artificial Sequence: Synthetic coding sequence
  source 1..1359: mol_type = other DNA
atggccaacaactataagaaaatagtgctcctgaaagggttggaggtaatcaacgattaccattttaggattgtgaaaagcctcttatcaaacgacctgaagttgaatccgaaaatgaaggaggagtacgataagatccagatcgccgatctgatggaggaaaagtttcctggggacgccggtcttggaaagttgatcgagttttttaaagagataccaactctcggcgacctggctgagaccctgaaaagagaaaagctgaaagttaagggcataattccatccaagaagacaaagcaaaaggaggtttatccagctactccggcatgtacaccttccaacagacttaccgccaagggtgctgaggagaccctgggcccacagaagagaaaaaagccttcagaagaagagacagggactaaacggtctaagatgagcaaagagcagaccaggccgtcgtgctccgctggagcctccacatctaccgccatgggacgaagcccccctcctcagacctcaagtagcgctcctccgaacacctcttcaaccgagtccctcaagccactggccaatcgtcatgccaccgcatcgaaaaacatcttcagggaagacccaataatcgcaatggttcttaacgcgacaaaggtgtttaaatacgagtcttctgagaatgaacagcgtcggatgttccacgcgacagtagcaactcagacccagttctttcacgtcaaggtcctgaacatcaacttgaagagaaaatttattaagaaaagaattatcattatttccaactactccaaacgaaactcactgttagaagtgaacgaagcctcctctgtgagtgaggctggacccgatcagacatttgaggtccccaaagatatcatccgcagagctaagaagatacctaaaataaacatcctccataagcagaccagtggttacatagtgtacgggctgttcatgctgcacacaaagatcgtgaatcgcaagaccactatttatgagatccaggacaagactggtagcatggctgtcgtgggcaaaggtgaatgccacaatattccttgcgagaagggagataagctgcgtctgttttgctttaggctccgaaaacgtgaaaatatgagtaagctgatgtcagaaatgcacagcttcatccagatacagaagaacactaatcaaaggtctcatgatagcaggtctatggctcttccccaagaacaatcccaacacccgaagccgagcgaggcgagcactaccctcccagaaagccatctgaaaaccccgcagatgcctcccacgacaccttcttcgagcagttttaccaaagtgacgaaggataaagacatcaagtag

SEQ ID NO: 237528 - DNA, 1386 bp, synthetic construct
  misc_feature 1..1386: note = Description of Artificial Sequence: Synthetic coding sequence
  source 1..1386: mol_type = other DNA
atggccaacaattataaaaagattgtgctgctgaaaggactcgaggtaatcaatgactaccattttcggatagtgaagagtttactctctaacgatttgaagctgaacccgaagatgaaagaggagtacgacaaaatacaaatcgccgacttaatggaagagaaatttcctggagacgccggtctgggcaagcttatcgagttttttaaggagatccccacactcggagaccttgctgagaccctgaagagggaaaagttgaaggtggcaaataagatcgagtcgattcccgtcaagggtatcatcccgagtaagaagacgaaacagaaggaggtgtacccagccacaccagcctgcaccccttcaaaccgcctcaccgcaaagggcgctgaggaaacactgggaccccagaagcggaagaagccttcagaggaggagactggcacgaagaggagtaaaatgagcaaagaacagacgcgcccaagctgttctgccggagcctccacctccactgccatgggaaggtctccccctccacagacttccagttcagctcccccaaacacctcctccacagaatcactgaagccactcgctaacaggcacgctacagcatccaagaacatttttcgggaggaccccattatcgctatggtgcttaacgccaccaaggtgttcaaatacgaaagttccgagaacgagcaaagacgcatgtttcacgcgacggtagctactcaaacacagtttttccatgtgaaggtactgaatatcaatctcaaacgcaaatttattaagaagagaattatcatcatttcaaattactcaaaacggaactctttattagaggtgaatgaggcctcaagcgtctctgaggctggacctgaccaaaccttcgaagtgcctaaggatattatccggagagccaagaaaatccccaaaattaacatcctccataaacagacatccgggtatattgtgtatggtttattcatgctgcacaccaagatcgtcaaccgaaagacgactatatatgagatacaggacaagaccggaagcatggctgtagtggggaaaggggagtgtcacaacataccgtgcgaaaaaggagacaagctccgattattttgttttcggctgcgtaaacgtgagaacatgagtaaattgatgagcgagatgcacagcttcattcaaattcagaagaatactaatcaacggtcccacgatagccgcagtatggccctcccacaggagcagagccagcatcctaaacctagtgaggcttcgaccacgctccccgaatcacaccttaaaacacctcaaatgccaccaactactccctcttctagctcgtttacaaaggtaaccaaggataaggacattaaatag

SEQ ID NO: 237529 - DNA, 453 bp, synthetic construct
  misc_feature 1..453: note = Description of Artificial Sequence: Synthetic coding sequence
  source 1..453: mol_type = other DNA
atggctaacaattataagaagattgtgttgctaaaggggctcgaagtgatcaatgactaccatttcagaatcgtaaaatctctcctgagtaatgatctcaagcttaaccccaagatgaaggaggagtatgacaagatccagatcgccgatctgatggaggagaaattcccgggagatgcgggactagggaaattaatcgagttcttcaaggagattcctacgctgggcgacctcgccgagactctgaaaagggagaaactcaaagtggcaaacaagatcgaatccatcccagttaagggaattattccttccaagaagaccaagcagaaagaggtttatccagccacaccagcttgcacaccctcaaaccgactgaccgccaaaggcgcagaagaaactttgggcccacagaagagaaaaaagcccagcgaggaggagaccgggactaaatag

SEQ ID NO: 237530 - DNA, 399 bp, synthetic construct
  misc_feature 1..399: note = Description of Artificial Sequence: Synthetic coding sequence
  source 1..399: mol_type = other DNA
atggccacaacagtgaccctggaaaagtgtgggcataataagggttataagggattggacaactgtagattttgcccaggctcccaatgttgcgtcgaagacggtcctgagtctatagattcgattattgatatggacgctgtgtgcaaaagggtgaccactttgggtctcgatgtgtctgttactatttctcaagatgccggacgttacctgtgtgattttacttattacacatctctgtaccagagtcatggaaggtcggccttcgtgcacgtccctccattgggcaagccttataacgcagaccagctggggagagccctgagggccatcatagaagaaatgcttgatctcttggagcagtctgaggggaaaatcaattattgtcataagcattag

SEQ ID NO: 237531 - DNA, 630 bp, synthetic construct
  misc_feature 1..630: note = Description of Artificial Sequence: Synthetic coding sequence
  source 1..630: mol_type = other DNA
atggagcagccacggaaggcagtcgtggtgactggctttgggccttttggcgagcacacagtgaatgccagttggatcgccgttcaggaactagaaaaactcggactgggagacagcgtcgacctgcacgtttacgagatacctgttgagtaccagaccgtgcagcggctgatccccgctttgtgggagaaacactcgccgcaacttgtagtacatgtaggggtgagcggaatggctaccactgtgaccctcgagaagtgcgggcacaataaaggttataaaggcctcgacaactgtaggttttgtcccggatcgcagtgctgtgtggaggatggccctgagagtatcgacagcattatagacatggacgcggtgtgtaaaagggtcacgaccctcggcctagatgtgtccgttaccatctcccaagatgccggacgttacctgtgtgatttcacttactacacctcactgtaccagagccatgggaggtctgccttcgtgcacgtcccacccctgggcaaaccctataacgccgaccagctcgggagagccctgcgggctatcatagaagaaatgctggacctgttagaacagtcagaaggtaagatcaactactgtcacaagcattag

SEQ ID NO: 237532 - DNA, 609 bp, synthetic construct
  misc_feature 1..609: note = Description of Artificial Sequence: Synthetic coding sequence
  source 1..609: mol_type = other DNA
atgaaaaaggcacgcaatgatgagtacgagaatcttttcaatatgatcgtagaaattccgcgttggacaaacgcaaaaatggagatcgcgacaaaagaaccaatgaacccaatcaagcagtatgtgaaggacggcaaactgaggtatgtggctaatatattcccttacaaaggttacatatggaattatggcacactcccccagacctgggaagacccccatgagaaagacaagagcaccaactgcttcggtgacaatgaccctatcgacgtgtgcgaaataggatcgaaaatcctgtcctgtggggaagtgatccacgtgaagatactcggcattctggctctgatcgacgagggtgagaccgactggaagctaattgccataaacgccaacgatcccgaagcatccaagttccatgggctccggaacataccagtgtatacaataaatcggattgttatcctccctagcctggatagatcccagacaagctctctatcatatctccccgcacaccaggactcctgtgttccactcgatgccgcacttcacgtagtattatacttctgctcgctgctggggttacagtcctatctgagctgcttttag

SEQ ID NO: 237533 - DNA, 1005 bp, synthetic construct
  misc_feature 1..1005: note = Description of Artificial Sequence: Synthetic coding sequence
  source 1..1005: mol_type = other DNA
atgtccgctcttctgaggcttcttagaactggcgctccggctgcagcatgcctgcggctgggaacaagcgccggtactggcagtcgcagagccatggccctgtaccatacggaggagagaggccagccctgtagccaaaattataggttattctttaagaatgtgactgggcactacatcagccccttccacgacatcccactgaaggtcaactccaaagaggagaatggaatacccatgaagaaagccaggaatgatgagtatgaaaacctgtttaacatgattgtggaaatccctaggtggacaaatgccaagatggagatcgccacaaaagagcccatgaacccaatcaaacagtacgttaaggatggcaaactaagatacgttgccaatatcttcccttacaaggggtacatttggaactacggtacattgccgcaaacttgggaagacccacacgagaaggataagagtaccaattgcttcggggacaatgaccctatcgatgtgtgcgaaatcggtagcaaaatcctgtcatgcggagaggtgatccatgtgaagattctgggtatcctggcccttatagacgaaggcgaaactgattggaagttgatcgcaatcaacgccaacgaccctgaagctagtaagtttcacgatatcgatgacgtgaaaaaatttaaacctggctacctcgaggcaaccctgaactggttcagactttacaaggtgccagacggcaaacctgagaaccagttcgccttcaacggggagttcaaaaacaaggccttcgctcttgaagtcattaaatctacccaccagtgctggaaggccctgctgatgaaaaagtgcaatggtggagcaataaactgcacaaacgttcagatctctgatagcccttttcgctgcacccaggaagaggcgcgatctctggtggagtccgtaagctcatcccctaacaaagaaagcaacgaagaggaacaggtgtggcatttcttaggcaaatag

SEQ ID NO: 237534 - DNA, 918 bp, synthetic construct
  misc_feature 1..918: note = Description of Artificial Sequence: Synthetic coding sequence
  source 1..918: mol_type = other DNA
atgagcgccttattgcgtctgttgcggactggcgctcccgctgctgcctgtttgcggttgggtacgagcgctggtacaggcagccgccgtgccatggctctgtatcacacggaggagaggggacagccatgttctcagaactaccggttgttctttaaaaatgtgacgggacattatatctcgcctttccacgacattcctttaaaggtgaactcgaaagaagagaacggaatccccatgaaaaaggccagaaacgacgagtacgagaatttgtttaatatgatcgttgagatccccaggtggaccaacgcaaagatggaaatcgccactaaggaaccaatgaatcccattaaacagtacgtgaaggatggaaaactccggtacgtggctaacatcttcccctataaaggttatatttggaactacgggacccttccccagatactctcttgcggcgaagttattcacgtgaagatactagggattttggctcttattgatgagggcgagactgactggaagcttatagcgatcaacgctaatgatccggaggcctcaaagtttcacgacatagacgatgtcaagaaatttaagccaggctatttggaagcaacgctcaactggttccgcctgtataaggtccccgacggcaaacccgaaaaccagtttgcattcaatggagagttcaaaaacaaagcgttcgcactggaagtgattaaatcaacccaccagtgttggaaggcacttctgatgaagaagtgtaacggcggagctatcaactgcactaatgtccagatctcagattctccttttcggtgcactcaggaggaagctaggtccctggtcgaaagcgtgagcagctcaccaaacaaggagagtaacgaagaagagcaagtgtggcatttcctggggaagtag

SEQ ID NO: 237535 - DNA, 507 bp, synthetic construct
  misc_feature 1..507: note = Description of Artificial Sequence: Synthetic coding sequence
  source 1..507: mol_type = other DNA
atgtctgcactgcttagattgttacgcaccggagctcccgcagcggcttgcttgagactaggcacttccgctggtacgggcagtcggcgtgctatggcattatatcatactgaggagcggggtcagccgtgctctcagaactaccgactgttctttaacatagacgatgtgaagaagtttaagccgggatacttagaggccactctgaattggttccgactgtacaaggtgcctgatgggaaacccgagaatcagttcgcgtttaatggcgagtttaaaaacaaggcctttgcactggaggtcataaagtctacccatcagtgttggaaggcgttactgatgaaaaagtgcaacggaggcgctatcaattgtactaacgtgcagatttctgactcacccttccgttgcactcaggaggaagcacgttcattggtagaaagtgtatcctccagcccaaacaaagaatctaacgaggaagaacaagtctggcattttctggggaaatag

SEQ ID NO: 237536 - DNA, 1050 bp, synthetic construct
  misc_feature 1..1050: note = Description of Artificial Sequence: Synthetic coding sequence
  source 1..1050: mol_type = other DNA
atgagtgctctacttaggctgttacgaacaggggctcctgccgctgcttgccttagacttgggacatccgctggaacgggttcgcgaagggccatggcactttaccatacggaagagcggggtcagccctgctcccagaactaccggctcttctttaagaatgtgaccggccattatatctcaccctttcatgacatccccctcaaagtgaactctaaagaggacaccgaggcccaaggcatatttatcgatctctctaaaatttgggagaacggcatccctatgaaaaaagcacggaacgacgaatacgagaacctgttcaacatgatcgttgaaatacccagatggacaaacgctaaaatggaaatcgcaactaaagaacccatgaatcccattaaacagtacgtcaaggacggcaagctccgatacgtagcaaacattttcccttacaagggctatatttggaactacgggacactgcctcagacatgggaggacccccacgagaaagataaatctactaactgcttcggtgacaatgatccgatagatgtctgtgaaattgggtccaaaatcctgtcatgtggagaggtgatccatgtcaaaattctgggaatactcgcattaattgatgaaggcgagacagattggaagctcattgccatcaatgcaaacgaccccgaagcctccaagtttcatgatatcgacgacgtgaaaaagtttaagccgggttatttagaagctacccttaactggttcagactgtacaaggtgcccgacggcaagcccgagaatcagttcgcttttaacggggagttcaaaaataaggcattcgccttagaggtcattaagtccacacaccaatgctggaaagccctgctgatgaaaaagtgtaacggaggagccattaattgtacaaatgtgcagatctctgactcccctttccggtgcactcaggaggaggctcgtagcttggtcgagtccgtgtctagtagccccaataaagagtcaaacgaggaggaacaggtttggcacttcctgggcaagtag

SEQ ID NO: 237537 - DNA, 951 bp, synthetic construct
  misc_feature 1..951: note = Description of Artificial Sequence: Synthetic coding sequence
  source 1..951: mol_type = other DNA
atgtcggctctgctgagattgttgagaacgggcgcacctgccgctgcctgcctgcggctgggcacctctgcaggcaccgggagtaggagagctatggcgctgtaccacactgaagaacgcggtcaaccatgttcccagaactataggctttttttcaagaatgttaccgggcattatatcagtccatttcatgatattcctctgaaagtcaacagcaaagaagagaacggcattccgatgaaaaaggcgaggaacgatgaatacgagatagctacaaaggaacctatgaaccccatcaagcagtatgtcaaagacggcaagctacggtacgtggccaacattttcccttataaaggctacatatggaactatgggaccctcccacagacatgggaggatcctcacgagaaggacaagtcaacaaactgcttcggcgacaatgacccgattgacgtttgtgagattggcagcaagatcctatcttgcggagaagtgatacatgtgaagatccttggcatactagcgctaattgatgaaggggaaactgactggaagctaattgccattaacgcgaatgacccagaagcgtcaaaattccacgacatcgacgacgttaagaaatttaagcccggatacttggaggctacactcaattggtttcggctgtataaggtccccgatggcaaacctgaaaatcagtttgcctttaacggggagttcaagaacaaggcatttgcattggaggttatcaagtctacacatcaatgctggaaggcactgctgatgaaaaagtgcaacggtggggcaatcaattgcacgaacgtccagatttctgatagtcccttccgctgtacgcaagaagaggctcggtcgctcgtggaatccgttagctcgagccccaataaggagtctaatgaggaagaacaagtgtggcacttcttgggtaagtag

SEQ ID NO: 237538 - DNA, 699 bp, synthetic construct
  misc_feature 1..699: note = Description of Artificial Sequence: Synthetic coding sequence
  source 1..699: mol_type = other DNA
atgtcagcactgcttcgtctgctgcgtaccggggcaccggctgcggcatgtctcagattgggtacctcagccggtacgggctccaggcgcgcaatggccctgtatcatactgaagaaagaggccaaccctgtagtcagaattacaggttattttttaagaacgttaccggtcattacatctctccttttcacgatattccccttaaggtgaacagcaaggagatactgagctgcggcgaggtgatccacgtaaaaattttagggatactggcacttatcgacgagggagagaccgattggaaattaatcgccattaatgctaatgatcctgaggcctcaaaatttcacgacatcgatgacgtcaaaaaatttaagcccggttatctcgaggccactctcaattggtttaggctgtacaaggtgccagacggcaaaccagagaatcagtttgccttcaacggcgaatttaaaaacaaggcatttgcgttggaagttattaagtccactcaccagtgctggaaagccctcctgatgaagaaatgcaacgggggtgctatcaattgcacaaacgtgcagatttccgactcacctttccgctgtacacaggaggaggcaaggtctctagtagaatctgtgagctctagtcccaataaagagtccaacgaggaagagcaggtatggcactttttgggcaagtag

SEQ ID NO: 237539 - DNA, 960 bp, synthetic construct
  misc_feature 1..960: note = Description of Artificial Sequence: Synthetic coding sequence
  source 1..960: mol_type = other DNA
atgtcagttggatttatcggcgcaggacaactggcctttgcacttgctaaaggcttcacagcggcaggcgttctggctgcccacaagattatggccagcagccccgatatggacctcgccactgtcagcgcactgaggaagatgggcgtgaaattgaccccccataacaaggaaaccgtgcagcacagtgatgtgctgtttcttgcagtaaagcctcatatcattccctttatacttgacgagatcggcgcagacattgaggatagacatatcgttgtatcatgtgcagccggtgtgacaatttcatcgatagaaaaaaaactttctgcgttcagaccagctccccgagttattaggtgcatgaccaacacgccagtagtggtgagagaaggggctaccgtgtacgccacaggaacccacgcccaagttgaggatggccgtctgatggagcagctgttgtcaagcgtgggattctgcaccgaggtggaagaggatttaatagatgccgtcaccggcttgtctgggtctggacctgcctacgcgttcactgccctcgatgccctggcagatggcggtgtgaagatgggcttgccacgtcgactcgctgttaggctcggagcccaagcattgctgggagcagccaagatgctactccacagtgaacagcatcccggtcagttgaaggacaacgtttcctcacctggaggcgctactatacacgcattgcatgttctagagtctgggggtttccgcagcctgttaataaacgccgttgaagcaagctgtatcagaaccagagagctgcaatctatggcagaccaggagcaggtgagccccgcagctattaagaagactatactggacaaggttaagctagacagccccgcaggcacagctctgagcccttccggccacacaaaattgttacccagatcgcttgcgcctgctggcaaggactag

SEQ ID NO: 237540 - DNA, 951 bp, synthetic construct
  misc_feature 1..951: note = Description of Artificial Sequence: Synthetic coding sequence
  source 1..951: mol_type = other DNA
atgtctgttggtttcattggtgcgggacagttggcattcgccttagcaaaaggcttcactgctgcaggagtgcttgccgcacataagatcatggcctcaagccctgatatggaccttgccacagtctctgcattgagaaagatgggagtcaaattgacaccccataataaggaaacagttcagcactccgacgtacttttcttggcagtgaagcctcacatcattcccttcatcctggacgagatcggggcagatatcgaagaccgccacatcgtagtgtcctgtgctgcgggtgtcacaatttcgtccatcgaaaagaagctctcagccttccgtcccgctccgagggtcattaggtgtatgactaataccccagtggtggtgcgagagggcgcaacagtatacgccacgggaacacacgcgcaggttgaggatggacgtcttatggaacaactgctctctagtgtgggcttctgcacagaagtcgaagaagatttgatcgacgcagtcaccgggttgagcggatccggacccgcttacgccttcacagccctggacgcattggctgatggaggcgtgaagatgggactccccaggaggttggccgtgagactgggcgcacaggcacttcttggtgcagcaaagatgctattgcatagtgaacagcaccctggccagctcaaggataatgtcagttctccgggaggcgcaacaatccacgcattgcatgtcctcgaatccggtggattcagaagcctacttatcaacgcagtggaggccagctgcatccgcactagagagcttcagagcatggcagatcaagaacaagtgtcccctgctgccatcaaaaaaacaatactggataaggaccacctgcccctcgaattgggaagccccgagggtttgcaccctctgctgttgcagtatcagcttgccagagccccttcgtag

SEQ ID NO: 237541 - DNA, 1041 bp, synthetic construct
  misc_feature 1..1041: note = Description of Artificial Sequence: Synthetic coding sequence
  source 1..1041: mol_type = other DNA
atggtgggcggagggagacgcgtagggagggatgaaccggtcccctcggtgggggctctgggccaggggagtccagattctatgagcgttggatttataggagccggacagctggccttcgccctggctaaagggttcacagcagctggtgttttggccgcacataagatcatggcatcctctccagacatggacctggccacggtgtctgctctgcgaaaaatgggcgtgaaactcacccctcataacaaagagactgtccaacactcggacgtgctgttcctggcagttaagccccatattatcccattcatcctagacgaaataggcgcagatattgaagaccgccatattgtcgtgtcttgtgcagccggtgtgaccatctcttcaatcgaaaagaagctcagtgctttccgcccagcccctagggtgatacggtgtatgaccaatactccagtcgtggtgcgtgagggcgcaaccgtctacgcaaccggcacccacgcacaggtcgaagacgggagactgatggaacagctgctgtcgtccgttggattttgtaccgaggtcgaagaggacctgatagacgctgttactgggttgtccggaagcggcccagcttatgcctttacagcactggatgccctagcggacgggggagtgaagatgggcttgcctcgacggctcgccgttcggctgggggcacaggcccttctgggggctgcaaagatgctactgcacagcgagcagcacccaggccagcttaaggataacgtgtcctcgccaggtggtgccactatccatgcattgcacgtgcttgaatcaggtggcttccgctcccttttgattaacgccgtcgaggcgtcatgcattcgcacgcgtgaactgcagtctatggccgaccaggagcaagtgtcacccgcagctatcaaaaagacgatcctggacaaagtcaagttggacagtcccgcaggcacggctttgtcacctagcggtcatactaagctcttgcccagatccttggcacccgctggtaaggactag

SEQ ID NO: 237542 - DNA, 819 bp, synthetic construct
  misc_feature 1..819: note = Description of Artificial Sequence: Synthetic coding sequence
  source 1..819: mol_type = other DNA
atgtccgttggattcatcggggctgggcagttggctttcgcgttggccaaaggcttcaccgccgcaggggttctagcggcacataaaataatggctagctccccggatatggatcttgccaccgtgtctgccttgagaaagatgggcgtgaaactgacaccccataataaagaaactgtgcagcatagcgacgttctcttcctggcagtgaaacctcacattatccccttcattttagacgagattggagcagatatagaggaccgccacattgtggtcagctgtgctgcaggcgttacaatttcttcaatcgaaaaaaaactcagcgccttcaggcccgctcccagagttatccgctgtatgaccaacactcccgtggtcgttcgagagggtgccactgtctacgccactgggacacatgcccaagttgaagacggtagactgatggagcagctcttgagttccgtgggattctgtacagaggttgaggaagaccttatcgacgccgtgacgggcctatcaggatctggtcccgcttatgcatttacagccctagacgccttagcagacggtggggttaaaatggggctccccagacgattagctgtaaggctcggcgctcaggcattactgggcggttgtcaggatgccgctgccctgcgcaccgcacctagacccgcacagggtcagcgacaattgtcatggtggggccatcatccctgtctggcttgtgcgggtgaatgggggctgccattgccggctcatcaacgctgcggaggtctcttgcatcctcacacaggcgctgcagttcatgggtag

SEQ ID NO: 237543 - DNA, 723 bp, synthetic construct
  misc_feature 1..723: note = Description of Artificial Sequence: Synthetic coding sequence
  source 1..723: mol_type = other DNA
atgtccgtggggtttatcggcgcagggcagctcgcattcgcactcgctaagggcttcaccgccgctggcgtgctagccgcacataagattatggcctcttccccagacatggacctggcaacggtatccgccctacgcaagatgggcgtaaaacttactccccacaataaagagacagtacagcacagtgacgttcttttccttgccgtgaagccacacataatatcaatcgaaaaattatcagcctttcgcccagcacctcgtgtgatccggtgcatgactaacactccagtggtggtgagggaaggtgccactgtctatgccacgggtacacacgctcaggtcgaggacggacggctgatggagcaactgttaagttccgtgggcttttgcaccgaagtggaggaggatctcatcgatgctgttactggactgtcgggatccggacctgcatacggggctgccaagatgctcctgcatagcgaacagcacccaggacagctaaaggacaatgtgtccagccctggcggagccaccattcacgcactccatgtgctggagtccggagggttccgatcgttgctcattaacgcggtggaggcttcatgcattcgtactcggtgggccccagccttgccggcatcactggtaagctccccctgcatggccgaagcttctttgacccatatctgctcattcacccactcagccgacacctactag

SEQ ID NO: 237544 - DNA, 1590 bp, synthetic construct
  misc_feature 1..1590: note = Description of Artificial Sequence: Synthetic coding sequence
  source 1..1590: mol_type = other DNA
atgctgaaattcaggaccgttcatggaggtctgagacttttagggatccgacgaaccagcacagcccctgcggcaagtcccaacgtgcgtagactcgagtacaagcccatcaagaaagtaatggtcgcaaacaggggcgagatcgcgatccgtgttttccgggcttgtaccgagctggggattcggacggtggcgatatacagcgagcaggatactggacagatgcaccgacaaaaagcagacgaggcctatctgatcggtcgtggcctggcacccgtgcaggcttacctacatatccctgatattatcaaggtcgctaaggaaaacaacgttgacgcggtccaccccggttatggattcctgagcgagcgggctgacttcgcacaggcatgtcaagatgctggcgtccgcttcattggaccctctccggaggttgtccgaaaaatgggtgacaaagttgaggcaagggccatagcaatcgctgcaggtgtaccagtggtccccggtaccgacgccccaatcacgtcacttcacgaggcccacgaattcagcaacacttatgggttccccattatctttaaggccgcatacggcggagggggtcggggaatgagggtggttcacagctacgaggagttggaggaaaattatactcgcgcatactctgaggctctagcggcatttggaaacggagcactctttgtcgagaaattcatagaaaaaccaagacatatagaggttcagatcttgggggaccagtatggaaacatcctccatttgtacgaacgagactgcagtattcagcgcaggcatcagaaggttgtagaaattgctcctgccgctcatttggatccccagctgcgcactcggctaacttctgattccgtcaagcttgcgaagcaggtgggctacgaaaacgccggaacagttgagtttctggtcgacaggcacgggaaacactacttcatagaggtaaacagtcgcttacaggtcgagcataccgtgaccgaggagatcactgacgtggacctggttcacgcacagatccacgtcgctgagggaaggagcctgccagatctgggtcttcggcaagagaatatacgtattaatgggtgtgctatccagtgccgggtcacaaccgaggaccctgctcggagtttccagcctgataccggtagaatcgaagtctttagatccggcgaagggatggggatcaggctggataacgccagcgccttccagggcgctgttatctctcctcactatgattccctgctggtgaaggtgatcgcacacgggaaggaccatccgactgctgcaaccaagatgagccgggcactcgccgagtttcgtgtgagaggagtgaaggtgcgcaggcaccaggctcagcccctggccgctgctttaggtcgcccttgtggccaggaagcccgtcgccctcaggccgcagtaaccgctcctaccggacccggatcccccaccttggttcgcgtccctcccgctgccagggtactgagctctcgcctcggaggaccttctcaaaccacacccgagaccagtacagaagtgtcgcctacaatccttctctag

SEQ ID NO: 237545 - DNA, 3537 bp, synthetic construct
  misc_feature 1..3537: note = Description of Artificial Sequence: Synthetic coding sequence
  source 1..3537: mol_type = other DNA
atgcttaagtttaggacagtccacggcggactacggcttctcgggatacgtaggacctccaccgcacccgctgcctcacccaacgtaaggaggttagaatataaaccgatcaaaaaagtcatggtggctaaccggggagaaatcgcaattcgcgttttcagagcctgtacagagctggggatcagaacagttgccatctacagcgaacaggatacaggccagatgcacaggcaaaaagcagatgaagcttacctgataggtcggggtctcgctccagtccaggcctacctccacatccccgatatcattaaagtggccaaggagaataacgtggatgcagttcatcccggatacggattcctgtctgaacgcgcagactttgctcaggcgtgtcaggacgcaggtgtccgcttcatcgggccatcccctgaagtagtgcggaagatgggcgataaagtggaggcaagggcaatcgcaatagcagccggagtccccgtcgtccccggaacagatgccccaatcacttccctacatgaagctcacgagtttagtaacacttacggctttccaatcatatttaaggctgcctacggaggtgggggtagaggtatgcgggtggtgcacagttacgaggaattggaggagaactataccagggcttactccgaggctctagccgctttcgggaacggggcactgtttgttgagaaattcattgaaaaaccaaggcatattgaggttcagatccttggggaccaatatggtaatatcctgcacctgtatgagagggactgctcgattcaaagacgacaccaaaaggtggtggaaatcgctcccgcagcacatctcgatccccaacttcgtacacggctaacaagcgactccgtaaaactggctaaacaagtaggatacgaaaatgccggaacagtggaattcctcgtcgaccgtcatgggaaacactactttattgaggtgaactctagactccaggtcgagcacacagtgaccgaggaaattacagacgttgatttagttcatgcccaaatccatgttgccgaaggacgttcccttcccgatttgggtctccgacaggaaaacattagaataaacgggtgtgctatccaatgccgggtgacgaccgaagacccggcacgatcattccagccagacaccgggagaatcgaggtgtttcgatcaggcgagggtatgggaatccggcttgataacgcctccgcatttcagggagcggttatctcaccccactacgattcattgctggtgaaggtgattgcccatgggaaggatcaccccaccgctgcaaccaagatgtctagagcgctcgcagagttccgtgtcaggggagtgaaaacgaatatcgcttttctccagaacgttctcaataaccagcagtttctcgctggaaccgtggacacacagtttatcgatgagaatccagaactcttccagctccggccagcacagaacagggctcagaaactacttcattatcttggccacgtgatggtgaatggacctacaacccccatacctgtaaaggcaagtccttcacctactgatccagtagtgccagccgtgcctatcggcccaccgccagccggttttagagacattctactccgtgagggccctgaggggttcgctagggccgtgcgtaaccatcctgggctgctcttgatggataccaccttcagagatgcccaccaaagcttgcttgcgacacgagtgagaacacacgacctgaaaaaaattgctccctacgtggctcacaatttctcaaagcttttttcaatggagaattggggtggggctacttttgacgtggcaatgcggtttctgtacgaatgcccatggagaaggctgcaggagctgcgagagttaattccaaatattccgtttcaaatgctactgaggggagccaacgcggtgggctacaccaattaccccgataacgtcgtgttcaagttttgcgaggtcgccaaggaaaatggtatggacgtcttcagagtatttgactctttgaattaccttccaaacatgctgttgggcatggaagctgctggttctgcaggcggtgtggtggaggcggcaatttcttataccggagacgtagccgatccaagccgcacaaagtatagtttgcagtattatatgggtcttgctgaggaactggtgcgcgctgggactcacattctgtgtatcaaagatatggccggactcctgaagcctactgcatgcacaatgctggtgagcagcctcagagaccggttccctgatttaccattgcacatacacacacatgacactagtggtgccggtgtggcagctatgttggcttgtgcccaggccggagctgatgttgtggacgtggcggctgacagcatgtccgggatgacttctcagccctcaatgggggcactcgtggcttgtacccgagggactcctctggataccgaggtacccatggaacgggtgtttgactattccgagtattgggagggagctcgtgggctgtatgctgccttcgattgtacagccaccatgaagtccggaaactccgacgtgtacgaaaacgagattccgggaggccagtataccaacctccatttccaggctcattctatgggcctgggctccaaatttaaagaggttaaaaaagcctacgttgaagctaatcagatgctgggggacctgataaaggtgacaccgagtagcaaaatcgtcggcgatcttgctcagttcatggtgcaaaatggcctgagtcgagccgaagcagaggctcaagcagaggagcttagttttccaaggagtgttgtggagttccttcaggggtatatcggagtacctcatggtggctttccagaacctttccggagcaaagtactgaaggatctgccacgcgttgagggcagaccaggggcaagtctcccgccattggatctgcaggccttggagaaagagctcgtggataggcatggagaggaagttacgcctgaggatgtcttatcagccgctatgtacccagacgtatttgcccactttaaggatttcacagcaacatttgggcctctggactctcttaacacccgcctgtttcttcagggcccaaaaatcgctgaggaattcgaagtggagctggagcggggaaaaaccctacatatcaaagctttggccgtgtccgacctgaatcgagccggacaacggcaggtcttcttcgagttaaacgggcagcttcgcagtattttggtgaaagacacccaggctatgaaagagatgcattttcatccaaaagctttgaaagacgtgaaaggccagattggggcacctatgcccggaaaggttattgacatcaaggtggtggccggtgccaaagtagctaaaggccaaccattgtgtgtactgtcagcgatgaaaatggagactgtggtgacctcccccatggaggggaccgtacgaaaagtgcacgtgaccaaggatatgaccctcgagggtgacgatttaatcctggaaatcgagtag

SEQ ID NO: 237546 - DNA, 3537 bp, synthetic construct
  misc_feature 1..3537: note = Description of Artificial Sequence: Synthetic coding sequence
  source 1..3537: mol_type = other DNA
atgctgaaatttcggacagttcacggaggcctccgcctccttgggattcgcagaaccagcactgcccctgccgctagtccgaatgtgagacgcctcgagtacaagccaattaagaaggtgatggtggcaaaccgcggagaaattgccattagggtgtttagagcctgcactgaacttggtattagaaccgtggctatctactcagagcaggacaccggacagatgcatagacagaaggcagacgaagcctatctgatagggcgaggcctggcccctgtacaagcttacttacacattcccgacatcattaaggtggccaaggagaacaacgtggatgcagtccaccctggctacggtttcctatcagagcgagcggattttgcgcaggcttgccaggacgctggtgtgcgatttatcggccctagccccgaagtggttcgaaaaatgggcgacaaggtcgaagccagagccatagccattgcagcgggagtgccagtcgtgcccggaaccgatgcgcctattacatccctgcacgaggcgcatgagttctccaacacctacggattccccatcatcttcaaagccgcttatggaggcggtggcaggggcatgagagtagtacatagctacgaagaactggaagagaactacactcgggcatactccgaggccctggccgcattcggtaacggcgctttgtttgtcgaaaaattcatcgaaaagcctcggcacatcgaggtgcagatcctgggagatcagtacggaaatattcttcatttatatgagagagactgctcgattcagagacgccaccaaaaggtcgttgagatagcccctgcagctcatctcgacccacagctgcgcactaggctgacaagtgacagtgtaaagctcgccaagcaggtcggctatgaaaatgccggaactgttgagttcctggtggaccggcacggcaagcattatttcatcgaggtaaattcccgcttgcaggtggagcacacggtgactgaagaaatcacagatgtggatctggtgcatgcacaaatccacgtggccgaaggaaggtctctgccagacttaggattacggcaggaaaacatccgcataaacggatgcgctattcagtgtagggtaaccacggaggacccagctcggtcatttcagcctgatacaggacgcatagaggttttccggagtggcgagggaatggggatccgccttgataatgcaagcgcctttcagggtgctgttatatctccgcactacgactcattgctcgtgaaagtgatcgcccacggcaaagaccaccctacagcagccacgaagatgtcccgcgcactcgcagagttcagggtgcgaggcgttaaaacaaacatcgccttcctccagaacgttctcaacaatcagcagtttttagcaggcaccgtggacacacagtttatcgacgaaaatccggagttgtttcaacttcggccagctcagaacagagctcagaaactactgcactaccttggccacgtaatggtgaatggccctactacaccgattccagtgaaggcctcccctagccctaccgacccagtggtacctgcagttcccattggccctcccccagccggttttcgcgacattctcctgagagagggccctgagggctttgccagggccgtccgcaaccacccgggactgctcctcatggataccacctttagagatgcccaccaaagcctgctggcaactagagtacggactcatgatcttaagaagattgcgccttacgtggctcacaacttctccaaactttttagtatggagaattgggggggagcaacctttgacgtcgcgatgcgatttttatacgagtgcccgtggagaagactgcaagagctgcgggagctgattccgaatatacctttccagatgctgctccggggtgctaacgctgtcggctacactaactatcccgataatgtcgtgtttaagttctgcgaggtcgccaaggaaaacggaatggatgtgttccgcgttttcgactctctgaactacttgcctaacatgcttctgggcatggaggctgccggaagcgccggaggagttgtagaggccgctatatcgtatacgggcgatgttgcagatcctagtcggaccaagtattccctgcaatattatatgggtctcgctgaagagctggttcgggcaggtacgcatatcttgtgtattaaggacatggcgggtttgcttaagcctactgcatgcaccatgctcgttagctcactgagggacaggttccccgaccttccattacatattcacactcacgacaccagcggggcaggggtggcagcgatgctggcttgtgcacaagcgggagctgatgtcgtggacgtggcagccgacagcatgtctgggatgaccagccagccctccatgggcgctctggtcgcttgcactagaggtacgccactagatactgaggtgccaatggaaagagtgttcgactattctgaatattgggagggtgctcgcggactgtatgctgccttcgactgcaccgctacaatgaagagcgggaattcagacgtctatgagaatgaaattccaggaggccagtatacaaatttgcacttccaggcccattctatggggctcgggagcaagttcaaagaggtcaagaaggcctatgtggaggccaatcagatgctcggggacctcatcaaagtgacgccatctagcaagatcgtcggggacttagcacagtttatggtgcaaaacgggttgtcacgagccgaggccgaggcccaggccgaagagctctctttcccacgaagcgttgttgagtttctgcaggggtacattggcgtacctcacggcggatttcccgaaccattccggtccaaggtgctgaaggatttgcccagggtcgaggggcgacctggcgcttcactgccgcctttggacctgcaggcgctggagaaggaactcgtggataggcacggcgaagaggttactcccgaggacgtcctgtctgctgctatgtacccagatgttttcgcccattttaaagatttcactgccactttcggcccacttgattccctgaacacacgactgtttcttcagggacccaaaatcgcagaagaatttgaagttgagttggagagggggaagactctgcacatcaaagcgctagctgtatctgatctgaaccgggcaggacagaggcaagtcttcttcgaactcaacggccagctgcggtctatcctcgtaaaagacacccaagccatgaaggaaatgcacttccacccaaaagccctgaaggacgtcaaaggccagatcggagcccctatgccaggaaaagtaattgatataaaagtagtcgctggggctaaggtggccaaaggccagccgctatgcgtgctctccgcgatgaaaatggaaactgtcgtgacgtcaccaatggaaggtactgtgagaaaggtgcatgtgactaaagatatgaccttggaaggggacgatttgattttggagattgaatag

SEQ ID NO: 237547 - DNA, 3537 bp, synthetic construct
  misc_feature 1..3537: note = Description of Artificial Sequence: Synthetic coding sequence
  source 1..3537: mol_type = other DNA
atgctgaaattcaggacggtacacggcggactgagactactgggaatccgcaggacctcaactgctcctgctgcttccccgaacgtccgcagactcgagtacaaacccataaagaaggtgatggtggccaataggggtgagatcgcaattagagtatttcgtgcttgcaccgagctgggaatcaggactgtcgccatttactccgaacaggacacgggccagatgcatcgtcagaaagcagatgaggcctatctgatcggccgtggtcttgctccggtgcaggcatacctgcacattccagatatcatcaaggtagcaaaagagaacaatgtagatgctgtgcacccaggatacggctttctgtccgaaagggccgacttcgcgcaggcctgccaggatgccggtgtgaggtttatcggaccaagcccagaggttgtaagaaaaatgggtgataaagtcgaagccagagcaatcgccatcgctgctggcgtgccagtggtgcctgggacagacgccccaattacaagcttgcacgaagcccatgagttctccaatacctatggtttccccatcatatttaaggccgcatatggtgggggaggtcgaggtatgagagtcgtgcacagctacgaggaactagaggagaattatacgagggcatactccgaagcgttggccgcattcggaaacggagctctgttcgtggaaaaattcatagagaagcccagacacatcgaggtgcagatcctcggggaccagtatggaaatattctgcacctgtatgagcgggattgctcgattcaacggcgtcatcagaaggtcgtcgagattgccccagcagcccacctcgatcctcagttaaggaccaggctcactagcgacagcgtcaagctcgccaagcaggtcggatacgagaacgccggaaccgtggagttcctggtcgatcggcatggaaagcattactttatcgaggtgaatagccgcctgcaagtcgagcacaccgtcaccgaagagatcacggacgtcgacttagtccatgcacagatccacgtggcagagggaaggagtctgcctgatctgggactgagacaggaaaacatcagaataaacgggtgtgccattcaatgccgggtgaccacggaggatcctgcaagatccttccagccagacactggacgcatcgaagtatttaggagtggcgaggggatgggtatccggcttgataacgcatccgccttccagggggcagtgatcagtcctcactatgactctctcctcgtcaaggtcatcgcacatggcaaagatcatcctacggccgctacgaagatgagtcgcgcacttgctgagttccgagtgaggggcgttaagactaacattgcattcttacaaaatgtcctgaataaccaacagttcctagctggtacagtggatacccagttcatcgatgaaaacccagagttatttcagctgcggcctgctcaaaaccgcgctcagaaactcctccactatcttggccatgtaatggtgaacggaccaaccacccccatccccgttaaagcatccccaagtcccaccgaccctgtagtgcccgctgttccgattggcccacctcctgccggtttccgagacattctactgcgagaaggacctgagggattcgctcgagcggtgcgaaaccatcccggactgttgctgatggacacaacattccgggacgcccaccagtctctgttggcgaccagggtgagaactcatgacttaaagaagatcgctccttatgtggctcacaattttagcaaattgttttccatggagaattggggtggtgcaacctttgacgtcgccatgaggtttctgtatgagtgtccatggcggaggctgcaagagctgcgggaactgattccaaatattcctttccaaatgctgttacgcggtgctaacgccgtggggtacaccaactacccagacaacgttgtattcaagttttgtgaagtcgccaaggaaaacggcatggatgtgtttagagtgtttgatagtctgaactatctcccaaacatgcttttggggatggaagccgctggatccgcaggtggcgtggtcgaggctgccatctcctatacaggcgatgttgctgatccatctcgcaccaaatacagccttcagtattacatggggctcgcagaggagcttgtgagagcaggcacacatattctttgcatcaaggacatggccggattgcttaaacctactgcctgtaccatgctggtgagctcactaagagatagattcccggatctgcctttgcatattcatactcacgataccagcggagctggggtggcagcaatgttggcgtgtgctcaggcaggcgcagatgtggttgacgtggcggctgactctatgtccggaatgaccagtcagccttcaatgggcgcactggtggcttgcacgcgtggaactccacttgacacagaagtgccgatggagcgggtctttgattactctgaatactgggagggggctagagggttgtatgcggcatttgactgcaccgcaacaatgaagagcggcaatagtgatgtgtatgaaaacgagatccctggaggacaatacactaatctgcacttccaagcgcacagcatgggactaggaagtaaattcaaggaggtgaagaaggcatatgtggaagcgaaccagatgctgggagatctcatcaaagtgacaccttctagtaagatcgtcggcgatctggcccagtttatggtccaaaacgggttgtccagagctgaagctgaggcccaggccgaggagctgtctttcccgcgatctgtggtggaatttctccaagggtacatcggcgtgccacatggagggtttccagaacccttcagaagcaaggtcctcaaagacctcccacgagtcgaaggaaggcccggtgcatcactacctcccttggacctacaggcccttgagaaagagttggtggacagacatggagaggaggtgactcccgaggatgtattgagtgcagctatgtaccctgacgtgttcgcccattttaaggattttactgctacgttcgggccactggactcactgaatacccgcctgtttcttcaaggccctaagatcgccgaggaattcgaagtggagcttgagcggggaaagacactccacattaaggccttggccgttagtgacttgaaccgggctgggcagcgccaggttttcttcgaacttaacggacagcttaggagtattctggtgaaagatacacaggccatgaaggaaatgcactttcaccctaaggctctgaaagatgtcaaaggccagattggcgctcccatgcccggtaaagtgattgacattaaggtggtagccggtgctaaagtagctaaagggcaaccactctgcgtgctcagtgcgatgaagatggagaccgtagtcacatcccccatggagggcacggtccgcaaagtgcacgtaaccaaggatatgacactggagggtgacgacttaattcttgagatagagtag

SEQ ID NO: 237548 - DNA, 615 bp, synthetic construct
  misc_feature 1..615: note = Description of Artificial Sequence: Synthetic coding sequence
  source 1..615: mol_type = other DNA
atgcggaagatgcttgctgccgtctcacgcgtgctgtcgggcgctagccagaagcctgcttccagggtgctggtagcttcgaggaattttgccaacgatgcgacgtttgaaattaagaagtgcgacctgcacaggctggaagaaggaccccctgtgacaacggtgctcacccgggaggatgggctaaagtattacaggatgatgcagactgtgaggcgcatggaattgaaggccgaccagctgtataagcagaagatcatccgcggtttttgccacctgtgtgacggccagttcctactgcccctgacacaagaggcatgctgtgtaggtctggaggcagggataaacccgacagatcatctgataacagcttaccgggctcatggcttcacatttaccagggggctgtcggtgagggagatcctagccgagctgaccggcagaaaagggggttgtgctaaaggcaagggcggatccatgcacatgtatgccaagaacttctacggagggaacggcattgtcggtgcccaagtccctctgggggctggtattgcactggcatgtaaatataacggtaaggatgaagtctgcctaacactctatggagatggttag

SEQ ID NO: 237549 - DNA, 330 bp, synthetic construct
  misc_feature 1..330: note = Description of Artificial Sequence: Synthetic coding sequence
  source 1..330: mol_type = other DNA
atggaactccagacatacaggtaccacggccacagtatgagcgaccctggggtctcttatagaaccagggaggagattcaggaagtaaggtccaagtcagaccctattatgctcttaaaggatcgcatggtcaacagcaatctcgcttctgtcgaagagctgaaggagattgatgtggaggtacgcaaagaaatcgaggacgccgctcagttcgctaccgctgatccagaacctccgcttgaggaactaggatatcatatttactctagtgatcccccattcgaggtgaggggcgctaatcagtggatcaaattcaagtcagtctcttag

SEQ ID NO: 237550 - DNA, 543 bp, synthetic construct
  misc_feature 1..543: note = Description of Artificial Sequence: Synthetic coding sequence
  source 1..543: mol_type = other DNA
atgcggaaaatgctcgctgctgtgagcagggtgctctcaggagcgtcccaaaagccagcatcacgggtgctagtagcctctagaaactttgccaacgatgcgaccttcgaaatcaaaaaatgcgatctccatcggttagaagaggggccacccgttactacagtgcttaccagagaggacggcctcaagtactatcggatgatgcagacagtccgcagaatggagctaaaggcagaccaattgtataagcaaaaaatcatccgcggtttctgtcacctctgtgacggacaagaagcatgttgcgttggtctagaggccggtataaacccaacagatcacctgattacagcttatcgggcacatggattcactttcacccggggacttagcgtacgggagatcctcgcagaattaactggacgcaaggggggatgtgccaagggcaaaggaggctctatgcatatgtatgctaaaaacttctacggtgggaacgggatcgtaggcgcacaagtggtcaaggacgaggactgtgtcttattatag

SEQ ID NO: 237551 - DNA, 1287 bp, synthetic construct
  misc_feature 1..1287: note = Description of Artificial Sequence: Synthetic coding sequence
  source 1..1287: mol_type = other DNA
atgagaaagatgctggctgccgtctccagagtactgagcggggcttcccaaaaacctcgtcacgggctggcaactctgccaagtcttgtaagcatctccaggctgaaacagagtagccatctcgggctgcctaaatgttgggactattcccactccctgaaaacacggcaggccagcagggtccttgtcgcctctaggaatttcgccaatgacgccactttcgagatcaagaagtgcgacctgcataggttagaagagggccctcctgtgacaactgtgctgacacgcgaagacggactaaaatattataggatgatgcagaccgtgcgacggatggaactaaaagccgaccaactgtacaaacagaagatcattcggggtttctgccacctctgcgacgggcaggaagcgtgttgtgtcgggttggaggcaggcataaacccaaccgatcatctcataaccgcctacagagcacatgggttcacattcacccggggactctcagtccgggagattctggccgagctgaccggcaggaagggtggatgcgctaagggtaaaggaggctcaatgcacatgtatgcaaagaacttttatggaggcaacggcatcgtgggcgcacaggtgcccctgggggctggcatcgctctggcctgtaagtacaatgggaaagatgaggtgtgccttaccctctacggcgacggagctgccaaccaagggcagatcttcgaagcatacaacatggctgccttgtggaagcttccttgtatttttatttgcgaaaacaaccgatacggaatgggtacaagcgtcgaacgcgcagctgccagcactgactactacaaacgtggggacttcatacccggactccgggtggatggaatggacattctctgcgtcagggaagctacccgtttcgccgcagcctactgcagatcaggtaaggggcctattttgatggaactgcagacttatcggtaccatgggcactccatgtctgacccaggcgtgtcttaccgtactagggaagagattcaggaggtgcgtagcaaatctgacccaatcatgctcttaaaagatagaatggttaattccaatctcgctagtgtggaagagctgaaagagatcgacgtagaggttaggaaggaaattgaggatgctgcgcagttcgcaactgctgaccctgagccgcctctggaggagctcgggtaccatatctacagctcagaccctccgttcgaggtcagaggagctaatcagtggatcaaattcaagtctgtttcctag

SEQ ID NO: 237552 - DNA, 366 bp, synthetic construct
  misc_feature 1..366: note = Description of Artificial Sequence: Synthetic coding sequence
  source 1..366: mol_type = other DNA
atgcgcaagatgctcgccgctgtctctagggttctgtccggcgcatctcagaagccttttgccggttcacctccaccccgtcatcttaccgtaggcaggaagctgagctccaggtacgaggtgacatttgagtctgctcaagcaagtcgagttcttgtggcctccagaaactttgccaatgatgctaccttcgaaatcaagaaatgcgatcttcacaggttggaggaagggcctccagtgaccacggtgttgactcgggaagacgggctgaaatattatcgtatgatgcagactgtccggagaatggagttgaaggcagatcaactgtataagcagaagattatccgcggattttgccatctgtag

SEQ ID NO: 237553 - DNA, 366 bp, synthetic construct
  misc_feature 1..366: note = Description of Artificial Sequence: Synthetic coding sequence
  source 1..366: mol_type = other DNA
atgagaaagatgcttgccgcagtctccagagtcctcagcggagcttcacagaaaccatttgcgggatctcctcctccacgacacctgactgtgggtcggaagctttcgagtaggtatgaggtgacctttgagagtgctcaggcttcccgagtgttggtggcttcccgcaatttcgctaatgatgctacattcgaaatcaaaaaatgcgatttgcatcggctggaggaagggcctccagtgacaaccgtgctcacacgcgaggacggcttgaaatactataggatgatgcagactgtgcgacggatggagctgaaggcagatcagctttataaacaaaagatcatccgcggtttttgccacctctag

SEQ ID NO: 237554 - DNA, 1173 bp, synthetic construct
  misc_feature 1..1173: note = Description of Artificial Sequence: Synthetic coding sequence
  source 1..1173: mol_type = other DNA
atgaggaagatgctggcagcggtcagcagagtgctgtcaggtgcttcacaaaaaccagccagtagagtcctcgtggcgtcccggaatttcgcgaacgacgcgacttttgagataaagaaatgtgacctgcatcggctggaggagggtcctcccgtaactaccgtgttgacacgggaggatgggctaaagtactatcgaatgatgcaaacggttcggaggatggaactgaaagccgaccaattgtacaaacaaaagattatcaggggtttctgccacttgtgcgatggccaggaagcgtgctgtgtcggcctggaggctggtattaatccaaccgaccacttgattaccgcctatcgtgcccatggattcactttcacgcgcggacttagcgtgagagaaatcctggccgagctcactgggagaaaggggggatgcgccaagggcaagggtgggagcatgcacatgtatgcaaagaacttttacggtggaaacggcatcgtgggggctcaggttcctctgggcgcaggcattgctctggcgtgcaaatataacgggaaggacgaggtgtgcctgaccctctatggcgacggcgcagccaatcagggccaaatatttgaggcctacaacatggctgcactgtggaagttgccctgtatcttcatctgcgaaaacaatcgctatggcatgggcactagtgtggaaagagctgccgctagcacggactattacaagcgcggagacttcattcctggactgcgcgtagatgggatggacatcctgtgcgtgcgcgaggctacacggtttgctgccgcttactgtaggagtggcaaaggtcctattctgatggagcttcaaacatataggtaccacgggcattcaatgtccgatccgggtgtgtcttatagaactcgcgaggagatccaggaggtgaggagcaaatctgatcctattatgttactcaaagacaggatggtgaattctaatttggcgagcgtagaggaactcaaagaaatcgatgtcgaggttcgcaaggagatagaggacgccgctcagttcgccaccgcagatccagagccgcctctagaggagctcgggtaccacatttattctagtgacccccctttcgaggtgcgcggagccaatcagtggattaagtttaaaagcgtttcctag

SEQ ID NO: 237555 - DNA, 618 bp, synthetic construct
  misc_feature 1..618: note = Description of Artificial Sequence: Synthetic coding sequence
  source 1..618: mol_type = other DNA
atgagaaagatgctggccgctgtatctcgggtcctgtcgggcgcaagtcagaagcccaggcatggccttgccacactgccctctctggtttccatctctcgcttaaagcagtcttcccacttgggcttgcctaagtgctgggactattctcacagtttaaagacccgccaggcctcccgagtgctcgtggccagccggaatttcgccaatgatgccaccttcgagattaagaaatgcgacctccatcgactggaggagggcccaccagtgaccacagtccttactcgggaagacggcctcaagtattaccggatgatgcagactgttcggaggatggaactcaaagctgaccagctgtataaacagaagattattcgcggattttgccacctctgtgatgggcaagaggcgtgttgtgtcggacttgaagccggaatcaacccaacggatcatttgatcaccgcctatagggcacatggtttcacttttaccaggggcctctcagtgcgggagattttagcagagttaacggggcgaaaggggggttgtgctaagggtaaaggcggatctatgcacatgtatgcgaagaatttttatggcggtaatggcatcgtatag

SEQ ID NO: 237556 - DNA, 1080 bp, synthetic construct
  misc_feature 1..1080: note = Description of Artificial Sequence: Synthetic coding sequence
  source 1..1080: mol_type = other DNA
atgcgcaagatgctggcagccgtgagccgggtcttgtccggagcgtctcagaagccggctagtagagtactcgtcgcgagccggaactttgcaaacgacgccacgtttgagattaaaaaatgtgatctgcacagacttgaggaaggtcctcccgtcaccaccgtgcttacccgagaagacggcctaaaatactatagaatgatgcagacagtccggaggatggaactgaaagccgaccagctctataagcaaaagattattcggggtttctgtcatctatgtgacggtcaagaggcttgctgtgtggggcttgaggcgggaatcaatcccacggaccacttgatcactgcctatcgtgcccacgggttcaccttcacgcgcggactgtccgtcagggaaatcctggctgagctgacaggccgtaagggcggatgcgccaaagggaaggggggttccatgcacatgtatgccaagaatttttacggaggcaatggaatcgttggtgctcagggtcagatttttgaggcttacaacatggccgctctgtggaaacttccctgtatttttatctgcgaaaacaaccgatatggcatgggaacttccgtggaacgggctgccgcaagcactgattattataagagaggggatttcattccgggattgagagtcgatggaatggatattctgtgtgtgcgggaggccacaaggttcgcagcagcttactgtcgatctggcaaaggtcctatcctgatggagctgcagacatacagatatcacggccactcaatgagcgaccccggagtttcataccgtacacgggaggaaattcaggaggtgcggagcaaatcggaccctatcatgctgcttaaagacagaatggtgaatagcaacctggcctccgtcgaggaactgaaggagattgacgttgaggtgaggaaggagatcgaggatgcagcccagttcgccaccgcagacccggaacctcctttggaagaactggggtatcatatttattcctcggatcccccatttgaggtgaggggcgcaaatcagtggattaagttcaagagcgtttcatag

SEQ ID NO: 237557 - DNA, 129 bp, synthetic construct
  misc_feature 1..129: note = Description of Artificial Sequence: Synthetic coding sequence
  source 1..129: mol_type = other DNA
gcaaatcaatggatcaagttcaagtctgtgaagggcaggagacgcaggggctacacattccgcggactgcctgattctgtgctcaatctcgtcaaggaggaggaaaacccggtgaacgagatccagtag

SEQ ID NO: 237558 - DNA, 1194 bp, synthetic construct
  misc_feature 1..1194: note = Description of Artificial Sequence: Synthetic coding sequence
  source 1..1194: mol_type = other DNA
atgcgcaaaatgcttgcagccgttagccgcgtgctgtctggggcttcacaaaaacctgctagcagagttttagttgcctcacgaaattttgctaacgacgcgacttttgaaatcaagaagtgcgatctgcaccggctggaggaggggcctccggtaactactgtgctcactagagaagatgggctgaagtactaccggatgatgcagaccgtgcgtcgaatggaactcaaagccgaccagctctataaacagaagataattcggggtttctgtcacctctgcgatggtcaatttttgctgcccctcacacaggaagcctgttgtgtgggactggaagcaggaattaatcctaccgaccacctgattactgcctatagggctcatgggttcacttttaccagggggctgagcgtgagggagatcttggctgaactgactgggaggaagggtggctgtgctaaagggaagggcggatccatgcacatgtacgcaaaaaacttttacggcggtaatggcattgtgggtgctcaggtgcccctcggcgcagggatcgctttggcttgtaagtataacggaaaggacgaggtttgtttgactctgtacggagacggggcagccaaccagggacagatatttgaggcgtacaacatggccgctctttggaagctgccttgcatcttcatttgtgaaaacaataggtatgggatggggacgtcggttgagagagctgctgccagtaccgattactataagcgaggagattttatccctggtttgcgagtcgacgggatggatatcttgtgcgtgagggaggctacacgctttgctgccgcttattgtcggtccggaaagggaccaatcttgatggaattacagacttaccggtaccatggacatagcatgagtgacccaggagtgtcctataggacaagggaagaaatccaagaagtcaggtccaagtcagaccctatcatgctcctgaaggaccgaatggtgaatagcaacctggctagtgtcgaggagctgaaagaaattgatgtcgaagtgaggaaggagattgaagacgccgctcagtttgcaactgcagaccctgagcctcctctagaggaattagggtaccacatctacagcagtgatcctcctttcgaggtcagaggcgctaatcaatggatcaagtttaagtcagtctcctag

SEQ ID NO: 237559 - DNA, 1167 bp, synthetic construct
  misc_feature 1..1167: note = Description of Artificial Sequence: Synthetic coding sequence
  source 1..1167: mol_type = other DNA
atgttagccgctttcattagcagagtattgcggagggtggcgcagaaatcggctaggcgggtgttggtggccagtcgaaattcgagcaacgatgcaacttttgaaatcaaaaagtgtgatctgtatctcctggaggaaggtccaccagtgactacagtgctgacccgagcggaagggttaaagtactatagaatgatgctgaccgtcaggagaatggagctgaaggctgatcagctgtataaacagaaattcattcgaggattttgtcacctctgcgatggtcaggaagcctgttgtgttggcctggaagcagggatcaacccctccgatcacgtcatcacttcttatagagcccacggggtctgctacacgcgagggctttctgttaggagcattctggcagagctgacaggcagacggggtggatgtgcgaaagggaaggggggatccatgcatatgtacactaaaaatttctacggcggaaacggtatagtcggagctcaagggcctctgggggcaggcatcgccttggcatgcaaatataagggtaacgatgagatttgtctgacactgtatggtgatggtgcggctaaccagggacagattgctgaggccttcaacatggccgctctatggaagctcccttgcgtcttcatctgtgaaaataatttatatgggatgggaacctccacagaacgggctgccgcatctcctgactactacaaaaggggcaacttcataccaggcttaaaggtggatggaatggacgtactgtgcgtccgcgaggcaaccaagtttgccgcaaactattgccgaagtggaaagggccctatactgatggagcttcagacatacagataccatgggcattcaatgagtgatcccggtgtgtcatacagaacccgagaggaaatccaagaagtgcgctctaagcgggatcctatcatcattctccaggatcgaatggtcaactccaaattggccaccgtggaagaactcaaagaaatcggtgcagaggtgcgaaaggagatagatgacgccgcacaattcgccactacagatcccgagccacacttggaagaactcggccatcatatctacagctcagattccagcttcgaggtgagaggggcaaatccttggatcaagttcaagtcagtctcttag

SEQ ID NO: 237560 - DNA, 1080 bp, synthetic construct
  misc_feature 1..1080: note = Description of Artificial Sequence: Synthetic coding sequence
  source 1..1080: mol_type = other DNA
atggcggctgtgagtggattagtacgccgacctctccgagaggtttccggcttgctgaagcgcaggttccattggaccgccccagctgcgcttcaagtgacagtccgcgacgctatcaaccaagggatggatgaggagctcgaacgcgacgagaaggtgtttctgcttggcgaagaagtagctcagtatgatggtgcctacaaggtgtcccgcggtctctggaagaaatacggggataaacgcattatcgacacacccatcagcgagatgggattcgctgggatagcagtgggggcagccatggccggtctgcggcctatttgcgagttcatgacttttaactttagcatgcaggccatcgatcaggtcatcaatagtgcagccaagacctattatatgtccggtggcttacagccagttcccattgtgtttcggggtcccaatggcgcaagcgctggagtcgctgcccagcactctcagtgtttcgccgcatggtatggccattgtcccggactaaaggtggtgtctccgtggaactccgaggatgctaagggactcatcaagtccgctatacgggacaacaatcccgttgttgtactggagaacgagcttatgtacggcgtgccatttgagttccccccagaggcccaatctaaagactttctcatcccgataggcaaggcaaagatagagcgccaaggaacgcatataacggtagtatcacactccagacctgtcggacactgtctagaggcagctgccgtgctctccaaggagggcgtggagtgtgaggtgatcaatatgcgcacgatcagacccatggatatggaaacgatcgaggcttccgtcatgaagacaaatcacctcgtcaccgtggagggcggatggccccagttcggagttggggcagaaatatgcgcacggattatggaaggacctgcattcaatttcctcgatgccccagcggtgagggtaacgggcgcagatgttcccatgccttacgctaagattctagaagacaacagtattccacaagttaaggatattatttttgctatcaaaaagacactcaacatctag

SEQ ID NO: 237561 - DNA, 1026 bp, synthetic construct
  misc_feature 1..1026: note = Description of Artificial Sequence: Synthetic coding sequence
  source 1..1026: mol_type = other DNA
atggcagccgttagtggcctggttagacggccactgcgggaggtgaccgtacgagacgcaatcaaccagggcatggacgaggaactggagagagacgaaaaggtatttcttttgggtgaggaagtggcccagtacgacggggcttataaggtctcaaggggcttatggaagaaatacggggataagcgaatcatcgacactcccatcagcgagatgggattcgcgggaatagctgttggcgctgctatggccggactgcggcctatctgcgaatttatgacattcaacttctcgatgcaggctattgatcaggttattaacagcgcggcaaagacctactacatgagtggcggattgcaacccgtgccaattgtgtttaggggaccaaacggcgcttctgctggcgtcgccgctcagcactctcagtgtttcgccgcatggtacggccattgccccggactgaaagtggtctcaccgtggaacagcgaggacgctaagggactgatcaagagtgcaattcgagacaacaatcccgtcgtggtccttgagaacgaactgatgtacggggtcccattcgagttcccccctgaggctcagagtaaggattttctaattcctattggcaaggccaaaatcgagcggcaagggactcacattacagtggtgtcacattcgagacccgtgggccattgtttggaggccgctgctgttctgtccaaagaaggcgtagaatgcgaagtgatcaacatgcgaaccattagaccaatggacatggaaacaatagaggcttcagtgatgaagacaaaccacttagtgaccgtggagggcggatggccacagtttggcgtcggggcagagatttgcgcgcgtatcatggagggccctgccttcaactttctcgatgcaccggcagtgcgagtgactggggcagatgtgcctatgccctatgcaaagatactggaggacaattcgattccgcaggtcaaggatataatttttgccatcaagaagaccctgaatatttag

SEQ ID NO: 237562 - DNA, 1026 bp, synthetic construct
  misc_feature 1..1026: note = Description of Artificial Sequence: Synthetic coding sequence
  source 1..1026: mol_type = other DNA
atggcggcagtctccggtctggttcggagacctcttcgggaggtcagcggtctgctgaagcggcgttttcactggaccgctccggctgcccttcaggtgacagtccgggatgcaatcaatcaaggtatggacgaggagctggagagagacgaaaaggtgttcctgctaggggaggaagtggcccagtacgatggcgcttacaaggtgtccaggggcctgtggaaaaaatacggtgataagcgcatcatagacaccccaatctccgaaatggggttcgccggaattgcagtgggagctgccatggccggtctccggccaatctgtgagtttatgacattcaatttcagcatgcaggcgattgaccaggttataaattcagctgcgaaaacctattatatgtcaggcgtcgcagcacagcatagtcagtgctttgcagcgtggtatggtcattgcccgggactcaaggttgtctccccttggaactctgaagacgccaaaggcctgattaagtctgccatccgcgacaacaatccggtggtggtgctggaaaatgaattgatgtacggcgtgccttttgaatttccccctgaggctcaaagcaaggacttcctcatccccatcggcaaggccaaaatcgaaaggcagggcacacacatcacagtggttagccatagcaggcccgtgggccattgcctcgaggccgcagctgttctgagcaaggaaggggtagaatgtgaagtgattaatatgcgcaccattcgccctatggacatggaaacaatcgaggcttcagtaatgaaaactaatcacctggtcaccgtcgagggcggttggccacaatttggcgttggcgctgagatctgtgcacgaattatggagggacctgccttcaactttctggacgccccagccgtaagagttacaggcgcagacgtaccgatgccctacgcgaagattctggaggataattcaatcccacaggtcaaggacatcatctttgctattaaaaaaacactgaacatctag

SEQ ID NO: 237563 - DNA, 1236 bp, synthetic construct
  misc_feature 1..1236: note = Description of Artificial Sequence: Synthetic coding sequence
  source 1..1236: mol_type = other DNA
atgaaagccgctaggtttgtgctgcgcagtgccggtagcctgaatggagccggtctcgttcctcgggaagtcgagcatttctccagatacagtcctagtccactaagtatgaaacagctgctggatttcgggtccgagaatgcatgcgagagaacgagctttgcatttttgcggcaggagctccccgtccgactagccaacattctgaaagagatcgacatcctacctacccaactggtcaacacatcctcagtccaactagtaaagtcctggtatatacagtccctgatggacctcgtggaatttcacgagaagtctccagacgaccagaaggctctgtccgacttcgtggataccttaataaaagtcaggaaccgtcatcacaacgttgtcccgacaatggctcagggtatcatcgagtataaagacgcctgcactgtggatccagtgacaaaccaaaatctgcagtattttctggacagattctacatgaacaggataagcacccggatgctgatgaaccaacatatattaatcttcagcgactcccagaccggaaatccaagtcacattgggtcgatagacccaaactgtgacgtcgtagctgtcgtgcaagacgcgttcgaatgttcacgtatgctgtgcgaccagtactacctatcatctcccgaactcaaactgacccaggttaacggcaaatttccggaccagccaatccatatcgtgtacgtcccatcccatcttcatcacatgctctttgagttgtttaaaaacgctatgcgcgcaaccgtggagcaccaggagaatcaaccttccctcactccaatcgaagtgatcgtagtcctcggcaaggaggacctaactatcaagataagcgatcgagggggaggggtgcccttgaggatcattgatagactattctcttacacctacagtaccgcgcctacacctgtgatggacaattcaagaaacgcacctctggccggttttggctatggactcccaatcagtcggttgtacgccaagtactttcaaggcgacctgaacctgtactccctgtcaggctatggcaccgatgctattatctatctcaaagcactgagttctgaaagtatcgaaaaactgcccgtgtttaacaagtccgctttcaaacactaccagatgagctctgaggcagacgactggtgtatcccatctcgagaaccaaaaaatctcgctaaggaggtagcgatgtag

SEQ ID NO: 237564 - DNA, 1128 bp, synthetic construct
  misc_feature 1..1128: note = Description of Artificial Sequence: Synthetic coding sequence
  source 1..1128: mol_type = other DNA
atgaagcagcttctcgattttggctcagaaaacgcttgtgagcgcactagcttcgcctttctgagacaggagttgcctgtccgccttgctaacattctcaaagaaatcgatattctgccaacacagctcgtgaatacaagctctgttcagctggtcaaatcatggtatattcagtcactgatggacctggttgagttccacgagaagagccccgacgaccagaaggccctgtctgacttcgtcgatacgttgatcaaggtgcgcaaccggcatcacaatgtggtgccaacaatggcacagggaatcatcgagtacaaagacgcgtgtactgtggaccccgtgactaaccagaatctacagtatttcctggataggttttacatgaatcgtatttccacacgcatgctgatgaatcagcacatcttaatcttttccgacagtcagaccggtaatccgagtcatataggcagtattgacccgaattgcgatgttgtggctgtcgtgcaggatgcatttgagtgtagccggatgttgtgtgaccagtattaccttagtagtcccgaactgaagttaactcaggtcaacgggaagttcccggatcaaccaattcatattgtatatgtgccttctcatctgcaccacatgttgtttgagctgttcaaaaacgcgatgcgggcaactgtcgagcatcaggagaatcaaccttctctgactcccattgaggtcatcgtggtactgggcaaggaagatttgacaattaagatatctgaccgcggagggggtgtccctctgaggataatagatcgtttattttcctacacttattctaccgcacccacccctgtcatggacaactcacggaacgcacctctcgctggattcggatatggactgcccatttctaggttgtacgccaaatatttccagggcgaccttaacctctactcgctgtctggatacggcacggacgcaataatctacctgaaggccttatcttcagaatccatcgaaaaattgccagtctttaataaatcagccttcaaacactaccagatgagttctgaagccgacgattggtgtatcccctctagggagcctaaaaatctggcgaaagaggtcgcaatgtag

SEQ ID NO: 237565 - DNA, 1614 bp, synthetic construct
  misc_feature 1..1614: note = Description of Artificial Sequence: Synthetic coding sequence
  source 1..1614: mol_type = other DNA
atgccagcccctacacaactgtttttcccattgattcggaattgcgagctctccaggatttacggcacagcctgctactgccaccacaagcatctctgttgctcctcctcttatatcccgcagtctcggttgaggtacaccccccaccccgcttacgcaactttctgcagaccaaaggaaaattggtggcagtacactcagggcagaagatacgcttccactccccagaaattctatctgactcccccacaggtcaattctatattgaaagccaacgagtatagcttcaaagtgccagagtttgatgggaagaatgtctcatctatcctgggatttgacagtaaccagcttccagccaacgccccaatcgaagacaggcgctccgcagcaacttgcctccagacccgcggtatgctgttaggcgtgttcgacggccacgctggatgcgcgtgttctcaagctgtgagcgagcgcctcttttactacatcgctgtgtcactccttccccacgagacactgctagagatagagaatgccgtcgagtcaggacgagccctcctacctatcttacagtggcacaaacaccctaacgattatttcagtaaggaggccagcaagctgtactttaatagcctccgaacctactggcaggagttgatcgacctgaacactggagagtcaactgatatagatgtcaaagaggccttgatcaacgcgttcaaaaggttggacaacgacatctctctggaggctcaagtgggcgatccaaacagttttttaaactacctggtcttgagagttgccttctcaggggctaccgcttgtgtggcacacgttgatggcgttgatctccacgtggcaaatacaggcgattcccgggcaatgcttggggtgcaggaggaggacggctcctggagtgccgtgacactttctaacgatcataacgcccagaacgagcgggagctcgagaggttaaagcttgaacaccccaagtcagaggccaagagcgtggtgaagcaggataggttacttggtctgttgatgccctttagggcattcggcgatgttaagttcaaatggagtatagacctgcaaaagcgagtgatcgagagcggcccagaccagcttaacgacaatgaatacaccaaattcatcccgccaaactaccacacccccccatatctgacggctgagccagaagttacgtatcatcggctgcgcccacaagataaatttctggtattggccaccgatgggctgtgggaaaccatgcatcgccaagatgttgtacggatcgtaggggagtacctcactggcatgcaccatcaacagcctatcgcggtgggcggatataaagtgacgctgggtcagatgcatgggcttctaaccgaaagaaggaccaagatgagttcagtttttgaggatcaaaatgcagccacccatctaatcagacacgcggtggggaacaacgagttcggcaccgtcgatcacgagcggctgagcaagatgctctctctgcctgaggaactcgcccgaatgtaccgagacgacattacgatcatcgtagtccaatttaacagccacgtggtcggagcatatcaaaatcaggaatag

SEQ ID NO: 237566 - DNA, 1689 bp, synthetic construct
  misc_feature 1..1689: note = Description of Artificial Sequence: Synthetic coding sequence
  source 1..1689: mol_type = other DNA
atgtgtgtctgtccaggacccaggcggattggcatccctgtgagatccagctccttgccactgttctccgatgccatgccggctccaactcagctattcttccccttgattaggaattgcgagctgtcccgcatttatggcactgcctgttattgccaccacaaacacctgtgttgctcatcctcttatatacctcaatccagattgagatacacaccccatccggcttacgccaccttctgcaggccgaaagagaattggtggcagtatacccaaggtcggagatatgccagcactcctcaaaaattctatctaactcctcctcaagtaaattcaatcctgaaagcgaatgaatactcttttaaggtgcccgagtttgatggaaagaacgtatcttcaatcctcggctttgacagcaatcaactccccgcaaatgcccctatcgaggatcgcaggtccgctgctacgtgcctgcaaaccagggggatgcttttgggtgtgtttgacggacatgctgggtgtgcctgctcacaggctgtgagtgagaggctgttttattatatcgccgtgtcgctgctgccccatgagaccctgctagaaatcgagaatgcagtcgaatcagggagggccctccttcccatcctacagtggcacaaacaccctaatgactacttttccaaggaagcttctaagttgtactttaactctctgaggacgtattggcaggaacttatcgatctgaacaccggagaatcaaccgacattgacgtcaaggaagcactgattaacgcatttaagcgtctggataatgacatttccttagaggcccaagtgggcgatcctaacagttttctgaattaccttgtacttcgcgtcgcattctccggagccacagcctgtgtggcccacgtcgacggcgtcgacctgcatgtcgccaacactggtgactcccgagcaatgctgggagtgcaagaagaggatggctcctggtcggctgtgactttgtctaacgatcataatgcccagaatgaacgcgaactagaacggctgaagttagagcatcctaagagtgaagctaagtccgtggtgaagcaggatagactactcgggctgctcatgccctttcgggcatttggcgatgtgaaatttaaatggagcattgatttacagaagagagtgattgagagtggcccagaccaactgaatgataatgagtatacaaaatttatcccacctaattatcacacccctccatacctaacggccgagcccgaagtgacgtaccatagactgcgaccccaagataagttcttagtgctggctacggacggcctctgggaaactatgcaccgccaagacgtcgtgagaatcgtaggcgagtatcttactggaatgcaccatcaacagccgatagcggtgggaggatacaaggttaccctggggcaaatgcatgggctgcttacggagagaaggaccaaaatgtcttccgtgtttgaggaccaaaatgccgcaacccacctgatccggcacgccgttggcaacaacgagttcggtaccgtcgaccacgagagactttctaaaatgctatctctgcctgaggaactcgcccgtatgtatcgggacgatataaccataattgtggtacagtttaatagccatgtcgtcggggcttaccagaaccaggaatag

SEQ ID NO: 237567 - DNA, 1614 bp, synthetic construct
  misc_feature 1..1614: note = Description of Artificial Sequence: Synthetic coding sequence
  source 1..1614: mol_type = other DNA
atgccagctcctactcagcttttctttccactgattagaaactgtgaactgtctcggatctacggcacagcctgctattgccaccacaagcatttgtgttgttcgagttcctacattccacagtcgcgattacgatataccccacatcccgcttacgccacattctgccgaccaaaggaaaactggtggcagtatacgcaaggtcggagatacgcatcaacccctcaaaaattttatctcacccctccacaggtgaattccatcctgaaagcaaacgagtattctttcaaggtcccggagtttgatgggaagaatgtgagctccattttggggttcgatagtaaccagctcccggctaacgctcccatcgaagacagacgctctgccgctacctgcttgcagacaagaggaatgttactgggtgtttttgatgggcatgcaggatgcgcctgttcccaggcggtcagcgaaagactgttttactacatcgcggtgtcgctgttgccgcacgagaccctcctggaaatcgagaatgcagtggagtcaggtagggctttgctgccaatcctgcagtggcataagcaccctaacgattacttctcaaaagaggccagcaaactgtacttcaacagcctgagaacatactggcaggagctcattgatcttaatactggcgagtccaccgatatcgatgtgaaggaggcgcttataaacgcttttaagcgcttggataatgacatctcattagaagctcaggtgggggaccctaattctttcctgaactacctggtgctgagggtagcgttttccggagcaaccgcttgtgtggcacatgtggatggggtggacctccacgtggctaatacaggtgactccagagcaatgctcggcgtgcaggaggaggatggctcctggagtgctgttaccctttctaacgaccataatgcacagaatgagagagaactggagcgtctgaagctggagcatcccaaatcagaagccaaatcagtcgtcaaacaggaccggctcctcggcctgctaatgccctttcgggctttcggcgatgtaaagttcaaatggagcatagatttgcagaaacgggttattgaatccgggcctgaccaactgaacgataacgagtacacaaaatttatcccacccaactatcataccccaccttacctcacggccgagcctgaagtaacttaccacagactgaggccgcaggataaatttctcgtgcttgccacagacggactttgggaaactatgcacagacaggatgttgtgagaatcgtgggggagtacttaaccggtatgcatcaccagcagcccattgcagtgggcggttataaagttactctgggccagatgcacggactgctgaccgaacggaggaccaaaatgagcagcgtcttcgaggaccagaatgcggctactcacctgattcgccatgcagtcgggaataacgagttcggaacagtggatcatgagagactgagcaagatgctctcacttcctgaggaactggcccgtatgtaccgcgatgatataactataatcgtggttcagtttaactctcatgtggtgggggcataccagaatcaggagtag

SEQ ID NO: 237568 - DNA, 231 bp, synthetic construct
  misc_feature 1..231: note = Description of Artificial Sequence: Synthetic coding sequence
  source 1..231: mol_type = other DNA
atgcctgcccctactcagctgttttttcctctgataaggaattgtgaactttcacgaatctatggcacggcctgttactgccaccacaaacatctgtgttgctccagctcctacatacctcaatcaagactgcggtacacgccacacccagcctatgctacattctgtagaccaaaagagaattggtggcagtatactcagggcaggagatacgcaagcaccccacagtag

SEQ ID NO: 237569 - DNA, 387 bp, synthetic construct
  misc_feature 1..387: note = Description of Artificial Sequence: Synthetic coding sequence
  source 1..387: mol_type = other DNA
atgcctgctcctacccagcttttctttccattgatcagaaactgtgaactatcgaggatttatggtactgcgtgctattgtcaccacaaacacctgtgctgctctagctcgtatataccacagtcaaggctgaggtacacccctcatcccgcatatgccactttttgccggcctaaagagaactggtggcagtatactcaaggacgcagatacgcttctactcctcagaaattttacctgaccccacctcaggtaaattcgattctcaaagctaatgaatatagcttcaaggtgccagaattcgatggcaaaaacgtgagtagcatccttgggttcgattccaaccaactgccagccaacgcccctatcgaagaccgaaggagctag

SEQ ID NO: 237570 - DNA, 699 bp, synthetic construct
  misc_feature 1..699: note = Description of Artificial Sequence: Synthetic coding sequence
  source 1..699: mol_type = other DNA
atgccagctcctactcagctgttttttccactgattcgcaactgcgagctgtccaggatctacggaaccgcctgctactgccaccacaaacatctgtgttgttcttccagctacatccctcagtctagactgagatacaccccccaccccgcatacgccaccttttgtcgtccaaaggagaactggtggcaatacacacagggacggcgatacgcaagcaccccccaaaaattctacctgacaccacctcaggtcaactccatcttgaaggctaacgaatactcgtttaaggtcccggaattcgatgggaagaatgtgagctctatcctaggcttcgacagtaaccagctgcccgcaaatgcgccaatagaagaccgtcgatcagcagccacctgtctgcaaacccggggtatgcttcttggtgtgttcgatgggcacgcgggatgcgcctgttctcaggccgtatccgaacgtctattttactatatcgcagtctccttattaccccacgaaaccttattggagatagaaaacgccgtcgagtcaggtcgagccttactgcccattctccagtggcacaaacatcctaatgattacttctcaaaggaggcaagcaagctgtatttcaacagtctcagaacatactggcaggaacttattgacctgaacactggagaatccacagacatcgacgtgtag

SEQ ID NO: 237571 - DNA, 219 bp, synthetic construct
  misc_feature 1..219: note = Description of Artificial Sequence: Synthetic coding sequence
  source 1..219: mol_type = other DNA
atgcctgccccaacccagctcttcttcccactgattagaaactgtgaactgtccaggatctacggcaccgcctgttattgccaccataaacacctctgctgctcctcctcgtatatcccgcagtctaggctgcggtacactccccatcccgcatatgccacgttctgcagaccaaaagagaactggtggcagtatacgcaggggcgtcgatacgcatag

SEQ ID NO: 237572 - DNA, 1614 bp, synthetic construct
  misc_feature 1..1614: note = Description of Artificial Sequence: Synthetic coding sequence
  source 1..1614: mol_type = other DNA
atgccagcccctactcagcttttcttccctcttatccgcaattgtgaactgtccaggatatatggaacggcttgctactgtcaccataaacacctgtgctgttcctcctcatacatcccgcagagcaggctcagatacactccacatccggcatatgcaacattctgccgacctaaggagaactggtggcagtacacacagggcagaagatatgcgagtaccccacagaagttttatcttacaccccctcaggtgaactcaatattaaaggcaaacgaatactcattcaaggtgcctgagtttgacggcaagaatgtgtccagtatactaggtttcgattcgaaccagctgccagcaaacgcaccaattgaggaccggcgtagcgccgctacatgtttgcagacaaggggaatgctgctcggagtgttcgacgggcacgccggatgtgcttgcagccaggcagtctccgagcggctgttctattacatagcagtgtccttacttcctcacgaaacactcctagaaattgaaaatgccgtcgaatccggacgggcactcctccccattctgcagtggcacaagcatcccaacgattatttttctaaggaagccagcaagctatacttcaattccctacgaacgtactggcaggaattgattgacctgaatactggggaaagcacagatatcgacgtgaaagaggccctcataaatgcctttaagagacttgataacgacatttctttagaagctcaggtcggagatcctaattcattcctgaattatcttgtgctgagagttgccttttccggagcaaccgcttgtgtcgctcacgtggatggggtggacttgcacgtcgccaacacaggagatagccgggcaatgctgggagtccaagaggaagacgggtcatggtccgcagtgactctctcaaatgaccacaacgctcaaaacgagcgggaactggaaagactaaagctcgagcatccgaaaagtgaggcgaagtccgtagtcaagcaagatcgtcttctcggtttattaatgcccttcagagcgtttggcgatgtcaaattcaaatggagcatcgacctacaaaaacgtgtgatcgagagtggccctgatcagcttaacgataatgaatataccaagtttatcccccctaattatcatacaccgccttatttaaccgccgagccagaggtgacctaccaccgactgagaccccaagacaagttcctcgttctggcaactgatggcctgtgggagacaatgcaccgacaggacgtggtgagaatagtgggggagtacctgacgggtatgcatcaccagcagcccattgcagtcgggggttacaaagttaccctcggccagatgcacggcttgcttacggagcggcgaactaaaatgtcctctgtctttgaggatcagaatgccgctacgcaccttattaggcatgcagttggtaataatgagttcggaacggttgatcatgaaaggctttccaagatgctgtctctgccggaagaactggctcggatgtaccgggatgacataacaatcatcgtcgtgcaattcaactcacatgtggtcggcgcatatcagaatcaagaatag

SEQ ID NO: 237573 - DNA, 444 bp, synthetic construct
  misc_feature 1..444: note = Description of Artificial Sequence: Synthetic coding sequence
  source 1..444: mol_type = other DNA
atgccagccccaacacagctgttttttcccctgattcgaaactgtgagctgagtcggatctatgggacagcctgttactgccaccataaacacctgtgctgcagctcaagctacattccgcagagtcgccttagatacaccccccaccctgcttacgctacattttgcaggcctaaggagaactggtggcagtacacacagggcaggcggtatgcctcaactccacagaagttctacctcacccccccacaggtgaacagcatactgaaggccaatgaatacagcttcaaggtccccgaatttgatggcaagaacgtctcctcaattctgggctttgactctaatcagttaccggctaatgctcccatcgaagaccgacgctccgcagccacctgtttgcaaactaggggtatgctcctgggcgtctttgacggtcacgcgtag

SEQ ID NO: 237574 - DNA, 1467 bp, synthetic construct
  misc_feature 1..1467: note = Description of Artificial Sequence: Synthetic coding sequence
  source 1..1467: mol_type = other DNA
atggcagatacgtttctcgagcatctgtgcttgctggatattgattcagagcctgttgcggctagatccacttcaatcatcgcgacgataggccctgctagtcgtagcgttgagcgcctaaaagaaatgatcaaggctgggatgaacatcgctcgacttaattttagtcacggctcacatgagtatcacgccgagtctatcgcattggatacgaagggtcctgaaatcagaactgggatcttgcagggcggtccggagagcgaagtggaactcgttaagggctcacaggtgctggtgactgtggaccccgctttccgcacccggggaaacgccaacaccgtttgggttgactatcctaatatagtgcgcgtggtgcctgtcggaggacgtatatacatagatgacggattaatttctcttgtggtccagaagattggacccgagggcctcgtgacccaggtggagaatggcggtgtgctaggcagtagaaagggagtaaacctgccaggggctcaggtggacttacccggactaagcgagcaggatgtccgcgacctgcgcttcggcgttgaacacggggtggatatcgtgttcgcatccttcgtcagaaaagcatccgacgtggcggcagtgagagcagccctgggccctgagggacatggaataaaaattatttccaaaatagaaaatcacgaaggtgtgaagcggtttgacgaaattctggaggtctccgacggtatcatggtggcacggggtgatttaggtatcgaaataccggcagagaaagtatttctcgctcagaagatgatgatcggcagatgtaatctcgcaggtaagccagttgtgtgcgcaacccagatgctcgagagcatgattaccaagcctagaccgacaagagcagagaccagtgacgttgcaaatgctgtactggacggcgctgattgcatcatgcttagtggcgagaccgccaagggcaatttccccgttgaggcagtgaagatgcagcatgcaatcgctagggaggctgaggcagccgtgtaccacaggcagctttttgaggaactcagacgggctgcacccctgtcacgggatccaaccgaggtaaccgccatcggcgcagtcgaagctgcctttaagtgctgcgctgctgctatcatagtgcttacaaccacagggagatccgctcagctcctgtctagatatagaccacgcgcagctgtcattgccgtcacgagatccgcacaggctgctcgacaagtgcacctgtgccgaggtgtctttccactgctctatagagaacctcccgaggctatatgggccgatgacgtcgacagaagggtgcagtttggtattgaatctggcaagctgcggggttttctgcgagtgggggaccttgtcatcgttgtgacagggtggcgccctggcagcggatacactaacataatgagggtgttgtcaatttcctag

SEQ ID NO: 237575 - DNA, 1725 bp, synthetic construct
  misc_feature 1..1725: note = Description of Artificial Sequence: Synthetic coding sequence
  source 1..1725: mol_type = other DNA
atgagtattcaggagaatataagcagtctgcaattgagatcttgggtgtctaagtcccagcgcgatctggccaagtctatcctcatcggcgcaccgggaggaccagcaggatacctgcgacgggcttcagtggcccaacttacccaggaactgggcaccgccttcttccagcaacagcagctgccagcggcaatggccgacacgtttctcgagcacttgtgcctactggacattgattccgagcccgtggccgctaggtctactagcatcatcgccacaatcggaccggcatctagaagcgtagagcggctgaaagagatgattaaagctggtatgaacatcgcaaggctcaatttttcacatggatcgcacgaataccatgctgagtccatcgccaacgttcgcgaggcagtcgagtccttcgccggttcccctctcagctatcgtcccgtcgctatcgccttggacacaaaaggacctgaaatccgaacaggaatcctgcaaggcggtcccgagagcgaggtggagctcgtgaaaggttcgcaggtgttagtgacggttgatccagcctttagaaccaggggcaatgccaacactgtgtgggtggactatcccaacatcgtgcgcgtcgtaccagtaggcggaaggatttacatcgacgatggactgatctctcttgtcgtccagaagattggaccggagggcttggtcactcaggtcgagaacggcggagtgctcggatcccgaaaaggcgtgaatctccccggtgcccaggtggacctgccgggactgtcggaacaagatgtcagggacttgcggttcggagtcgagcatggagttgatattgttttcgcctccttcgtaagaaaggctagcgacgtggctgcagtccgagcagccctcgggcctgaagggcacggcatcaaaatcattagcaagattgagaaccacgaaggtgttaaacggtttgacgagatactggaagtgtctgatgggatcatggtggccaggggcgatcttggaattgagatacctgcagagaaggtttttttggctcaaaagatgatgatcggaaggtgcaatctggctggcaagcctgtcgtatgcgcaacacaaatgctagagtccatgattacgaagccccgacccacccgagccgaaacctccgatgtggcaaatgccgttctggacggagctgattgcatcatgctttccggcgagaccgcaaaaggaaattttccagtggaggccgtcaaaatgcagcatgcaatcgcgagggaggccgaagcagccgtgtaccatagacagttgttcgaggagctgaggcgcgctgctcccttatcccgggatccaactgaggtgactgcaatcggagccgtggaagcagcttttaagtgttgcgcagctgctattattgtcctgactaccacaggacgatcagcacaactcctctctcggtatcgacccagagccgctgttatcgctgtcaccagatcagcacaagcagccagacaagtgcacttatgcagaggcgtgtttccgctcttatatagggagccccctgaagccatctgggcagacgatgtcgataggcgtgtgcagttcggtattgaatccggaaagctgcggggattcttaagggtcggagacctcgtgatcgtcgtcactgggtggagaccagggtctgggtataccaacataatgagggtactgtctataagttag

SEQ ID NO: 237576 - DNA, 1632 bp, synthetic construct
  misc_feature 1..1632: note = Description of Artificial Sequence: Synthetic coding sequence
  source 1..1632: mol_type = other DNA
atggaaggcccagccggttacctacgcagggcttctgtggcacaactgacccaagaactgggcacagctttttttcagcagcagcaactgcctgccgcaatggcagacaccttcctagagcatctgtgtcttctggacattgacagtgagcccgttgccgctagaagcacatcaattatagccacgattggaccggctagcagatccgtggagcgtctgaaggagatgattaaagctggaatgaatatcgccaggcttaacttttcacacggctcacacgagtaccacgccgagtctatcgccaacgtgagggaggcagtagagtcattcgcaggctcccccctgtcataccgccctgtggctattgccctagacaccaagggcccagagatacggaccggaatcctccagggcggtccagaaagcgaagtggaattggttaagggctcccaggtcctggtgacggttgaccctgctttcaggacaagaggcaacgcaaatacggtgtgggtggattaccccaatatcgtgcgtgtggtcccggtaggcggaagaatctatatagatgatggactgatcagtctggtcgtacagaaaatcggccctgagggcctcgtcacccaggtggagaatggcggtgttctcggaagccgcaagggagtaaatcttcctggagcccaggtggatctgccgggtttatccgagcaggatgtaagggatctgcgctttggggtcgagcacggggtcgatattgtgtttgcgagtttcgttcgcaaggcctccgacgtggctgctgttagagctgccctgggaccggaagggcacgggattaagatcatctcaaaaatcgaaaaccacgagggggtgaagagattcgatgagatcctcgaagtatccgacggcataatggtggcaaggggcgatctaggtatagaaatccctgcagagaaggtgtttctcgcacagaaaatgatgatcggacggtgtaacttagccggtaagcccgttgtttgcgctacccagatgcttgaatcaatgataactaagccacgccctacgagggccgagacaagcgatgtcgcaaatgccgttctcgacggggcagactgtataatgctctcaggagagaccgcaaagggaaattttcccgtggaggctgtgaaaatgcaacatgcgatcgcacgagaagctgaggccgcagtgtaccaccgccaactgttcgaggagcttaggcgggctgctccattgtcccgcgaccccacagaggttacagctattggagctgtggaagccgcatttaagtgctgtgcggctgccataatagtcctcacgactacagggaggagtgcgcagctgttgagccgttacaggccccgtgctgctgtgattgccgtgaccagatccgctcaggcagccagacaagtccatctttgccgcggtgtttttccgcttctgtacagggagcctcctgaagcaatttgggctgacgatgttgaccggagggtacagtttgggatcgagagcggtaagttacgagggtttctgcgcgtcggggacttggtgattgttgttactggctggcgtccaggatcggggtatacgaacatcatgagggtgctgtcaatatcatag

SEQ ID NO: 237577 - DNA, 1800 bp, synthetic construct
  misc_feature 1..1800: note = Description of Artificial Sequence: Synthetic coding sequence
  source 1..1800: mol_type = other DNA
atgtccatccaggaaaacatatctagcctgcagctcagaagctgggtttctaaaagtcagagggatttagccaagtccatcctcatcggtgcgccaggggtgccacttacgacacagcagtgtggggctgacccacagcgtggcagacctcgcgaagtatgttctggaatggaaggacctgcaggatatctcaggagagcatccgtggcacagctcacccaggaattagggactgcctttttccagcagcagcagctccccgctgccatggctgacacctttctcgagcacctgtgcctgctggatatcgattcggaacctgtggccgctagatccacttccattatcgcgaccattgggcctgcctccagaagcgtcgagagactgaaagagatgataaaggcagggatgaacatagctagactcaattttagccacggctcccatgagtatcatgccgaatccattgcgaacgttagagaagcagttgagagcttcgctggcagtcctctctcatataggcctgtggcgattgctcttgataccaagggcccagaaattaggacgggcatcctccaggggggacctgaaagcgaggtggagctggtgaaaggctcacaggtactggtgacagttgatcccgctttcagaactagagggaatgcaaatacggtgtgggtggattaccccaacatagttcgggtcgtccctgtgggtgggcgtatctacattgatgacggactcatttcgctggttgtgcagaaaataggccctgaaggtctcgtcacacaggtggaaaacggcggtgttctgggatccagaaagggggtgaatctccctggagcccaagtggatttgccgggactgtccgaacaggacgtcagagacctgagattcggagtagagcatggggtggacatcgtatttgccagcttcgtgagaaaggcaagcgacgtcgcggcagtgcgggctgctctgggtcccgagggtcacggcattaaaataatctccaagatagagaatcacgagggggtcaagagatttgatgaaatcttggaggtctccgatggaatcatggtggctcgcggagatttagggatcgagattcccgcagaaaaagtgttcttggcacagaagatgatgattggtcgttgtaacttagcaggaaagcccgtggtgtgtgctactcagatgctagagtcgatgatcaccaaaccccgtccgacccgcgctgagacttccgacgtcgctaacgcagtgctggatggcgctgattgcattatgttgtcgggcgagaccgccaaagggaattttccggtggaggctgtcaaaatgcagcatgcaatcgcgagagaggccgaggccgctgtctatcaccggcagctttttgaggagctgcggagagccgctcccctgtcccgcgaccccaccgaagttactgcgatcggtgctgtggaggccgctttcaagtgctgcgccgctgccataatcgtgctcacaacgactggtagatcggcccaactcctttccaggtacaggcctagggcagccgtgatagctgtgactagatcagctcaggcggcacgtcaggtgcatttatgccgaggtgtgttccccctcctgtacagggagcctcctgaagccatctgggcagatgacgttgatcgtagggtccagtttggtattgagtctggcaagctccgtggcttcttgagggtgggcgatttagtcatcgtcgtcacaggctggcgtcccggttccggttatacgaacatcatgagggtgctctccatttcttag

SEQ ID NO: 237578 - DNA, 1596 bp, synthetic construct
  misc_feature 1..1596: note = Description of Artificial Sequence: Synthetic coding sequence
  source 1..1596: mol_type = other DNA
atgagcaaaccgcactctgaggcaggaaccgcttttatacagacccagcagctccacgcagcaatggctgataccttcttagagcacatgtgtaggctggacattgatagtccccctatcactgccagaaacactggcatcatttgcaccatcgggcctgcctccagatcagtcgaaactctcaaggagatgataaaatctggcatgaacgtcgcccgactgaactttagccacgggactcacgaatatcatgcggagacaataaagaacgtgaggacggctaccgagtcctttgccagcgatccaatactctatcgcccagtcgctgtggcacttgacacgaagggacctgagataagaacaggcctgattaaaggatcgggtacggcggaagtggagctgaaaaagggagctaccctgaagattaccctcgataatgcttacatggaaaagtgtgacgaaaacatcctctggctcgattataagaatatttgcaaagtggtcgaagttggctcaaagatatatgtcgatgacggcctgatttctctgcaggtgaaacagaagggagccgatttcctggtgaccgaggtcgaaaatggcggtagtttgggatcaaaaaaaggagtgaatctcccgggagccgctgtggatctaccagccgtgtccgagaaggatatccaggacctgaagttcggcgtggaacaggacgtggacatggtgtttgcctcctttattcgaaaggccagcgatgtgcacgaggtgagaaaggtactgggtgagaaaggcaagaacatcaaaatcatctcgaagatcgagaatcatgagggagtccgtcggttcgatgaaatactggaggcctctgacggaataatggtagcacgaggggacctggggatcgagataccagcagaaaaggttttcttggcccaaaaaatgatgatcgggcgttgcaatcgggcaggcaaacctgtgatttgcgccacccagatgttggagtcaatgataaaaaaaccccgtcctacgcgggctgagggcagcgacgttgcgaatgcggtgctggatggagcagattgtatcatgctcagcggagagactgcaaagggagactatcctctggaggcagtgagaatgcagcacctgatagcccgagaggccgaagcagccatgtttcaccgaaaactttttgaagaactggtcagagcttcaagccacagtactgaccttatggaggccatggccatgggcagcgtcgaagcgtcctacaagtgtcttgccgctgctttgatcgtcctcacggaaagtgggcgttcagcacaccaagtcgccagatataggcccagggcgccaataatcgccgtcacccggaatccacagactgcaagacaggcccacctttatcggggaatattccctgtgctctgtaaagatcccgtgcaagaggcatgggctgaggacgtcgacttacgcgtcaacttcgcaatgaatgttggcaaagccagaggcttttttaaaaaaggtgacgtggttatagttctcacaggctggcgccctggctcgggattcacaaacaccatgcgtgtcgtcccagtgccttag

SEQ ID NO: 237579 - DNA, 1101 bp, synthetic construct
  misc_feature 1..1101: note = Description of Artificial Sequence: Synthetic coding sequence
  source 1..1101: mol_type = other DNA
atgtctaaaccacactcagaagccggaactgcatttatccagacacaacagttgcacgccgctatggcagacacattcttggagcacatgtgccggcttgacatcgatagccctcccataaagaaaggcgttaacctccccggtgccgctgtggacctgccagctgtatctgaaaaggacattcaagacttaaagtttggcgtggaacaggacgtcgacatggtgttcgcttcattcatccgtaaagcctctgacgtccacgaggtgaggaaggttcttggcgagaagggcaagaatatcaagattatcagcaagatcgagaatcacgaaggcgtgaggcgcttcgacgaaatactggaagcctcagatgggattatggtagccaggggagaccttggaatcgagattcccgctgagaaagttttcctagcacagaaaatgatgatcggtcggtgtaatagggcaggcaagcctgtcatctgcgctacacaaatgctcgagtccatgatcaagaagccaaggcctactagggccgagggctcagacgttgcaaacgcggtgttggacggcgcagattgcatcatgctttccggcgagaccgccaaaggggactatccgctggaggctgtgcgaatgcaacacttgatcgcacgcgaggctgaagctgctatgttccatcgcaagttattcgaggaactggtacgagccagctcgcattccacagatctgatggaggccatggccatgggatccgttgaggcctcctataagtgtctggcagcagccctcatagtactcaccgagagcggcaggtccgctcatcaagtcgcacgctatcgaccacgtgccccaatcatagcagttacccgtaatccacagacagccagacaggcccatttataccgtgggatctttccggtcctatgcaaagatcccgtgcaggaggcctgggctgaggacgtagaccttagggtgaattttgcgatgaatgttgggaaagccagaggatttttcaagaagggagacgttgtgatagtgcttaccggctggcgacccggatccggatttactaacactatgagagttgtcccagtgccgtag

SEQ ID NO: 237580 - DNA, 1596 bp, synthetic construct
  misc_feature 1..1596: note = Description of Artificial Sequence: Synthetic coding sequence
  source 1..1596: mol_type = other DNA
atgtcaaagccacattccgaggccggtaccgctttcattcaaacacagcagttgcatgcagccatggccgacacctttttggaacacatgtgtcggttggacatagactctcccccaatcacagcccgtaataccgggatcatctgtacgattggaccggcttcccgatccgttgaaaccctgaaggaaatgatcaagagcggcatgaacgtggcacgccttaactttagtcacggcacccatgaatatcatgctgaaaccataaagaacgtcaggaccgctacggaatcattcgctagtgaccccatcctctaccgccctgttgcagtcgctcttgatactaaaggccctgaaatccgcaccgggctaatcaagggcagcggtacggcggaagttgagctcaaaaagggagcaacactgaagatcacacttgacaacgcctatatggagaaatgcgacgaaaatattttgtggctcgattacaagaatatatgtaaggtggtggaggtgggcagcaaaatttacgtggacgacggattgattagccttcaagttaagcagaagggggctgactttctcgtcactgaggtcgagaatggtggatcgctgggtagcaaaaaaggtgtcaacctgcccggagcagccgtcgatcttcctgccgtatccgagaaagatatacaggatctgaaatttggagtggagcaagacgttgatatggtgtttgcatcattcattaggaaggcctctgacgtgcatgaagttcgtaaggtcctgggtgagaaggggaaaaacattaagattatctctaagatcgaaaaccacgagggcgtaagacgcttcgacgagatcctggaagccagtgacggaataatggtagcacggggtgacctggggatcgagattccggctgaaaaggtctttctggcccaaaagatgatgattgggagatgcaatcgcgcaggaaagcccgttatctgtgcaacgcagatgctggaatcaatgatcaaaaaaccaagacccacgagggccgaaggcagcgacgttgccaacgccgtattagatggggcagactgcatcatgctgtcgggtgaaacagccaagggagactaccctctcgaggccgtgcgaatgcagcatctgatcgctcgcgaggcagaggccgctatttatcacctccagctctttgaagagttgaggaggttggcaccaattacgtctgaccctacagaagccacagcggttggggcagtggaggcttctttcaaatgctgttctggtgcaatcatagtactgaccaaaagcgggcgaagcgctcaccaggtagcgaggtaccggccaagagcccctattattgcagtgactcggaatccccaaaccgcgcgacaggcacacttatatcgtgggatattccccgtcctttgcaaagatccggtacaagaggcctgggctgaagatgtggatctccgcgtaaatttcgcgatgaacgtgggaaaggcacgcggattctttaaaaaaggcgatgttgtgatcgttctgaccggttggcgcccaggcagcggttttactaatactatgcgagtcgtcccggtcccctag

SEQ ID NO: 237581 - DNA, 1596 bp, synthetic construct
  misc_feature 1..1596: note = Description of Artificial Sequence: Synthetic coding sequence
  source 1..1596: mol_type = other DNA
atgagcaaaccccattctgaggctgggacagcatttatccagacacagcagctccacgccgctatggccgacacatttctcgagcatatgtgtagattggacatcgatagtcctccaataactgctagaaacactggtattatctgcaccatcggaccggcaagtaggagtgtggaaaccctcaaggaaatgatcaagagcggtatgaatgtcgcacgacttaatttctcccatggaacacacgagtaccatgcggagactatcaaaaacgtgcggactgccaccgaatcattcgcaagtgaccccatcctgtatcggccagttgcggttgccctggatactaaaggacccgagatccgcacaggcctgattaaagggagcggcacagctgaggttgaattgaagaagggcgcaacactcaagatcacactcgataatgcttacatggagaagtgcgatgaaaatatcttgtggctggactacaaaaatatctgcaaggtcgtagaagtgggtagtaagatttacgttgatgacggcctgattagcttgcaggtgaaacagaaaggcgctgacttcctggtaaccgaagttgagaatggtgggtcattgggttccaagaagggagttaatttgcctggagctgccgtcgacctaccagcagtgtctgaaaaggacatccaggacctgaagttcggggtggagcaggatgtcgacatggttttcgcctctttcatcaggaaagcctctgacgtccatgaggtgagaaaagtgctcggcgagaagggcaagaatatcaagatcatcagcaagatcgaaaatcatgaaggggtgcgacgcttcgacgaaatattagaagcatctgacggaattatggtcgccaggggcgacctgggcatcgaaatccccgcagaaaaggtgttcctcgcccagaagatgatgattggtagatgtaatcgagccggaaaacccgtgatctgtgcaactcaaatgctcgagagcatgattaaaaaacctcggcctacgcgggcagagggatccgacgtcgctaatgctgtgctggacggagcagactgtattatgttatcgggcgagactgcgaagggtgattacccccttgaggccgttcgaatgcagcatctaatagcacgggaggccgaggcggcaatgttccatcggaaactcttcgaggaactcgtccgagctagttcacatagcaccgacctcatggaagccatggccatgggtagcgtcgaagcatcttacaagtgccttgctgcagcactaattgtccttactgaaagtggacgtagtgcccaccaggttgccaggtaccggcctagggctcccattattgcggtcaccagaaatccccagacagcacggcaggctcacttatatcggggtatcttcccagtgctgtgcaaagacccagtgcaggaggcgtgggcagaggacgtggacctgcgcgtgaacttcgctatgaacgtgggaaaggcaaggggatttttcaagaagggtgacgtggtcatcgtactgacgggctggagaccgggaagtggcttcaccaataccatgcgagtggtccctgttccatag

SEQ ID NO: 237582 - DNA, 1377 bp, synthetic construct
  misc_feature 1..1377: note = Description of Artificial Sequence: Synthetic coding sequence
  source 1..1377: mol_type = other DNA
atgtcaaagcctcattcagaagcaggaacagcctttattcaaacccaacaactccacgctgccatggctgacacatttctggagcacatgtgtcggctagacattgacagtccacccatcacagcccgaaataccgggatcatctgtaccatcgggcctgcaagtcgttccgaggtggagctcaagaaaggagccaccttaaagattactctggacaacgcttacatggagaaatgcgacgagaatatactctggctggattataaaaatatttgcaaagttgtcgaagtcgggagtaagatttatgtggatgacggactgatctccctgcaagtgaaacagaagggagccgactttctggtgacagaggtcgaaaatggtggatcgctcggaagcaaaaagggggtaaacctgcccggagccgctgtggatctgcccgcagtcagtgagaaagacattcaagatctgaagttcggagtggagcaggatgtagatatggtcttcgcatctttcatccgaaaggcgtccgatgttcatgaagtacgcaaagtcttaggagagaaggggaagaatattaaaatcattagcaaaattgaaaaccatgagggagtgaggcgatttgacgaaattctagaggcgtctgatggcataatggtggcaaggggtgatctaggcattgaaattccagctgagaaagtatttcttgctcagaagatgatgatcgggagatgcaatcgcgcaggtaaacctgtcatctgcgctacacagatgctcgagagtatgataaaaaagccccgtcctactcgcgctgaagggtctgacgtcgcaaacgctgtattggatggggcagattgtattatgctttcaggcgaaacagcaaagggcgattaccccctggaagctgtccgcatgcagcatctgattgcaagagaagccgaggcagcaatttatcatttgcagttattcgaagagttgagacgccttgcccctatcacctctgatccaaccgaggccaccgccgtaggggctgttgaagcaagctttaagtgttgctctggagctattatcgtcctgaccaaaagcggcagaagcgcccaccaggtggctagatacaggccaagagcaccgatcatcgccgtaacaagaaacccacagacggccaggcaggcacacttgtatcgaggcatctttcccgtattgtgcaaggaccccgtgcaggaagcctgggcggaagacgtggacctgagagtaaacttcgccatgaacgtgggaaaggctcggggtttctttaagaaaggtgacgttgtgatcgtattgacagggtggcgacctggctcgggatttaccaacactatgcgagtcgtgccagtgccatag

SEQ ID NO: 237583 - DNA, 1551 bp, synthetic construct
  misc_feature 1..1551: note = Description of Artificial Sequence: Synthetic coding sequence
  source 1..1551: mol_type = other DNA
atgagcccagaagcccagccacagcgtactaagggcccacagcagccttgccggagccccatcgtgaagcccggtctgcccagcttccgacctagcagttgtacccagccctggctgacgcattcttggtccacttgtgctgcatggaccctcatccaccacccatcccaacccggaacattggcttcgtccgtgccgctataccacgctgagaccatcaagaacgtgaggacagccaccgagagcttcgctagtgatccaattctgtatcgccctgtggccgtggcacttgacaccaaagggccagagattaggactgggctgattaaaggaagtgggaccgctgaggtggagctgaagaaaggggcaacactaaagatcaccttggataacgcatacatggaaaagtgcgacgaaaacattctctggctcgactataaaaacatctgcaaagtggtggaggtggggtccaaaatatacgtcgacgatgggcttattagtctgcaggtcaagcaaaagggcgcagacttcctggttactgaggtagagaacggtggttccctaggcagcaaaaaaggggtgaatcttccaggtgctgcggtggatctgcctgcggtcagcgagaaggacattcaagatttgaaatttggagtcgagcaggatgtggatatggtgttcgcctcattcattcggaaagccagcgatgtacacgaagtgcggaaagtccttggtgagaagggtaaaaacatcaagatcatatccaaaatagagaatcacgagggcgtgaggcgcttcgatgagatacttgaagcttctgacggaatcatggtggcacgtggcgacctggggatcgagataccggctgagaaggttttcctcgcacagaagatgatgatcggtcggtgtaaccgggctggaaagcccgtgatttgcgctacccagatgctcgagagtatgataaagaaaccccgacctacgagagctgaggggagcgacgtggccaatgcagtgctggacggcgcagattgcatcatgctctcaggggagaccgccaagggcgattacccattggaggcagtccgaatgcagcacctgatcgctagagaggcagaagctgccatttaccatcttcagctttttgaggagttgcgtcgcctcgctcccattacctctgatccgacagaagctaccgctgtgggtgccgtggaggcatcatttaaatgctgctccggggctatcatcgtgctgaccaaaagcgggaggtcagctcaccaggtcgccagatatcgccctagggcccctataatagcagtgacgcgcaacccacagacagccaggcaggctcatctgtaccggggaatcttccctgtcctctgcaaggatccagtgcaggaggcctgggctgaggacgtagatttgcgagtgaacttcgccatgaacgtgggcaaagccaggggtttcttcaagaagggcgatgtagtgattgtcctgacggggtggcggccagggtcggggttcactaatacaatgagggtagtccccgtcccttag

SEQ ID NO: 237584 - DNA, 1212 bp, synthetic construct
  misc_feature 1..1212: note = Description of Artificial Sequence: Synthetic coding sequence
  source 1..1212: mol_type = other DNA
atggccggtgcggctacccaggcgtcactggaaagcgcccctcggattatgcggctggtcgctgagtgcagtcgatctcgggctagagccggtgagctttggctgccacacggcaccgtcgccaccccagtctttatgccagtcggcacccaggctactatgaaaggaatcacaacggagcagctcgatgccttaggttgtaggatttgtcttggcaatacctaccatctggggctgcggccaggcccagagctcatacaaaaagcaaatgggctgcacggctttatgaactggccccacaatctgcttacggattctggtggcttccagatggtgtccctggtttcactgagcgaggtgaccgaagagggtgttcgcttccgctctccttatgatggcaacgaaaccctgttgtcccccgagaaaagcgtccaaatacagaacgcgctgggtagtgatatcatcatgcagcttgatgacgttgtgagcagtaccgtaacgggtccaagagtggaagaggctatgtacagatccattcggtggcttgataggtgtatcgccgcacaccaaaggccagataaacagaatctattcgctattattcagggaggtcttgacgccgatctgcgagcaacttgtctggaagaaatgactaagcgcgacgtcccgggattcgccattgggggtttgagcggcggagaatctaagagtcagttttggaggatggtcgctctcagcacctctcggctgccgaaggataagccacgctatctgatgggcgtcggatatgccaccgatctggtggtgtgtgtagcactaggatgcgatatgttcgactgcgtcttcccaacccgtaccgcgaggtttggatccgctctagtgccaacaggcaacctgcaactacgaaagaaggttttcgaaaaggattttggacctattgatccagaatgcacatgtccaacgtgccagaagcactctcgagcatttttacacgctctcctccactccgataacacagctgctctgcaccatctcacggtgcacaacattgcatatcagttacagcttatgagcgccgtgcggacatccattgtagagaagcgatttcccgattttgttcgtgatttcatgggtgccatgtatggagaccccaccctttgccctacatgggctaccgacgcgctcgcctctgtggggatcacgttgggctag

SEQ ID NO: 237585 - DNA, 678 bp, synthetic construct
  misc_feature 1..678: note = Description of Artificial Sequence: Synthetic coding sequence
  source 1..678: mol_type = other DNA
atggctggcgcagcgactcaggcctcactggagagcgcccctcgaattatgcgcttagtcgctgagtgcagtagatcaagggccagggcgggagagctgtggttgccccacggaactgtggccacaccagtgtttatgcccgttggaacccaggccaccatgaaggggatcacgaccgagcagctggatgctttggggtgcagaatctgtctcggaaacacctatcacctggggctccgtccagggcctgagcttatacagaaggctaacggcctccatggctttatgaactggccacacaacctcctaacggacagcgggggatttcagatggtttccctggtcagcctcagcgaggtgactgaggaaggtgtcagattccgcagcccctatgacggcaacgagaccctgcttagccctgagaagagtgtccagattcaaaacgctcttggttcagacatcattatgcagctggatgatgttgtcagctccacagtaacaggccctcgggtcgaagaagctatgtatagacccctgggactagtgaccggggctctccttcaagtgaacccattggccggaccggttcactgttcaccttccgcggctggacaggccgagccactgcgccattacccaggttgggccggaaggagatctccaggtcatctgccttag

SEQ ID NO: 237586 - DNA, 2097 bp, synthetic construct
  misc_feature 1..2097: note = Description of Artificial Sequence: Synthetic coding sequence
  source 1..2097: mol_type = other DNA
atggccgctgctggcgctgccgtcgccagatccccaggtatcggggctgggcctgcccttcgtgcaaggagatcaccacctcctcgagccgctcgcctgcccagactcctggtcttattagcagctgcggctgtagggcctggtgcgggtggggcagcacgattgtatagggctggcgaggacgctgtttgggtgctggattcaggctcagtgcggggtgccactgctaactcctcagcagcgtggctcgtgcagttttattccagctggtgtgggcactgcatcggctacgccccaacttggcgcgctctggccggagatgtgagagattgggcctctgccattagggtagcagccctcgattgcatggaggaaaagaaccaagcagtctgtcatgattatgatatccatttttacccgacctttcgatacttcaaggctttcacaaaggagtttacaaccggtgagaattttaagggtccagaccgagagctgaggacagtgagacagacaatgatcgactttctgcagaaccacacagaaggctcacgtcccccagcctgccccagactcgatcccattcaaccttcggacgtgctgtctctcctggataatagagggtcacattacgtcgctatagttttcgagtctaattcctcatatctgggtagagaagtgattctcgatctgattccatacgaaagcatagtggtaacacgagcgttagacggagataaggctttcctggaaaaactcggcgtgtcttccgttccatcgtgttatctgatttatcctaacggcagccacggcctgatcaacgttgtaaaacccctcagagctttcttcagtagctatctcaaaagtctgccagatgtcagaaaaaaatccttgccccttccggagaaaccacataaggaagaaaactcagagatagtggtttggagagagttcgataagtccaagctctacaccgtggatctcgaatccgggctgcattacttgctgagagtggagctcgcagcacacaagtcacttgccggtgcggaactgaagacactcaaggactttgtaaccgtcctggctaagctctttcccggacggccacccgtaaagaagctcctggaaatgctccaggagtggctagcatccttgccactcgacagaatcccttataacgcagtactggacttggtgaataacaagatgaggatctctgggattttcctgaccaaccacattaagtgggtgggatgtcagggcagtcggagcgaactccgaggttatccatgcagtttgtggaagctgtttcacacactgaccgtggaggcgtccacacaccctgacgccctagttgggacaggcttcgaagatgatccccaggcggtactgcagactatgcggcgttatgtgcatacgtttttcggatgtaaagaatgtggcgaacacttcgaggagatggctaaggagtcaatggattccgtgaaaaccccggaccaggccatcctatggctgtggaagaagcataatatggtgaatggtcgcctagctggccacctatccgaggaccctcggttcccaaaactgcagtggccaaccccagatttgtgtcccgcatgccatgaagagataaaaggcctggcctcctgggacgagggtcacgtcctaacctttctcaaacagcactatggccgtgacaacctgctcgacacctactcagcagatcagggggacagttccgaaggaggcacactggccagaggggaggaggaagaaaagagattgactccaccagaggtcagccatggtgatcgggacacacagagcgtcagacctccaggagcactcgggcctcgccctgctctgcctgaatctctccaccattctctggacggaaaactgcaatctctggacgggcctggcgctcataaagaagtcggaggggcagctccattcctgggtgtcgacttcagcagcctggatatgtcattatgtgtggtgctgtacgtggcgagttcacttttcttgatggttatgtatttctttttcagagtacgcagccgacggtggaaagttaagcatcaccacccagccgtgtag

SEQ ID NO: 237587 - DNA, 948 bp, synthetic construct
  misc_feature 1..948: note = Description of Artificial Sequence: Synthetic coding sequence
  source 1..948: mol_type = other DNA
atggaggagaaaaaccaagcagtgtgtcacgattacgatattcacttctaccctacgtttagatactttaaagccttcacaaaggaatttactactggagagaatttcaaagggccagatcgagagttgcggacggtcaggcagacaatgattgattttcttcagaatcatacagaagggtcacgcccacccgcttgccccaggctcgacccaattcacgtgaaaccgctgcgagcttttttctctagctacctgaagtcattgcccgacgtgagaaaaaaaagccttccccttcccgaaaagccccataaggaagagaactctgaaatagttgtatggcgcgagtttgataagagtaagctttatacagtggacctagaaagcggtttgcactacctgttgagggtcgaactagcggctcacaaaagtctagctggtgctgagctgaaaacactgaaggatttcgtaacggtcctggccaagctctttccgggaaggccgcctgtcaagaagctgcttgaaatgctgcaggaatggctggcttccctgcccctggaccgaattccatataatgccgtgctcgacctggttaataataagatgaggatctccggcatcttcttaacaaatcacataaagtgggtggggtgccaaggctcccgctccgagttaagaggctacccatgttctctttggaaactatttcatactctgactgtcgaggccagcacccatccagatgcccttgttggaacaggcttcgaggacgacccacaggctgtgctccagaccatgcggcgttacgtacacaccttcttcggatgtaaggagtgcggcgagcacttcgaggagatggccaaggaatcgatggacagcgtaaaaacaccagaccaggcaatcctatggttgtggaaaaaacataacatggtgaatgggaggctcgcatag

SEQ ID NO: 237588 - DNA, 735 bp, synthetic construct
  misc_feature 1..735: note = Description of Artificial Sequence: Synthetic coding sequence
  source 1..735: mol_type = other DNA
atggctgccgctgcagctgcaggagaagctcgtcgagtattggtgtacggcggacgcggagctttgggatcacgctgtgtccaggcatttcgtgcacgcaactggtgggtcgcgagtgtggacgttgttgagaatgaggaggcgtctgcctccataatcgttaaaatgacagattcttttactgagcaagcggatcaagtaacggccgaggtgggaaaattacttggggaggaaaaggtagatgccatcctctgtgtagctggcggatgggccggaggaaacgctaagagcaagtcacttttcaagaattgtgacctgatgtggaagcagtcaatatggaccagtaccatctcctctcaccttgctactaagcacctcaaggagggcggactgctcaccctggccggagcgaaggcagcactggatggcacccccggtatgatcggatacgggatggccaaaggagcagtccatcaactgtgccagtcactcgctgggaagaatagcgggatgcccccaggagccgcagcaatcgccgtcctgcccgtgacgctggatacacccatgaatcggaagtccatgcccgaagccgacttttccagctggacccctctggagtttctggtcgagacctttcacgattggatcacggggaagaaccggccatctagtggatctcttatccaggtcgtgaccacggaggggaggacagagctgacccctgcctatttctag

SEQ ID NO: 237589 - DNA, 681 bp, synthetic construct
  misc_feature 1..681: note = Description of Artificial Sequence: Synthetic coding sequence
  source 1..681: mol_type = other DNA
atggctgccccactgctccacacccgactgcctggggatgctgccgcttctccaagcgcagtgaagatgttgggagctagccgaacaggcatctcaaatatgagagctctggaaaatgatttttttaactctcctcccagaaaaacagtacaattcgggggaaccgtaactgaagttctgctcaagtataaaaccggagagacaaacgatttcgagctccttaaaaatcagctcttggacccagacatcaaggatgaccaaattatcaattggctattagagttccggagctctatcatgtacctgacgaaggatttcgagcagctcatttctattattctgcgcctcccttggctgaatagatcccagacagtggtggaggagtatcttgcttttcttggtaacctggtgtctgcccaaacagtttttttgcgaccctgcctgagtatgatcgctagtcattttgttcctcccagagtaatcattaaagagggggacgtcgacgtgagcgactccgatgacgaagatgataacctgccagcaaacttcgacacaagtcagagcctcgctaacaactccaagatctgtacaatcgataccgtagtaagccacgcaaataccggaggcaagatcagcatctgttcgaagataagggagaataccggcatgttgaggagctag

SEQ ID NO: 237590 - DNA, 894 bp, synthetic construct
  misc_feature 1..894: note = Description of Artificial Sequence: Synthetic coding sequence
  source 1..894: mol_type = other DNA
atggatgctgaaggattggcacttctgttgcccccagtcactttggccgctctagtggattcctggctgcgagaggactgtcctggactgaattacgcagctttggtgagcggggctggcccttctcaagcagccctctgggcaaagagtccaggggtcttagccggacagcccttttttgatgcaatttttacccagctaaactgtcaggtgtcttggtttctgccagagggctctaaactggtgcctgtggcccgtgtcgctgaggtgcgaggccctgctcattgccttctgcttggtgagagggtggcccttaataccttggctagatgcagcggcattgctagcgcagccgcagcagctgtggaggcggcacggggtgcgggttggacaggacatgtagcaggtacccggaagactacccccggtttccgtctcgtggaaaaatatggcctcttggtcggcggagccgcatcccacaggtatgatctggggggattggtaatggtgaaggataatcacgttgtcgcagcgggaggagtggaaaaagccgtgagagccgcaagacaggccgcagacttcactctgaaggtggaggtcgaatgcagtagtctgcaagaagctgtgcaggcagctgaagccggtgctgatctcgtgttgttggacaacttcaagccggaagagctccacccaaccgccacagttctgaaagcgcagttcccaagtgtggcggttgaggcttccgggggaattacattagacaacctcccacaattctgtggtcctcacatcgacgtaatcagcatgggaatgctcacacaggctgcccctgccctggacttctccctgaagcttttcgcaaaagaagtcgcacctgtgcctaagatccactag

SEQ ID NO: 237591 - DNA, 498 bp, synthetic construct
  misc_feature 1..498: note = Description of Artificial Sequence: Synthetic coding sequence
  source 1..498: mol_type = other DNA
atggatgctgagggccttgctcttcttctgccacctgtgactctcgcggctctcgtggactcgtggctcagggaagattgtccagggctcaactatgccgcactagtgtcaggcgctggtcctagccaagcggcattgtgggccaagtctccgggagtattggctggccagcccttcttcgacgccatctttactcagctgaattgccaagtttcttggttccttccagaaggaagtaagttagtacccgttgccagggttgctgaagtaagagggcctgcacactgtttattactcggggaacgagtcgccttaaacacgcttgcccgttgcagcggtatcgcatcggccgcagctgccgctgtcgaggccgctcgcggagccggatggaccgggcacgtggccggtaccaggaaaaccaccccgggtttcagactcgtggaaaagtatgggcttctcgtgggcggtgcggcatcccaccggtacgatctcggatag

SEQ ID NO: 237592 - DNA, 2154 bp, synthetic construct
  misc_feature 1..2154: note = Description of Artificial Sequence: Synthetic coding sequence
  source 1..2154: mol_type = other DNA
atggcagtagccgtacggaccctccaagagcaactcgaaaaagccaaagagagcttaaaaaacgtcgatgaaaatattcgcaagctgaccgggcgtgatcctaacgatgttcggccaatccaagcaaggcttctggccctctcaggcccagggggtggacgcggacgcggtagtttactcctcagacgaggattttctgattctggagggggtcctcctgccaagcaaagggatctggagggagcagtgagcaggctagggggtgagagacggactagaagagagtcaaggcaggagagtgatcctgaggatgacgatgtgaagaagcctgcccttcaaagcagtgtagtcgcgacaagcaaggagcgaacacggagggacctcattcaagaccagaatatggacgagaagggaaaacagagaaatcgtcgtatattcggtcttctaatgggtaccctccagaaattcaaacaggaatccaccgttgcgaccgagcggcagaaacgtcggcaggaaattgagcaaaagttggaggttcaggccgaggaggagagaaagcaggtagagaatgaaaggcgggagctgttcgaggagaggagggccaaacagaccgagctccggcttctggagcagaaagttgaactagcacaactgcaggaagagtggaacgaacataacgcaaaaatcatcaaatatatccgaacgaaaaccaagcctcacttgttctatattcctgggaggatgtgccccgctactcagaagcttatcgaagaatctcaacggaagatgaacgctttgtttgaagggagacgtatagagtttgccgaacagatcaataagatggaggcccgacccagacgacagtctatgaaagaaaaggagcaccaagtggttaggaacgaagaacagaaagctgaacaggaagaggggaaggtggcccagcgtgaagaagagttggaggaaacaggcaaccagcacaatgacgtggagatcgaagaagctggtgaggaggaagagaaggaaatcgccatcgtgcacagtgacgcagagaaggagcaggaggaggaggagcaaaagcaggagatggaggttaagatggaggaagaaacagaagtgcgggagagtgagaaacagcaggactcgcagccggaggaagtcatggacgttttagaaatggtcgaaaacgtaaagcatgtgatcgccgatcaagaggtgatggagacgaatcgagttgagtccgttgagccgtctgagaatgaagctagtaaggagcttgaacccgaaatggaatttgaaatcgagcccgacaaggaatgtaagacactttctcctgggaaggagaatgtctcggccctcgatatggagaaggagtccgaggagaaggaggaaaaggagtcagaaccgcagccagagcctgttgcccaacctcagcctcaatcccaacctcagcttcagctgcagtcacagtcgcagcccgttctgcagtcccagcccccatcacaacccgaggatctgtcattggccgtgttgcagccaaccccccaagtgacgcaagaacagggccacctgctacctgaaaggaaggacttccctgtggagtctgtcaaactgaccgaggtgcctgtggagcccgtgctgaccgttcaccccgagtcaaagtctaagactaagactcgctctagatcacgagggcgtgcccgaaataaaacctccaaaagccgatcccgctcttcttcatcctcatccagcagctcatcgagtacttcaagcagctcgggatcatcctccagtagcggaagcagttcctccagaagctccagtagttcatcctcttctacctctgggtcttcctcccgggactctagttccagcacctcatcctcatcagaatctcggtcaagaagccggggacgtggtcacaatagagatcggaagcacaggcggtctgtggaccggaagcgacgggatactagcggcctggaaaggagtcataaaagctctaaaggaggttcctcccgggacaccaaaggcagcaaggataaaaactcaaggtccgaccgaaaaagatcgatctctgagtcgagcagaagcggcaaacggagcagcagatccgagagggatcgaaaatccgataggaaggacaagcgcagatag

SEQ ID NO: 237593 - DNA, 1704 bp, synthetic construct
  misc_feature 1..1704: note = Description of Artificial Sequence: Synthetic coding sequence
  source 1..1704: mol_type = other DNA
atgcacggcaggttaaaggtgaagactagtgaggaacaggccgaagcaaaacgcctcgagagagaacaaaaattgaaattgtatcagtctgcgacgcaggccgtttttcagaagcggcaggccggagagcttgacgagtcagtccttgagttgacaagtcaaatacttggcgcaaatcctgatttcgccacactctggaattgcagacgagaagtgttgcagcagctggagacccagaagagcccggaagagctggctgctctggtaaaggcggagctcggttttctggagagctgcctacgcgtgaaccccaagagctacggcacgtggcatcaccgctgttggctgctgggcaggctgccagaacccaattggactcgtgaactggagctgtgcgcccgatttctcgaagtggatgagaggaatttccattgctgggattaccgaaggttcgtggccacccaggctgctgtcccacccgctgaggagttagcttttactgattctctcatcaccaggaatttttcgaattattcttcctggcattataggtcttgtttgcttccacaactgcatccccagcctgattcaggcccacaaggacgactgcccgaagacgttctgctcaaggaattagagctggtacagaatgccttttttacagatcccaatgatcagtcggcctggttctatcacaggtggttactcggtagagctgacccccaggatgcactgagatgtttacacgtgtcacgagatgaagcctgcctgaccgtgtcattttctaggccgctcctggtgggctcccgcatggagatcctgctgctcatggtcgatgactcacccttgattgttgagtggcgcacccccgatggtcggaaccgtccttctcatgtgtggctgtgcgatctcccagctgctagcctgaatgaccaactgccccaacacacgtttcgagtcatctggacagccggagatgtgcagaaggaatgcgttttactgaagggaagacaggagggatggtgcagagacagcactaccgacgagcagctgttcagatgtgaactctccgtggagaaatcaaccgtgctacagtccgagttagagtcatgcaaagagctgcaagagttggaacctgagaacaagtggtgtttgttaacaataatactccttatgcgggctcttgaccctctcctgtacgagaaggaaaccctgcagtatttccagacattgaaggcagtggacccgatgagagcaacctatctggatgacctgaggagcaagttcctgcttgaaaactctgtactgaagatggagtatgcggaggtgagggtgctgcacctggcccacaaagacctgaccgtgctgtgccatctcgaacaattgctgctcgtcacacacctcgatttatcacacaatcgcctacgcacattacctccagcgttggccgcattgcgctgcctcgaggtgctgcaggcatctgacaacgccattgagagcctggatggggtaacgaacctgcccaggttgcaggagctgttgttatgtaataaccgcctgcagcagcccgcagtgttacaacctcttgcgtcgtgcccacggttagttctgctgaacctgcagggaaaccccctctgtcaggcagtgggcattcttgaacagcttgcagagttgcttccaagcgtctccagcgtgctcacatag

SEQ ID NO: 237594 - DNA, 996 bp, synthetic construct
  misc_feature 1..996: note = Description of Artificial Sequence: Synthetic coding sequence
  source 1..996: mol_type = other DNA
atggggacacctcagaaggacgtcataatcaaatccgatgctcccgacacgctcctactcgagaaacacgccgattatattgcttcctacggcagcaagaaagacgattatgaatactgcatgagtgagtatctgcggatgtctgggatctactggggtctgacagtgatggatctaatggggcagctgcataggatgaatagggaggagatcttagcatttatcaaatcttgtcagcacgagtgcggaggcatcagcgcttctataggccacgaccctcacctgctctacacgttaagcgctgtccagatccttaccctatatgacagcatcaacgtcattgatgttaataaggttgtggagtacgtgaagggacttcagaaggaggacgggagcttcgccggagacatctggggagagatcgacacacgatttagtttttgtgccgtagcgactctcgcactgctgggcaaactggacgccattaacgtggaaaaggcgatcgaatttgtgttaagttgtatgaattttgatggagggttcgggtgccgccctgggagcgagtcccacgcgggacaaatttactgctgtactggttttctagctataacctcacagctccaccaagtgaactcagacctcctgggatggtggctgtgtgagcggcagctgccctcaggaggcctgaacggaagaccagaaaagctgcccgatgtgtgctatagctggtgggtactggctagcctaaaaatcatcgggcgattgcactggatagacagggagaaactcagaaatttcattctggcatgtcaggacgaagaaacaggcggtttcgctgaccgtcccggtgacatggtggatccattccacacactgttcggcattgccggtctgtcattgctcggagaagagcagatcaaaccagttaaccccgtgttttgcatgcccgaagaagtacttcagagagtgaacgtgcagcctgagctggtttcctag

SEQ ID NO: 237595 - DNA, 963 bp, synthetic construct
  misc_feature 1..963: note = Description of Artificial Sequence: Synthetic coding sequence
  source 1..963: mol_type = other DNA
atgggcaccccccagaaggatgtgatcatcaaatccgatgcgccagacaccctgttgctggagaagcacgctgattacatagcgagttatggcagtaaaaaagatgactatgaatactgcatgtctgaatatctgcgtatgtccggcatttactggggtctgaccgtcatggacctaatgggtcagctgcacaggatgaaccgagaggagattttggccttcattaaaagctgccagcacgagtgtggcggtatttctgcctccatcggacacgacccccatttgctgtacaccctcagcgccgtgcagattttgacactctacgatagcatcaacgtgattgatgttaacaaggtggtcgaatatgttaaaggcctgcagaaagaggatggttcatttgcgggagacatctggggagaaatcgatacaagattctccttttgtgctgtcgccacactagctctcttgggaaagcttgatgccatcaacgtcgaaaaagcaatagaatttgtgttatcgtgcatgaacttcgatggcggattcggctgtcgccctggttcagagagccatgcaggacagatctattgctgtaccgggtttctggcgatcacatcccagctgcatcaagtgaactcagatctactaggctggtggctgtgcgagcggcagttaccaagtggcggactgaatggacgcccagagaagctgcctgacgtctgttacagttggtgggtgctagccagtctgaaaatcattggtcgtctgcattggattgaccgggaaaaactgcggaactttattcttgcctgtcaagacgaagagaccggagggttcgccgaccgcccaggtgacatgcactttatataccagaattatcctaagaaagaactgtcaagtaacaaggagacgctgaccgagtcgttgttacctaggctcgaaaggtcctctacgattagtgcatag
